United States Patent Application Publication US 2007/0161031 A1 - sequence listing, part 9

SEQ ID NO: 10445 - DNA, 2300 bp, Homo sapien
ctgagcagctgggattacaggtgctggccaccacgcccggctgattttgtattttttagtagagacagtgtttctcatcatgttggccaggctggtctcaaactcctgacctcagatgatccacccgcctcagcctcccagagtgctgggattacaggcgtgagccacagcaccgggctgccaaatctgtttctttacacattgtctgtggccgcttttgtgctgtagtggtagcactgagtagttgtaacagtgttagactaaatttggcctgaggatgcctccatattttgagtccttaagtaaggaactgcagcctaacttagtatgtaaactgactagaagtctaacttaggactattcagtatttttgtaacaaatagctgccaatcacagcagcctagcttcaatcaatcacaggtggccatctgattagaccacattcaaataaggcaaagccgaggtgtaaccagtcaagctgtctctgtacctcacttcagttttgcccctaaatgttgcctgcccagaatgtggactggagctgtctgaacctcgtctggttctgagggctgcctgatggatgaattgttttttgctcagacttggctagatttaatttaacagcagagaccttctggcccacagtgcctaaaaatatttactctttggctgtttcctgaaacaaattgctgatccctgatttaaagcataaatgctaagtcagacctgagttctattcctggctctgacatacaggctgtgtgatttggggccaattatttaacctttctgtgcttcagtttcctcctgtataagatggggataacactgggcttcagaaaatggaaagcaaacaatacatacggagtgcttagaatggtgcctggcacatagtcagcacccactgactactggctcttatcattgttactctcgtggtgataatgcttttctccataatcccaccttcttttcacgcacattaaatgttcatggataggtttaagtgttttgtttccccactggataggagaaataacagaccaggtggagtctccacctgaagcttgggtttctctgtgttttttccaggtctcacttaccttgatgacctgcttcccaaactgtgggcatttatctgtgagctcgggccccacggagggttaaagctcttcttggaatgcctgaacaatgacactgaagagtccaagcaactcttggccatgctgatgctgttctgtgactgttcgcggcacctcatcacgtaggttgactgctgtgggactgaattcctttcctagaatatggagagaccaaaatacagtgtcagtaaggaagtaattgctaatgtgattactgcaaacatttggacctgtgtggcagggcattgtaagaactagccatttaccaagtgagcagtgtgcagtaaatgttcagcagttgttagggtggggcctgggagttaaaagttcccatcctttcaaggaagctgatcagtaccactggctgtggcttggggtctcctggagatgggtttagatcatggctcagccatttattcactgtgctagctagattcctggaaaattccaaagtcagagccagggtgcagatccttgctaagcagatcttgagacaccctgggcaagggatcacggattcaacctctctgagactcagttgactcatctgtaaatgggaatgacaatagcacataccttttaggcacatggtagggattaaaagacataattattgcaaagtgcttatcacagtccctggcacataggatgagttcagtacttgttggctcttattattatcaagccgaccctgagcaagtttcttaacctctttgagtctctatttcctcattagaatgaagagaatattaccagttcaatagagggtaagtgaaaaaaacagcgtcaaatacttagtgcagtgcctggcacagagtgggaaattaacaaacattagtcccatttagttcctttggtttttaagcttatgcatcttgtgtgtttggtattcttttcattccaccttttcccaaaaggttggtgaagaattataagatacaatggacctcaggcagttatgttcaggctggaagactttagccggagaggatcagggacatgtaggtggcagattgggtgaggatcatggaagaactcactgagcagttggaggcaagagcaggggtctagctgctggtgaagacatccttaatcactggatgggggtaagccaagagtgaatcttattctagtgtatggagcagtgttaggaaatgt

SEQ ID NO: 10446 - DNA, 2300 bp, Homo sapien
ctcacttaccttgatgacctgcttcccaaactgtgggcatttatctgtgagctcgggccccacggagggttaaagctcttcttggaatgcctgaacaatgacactgaagagtccaagcaactcttggccatgctgatgctgttctgtgactgttcgcggcacctcatcacgtaggttgactgctgtgggactgaattcctttcctagaatatggagagaccaaaatacagtgtcagtaaggaagtaattgctaatgtgattactgcaaacatttggacctgtgtggcagggcattgtaagaactagccatttaccaagtgagcagtgtgcagtaaatgttcagcagttgttagggtggggcctgggagttaaaagttcccatcctttcaaggaagctgatcagtaccactggctgtggcttggggtctcctggagatgggtttagatcatggctcagccatttattcactgtgctagctagattcctggaaaattccaaagtcagagccagggtgcagatccttgctaagcagatcttgagacaccctgggcaagggatcacggattcaacctctctgagactcagttgactcatctgtaaatgggaatgacaatagcacataccttttaggcacatggtagggattaaaagacataattattgcaaagtgcttatcacagtccctggcacataggatgagttcagtacttgttggctcttattattatcaagccgaccctgagcaagtttcttaacctctttgagtctctatttcctcattagaatgaagagaatattaccagttcaatagagggtaagtgaaaaaaacagcgtcaaatacttagtgcagtgcctggcacagagtgggaaattaacaaacattagtcccatttagttcctttggtttttaagcttatgcatcttgtgtgtttggtattcttttcattccaccttttcccaaaaggttggtgaagaattataagatacaatggacctcaggcagttatgttcaggctggaagactttagccggagaggatcagggacatgtaggtggcagattgggtgaggatcatggaagaactcactgagcagttggaggcaagagcaggggtctagctgctggtgaagacatccttaatcactggatgggggtaagccaagagtgaatcttattctagtgtatggagcagtgttaggaaatgttcagatagagctgtgtcttaaatggctcatttattcatatgttctttcaaacatttattcatttactcacaaatgcttactaagtacctgctaagtgtcactagtatgtgtcttagatatcgaaaagattctgcagctttcctcagtaaacatcgactctcagtcaatgttccttgatatgcagacatgaataaggaaggcgtgaattgaggtgtgaattaagaaagtgtcacagtcagatccttatgaataagaaaaatatagagtacagattttttcttaattgtattttttaactttttactatggtcgatttcaaattaatagaaagtagaaaggataatataatgaaccctcatgtgcccattatcagcttcaacagtaccacctcacagccagttttgcttcatccaaatgcccacctgcttttctctcccacattattttgaagcaaatcctagacatcatatcatttttttcattttatttttattttattttactttaagttctaggatacatgtgctgaaagtgcaggtttgttacataggtatacatgtgctgtggtggtttgctgcacctgtcaccccgtcatctaggttttaagctctacatgcattaggtatttgtcctaaggctctccctcccctttccccctacccctgatgatatcatatcattttatctgtagattttacagtaagtatctctacaagataaagcttatttctcaacctcgtttattgtctagtaagcagtacagattttttttctcttcgccttttttcagtgtggaattgtgggtaattttctctctgatttagaatccttgatgacattgaagtttatgaagaacagatttcattcaaactggaagagctggtcactatctcctctttcctgaattcttttgtgtttaagatgatctgggatggaattgtaggtaagagaaaaggtgtctgctgttgtttggttgatgctgcacccagggaggccgaagagtctatggcatcaactgattcttagctttattgtctctccaagttaatagaaggtgcacatttattcccacaattggaaattttctttcttca

SEQ ID NO: 10447 - DNA, 2300 bp, Homo sapien
taatgagaaataaacatcagtatctggtgagtggggatggcttacacagagggtcagctccttcagagggtcccagcttgctgcttgtaacctcagaggcagcacttaccccttactgcttagatggtcatctcttgttgatttctttcccctagatcctttctaatagcaaacattttgtgggcaagaccagagctggatgacagagtgtgtagagtagctgatgtaatgccttgctcaacaaagatgctcaataaatatttgctgaaggacttgattgatcctttgccattgtccctgcactgtgccaagtagtttacaggcattatcttctggaattatcctggaatctttccacaaccccaaaggtagccaacacctattctcttcattttactgaggaggaaactatggctcagatgagacaccttcctagaccatccaagaagaggcaggagtgggatgcccaaaactgtcctagaccagagcacaaactgtaacttctatcctaccgaaattatttatttatttattattattattattattttgagatggggtctcactctgtcacccaggctgaaatgcagttgcacgatctaggctcactgcaacctctgcctcccaggctcaaacaatcctcccacctcagcctcccgagcagctgggagcacgggtgtataccaccacacccagctaatttttttttttttttttttttggtagagacgggtttcaccatgttgctcaggctggttttgaactcctgagctcaagcaatactcctgcctcaaactcccaaagtgttgtgattacaggcgtgagccaccgtatctggcctatgattattttgttcacagacagggtcttgctctgttgcctaagctggaatgcagtgcagtggcatgatcatagctcactgcagccttgaactcctgagctcaagtgatcctctgcctcagcctcccaagtagctaggactcttaactctatcctacccaaatttttatcttatactccaccaactcagggcctcttgcaggaaaagaaacctgagccacttccatagtatgaggcttcgagtgtactcagagatgaagaattgccaaaatacagctcaaaaagtggcattttcaaaaaacaatgtaaacaactcaaggacatagctcaaaattaaaatgtgacattacaagcccattcgaaggttaatttcctggatctgtgaactaaattaatccattattaatccacggtactctagaggttctgaggtctgggttgaggtgcaagtttcaaggaatatgaggaaagccatctttagaaggtgctggtgtatctgggacctggggaataaactgctttggagattggtcacaatctgagtcgagagccctcctggcccacatgggatatgccctgccctgcccgatgatagcgggacttcattgggacttaggcaaagactacctggtctctggcgcccacgtggcccacgttgccatggtgacgtcagaacagcgtggagacgtcacctgacggttgccgcggtgacctcacggcggtgtgacgtacccatggcgacgacaccacgattcacggcaggtgttcgagttgcccttcccgccagccactcacctgtccccgtcttccacgccctgagggccgcggctctggaaacggggatacaggagcctggcggcgccgaagcacccgcgcaggccaagacggctccccaggccaagacggctccccaggccgcacacagccatgagccaggctgcttgacgggacctgaccccgccaggttcccgtccagtccgcggggtgactccacccacagctggccgcgccaccgctcaggtttcaatttttattggttcgcagttctcaccccagggcgggacactcccagggacttgtttcccattggtttaacggaaggagcggggcgggaaaacccgtgtcggcttggctgcaacacctattgaccaatgttcaagcctattggtaaaggtactccgggctcgcgcgctctgattggctggcctgaagtacaacgcctcctccccttgaggcacgggcgctctgggttgtgggagttggggagctgctccggcttcggcgcggaggggcggcggccggggaggcggcggcggcggcaggtgagaggccggggtcgggcggccgggcggcgcgaggtcctagacccaggacgacgctgagccaggcgtccagcttctgtggctcagtttacccagctctgagagtcttgccccgagggatcggcgacctcaatctga

SEQ ID NO: 10448 - DNA, 2300 bp, Homo sapien
cccaggagtttgagaccagcgtagtgtcagaccacgtctctacagaaaaataaaagaaaaaaattagtggggcatggtggtacacacctgtggtcccagctacttgggaggctgaggttggaggctgcagtgagccatgatcgcaagattgcactccggtgacagagcaagactgtctcaggaaaaaaaaaaaaaagcagagtgcagcagaggtggtttcagacagacttaggttcacaccaagctctaccaaggtatataggacttggatcaagttaccacttctctcctaagcctcagtttgcacatttgtaaaataggataataaaagggtatgccttgggggtagctgtaagggtaaaatgagataatggatgttttcaactcctttgctagatcatccttccaacttctaaatgtcttagtgccccggagctcagttctcaaacctctttccttctgcatcaaagctcactcctaggtgatctcattccactcacagggctttatattataatcatctttttgctatcataccgagcgaggcccaagaatcccttcagtgggcataagaaatcttttccttgcctggctggggagaacctgatctctctgatctgctcccaagctgtgcctcagggtgtccttttaccttcttacaaaattagcatcagggagaaggggtacccaatccttaaaggctctaacggctttgtaccttgccatgtaccacggcatgttctccatgaaggatgactttccccggagcagacaccagtaggacttctgacaacatggctcctgggaatcctaaaagggaaagccaatgagaagagcaaagatctctagatgtcagaaccagcaggaagagatcttagaacacctagttcaagcccatcataataacaaaaaaggtagttaccgtccagcacttgctacgtaccagaaaggcaatgcaggagtcaactggacacatccaacagatctgggttcaaatgccagctcttccactccccagtgatgtcatcttagttaactcacttaaatggctaagaacctcggtttccccacacgttatatggagagaaaataaccgtacctacctcggtggatgttaggaaggttaaattaacgcaagggaaacacttggcggtgtctggcacctactaatcattcaattactgagagctacttattactggctctgttcttcgtttcagcttttacaactactactattaaaggtagaaattacatgaaatcatggagcagaaagaactctttgctggacatttaggctgtttccaatgtgtcacaattataaacaaggctgcagaaaacacccagtacgcctcgttttgcacacttaaatgagtatttctgcaggacagagtcctagaaaggagcttgcagggtctataggtgtgtgcaatttacacttttatacataacgcaaaattatcctccgcttaaggctttacgtagattaccttacgctaagattcaggtgtactatgagctaagtactatcgtgatccccatttcttagaaaaactgaggctcagagcggggaatccccttgcttgtcaagctcaaaatcacgactgtcagattgaggtcgccgatccctcggggcaagactctcagagctgggtaaactgagccacagaagctggacgcctggctcagcgtcgtcctgggtctaggacctcgcgccgcccggccgcccgaccccggcctctcacctgccgccgccgccgcctccccggccgccgcccctccgcgccgaagccggagcagctccccaactcccacaacccagagcgcccgtgcctcaaggggaggaggcgttgtacttcaggccagccaatcagagcgcgcgagcccggagtacctttaccaataggcttgaacattggtcaataggtgttgcagccaagccgacacgggttttcccgccccgctccttccgttaaaccaatgggaaacaagtccctgggagtgtcccgccctggggtgagaactgcgaaccaataaaaattgaaacctgagcggtggcgcggccagctgtgggtggagtcaccccgcggactggacgggaacctggcggggtcaggtcccgtcaagcagcctggctcatggctgtgtgcggcctggggagccgtcttggcctggggagccgtcttggcctgcgcgggtgcttcggcgccgccaggctcctgtatccccgtttccagagccgcggccctcagggcgtggaagacggggacaggtgagtggctggcgggaagggcaactcg

SEQ ID NO: 10449 - DNA, 2300 bp, Homo sapien
agaattgttgggtgcctggaatgaaacgcatggcagaggggagccaggtgcctttttgactgttccctaagcccttgatcaagttgtggggtggtgtttgtcccagggcactttgccacctccatgggccttttcgcatcagtaagggtcctggggctctctcctctttactcagggcggtcttcatggatgagtggcaggtcctggcctgcagcccccaccagctgggccactccattagtggctcagtaacctggcctgccacagcgccacacctgggcccccggctagttctctgggatctttctgtcccagctcagtcatgcctccctttccaaggctgtacgtcagagttgtcagcattggcactattgagatttggggctgggttattctttgtggtggggctgccctgtgcattgtagccatccccagcccctacccactagatgccagtagcaccctcagcgtggcaatcaaaaacatctccagacattgcttagtgtcccttgggaggcagaatcacccttgccgccgacctttgcactccgcagaagccagtaggagcgtggaacagcttcctcgggttgctccagcagtcgtcaggagagcctcgggtgccgaggtgaagctggtctgccaccgccccggatccatgtggaaccagagctggatcatgtgggggagtctcaaatgcccgggccccggcctgtcttcaggagcccacggtctgatggggaaggcggtcactggaatcgtcagagagaagacacctgaagggttgtgaagctgctgtgggtgacagtgacaggcgtcttagatctggctgcgagcctggggaatcattcatggaagtggtggcatttcattccttcagtgtctcctgagagccacttgtggcctaagcactggactaggccctggagctagaaaactgatgaagacgtgggctgggcaccgagtgtacggtctactgggggcatcaggagatgaatgaggaggtttccaaggggggcgggcaggggaacggccaggggaatggccaggcgttgctggtgtgctgggcggaggcgctgggtccacaggcctaggtttgagtccagctctcccacttgccagctggtgccctcaggtgagtcacttctcccagacctccagctccttgtttacttagggggatcttgaacatacaatcagaagcggtggctctgaagtgcttacctgtttgctggccgagttcattcatcctttccacaagtatcattaagcacctactgcgtgctgagtactggggcctccgcagggaacaaaacaaagccccgcctccgtggaactcatactttgttgggagaggagaaaaaatcagttgtctgtgagagcatatcaggcagtcttaagcacctttaggaaacaaggcagggtcagaggctacaaagagaaggaggggtccgattggatgggggttcgggggctgctggtgaaggaacattgagcagaaacctgaataagtcacgccgctatggggcggggctggtccctggcagaggaagcgcggtgcaaaggtcctgagacgagcacgctgcctgccgtgtgacacagtagctgggaggtcagagtggctgagtggagtgagcagcctggggagcgaggagagaagaagaggctggggcagtggccaagcccggatcacaggagcgcttaccaggcttaccccctgcgtggtggccgctggatgggtatgagccctggatctggtggggctggtgacaggcctgtctgcagaggacttgtctaagaaagatgaagatgcaacacccaaactcctcccgcctggctagatgggagcatggagcaaaccaacctttgctgcctgctgtggggtgccacgggagcagatggcggcttcacagagaagctgggggccagactccacgttaatcccatggatggcttaaggagcttccccccaccaaccatgcgtggtgcctctctgtaaagaaaaaatgcattgtttgtgaagtggatcaagatgcggcctcccagaacgctgcccttttgaggaatggcttgtcttagaagggaagagaaaagccaaatagaatgttcatcttttgtaaagttaaaaaaaaaaaaaagccagcctccaaggctgagaatcgatattaatttcatgggcttatgggcagtgagataaagcaggtttctggcagccctttccagccctattggattttacaatcttgaactgtgaagacagcgaataaaggtatcaagggctctgcccgtctccagctgtctcg

SEQ ID NO: 10450 - DNA, 2300 bp, Homo sapien
cgagcagccgcttagaggcctgaaacagggccagctcctgtcctagataaggcggcgggtgacccacttgggccggccctggaggtccgccgcgggcgcctctcccggcggggtgggttggctcctggaagtaggctagggcccgtctataatcagcccgtccgctggatacgctccccagggtctccaaagccctccagcccgggtgagtacagagggcatttattgagcacttaatgtgtgttttgagtcctttacatgcaagaattcattttgccctcaaatctacgctgtaaggtaggaattatgatgccccccatttcacagacaagaaactgaggcgcagacccgtgaaggtaaatggccaagaccaacaaccagcaagggcagggctgcaatcccacccagtttcggtgggactccaggtatcacacgggcatagcctgaggggtggggggtctgactgctgctctgcatttctgtggggatctttgttattatcccggaaagctggcttcctacagtgctgtgtgatggacacacagcaactgagggaactgccccacccaggactcaatttccccatctgtaaatgagactgctagacgggccgcccatgggctgtgagaacccaggaagcttctttaaaagtaaaagggaaagcacagtatagtttgatagattcatatttgaaccccaggttgatgtgaaactatgcctcagtttccctatctattaagtgggggagtaggctagtgcctgtctcctgtgggcgtggggtacgtctagaaggtgtagcttgcaaattgctcagcgctgtgctgggttatatagttagcgctccacagatcacaactgtgatgccaaaaacacatcgctgccaaaaataagccttaggacaaaaacatccaggaccatgtcacttcacatctccttacctcagtttcctctgtaagttggaagtataataatagtacctaccgtatcagttttctcatctgtaaaatgggggtgatagtaatacccactcacacggtgttgtgaggattagataaaatactttgctacataagtgttagctatagttgttatttttaacaaattcctcatgaggttggtttttgccaagattaaatgaaataatgccgataatgcacttatacagtgccttgtcccaaatatgtgatcagtaaatgacactggttttgccacccctagtgggactacaaaaaccagcacgccctgcgcccccagtcggggcccctccacccggcgccggcgcgcagcatgccgggagttgcagtcctcgcgaggcaagttccgcctcgtccctgcttgggggaggaggttggagagccgccctgccggcctttgaattttgccgcgaaaagcgcgcgtggcggcccccggctccgcccctcgcaggacgcggtgccgcgtcaccctggtaaccgcctctcagccgccgctgattgggctgggccgcggggggcgggcgggggacgagacgcgggggctgctgccggcgctcgcgcctgtcagtcgggccagagcggagcagcgggcaggactgcctggccggctgctccgcggagaggctgcgcgcgccggccgggggaggcggacagccgggcccggcgcctgtggggcgcggcgcgcggcacccgggcctgagaccaggcgaggcgccggcgcgcgccagacggcgcgaggctgcggccccgggagcccccgcgcgccgcccggggccatgggcgcgtgagagcccagcgcgcgcggcccctgctgcggcttgcgagctcgcacacccggtgcacagtcccccgggccgtcctcgtgtccgtcctgcgccactgggatcggctgtttctcagcgccgaggcccccgaggctgcatccgagcttgcgtcgcccgctgccgccgccgccgccgctgccgccgccgctgttcgccggcttcccctccccccacacccggggctcagagcaggaggaggaggggccggtgcattctcgccgctgttctttgcaacctgcaggggccggtgtatgtccggcgaggagccggggccgctgcgggtgcgtgcaacccccgaaggagacaatccctccacctcggggcgaacccgggggctgcaagccgcgggcgggcgggcgagcgagaggaagcaacaaagacaggctgcagctggggctggcgaaaggggccgcggccgccgggctcccagcgcgggcggagagggcgccctgggagcggcgcgggccgagctgcagccttgagcggggccccgaggggaggc

SEQ ID NO: 10451 - DNA, 2300 bp, Homo sapien
tttcagaaggaggggaggtgggtggggggaggtgtgtgtgagagtgtacgcaggacatgttccccacacacgtgtacacacacacacatacattccactgctacatctcatcacttagagtagaatttgggatgaggtagatgaacaagggcctcaggccaggcccatcatccctacctccgtccctgaccatctgccaccctgagtgcctactgtgtgccccatcgtgcagacacagtagaaccggcactccagtggaagagacagacactaaaccattcatcaagataatttcagagcagtaatgacaatgaaagaactgctgtggtgatgggacaatggccagggcagaaggttgccagcttgaccaggtggtcaaggagggtctctcggaggaggtgatgtttgagctgaggtgtgaatggggaaatggagctggcatggagagtgggagagtggtgtgtactggggacagtgtggtgttgcactgtccacaggtggcattgaacatttgcagtgaggcaagtctgaactgaactgagatgtaaaatccatcccaggtttcaaagacttagaataaaaacaagaacataaaatacctcaggaatttttaaatactgattacacattgaagtgatactattttggatctattgggtgaagtaaaatatattattaaatttaatttcctcttactgctagaaaatgtacaattacatatgaggctcccattattacattttttttttttttgagacggagtctcgttctgtcacccaggctggagtgcagtggcgtgtgatctcagctcactgtaagctccgcctcccgggttcacgccattctcctgcctcagcctcctgagtagctgggactacaggcacacgccaccacgcctggctaattttttgtatttttagtagagagggggtttcaccgtgttagccaggatggtctcgatctcctgtcctcgtgatctgcccatctcggcctcccaaaagtgctgggattacaggtgtgagccaccacgcccggcccccattattacatatttctatcagacagcactggtatagggtatttaggtagaggcaaaaccataagtgcaaaggccctggggtggggacagggttggcttgtgagaggaccagaaagcaagccagcgtgtctgagcaggatcagcctgggacagggacagtgcagatagacattgggaaagggattcacagaggtccttcaaggatattgttagaaaagccacggaagactggcgggatggctcatacctataattccagcacttagggaggctgaagtgagaaggttgcttgaggccaggagttcaagaccagcctgggcaacatagcaagatcccacatctacaaaaaataataattagctgggtggggtggtgcacaactgtagtcccagctacttgagaggttgaggcaggaggatcacttgagcccaggagggagctgcagtgagccatgatcatgccaccgtaccccagcctgggtgacagggcaagaccctgtctccaaaaaaaaaaaaaaaaaagctatggaagccactaggtgagctctacgcaggagagatgtgcgctacacacagaaaggcttggtctggctcccttgaggtggagattgacggcaggggggcgatggggcacagggacgggcaggaatctgttgtagaagagttgctgccgggacctgctggtgaattggctccaccggatccggctccgcagaaagctcactgcttcctgtggctcctggatttccaagcctctggggtttcctgtctctcccggcacccgtctccacctccccagcagctgttccctgtcatgtcggtgcatttacaatgagcgccagtcgcctgtctccaggtggtcagaggttgaaatcccttttgaaaagttctttaaaaaaaaaaaaaaagaaagaaagaaaaaccagaagtcatgcatgttcattgtggaaaaattagaaatacagagaagcacaaagaagaaaaggaaaattccccagttaaccgtcagccgctaggctatgacagggggagggggttgaacccaggtggtctggctccagcactttctaaatcacagtgcctgtggccggatgacatggagggagctccctgaccataggaggggttagagacacgacgcccctctaccctcactcacagcagaggtggaaagctggagactgacccacacatgggtggtgagtggcgtttgactcttggagatttaaataaaacaaacattgagagagcttatgaactct

SEQ ID NO: 10452 - DNA, 2300 bp, Homo sapien
ctatgtcagagcggctagagatggactctgccctggagcaggggccacagaaagaggctggggcagggtgagggaggttgccacaggcctcttaccttccagattgcacatgattgtgagtctccatagaccatccgactgtgcgtaagagggtgcctgtaagtgcagaggaacatgccatgcagcaaacacatatgtacataggtgagtgtgtaccagggtgtgtgtgcacacccagccctccctgtgcacatgcacggcgtgtcctccagggctggtgtccaaggctgtggtgatggcaggcccgagtcaggcctgctcccgccacctgctcacattccaagtccccgaggagaggagcagcactgccttcctgcagtcaaggactttcatccctgcaataagccccacttcattccctttttaaactgtataatttctgcctgattgtaatggcctattttaaaattaccagaaatcaaagccgggaagtggatactgcagcttttattgcgtctctgtgttaaggctggcgattggggagggggcggtgagaatcacctcccctcccctccatcctccactctctctctctctcgctctttttttttttttcttgagacagtaataggagaaaattggttttgaaactgaataaaagtccctttcagaggaaatcatttctttcagggtacctttgctgaaagtaaaatagggcataatgaaaggtggttacgcgattgtctttcatttaccgagaggccaggacagacgggaggctgcaaccgtctccgggaaatacaagattggaataattgcgccgtaacaaggagcttgttgtgaaattagtatcttaagaaagtagtgaaaaaaggcttttcctcatgaatacttcattattagaagaaagcggcagaatttaggactccagacacctgtttagtattaaataacttccctttcttccccttcaacaccccctctgctttcttcttcttttttaaaaccaacatgaagattgaggtgatccagcttggctgctcaggactgtgggaggtcaggaagtggtggggacagggtgcccgggaagatggacatcaggggtgtccggggttgagctcaccctgagacctgccttctccttagcaagaagggaggaagggacctctaggtaagctcccaccgccaccctcccattggggcctcacaggcaggcccactctgaccctgccagtcaggggctttgggctctcaggaatgtgcctgggcctcctgaaacgttctctgcaggagagtgggtttggggaagctgaaggcaagtgtctgtgtgaatgtcaggctctggccgttggggaaggtaccacacgggcctgtgtgcagccacatctgagctgctgccctgcggggcacagatctctgcccttcccattcagggtaaggagctcaggcagcgacagggatctcgggtcagggcagccttgatggcccattggggctgggctcagggtgcagcatggatcaaggttcaagagccccttgttctctcaggaaagccatcctgacatctcccctccaggggggctatgaggatgccctgggcgggagacagaccagtacttcagtaacctgggacacccatgtacccactggcatttcccgagcacccctctgtgtagatgcccaagatgaccaagtggggtcttcaggctgacttgcttacagggggccaccaccggccggaagcacagcctgctgcggggcacggagggagtgaggatctcacccagttgggggcatcagggcaggccccagagcagatgacccagatgccgagcagggccggggcatgtgtgatccatcagtccagcccccactcaagagccctggattctgtcccttcccatgaggccacagatgggcctcttgatgcctcaggccttggtcccctcattggtcgaataagggaaatgggtgtctgctttgagagtctctgatgttcttcggggttgcagggagactcccggggggaatggtgggaggcgaacacggagcagcccccaagtgacagagcaccccatcttcctcctgcagggacccagtcgcagagcgcaccccactggggacccccagctcagccatgctggcctgtctgcagaggacccagaacgccccgggccaacacctggcctgcccgagcaagagcctggagctgcgcaagtgtgagtaggacgcctccccagcctttgcagggcaggtcgtgggcagagaacgccattcaccccccaggatgtccacctacc

SEQ ID NO: 10453 - DNA, 2300 bp, Homo sapien
gacattagggagtccccgttctgttggcaccgcttagttttgggggtacaccccttggatcccacagatctgcccttggctagcacagggtaaggctgctgaggtcccggagattggtcaccaggggccgctgttgtcacactcaggggcctcctcagaggggttcagaaggaagcttggaacctggggatgtgatcaggaagactccctgtgagcaccctgttgggtgtgccctgaggctttgagacaggaaatatcccacccccaccctcgtaccctcaccccaagaaggagagaaggtggcctcgactgcctctggagcgttcaggaccaagttgctgtgtgccttcaggcaagttgcctcccctctctgaacctcagtttcctctctttcaaaataagagtactcacccctacttctcaaatgtggcttcttcctcttccctgagggccttccccttcttttgtgcctaattcaatatgagggacaggaccagttagggcgtactagaaatgagacccagccacccaggtcagggttgggttccagtccttgctctgccacaaactcattatgagtccttgcagtgtaattggggaaactgaggtccagagaggagaaaggacttacccagtttccccaattgcaatacaagaggcaggactcagcatttcctgaagtcttgtttgttccatggggtgtaaataggtggaaacaaaaacttaggtggtcaaaaaagttagggaaatgctgggttaaagctaaaagggggctgggcgtggtggctcatgcctgtaatcccagcactttgggaggccttcaaggcaggcagatcacttgaggtcaggagtttgagaccagcctggtcaacatggcaaaaccccatctctactaaaaatacaaaaattagccaggtgtagtggagcatgcctgtaatcccagctaatcaggaggctgaggcaggagaaccacttgaacctggaaggcagaggttacagtgagccgagactgtgccactgcaaagaagttaaaagggaatcttgcctgcaggatctgttagcatctttaatatgttaatgcgatttgtgtatctccaagagccgggataggcatctgtttctcaaactcttttgactgggaaacccactttccaaggtgacttggaagtcagctgcactaggcaaggatgggaatactccacctttgttatatgtcttttacctaatggctctgtgctacccaggggatttgaccacctgtctcctaagttaaacctcacatggtacatacattaaaatattagcctcattttattttatgagacgaggtcttgttctgttgcccaggctgtagtgcagtggtgcgatcatggctcactgcagccttgacctcctgggctcaagtgatcctcccacctcagccttctgagtatctgggactacaggcacacactacacccagctaatcttaaaattgtttgtacagataggggtctcgtgatactgcccaagctggtcttgaactcctgggctcaagtgatcctccagcctttgcttcccaaagtgctgggattacaggtatgagccacagctccccgttggagcctcattttacagttgggaaatagatgactcaggagtgatcacttgcctgaggtcacacacacctgcacacagcctcaggatggaacgagttctgaccctcagacaactacatcccacagcactcagaggggtcctcttacaggacgaatctgccctatcatcctgaccacacatcacctgatgccacctcactcctccaggtgccaccacttccttcaacagatctggaaattgaggctcagagaggcacacaagtcacccagggtcacacgtggagtcagtgggatactaagttccgttttcttgcctcctcccctccccctgccactcgctggcgagctggtgatggtggcaatttaaacagaaaacctttcgtcccttgctctcacctatcgcgctggctggactccaccttctccggccaacgttgggggtgggacggggtgtgggccctttaagagcgcccgggagggatgggcaggcgcagtggtgctgggcacacgtggagctgcgcgtggaggagtccaggctgcagccgagggagctgagtagggcaaagttaggagtcgctgtttggatggcaagttcagaagttggaacttgtctcagtttccccgctccagaaatggggttgtgatataaagacagggatatgagtgaagaaaacacagagccaccctggaaaggtgagtgtc

SEQ ID NO: 10454 - DNA, 2300 bp, Homo sapien
cacttgcaaaatgggtagagcaaaccctacctcacagcctgttctccctctcatcccctaggcttctgtgctcagtgagttaattattagggtttgtttctttgtaaatgtttcacgctggaggtgaacacatcactcctattcaggggtacacacacacacacactctctctctctctctttcgcctccccacccagcaattctaaaatttcactttccagctgttggacctcaggagagatgctgctattttcaagctgaggaggaaggagctaccccacagtccctgagtcagctcaatttagtgaaaacactaatgatgaaaatggcatggctctgggccgggcacggcggctcacacctgtaatcccagcactttgggaggccaaagtgggtggatcaactgaggtcaggggttcaagaccagcctggccaacatggtgaaaccctgtctctactaaaaatacaaaaaattagcctggcgtggtggcgcatgcctgtaatcccagcccccaggaggctgaggcaggagaatcgcttgaactcaggaggcagaggttgcagtgagctgagatcacacccctgaactccagcctgggcgacagagtaagactctgtctcaaaaaaaaaaaaaaaagggctctgcacagcctggatgctcccagcatcttcactgcgactgtgaggtgaggacttttgtatgccccactctacagggggatgtagaggcactgaggcacaaaggtgaagggacttgcatagggctgctgggttagagagtcacagagccaagctgtgggcctgctaggctttccaaccaccctggaggaagtgagctgcccatcctgtggaggtattcaagtggactcagtgctgggtagagggtatggctatgtgttggggcccacctttgttatctgataaaagaaaatacatgggtaggtgtggtggctcatgcctatactctcagtgctttgggagactgaagtgggaggatcacttgaggccaggagttgtagaccggctgccctcccccacccccccttctacaaaaaaataaaaattagtggggtgtggtggcgcatgcctgtactcccagctgctcaggaggctgaggtgggaggatctcttgaggccaggagtttgaggctgtagtgagccgtgatcatgccactgcacttcaacctgggtgacaaagggagaacatgtatcaaaaataataataataataaaaaaaataaacaaaaacgcattgagccaggcacggtgactcagacctctaatcccagcactttgggaggccgaggtgggtagatcgcttgagcctggagtttgagaccagcctaggcaacatagtgagaccctatctctgcaaaaaatttaaataaaattagccaagcatggtggtaggcgtctgtggtctcagttactagggaggctgatacgggaggattgcttgaacgctggtggttgaggctgcagtgattcctgatcacgccaccgcactccagcctgggcaacagagtgagaccctgtctcaaaaacaacagcaacaaaacattgatggcctactccgaggcaggcttcgcagtaagcactgggtgaagaccaaggagagcagctcacatttatttacccctgaaccatctctatgggccatacccgagggtagggacctccttcaacgcctcggaggaaattgtctgctgaatgaatgaatgagcaaacacgtggaggactgggccgggacgcccatttagagactaggacacagtcccagggcggcccgaagtcacggagcaagatcgaatcggagccgattccaactagagccctctccaaagaccgtctgccgctctatccggggatcgcgacacccattttccaggcgaggaaactgaggccctggccctgcacctcccccgcaggggaggccctcgctgggcgggcggggtgcgagtaggggccgccccttctagggcctgcgctcggcggggtccgcgagccggcgggtgggcggggagctggccgggggcggcgcgcggctggaacctgagccggcggaggagggacccgcgggcggacgggcgccgggcgggccggccgggattcaggaagcgcggatctcccggccgccggcgcccagccgtcccggaggtaagtggggcccgggcccgggaggggcggctcagccgaggtcccctcgcgcccctggggacatctccgtggcccgtccggctccggggggtcccgaggctccaaaatgcgggccaggggcgcgggagacggaaggcaccag

SEQ ID NO: 10455 - DNA, 2300 bp, Homo sapien
acacggagactggcatccatctgagccagcctgagcttgagaggccccgaggtggcttctttttggcagctccgtttcccaacagctgtgtggcaaaaggcccacttcctaaaggtctagggccatccatcctacctttggaaagatgtggtgagtccaggcaggagcaccaaaatcaatgcctgacttggtgaatgactgccagggcacagagccagctgcatggctgcttaagtctgacaattgctccagcagcctcctttataatgtccaaaggccagagtacatacagaccagtggcacccgcccacccggtcctgggatggtggtgattagatctttgtgttcagaaaaatctggcccttgaggtcagagcctgaggtttggcctctctgctgccagaaggacgaggattgagtaggaggggagagactacagttgcttgctaactcatcttgcccctcctctgctgcacagggatgcttggagggacagccctccactgtgaatcccttggggcagaagtcaggccctcccaggacccaccaatgggcttctgcagcatgggcgcccagcctatatccacgtgaaaaggaatgggaggaattcatgacaaagggctttataaaatataacgtatgaccgtgatcataactagcatcatctctattttgagtggctcccaggatatgccattgaattaggcagtaactcatttctaatcctcatgatgaacttaggaggaatttggcaccattttccagaagaggaaaccaatgtgcagggaggtgaagcgatttgatcaggtcatgaaggtaggaagtggtccacaggactttacagcaggtctagccctgtaacaggggagaccaacaccacatcaggaaacaggaagacgttggaagtcgtctctagggcagaaatgtcccttgtaggggaggaggggaaatgataggaagttcccggctggcatgacaatgtgattatttcaatgagcttcttagaatggaaatattggggccgggcgcagtggctcatgcctgtaatcccaacactttggggggccgaagcgggtagatcacgaggtcaggagtttgagaccagcctggccaacatggtaaaaccctgtctctactaaaaatacaaaaaaaaattggccaggtgtggtggcgcaatcctgtaatcccagctactctgaaggctgaggcaggagaatcgcttgacccaggaggcggaggttacagtgagtcgagatcacgccactactccagcctgggacagagcgagagtccgtctcagaaaaaaaaaaaaaaaaaaaaaagaatggaaatgttgggtcctagtcttaggtttcattgtttcagtaaaaacctgccagagtgaatgttaactccttttattacgtacttacagtggtacttatatggaggccttttttgtggttcttgctagagtgttaactgtatctgagcttttcaaagtcattgcagtggatcagccctctccagggtcttctagaagcctctgctttccaccctggcagttaggcagtcgactcacacttcccctgtgttcagaaatgattcattttctgccttgctgttcctccaagttccttacttcactcccttctgagatctctgtcttaatggtctggaatacatttgaagtcattattttatgatggggagatttctgctaattttacccctaacaatcaatcaatgagtcaataattctttttctccctcctcccttccttcctctccttctgctttgatttcttaatcattggaataattgttttctggatttcctctctaaagaaaagctttgtctgttgggaaaggtgatgatgatataatttataataataagcataaatgataataccttctttttattttattttattttattttattttatttttgagacagagtcttgctctgtcaccaaggctggagtgcagtggcatgatctcggctcactgcaacctccaccctccccctaggttcaagcaattatcttacctcagcctcccaagtagctggaattataggcacacaccaccacacccagttaatttttgtatttttagtagagatggggtttcaccatgttggccaggctggtcttgaactcctgacctcaggtgatttgtccgctacagcctcccaaagtgctgggattacaggcctgagccatggtgcccagcctaataccttctttttcactgagcacttactaggtaccagaaactgtgcttaggcctttatttatacaactttatttaagcc

SEQ ID NO: 10456 - DNA, 2300 bp, Homo sapien
tgacctcaactcctatcaccctactcactcttgccctcacttacccattcccatttcctcccctggccccccgattccttgcaccacactaagctctttgttaccttaaggcttttgctcatgtgcctcacaccccaagtctttttttttttttttttttagacggagtctcgctcgctctggctggagtgcaatggcacggtcttggctcactgcaacctccacctccctggttcaagcaattctccctgcctcagcctcctgagtagctgggattacaggctcctgccaccacacccagctaacttttgtatttgttagtagagatggggtttcaccatgttggccagactcacaccccaagtctttgacctggctctatcctacttctcctctaggtctcagctcaaatatcacctcttcagaggtactgctcccaaacccctacatccgatctcagccaacaggcttcagtcatcctccgtcactacactgttttattttcttcacatactcatcagtgtctgaagttgtcttaccaatttgtgtattgcattgtgttgtgttcccaaccagattgtcagctccacaagggcagggattttgctgtatcattcactttatcctcagtgcccagtgcagtgcatgacacatagtggtggagggtgggggaggggtgggaaggatggcaaatgtttattctggaatgaataagaggctctcaacaatggtgtgttagatttttgcataagctgggcattgggtttaggacataagcatctaggtgggttgtggctgagatgacttgtgattcaaggtgtgagaagctggaccctgggctgttggagagacattaggtttgggaaacaagtgtccaggttgtgggtgaattggtataaactgggctggctccagctgttaccagtagaaggtgtccaggtacttggcatcttggagaaaacacacaaacgaagcaaggaaagcaaaagcaaggatttactgagaacgaaaagtccaccccacagtttgggagcaggcttgagcgtagaggctcaagagctctgcttacagaattttctagggtctcaatactctagaggtttcccattggttacttggtgaatattctatgtaaatgaagagaatgaagtgaagtcacagagtcatttactcagaatgtgccctattgcaaatggagaggatgtgcaaatggagaggatgttacttggtgggagaggatgaatgtgaagttacaaagtataaatggagaggatgtttcttggagtgtgtggtctgtgtaaatggagaggatgaatgtgaagttacaaagtgtaaagggcgtgaatggagaggatgaagtgaagttgcaaagccgtttacattcctgtcattgctaaggtgctttttgatttaggtctaggaagtcagccttatgttccctgcctccaggccctatttttctgcctcacaacaggtaacatcagactgttgagggcagactggaccccagatttcgggaagcaggagttgtccagcagggcagtggctgagttagactgtgacttcagcagtgttcaacaggtataaggtcattgaagaccaagaatcaagcaatcgagcgtcctcgtcggttgtagcgaaagagaaccgtgaccaacaggagagcagtgtccacccaggtcacttggggttactggggtacaattttgggggaaacgggggtcctggggagcgttggctgggtggggctgtaacccgagctggtgggcgggttgtgagctgtgacctggcccgagtcggcccgcccggattggggggccaaaccgggggcggcgggaggcacacctggggaagactcacctgggagcggctcacttgggccctccgggacccatgaaccggcgcacctcctctgcgtcccgcccccggccggccccccggccaatgggggcgcggagacctcggcggcgggcgcggattgggagccggtgagcgggggcggggcggcgcgcccggcagtttaggcgctcggccggcgggcggcgctgagcgctcggctacgagggcgccgtgcgggcggaagtggcgacgctggcgtccccggagcctgcggcgggcggctgtgacggccccggcgctgacggcggcggccgggggggcggtgtcgacgcccgcggcgccggctggggcatcaccgcgggcctcgaccccgaaatggcgctgctggccgaacacttgctgaagccgctgcccgcggacaagcagatcgagaccgggcccttcctcgaggcggtgtccca

SEQ ID NO: 10457 - DNA, 2300 bp, Homo sapien
ctcacacgggcaaccctagaaagctgcactattttttgttttgctttgttttttgagacagagtcttgctctgttgcccaggctagagtgcagtggcatgatcttggctcactgcaacccccgtctcctcggttgaggcgattctcctgcctcggcctcccgagtagctgggactacaggtgcctgccaccacgcccagctaatttttatatttttagtagagacgggggtttcaccatgtggccaggctggtctgaagctcctgacctcaagagatccgccagccttggcctcccaaagtgctgggattacaggcatgagccaccaggcccggcctgaaagttgctctatttttactctcattccatggactaggaagctgaggcacagacagatgaagtgacctgcccaagactacaccagcatggtatagcttgaaacctgggcgttctgactgtagagaccatgttttgagacagggtctcactctgtcactcaggctggagtgcaatggtgtgatcacggctcactgcagcctccttgtcctgagctcaagtgatcctcccacctcagcctcccaagttgctaggactataggtgtgcaccaccacagcctgctaattttatttatttatttatgtattcatttatttatttaatttggaggtggagtctcactttgtcacccaggctggagtgcagcagcgcaatcttggctcactgcaacctctgcctcccaggttcaagcgattctcctgcctcagcctcccgagtagctgggagtataagcatctgccatcatgcccggctaatttttgtatttttagcagagacggggtttcatcatgttggccaggctggtcttcaactcctgacctcaggtaatccaccctcctgggcctcccaaagtgctgggattacaggcgtaagccactgaacccagctgaggccatgatgctgcatccaggaaaaacagagatgaataaagaatggagaaatgaagggaagaagaaatgaaagaatgggaaaatgaaagaaaagagaacaaacaagtatttttcttcattttctttttaatggaatagttggcatgtaatacttgtagcacacgagttataaaacatactaatagaatgaacacttttgaactcaccaccaatataagactataatagaaagttatcggccgggtgcagtggctcactcctgtaatcctagcactttgggagcctgaggcaggcgcatcacgaggtcaggagatcgagaccatcctgaccaatatggtgaaaccccatctctactaaaatacaaaaaattagctgggcgtggtggcgtgcgcctgtagtctcagctactcggtaggctgaggcagggtaatcgcttgaacccgtaaggcggaggttgcagtgaatcgagatcacgccactgcactccagcctggcgacagagcaagactctgtctcaaaaaaataaaaaagttaccaataacttccatctacttatgccagcaggcctctgcccaagttgtacattgaacacacctggggaattttggaaaacactgatactctcagatgggatttggggtttggtttgggcatctggattttttaaaggtatctggattttttcttcttttttttgagacagtgtctggctctgtcacccaggctggagtgcagtggcacagtcatggctcacggcagcctcgatctcctgggctcaactgatcctcccgcctcagtctcccgagtagctgggaccacaagtcccaccatgcccggttaagtttaaaaaattttttagagacaggagtccctctgtgttgcccaggctggtatctggtgattctcacgcgcagccaggtttgaggaccactgacttacattctcttccccctggtttccaccttcaccttcacgtgatggtaaccaccatcctgaaatacgtgtagtgcatggacggattctttgcctccatgcttccctatttcaaggagcagcgacgtttgctatttatctcccgctggccacgacggggcaccagagaaaaacacaggctccctacgcgctgaaggaggcttggcccttgcgacgctccgtcgtcgggctcgttgccggtgcaaacagggaggaaacagccggcgttgctgtagcgcgtctgggaattacaccgggggactggccggcccgcttcgtgcctgcgggaagtcgggccgggggactcttcggaaactccgagcctcagagaaatgtgagtcggagggttggactaggccggatccggcgttagggcggggg

SEQ ID NO: 10458 - DNA, 2300 bp, Homo sapien
caggctggtctgaagctcctgacctcaagagatccgccagccttggcctcccaaagtgctgggattacaggcatgagccaccaggcccggcctgaaagttgctctatttttactctcattccatggactaggaagctgaggcacagacagatgaagtgacctgcccaagactacaccagcatggtatagcttgaaacctgggcgttctgactgtagagaccatgttttgagacagggtctcactctgtcactcaggctggagtgcaatggtgtgatcacggctcactgcagcctccttgtcctgagctcaagtgatcctcccacctcagcctcccaagttgctaggactataggtgtgcaccaccacagcctgctaattttatttatttatttatgtattcatttatttatttaatttggaggtggagtctcactttgtcacccaggctggagtgcagcagcgcaatcttggctcactgcaacctctgcctcccaggttcaagcgattctcctgcctcagcctcccgagtagctgggagtataagcatctgccatcatgcccggctaatttttgtatttttagcagagacggggtttcatcatgttggccaggctggtcttcaactcctgacctcaggtaatccaccctcctgggcctcccaaagtgctgggattacaggcgtaagccactgaacccagctgaggccatgatgctgcatccaggaaaaacagagatgaataaagaatggagaaatgaagggaagaagaaatgaaagaatgggaaaatgaaagaaaagagaacaaacaagtatttttcttcattttctttttaatggaatagttggcatgtaatacttgtagcacacgagttataaaacatactaatagaatgaacacttttgaactcaccaccaatataagactataatagaaagttatcggccgggtgcagtggctcactcctgtaatcctagcactttgggagcctgaggcaggcgcatcacgaggtcaggagatcgagaccatcctgaccaatatggtgaaaccccatctctactaaaatacaaaaaattagctgggcgtggtggcgtgcgcctgtagtctcagctactcggtaggctgaggcagggtaatcgcttgaacccgtaaggcggaggttgcagtgaatcgagatcacgccactgcactccagcctggcgacagagcaagactctgtctcaaaaaaataaaaaagttaccaataacttccatctacttatgccagcaggcctctgcccaagttgtacattgaacacacctggggaattttggaaaacactgatactctcagatgggatttggggtttggtttgggcatctggattttttaaaggtatctggattttttcttcttttttttgagacagtgtctggctctgtcacccaggctggagtgcagtggcacagtcatggctcacggcagcctcgatctcctgggctcaactgatcctcccgcctcagtctcccgagtagctgggaccacaagtcccaccatgcccggttaagtttaaaaaattttttagagacaggagtccctctgtgttgcccaggctggtatctggtgattctcacgcgcagccaggtttgaggaccactgacttacattctcttccccctggtttccaccttcaccttcacgtgatggtaaccaccatcctgaaatacgtgtagtgcatggacggattctttgcctccatgcttccctatttcaaggagcagcgacgtttgctatttatctcccgctggccacgacggggcaccagagaaaaacacaggctccctacgcgctgaaggaggcttggcccttgcgacgctccgtcgtcgggctcgttgccggtgcaaacagggaggaaacagccggcgttgctgtagcgcgtctgggaattacaccgggggactggccggcccgcttcgtgcctgcgggaagtcgggccgggggactcttcggaaactccgagcctcagagaaatgtgagtcggagggttggactaggccggatccggcgttagggcgggggcccgcaggcggcccgcgcgggcgggaaccggggcggcagtcagcgggcgcgagctcagggcgcctccggggtcctcactgcgctccccacgcgctgtgaccccatttgttgcacgtgcatgttcaggtcgagagagggatgcgacgtgttcggggagcagcccaccttgtgggtggccaatccgggacgggaatcttaaacttttaactcttggtgcaaagactgatccactggcggctttacg

SEQ ID NO: 10459 - DNA, 2300 bp, Homo sapien
tataccacatgtaaatataaatacacaattgatcctcatgtgcacatcccatatttacaaattcatctacttgctaaaatttgtgacctcaaaattaatacagcattttcaaggtcattgtaagaaatgtacagagcagagaaaaaaattgagtcaccaaaagcacatgtttccagctgagattgaacagggaggagactccttgacttcttgtttctgcactcatgctataaacaagtgtctgtggtctatttagtgccatgttagtcatatttgtgtgcttttcattggtcatttcactgttttaaaatggccccctaccgcccaggatcaattgagtgcccaggagattgaggctgcagtgagccatgatcacgtctgcaccctagcatgggtgaccctatctcaaaagtgtctccttggccagacgcagtggctcacgcctgtaatcctagcactttgggaggctgaggtgggctgatcacgaggtcaggagttcgagaccagcctgaccaacatggtgaaactctgtctctactaaaaatacaagaaaaattagccaggcatggtgacgcgtgcctgtaatcccagttactcaggaggctgaggcaggagaatcacttgaacccaggaggtggaggatgcagtgagctgagatcgtgccactgcactccagcctggatgacagagtgagactccatctcaaaaaaaaaaaaagtgcacacctgaacaacatagcaaggccccatctttaccaaaaaatttaaaaattttctaggtgtgttggcatgtgtctgtagtcctacatactcaggaggctgaggcaggaggatcacttgagcccaagagttagaagctatagtgagctatgattatgccagtgcactccagcctgggtgacatagcgagaccctgtctcaataaaaaaagaaaaaaagtggcccccaagcatagtcctgaagtgctgtctagtgtttctaagtgcaagaaggctgtgatgtgccctacggagaaatgtgtgttaaataagcatcattcaggcatgatttatagtgccgttggccatgagttcaatgttaatgaatcaatactatgtattaaataaggtatctttaaacagaaacacacgtagaacaaggttatatattgattggttgataaccccagaagcactgatctaatattggccaagtcacagcaactttttagaacataactaccaagaggctgggtgcggtggctcacacctgtaatcccagcactttgggaggccgaggtgggcagatcacgaggtcagaagatcgagaccttcctggctaacacggtgaaaccccgtctctactaaaaaaatacaaaaaaattagctgggtgtggtggcgggcgcttgtagtcttagctactcaggaggctgaggcaggagaatggcgtgaaaccgggaggcggagtttgcagtgagccaagatcgcgccactgcactccagcctgggcaacagagtgagactctgtctcaaaaaaagaaaagaacataactaccaagcataacaagaattgactgtgtgtggctataagtgctcggagaaaaacctagaaatagatcaacaaataacaatggctataagtgattatcttacttgttcattagtttctaaattgaatatattgactattctgtaattatatttatgtgttttaaaatatttaaacagttaaaataggatctatcctttattattattattattttttttttttttgagacagagtctcgctgtcatccatgctggagtgcagtggcatagtcttggctcactgcaacctccaccttctaggttcaagcgattctcctgcctcagcctcccaagtagctgggattacagatgtgcaccaccacgcccagctaatttttgtatttttagtagggatggggttttgccatgttggccaggctggtctcgaactcgtgacctcaagtgatccatctgcctcagcctcccaaagtgctgggattacggatgtgagcccctgcgcccagctaggacctagtctttttaaataaccaccattcatcacccagatatcatccatccattgtttcctcaacatctctgggaaacaatattagaagtcagagtttgagttgcctgaaagaaatcagagagacttgggtagtttgtgaaatcttttgttcaaagtgtattagatcctctagaataatccctgctccctatgggatagacactccctgtaacatgcacatgtgtatttgtttgattcattctcctttatctctttctctcgct

SEQ ID NO: 10460 - DNA, 2300 bp, Homo sapien
gagttcaattacttgaaaactccatggagattttcagtacagtagtagagtggtcacatgaaatgttcaatgttttaagtatttcccatcaaaaactttgtccagtgatcatgaatttcacgtctagaaaatatctgaatactgagaaaataatttagaaaagatataacaactaacattactactttactatgtgtgaggtacttcacttattctctatatccttactatcccgagatttgtcattgttctcatttgaaccatggtgaaaacactcaagtaacttgtctgagatcattgtgcaagaagtggcagagttggggttcaaaccctgaactccttgtctctagagccaaccctcttaaccaccatactcactggctcccaggattcgtctttgattgaaagcccataacttttcattatatggtttgaaagggtttgaataaactcttaaaaaatggtaaagatggtgtacatgcattttagagatttttgtggacattgaagaatttttaaatgtaaccctttgaccaggcagcttaagtggcacctattgtcaccccattgtgagtctgacgaagtatagctctttctttatttgaggtttctaggtattcagtttacttacccagatccatcctgcttgccaagtatgaaattattccttgtttcaaaggacagctaatgaagctctatgactttaaagggaaaaaagtattatacacacactaaaaatattattcatttttattttacatctttgcctctgtgaagctgctgttattgcaacttcttttttttttttcagatcagttgcaggattggacttggtagtttatgtaaaacaattaattggctgggcacagtggctcaagcctgtaatcccagcactttaggaggtcgaggtgagtggatcacctgaggtcaggagtttgagaccagtctggccaacatggtgaaacctcgtctgtactaaaaataacaaaaattagccgagctggtggcacacacatgtaattccagctactcgggaggctgaggcaggagaatcgcttgaaccctggaggcagaagttgcagtgagccgagattgcgccactgcactccatcctaggggacagagtgagactctgtctcaaaacaaacaaacagacaaacaaaccaattcatggacatcatagaacatttcctaatggaagaggccaggtttccctgtcctcagaaccatagcagctgagtgattttatgattctgtaactcgcagctttctgctaagcatattgacatgttgattcatagcagtgaattaggacagcagtctacaacatttactgcagaaaatgctatctgcataattcactgtcaaaattatattatcttggccgggcacagtggctcacgcctgtaatctcagcactttgggaggccgaggtgggcggatcacctgaggtcaggagtttgagaccaacctgaccaacatgatgaatccccgtctcagctaaaaatacaaaaattagccgggcgtggtggtgcatgcctgtaatcccagctactcgggaggctgaagcaggagaattgcttgaatctgggagatagaggttgcagtgagccaagattgtgcctctgtactccagcctgggtgacagagtgagactccatctcaaaaaaaaaaaaaaaaaaaaaaaagtattatcttgatttttatggagatggatccaaaatcattcgtctgtaccctctcaatttgctttcttagcttgaatgaaaaagcatgcatctgaaatggtagatccacattagggctacaaactgtggccctgaaccagaaagaagataactgtttacccaaggctcccactggtgtttttagtctcaattaacattgtacctaatcagccaaggtaggtcataccatccaacaagatgaccagcctgatgcattgatgagcatactgaaacaaaaatgtctcctttttctgacaaaccaaacttcagtcatcttttgccatctggcggtatagcaacctgctggtatccctgccactgagatttcactctctttccagatccttcctgggcatcagtaaataggggaacgtttttatgtgatgagtgctgcagtgtccatcggagtctagggcgccatatctcccaagtgaggcatctgaaacacacaccgtggcctccaacactgcttcaggtaaaggataagaattctcctgacagttggtaatttacattttagggctcatcatgttaataacttaaatttctcctggtgtacttcttccataagac

SEQ ID NO: 10461 - DNA, 2300 bp, Homo sapien
tatgcacatccagctcttcagatgcctgcaacaacagctgttcaagaatcccaacctaatccattctccacagatgtggagcccagaagatttgtgagttgttaaaccaaaacaggatgcaggagcaccaggatggcacccggagactctaaccatggaatgcgtgggaattctgtgattatttctccatcacacatttatcacactgtagagatggactcaagaccagtgcttctgaggccttttccagcacttctcattctttcagatgccttttgcaacttaacgttctccttcttcttcatcatgccgtgtttattgaaaatctccctatctcattaatcagaaaaccccataatgacaggaaccacatcgttttgcttaccagagtatctaaaaccaaaatagtacctggctaacaacaggcattcaatatttgctgaatggagatcatagctgtgtttatatgtaagacagacaataagtagtcattggtattagggtcacatctcctttctccttcacactgatttacctcatttcattgtgtttatctcacaccattttgtaaattatcccatgttagctattgttattctcaaattccacgcatatgaagaaaaacagtaattagaaaataatagcaatatccataattatgggagctactatttactgaggggttactatccagcaggtgtatcacatttttcccataatttattccatctgtccttagccaaaatgaatgtttaactttgctggtcacatacaagttttgtcgcatattcttcttcctctttttctttatttccctctctctcttcttcattttcatctcgcaaccctttaaaaatgtaaaaatcattcttaagtagcaagccatacaaaaacaaatcgtggactagaagtaaacaatgcattatcttaattttgaacatgagattaaaactgaagcctaaggaatcatctaatatattcttttttgttatttttgttgttgttgttgaagttgtttttgagacagtctcgctctgtcccccaggctggagtgcagtgacgcgatctctgctcactgcaacgtccacctcccaggctcaagcgattctcatgcctcagcctcctgagtatctaggattacaggcatgcgccaccacgcccggctaatttttttttttttttttttttttttgagacggagtctcactctgtcgcccatgctggagtgcaatggcgtgatctcagctcactgcaacctccaccccctgggttcaagctcctgcctcagcctcccaagtaactgagattacaggctcctgccactgtgcccggctaatttttgtatttttagtagagacggggtttcaccatgttggccaggctggtcttgaactcctgacctcgtgatccacccgcctcggcctcccaaagtgctgggattacaggcgtgagccaccgcgcccggccaatttttgtatttttagtagagatggggtttcaccatgttgcccaggctggtctcgaactcctgcctcaagtgatcctcctgcctcagccttccaaagagttgagattacaagagtgagccaccacgcccagcctggaatcatataatatattcttattttactttaccccagtaaaatgcaagcttcataaggactagaaattcagtctttgctcactgctgtttctccagtggctgggacagtatataaagcatggtaagtgcttgataaacatttgttgaatcaaggaatgaatgaatgaacttgaccattgattgcctcaggaaggttgtggctgcagggttctcatcacaagatattgctacttcccctggtattaatcagttgggacgaggggaatctctgccagagaagaagacccaaattcaatatttaaaggtaggacagatgatactcgggcagtctcctgccctcactcaagatggcgacaaggcagagtgccctttccggtcacatgacctgacactcgccgaagggcacctccccgcgcgtgcgtgctgtgccaaggctgcaaggcgctgaggggagaggcgccgccgtcagcgccgccgcagctgggacccgttagagcggaagcgccgccgccaccgccgcctttgctgtcccccggcctctagttccccgcaggtgggaggtgggagccatgtcgaaacggctccggagcagcgaggtgtgcgctgactgcagcgggccgggtgagtcgcaccggccgggcccgctcccctctgctttcctggcccggacccctaccccggggccgccccctcaggt

SEQ ID NO: 10462 - DNA, 2300 bp, Homo sapien
gatcgcgtcactgcactccagcctgggggacagagcgagactgtctcaaaaacaacttcaacaacaacaacaaaaataacaaaaaagaatatattagatgattccttaggcttcagttttaatctcatgttcaaaattaagataatgcattgtttacttctagtccacgatttgtttttgtatggcttgctacttaagaatgatttttacatttttaaagggttgcgagatgaaaatgaagaagagagagagggaaataaagaaaaagaggaagaagaatatgcgacaaaacttgtatgtgaccagcaaagttaaacattcattttggctaaggacagatggaataaattatgggaaaaatgtgatacacctgctggatagtaacccctcagtaaatagtagctcccataattatggatattgctattattttctaattactgtttttcttcatatgcgtggaatttgagaataacaatagctaacatgggataatttacaaaatggtgtgagataaacacaatgaaatgaggtaaatcagtgtgaaggagaaaggagatgtgaccctaataccaatgactacttattgtctgtcttacatataaacacagctatgatctccattcagcaaatattgaatgcctgttgttagccaggtactattttggttttagatactctggtaagcaaaacgatgtggttcctgtcattatggggttttctgattaatgagatagggagattttcaataaacacggcatgatgaagaagaaggagaacgttaagttgcaaaaggcatctgaaagaatgagaagtgctggaaaaggcctcagaagcactggtcttgagtccatctctacagtgtgataaatgtgtgatggagaaataatcacagaattcccacgcattccatggttagagtctccgggtgccatcctggtgctcctgcatcctgttttggtttaacaactcacaaatcttctgggctccacatctgtggagaatggattaggttgggattcttgaacagctgttgttgcaggcatctgaagagctggatgtgcatacactcagagggcagagggaatgttttcacaatgcattaaatagcttcatccagctatgtggtctagttgtagacagctgagctgaagcagcagcagaaagttcaagcccatgagtagctagctgtaagttgatttggttcttcattgagtcaaggaggcatagtgcctgaaactcaaagaataaacttcatattcgcagactgtggtcaaatatgtatattatttatcagtcctttcagccataacctcaaatccaaaaagctagcttaaaaatgacattcatacatggactaaatcaccaccatagttagctattgaatcataacccggttcggagttcaaatagaagcggttctcaactgaggacgatttttctccccgagacgacatttggcaatatctggagagacatgttttggggagtgctactggcattgagtggggagaaagaccagggcaactgctcagcatcctacaaggaccggacaacccccacacaaaaactgcccagttcaatatgtgccgaggttgagaaatcatgaagtagaaatatccccttttatgcaaatactgtatttgaagccacttcgccagggtttagcgttcctccttcaaaaattgtccggtgttgcccacttccaaaatggcttttgacccgtcgtggaagcatctgtcctgctccaaaaaggctgcaagggtgtcggcagctggaatggtttggtccggggctcagttgtcaccccctgacttcagagccaatggaagaggcccagttgtggaccgaaccacatggggctactggagcagggggaaagaagctggggacaggtagacggaactttccgcgtggagatctttggccaagagaatgagcctcagctctgttctgtgggctgcactgagtttctcggtgtgagctggaggtgggtgcaatggcgcggaccccggacccggtgcccaaggtcgcctatccccgccgcggcatgcggtggttcgctctccgcacttccctgtttggggcagttaggtccgcagaagtctgtccgcgagctgtcagcgcgggcgggaacgccgcggggcgcggggtgggcgcggccgacctggtccctgagccggccggcgaccccggacctcccgcgcgccccgcacccgaccggctcagccggccggcagcgtaacacgccctacgctcgcttgctcgccggcctcagggcaggcaggcgggcgcgggag

SEQ ID NO: 10463 - DNA, 2300 bp, Homo sapien
aaccaggtctgtaagacactggataaaatgtatgaagtcaacaagaacaaccatactagatttcaggggtaatcacaaatcctcatcctaactgctaagtttgttagcttgaaacttgagggcaccaatacctcccagaattgttgggagactttaaaagcagagtttctcagccaggcgtggtggctcacacctgtaatcccagcactttgggaggctgaggcgggcggatcacctgaggtcgggagtttgagaccagcctgaccaacatggagaaaccccatctctactaaaaatacaaaattagccgggcgtggtggtgcatccctgtaatctcagttacttggggggctgaggcagaagaatcgcttgaacccaggaggcggaggttgcagtgagccgagatcgcaccattgcactccagcccgggcaacaagagcgaaactcagtctcaaaaaaaaaaaaaaaaaaagaaggaaagaaagaaaagcagagtttctcaaccaagacgctgtcggctttgggggccggagaagtcttagttgcggggggctgtcttggccattgtaggatgttgagcagcataaccggcctctacccactaccagaagcacccactccccactttcaacaaccaaaaatgtcccatacattgccaaatgtccccggggggtcgtgggtgcaaaatcacctccaactgagagcactactgctttaaagagatagcaataatgaaaagattaaagcatcaaagcactttagaacaggaagggattttaaggagcctgagaacccgtgattctcaaactttgctaggtatcagcctccctggggagtttgttaaaaatgcggcacctggacctcaccccagacctatcaatagagtcaagtgttgggttctgccccagcaccaacatcctcattctacagctaagttaacgtcggccagagagggaaaatgccttgcccaaggtcacagggcgagttagaacctggactccaaaaccaaccaagcccttccttacaacaaggagagtgtgctattcttacgtctttgaggcagcagaacctaaaaatggttaagacggtgcattccggagccagccggcccgagttaaaatcccgacttggcatttatcagcggggcggcctcgcacaaggcacgtagcgtctgaggacctgtttccttctctgtccagtggaaaagtaacagtacctacccaccagcgttattggaaaggtgaagagagaagatatttaaaaagcccgtcgcacggtaagcactcgatacgtgtcctattattaggactgtcccacacctgcaaagtggaaggggtctggggatcccggggacagagggctggaaatgggctcagggaggcgaaacgacccccgattccccgaagtccccaccgggagacggacccccgccccgcccctcacctggccctgcagctccttctcgagctgccggtagtcgtttttccagactaggaggtgcagggggtagtggtcgcccgcgtcgcaggccgaggacatggcgaggaggccgtaacctggtcctcgtcgcccgccccaagtctcggccccggcggggtctcccgcgcccgcctgcctgccctgaggccggcgagcaagcgagcgtagggcgtgttacgctgccggccggctgagccggtcgggtgcggggcgcgcgggaggtccggggtcgccggccggctcagggaccaggtcggccgcgcccaccccgcgccccgcggcgttcccgcccgcgctgacagctcgcggacagacttctgcggacctaactgccccaaacagggaagtgcggagagcgaaccaccgcatgccgcggcggggataggcgaccttgggcaccgggtccggggtccgcgccattgcacccacctccagctcacaccgagaaactcagtgcagcccacagaacagagctgaggctcattctcttggccaaagatctccacgcggaaagttccgtctacctgtccccagcttctttccccctgctccagtagccccatgtggttcggtccacaactgggcctcttccattggctctgaagtcagggggtgacaactgagccccggaccaaaccattccagctgccgacacccttgcagcctttttggagcaggacagatgcttccacgacgggtcaaaagccattttggaagtgggcaacaccggacaatttttgaaggaggaacgctaaaccctggcgaagtggcttcaaatacagtatttgcataaaaggggatatttctacttcatgatttct

SEQ ID NO: 10464 - DNA, 2300 bp, Homo sapien
gaggaggaaaaaaagagatataaaggtaatcaccaccaccctcccacctcctgttttgttgttattttttaagcctagagggaactctttgttggctctgttaagtttagggttaatgtgattgggttgtgttaagcctaaccctaacttcttctctctctctctctttttttttttttttgaggcaaagtctcgccctgtcacccaggctggagtgcagtggcacgaccttggctcactgcaacctctgcctcctgggttcaagtgattctcctgcctcagcctcctgagtagctgggattacaagcacccaccaccacgcccggctaattttttgtattttcagtagagacggggtttcaccatgttggccaggctggtctcgaactcctgacatcaggtgatcctcacccacctcggcctccgaaagtgctgagattacaggcgtgagccaccgtgcctggcccctaacttcttttttataaaaatttctggccaggcacggtggctcatgcttgtaatcccaacactttgggaggccaatgtgggcgagtcacctgaggtcgggaattcaagaccagcctgaccaacatggagaaaccccatctgtgctaaaaaaaaatacaaaattagctgggtgtggtggcccatggctgtaatcccagctactcaggaggctgaggcaggagaatcacttgaacctggcaggcggaggttttggtgagctgagatcgtgccattgcactccagcctggacaacaagagtgaaactccatctcaaaaaaaaaaaaaaaatttcctggctgagcacggtggctcacacctgtaatcccaacactttgggaggccaaggtgggcagatcacttgaggccaggagtttgagaccagcctggccaatatggtgaaaccctatctttactaaaaatacaaaaattaaccaggcgtggtggcgcactcctgtagtctcagctactggggaggctgaggcaggagaatcgcttgaaccccagaggtggaggttgctgtgagccaagattgtcccactgcactccagcctgggtgacagagctagactctgtctcaaaaaaaagaaaaaggaaagaaaatttccttagtctgactcattcttggaggtgtttccccatagttggcctcagctgtaattaaagctattcgtgagggcttgtttatgtgttatcaagaacaattgttgaattcagccaaaaaaggagataaggacatttgagaatatttatcattggaatgagtgatttagtccaaactattgtgatgaaagatttagacagaacttggggtccaagcaaaaacattgcatgtggttgccacatcccagccccatcccagccccaccagttctatggccttgtgaaattacttctgctctgtgccttagttcctcagcagtgaaatgcaggtgatacccaaccttccttagagttattgagaggattagatgagttacgacgtggaagcctttagaatggcgcctgcagtatgtggtaagcatgcagtaattgttcaccagcaccaccaccaccattgccattactccactttgacagatgagggaactgaggcccagaacacatgggtagcgagtggccaaggtggggttggaatccaggtctggctcactccaaaatccagactcttcccattattctgctttaattcttacaactgtttatctagtttagagatcctcatgaaaagcaccctataaaggataaattagtttatggttattgtgaatgatttgatcagccagtctgtaattgcatttcctaatgaggtagcttggaccagaaactttaatgaagatcttttttttatagccacaagtgagatataatattagactttaaactccctacccctctgtagcagacaggaacccgctggaatctttgctgggaactgtggaacaccaatttggtgcacaaggggtaagttgaagcaatgagctttcattgcagttagatgaaaggaaacaacttgtctgtgtctgggatggcatttactggatcctgaacagcccactctatgtaaaggccaaagatacccccaagctggaatttgagatactcttttggaagagaattagatgagtgactctttgaaaataaataaggattttagaggaggggtagtgattatagaaatcaggtgctttccctcttatccattataaacgaggggcctctttatagaaatggaacttaaaaaggattcaggactttatattgcaacagagcaccttaacaaatattttcttact

SEQ ID NO: 10465 - DNA, 2300 bp, Homo sapien
gctgagatcgtgccattgcactccagcctggacaacaagagtgaaactccatctcaaaaaaaaaaaaaaaatttcctggctgagcacggtggctcacacctgtaatcccaacactttgggaggccaaggtgggcagatcacttgaggccaggagtttgagaccagcctggccaatatggtgaaaccctatctttactaaaaatacaaaaattaaccaggcgtggtggcgcactcctgtagtctcagctactggggaggctgaggcaggagaatcgcttgaaccccagaggtggaggttgctgtgagccaagattgtcccactgcactccagcctgggtgacagagctagactctgtctcaaaaaaaagaaaaaggaaagaaaatttccttagtctgactcattcttggaggtgtttccccatagttggcctcagctgtaattaaagctattcgtgagggcttgtttatgtgttatcaagaacaattgttgaattcagccaaaaaaggagataaggacatttgagaatatttatcattggaatgagtgatttagtccaaactattgtgatgaaagatttagacagaacttggggtccaagcaaaaacattgcatgtggttgccacatcccagccccatcccagccccaccagttctatggccttgtgaaattacttctgctctgtgccttagttcctcagcagtgaaatgcaggtgatacccaaccttccttagagttattgagaggattagatgagttacgacgtggaagcctttagaatggcgcctgcagtatgtggtaagcatgcagtaattgttcaccagcaccaccaccaccattgccattactccactttgacagatgagggaactgaggcccagaacacatgggtagcgagtggccaaggtggggttggaatccaggtctggctcactccaaaatccagactcttcccattattctgctttaattcttacaactgtttatctagtttagagatcctcatgaaaagcaccctataaaggataaattagtttatggttattgtgaatgatttgatcagccagtctgtaattgcatttcctaatgaggtagcttggaccagaaactttaatgaagatcttttttttatagccacaagtgagatataatattagactttaaactccctacccctctgtagcagacaggaacccgctggaatctttgctgggaactgtggaacaccaatttggtgcacaaggggtaagttgaagcaatgagctttcattgcagttagatgaaaggaaacaacttgtctgtgtctgggatggcatttactggatcctgaacagcccactctatgtaaaggccaaagatacccccaagctggaatttgagatactcttttggaagagaattagatgagtgactctttgaaaataaataaggattttagaggaggggtagtgattatagaaatcaggtgctttccctcttatccattataaacgaggggcctctttatagaaatggaacttaaaaaggattcaggactttatattgcaacagagcaccttaacaaatattttcttacttgatgctcacagtaactatatgaacttggtacagtggatgtccctgcgggtcagaaaaatgaaattacctttccactatcaaagctagacagggaaacagctagaacttcaactccaagtcttccaagtctcatgcactttcagatatttctttctttttttctttgttataatcaggagataaaaatgtaaaggagagtagagaaatattttaaaatgaagaaatccattacacttcctgtgtagtttggtgatatcctcatagattttcttgttccatgcaaaaaagttagtgaatagaacttcccggtctttagctggttaacacgtccacctcagacactgagtgccacaggccttcacttgtgaacatcatttggcatttctgactctcctgagttctggctcagcaggacctcaccacggaatgtgctactgcaaacaaccccacagccatcacgcctgatgagtacttcaatgaagagtttgatctgaaagacagggacattggaaggccgaaagagctgacgattagaacacagaagtaagagaggttcagctgccattttcaacctatgtatgtttcagaaattgtgctgttttatggtgttatgttggatcattccactgccctccccaccacccttatttttttttcagacggagtctcgctctgtcgcctaggctggagtgcagtggcacgaactcggctcactgcaacctc

SEQ ID NO: 10466 - DNA, 2300 bp, Homo sapien
ctcactccaaaatccagactcttcccattattctgctttaattcttacaactgtttatctagtttagagatcctcatgaaaagcaccctataaaggataaattagtttatggttattgtgaatgatttgatcagccagtctgtaattgcatttcctaatgaggtagcttggaccagaaactttaatgaagatcttttttttatagccacaagtgagatataatattagactttaaactccctacccctctgtagcagacaggaacccgctggaatctttgctgggaactgtggaacaccaatttggtgcacaaggggtaagttgaagcaatgagctttcattgcagttagatgaaaggaaacaacttgtctgtgtctgggatggcatttactggatcctgaacagcccactctatgtaaaggccaaagatacccccaagctggaatttgagatactcttttggaagagaattagatgagtgactctttgaaaataaataaggattttagaggaggggtagtgattatagaaatcaggtgctttccctcttatccattataaacgaggggcctctttatagaaatggaacttaaaaaggattcaggactttatattgcaacagagcaccttaacaaatattttcttacttgatgctcacagtaactatatgaacttggtacagtggatgtccctgcgggtcagaaaaatgaaattacctttccactatcaaagctagacagggaaacagctagaacttcaactccaagtcttccaagtctcatgcactttcagatatttctttctttttttctttgttataatcaggagataaaaatgtaaaggagagtagagaaatattttaaaatgaagaaatccattacacttcctgtgtagtttggtgatatcctcatagattttcttgttccatgcaaaaaagttagtgaatagaacttcccggtctttagctggttaacacgtccacctcagacactgagtgccacaggccttcacttgtgaacatcatttggcatttctgactctcctgagttctggctcagcaggacctcaccacggaatgtgctactgcaaacaaccccacagccatcacgcctgatgagtacttcaatgaagagtttgatctgaaagacagggacattggaaggccgaaagagctgacgattagaacacagaagtaagagaggttcagctgccattttcaacctatgtatgtttcagaaattgtgctgttttatggtgttatgttggatcattccactgccctccccaccacccttatttttttttcagacggagtctcgctctgtcgcctaggctggagtgcagtggcacgaactcggctcactgcaacctctgcctcccaggttcaagcggttctcctgcctcagcctcctgagtagctgggactacaggcgcgtgccaccacgcccagctaatttttgtatttttagtagagatagggtttcaccatattggtcaggctggtctcgaactcctgaccttgtgatccgcccgcctgggcctcccaaactgctgggattacaggcatgagccactgcgcccagcctcctctgcccctttttataaaaaataattttaaaattactttgccatgaaagctaacagtagattgtccatgttattagctcctttccaaatagaatctagattggatgtaagaattcctttttttttttattgctaaccagcttcagctgatcaaattcaaatgaaactgttccacccgctatcatttcttcatgcttgctgtcaattaaggctttgatcgtggcaggttgtcatgcaggtcgcttgcctttattgccagattttagggtgatgtgaattccttgtggccctagacatttgacctttaataggtctgaattaagagatgactgggcagagtgtggagtaaagctgctgttgtctagcctactgcatagcaataatctccttttcccatctggtggagatgacctcagtcttttcttggttgaattctgcaggtttaaagcaatgttgtggatgtgtgaagagtttcccctctctctggtggagcaggtcattcccatcattgacctaatggctcgaacgagtgctcattttgcaagactgagagatttcatcaaattggaattcccacctggatttcctgtcaaaataggtactgctaaataaacttcagcaacacttggaggttctgcccatgtttgtgggtggcagcatgtgggtggcaggatgcttcagggaattggagtgctttaggtcaaagtagctta

SEQ ID NO: 10467 - DNA, 2300 bp, Homo sapien
atttgtaaactgtcatggcgctgctgggagtgtagcagtgaggacgaccagaggtcactcttgtcaccattttggttttggtggtttatagcaggctcctttactgcaacctgttttatcagcaaggtctttatgacctgtattttgtgctgacctcctatatcatcctgtgacttagaatgccttaaccgtctgggaattcagcccagtaggtttcagcctcattttacccagctcctatttaagatggagttgctctggttcacacgcctctgacatttgtattgcacatccattgtgaggtgaatgatactaatcccactacaaatcaaaccttcaggaggtgaggcaatgtgtgaggtggtaaagcctccagattcaaaactatgcttgggtcaaattctagctctgccactttgtgtgtgcagtgttgggccaaacacttagctcaattccctcatgtattcagcaaacagttactgaatataatatgctactcttctagtcttgtagcaggacgagccgcagacaaaacctctcagacaccgagttgtagaaggaagggctttattcagctggcagcatcggcaagctactgccttaaaatccgagctccccgaatgcacaatttctgtcccttttaagggctcctcacagcactaaagatttcacatgaaagggtcgtgattgatttgagcaagtaggtggtacgtgacaggggctgcatgcaccagtggtaagagagaaacagaacagggcagggagtttcacaacgttcttctatacaatgtctggaatctatgaataacatcggtttctaagttatgagttgatttttagctactgggtgtgaggcctctgagcccaagccaagccatcgcatcccctgtgacttgcacgtatacatccagatggcctgaagtaactgaagatccacaaaagaagtaaaaatagccttaactgatgacattccaccattgtgatttgtttctgccccaccctaactgatcaatgtactttgtaatctcccccacccttaaggtactttgtaatctcccccaaccttaagaaggttctttgtaattctccctacccttgagaatgtacttcgtgagatccacccctgcccgcaaaacattgctcttaacttcaccgcctatcccaaaacctgtaagaactaatgataatccaccaccctttgcttactctcttttcggactcagcccgcctgcacccaggtgaaataaacagccatgttgctcacacaaagcctgtttggtggtctcttcacacacgtttggtggtctcttcacacacatgaaactgggtttaggccaggcaggcccaggcctggtttcgggcctggcgccgggctgcccgtctttggtttcacttccttgttgtttcttcttaaaacaggtactgagtataaaacaatataaaacaaaatgagagggtctctctctcccccagtctctgggacagagcagagagcaagaacaaaatcgctgtgctcgtggactttacatgctagggcggagcaggtcctcagaaaatcatcaaatgtacgttaaatgtataaggtaaatggtgatgagtctaaagtgaatggggggaatggaagagaacgaaggtagggagaatgtacattaagggaaagggagggttgcaattttagaaaaggatgtctgggcaagggctccctgagaagatggcatttgtactatagaaacacagtatctattttccaggcccgtaatgaaggtttaataagaaaatgcatggattcgtaaaaaatcttcaataggccccaaatggacctacaagacctcgaccccaatggatgagggaacgctaaccacagcagaacggtaatcgcggcgaacgttggcacagacggaaagttgatctgaacggaaagttggtccgggggaaacattagttattgaggaacgttaatccggaacaaatcttaggcagaagcggaacttagaccaggacgcacagttaccatggcaatgacgcgcgccctaagggcggtggcagcgacgcagagagacctgggaggagacagaggcagggcttgcgacggaagtggcctctctgcttctgcagggctggggaagatgctgcgtccagcgttaccgtggctgtaccttggcctctgcagcctcctggtgggggaggcagaggccccgagccccgtggatccgctggagcggagccggccgtacgcggtgctgcgagggcagaacctgggtgagcggccctcgggctggcgggcggcgggtagtgcctga

SEQ ID NO: 10468 - DNA, 2300 bp, Homo sapien
tagtacaattattcagcaactgggttccctggagtaagtgtgaaatgggatacttgcatctgggggttccctccatcattctctgttctcatgtgcttctcacagagtgagcatcttgctgctctgcctttaaatctaggtacataattttcagccacatgacccctaaaataagccaattccttcaccttcacctggagcaaaactgtaataacagcaacttgttccggagctagaaattggctccagtggacccactgggaagaaggagttgtttgctgtgctatgtggacaatttaagggtttaaaaggcaattttgataagccatgggtttttttgtttgtttgtttgttttgagacggagtctcgctgtgtcacccaggctggagtgcgatggtgtgatctcggctcattgcaagctccgcctcccgggttccggccattctcctgtctcagcctcccgggtagctgggactacaggcgcccgccaccatgtcccgctaattttttgtatttttagtagagacagggtttcaccatgatagccaggatggtcacgatctcctgacctcgtgatccgcccgccttggcctcccaaaatgctgggattacaggcgtgaggcaccgtgcctggcgatgagccatgatttttatctgaagtgccgtctttagaagataacctccatgtaaaacgtttctccacagtttatattttaaaatataaaattgaagaaaaaactattgccagtttgcttttttcctctttgttaatggactatctactatcatctcaccaaatggagtctcacagtacacagcttgggaaatgctgccttaagttgcagtgtgaagccttaagtttatgtaaccatgacttagccatctgtgtagcgggtataccaatggggtgtagggattggcggaagtagtttgcaccaagtagtactggtgtggaccataggtggcaatccagacaggctagagcaatgttcaggttacagtagcaagtggcaggttttggccagctgtccctactggggctggaaggataaagagccagaataaggagacagggcctcagttactgaaactgggatagaaactggggactggttatgggggaaattaaacaagaacctgtccagcttcttctattctcacaactaagttcagatctggagtcagaggcagggatgcagctacaagaggagttagcgttgcaggtttatgtagataggatgctaagcaggtctatgttagccaggattgtttgcgcagtaagtgacagaaacccagcttacgttaaccacaaagcctcaaaggggaatttattgaatcatgtaactgggcagttgaagagattgtgctgtccttggacatggatgaagataagggttcacactatgtcatcaggtaggttctctctccctacgtcttggttccatttgcttctatttggccgccttcttcttcttcttcttcttcttcttcttcttcttcttcttcttcttcttcttcttcttcttcttcttcttcttcttcttctttcttcttcttcttctcttctccttctccttcttcttcttttttgagacggagtttccctcttgttgcctaggctggagtgcaatggcgcgatcttggctcgccacaacctctgcctcccgggttcaaacgattctcctgcctcagcctcctgagtagctggcatgccccactacgcccagctaattttttgtatttttagtagagacagggtttaaccatgttggtcaggctggtctcaaactcccgacctcaggtgatccgcctgcctcagcctcccaaagtgctgggattacaggcgtgagccaccgcacccggcctttggcttccttcttgaacagctctctatgtagcatgaaatccttacattctcttcttagcaacctcagaggagccaacaagtctttcctgatgctctgttaggaaagtcccgggaaagactctgattggttgggtgtgaattacatatccatccctgaaccaatcaccgcctgggccaaggtgtcatcccattggccagtctgggtcatgtgctggttcctgtggcaggaaatagggagaagatgactgagccggccgggtgcagtggctcacccctgtaatcccaatactttgagaggccgaggtgggtggatcacctgaggtctggagttcgagaagatgacggagcagtgtgagccctactgaaccacatccagtggattttccttaggaaggaagatcctgttaccagacaaaatgggaaaaggaagtg

SEQ ID NO: 10469 - DNA, 2300 bp, Homo sapien
tggccaggctggtctggaactcctgacctcaagtgatctgctcatcttggcctcccaatgtgctgggattacaggtgtgagccaccctgcaccgccaggccgatgttctaagcatcaggctctacctgtgaatcttctctttttacagatgaagatgactgtatcgctcagattcctggtgggaaagcaatggtatactcaagtggggtaactaatgatgggacgatttacaaaggtgtgggcagagttaagaaaaagcaataaggtggtgggggggggcgcggtggctcacgcctgtaatcccagcagtttgggaggctgaggcggacggatcacaaggtcaggagatcaagaccatcctggctaacacggagaaaccccgtctctactgaaaatataaaaacaaaattagctgggcgtggtagtggacgcctgtagtcccagctacttgggagactgaggcgggagaacggcatgaaccgggagacggagcttgcagtgaaccgagattgtgccactgcactccagcctgggcgacagagcgagactccgtctcaaaaaaaagaaaagaaaagaaaagaaaaagcaataagagatagtgagctgcctggggctggcaagagtggggaacccttaccactcccaggactaaaggagggagtagtgcccagaagccccgcctatatggaactgagaagggtagggcctggagtcacgtccatcctcactgctctccagtctcctgaactggaagccaggggtcgggggcggggggttgggagggggggaccctgatacagttagtgtgggtgggaatgtacaaattagctcagactggaaaagtaaaaatctacctggccacttagcagactggagtaacagaaatggatcaagtcagctgcaaagataacaggaaacaatatttctttgtagctgtaaagttataatattaccccacccctgtctttgagtgactgctgaaacattgtcctttaaaatcacagaccatcagaaagtttgctgtttgaaattatgtgactaagattgaaatattccaattttgcctggaggatctaagtcatcttgacacggagaagcagcctcaatttacaacttaggagcagagattcagataaagagtttctggacacatttgacatttatcttagctttgttgctttcaagaaaacagggccctgggtcccctttgcaatccagatttgaggttgactgctttgtacaagcctgctttgctttgagtctatcaaaacatgacttcatttggattttatctaaactccactttcctcggaatcctgtaataaatcgctgtcttccactgtttggtgatgtcctgaggctcatctggtgggtggcgtccctcatggaatagatcaataaacctagctttgttgggctgccacttggtccctggtgatcttgggctgattgatctaggtcatgggttgaacttccggggcacagagcagggtggagagtaactcagagggtcaagcgagaaagatcctgcagataaataaaacccctccacccctagcatccccactcctgcaaatctgattttccccaccaactgcagaccagaatatcataagggctggtagctacagaccagaatattataagggctggtagaagaagaaggggagacctttatttacccagagctcctatatatcaggggctgaataaagggttgtagaaatgaatgaatcaatctctgagtggggcttgaggcaatggaaagatctcagcccttttctgaggtacaatcgaagctctgggtcttgtgacatttgcagggctgcccccttttcccaacagaaatgagtccaaaaaagcgaaaggaaagggggaaaaaaggagaattctaaaaatgcccatcctctgaataccatctttgtgtaggcatctgggggaggccagctggggcgaggtcatctgccaaccaggcccttaggacttggcccttcttgtttatcgaagtcacatctggggcaactgccagggcccgcccccactccacagtcattggaagagctcaaagttaaaggctcccgctaaaaatcagtatgtttcattttgcagttactgggagggggcttgctgtggccccatctgggagagttgagccctggtccagccccgcgcaggaagggaggctgtaaccgtgccagcctgctgcagctgcagtgatgttttcctgtatgagacaaacaaagtcgcccggatccaaagcatcaattatggcaccattaagttcttccacgtgatcgtct

SEQ ID NO: 10470 - DNA, 2300 bp, Homo sapien
gaaaaaacataaatgtcttcagtgcctcccaatgttgggcactgttgtaatcactttacctgtatcaactcccttaatcctcatgtcaaccctattgaggaaggttttattatagccacgttttacagatgaggaaagtttagcaagataaagagagggtacacaatggcagatgcagaattcaaacccaggtagccagggatgtctcctaacacacccaacaggatcaatgaattatataatcccttctacaaatcttgtattgtttctgtcagtattatgtaagttatttaattctttgaggttttgagtgttgcttcccctaattggttgtggggtggggccagttttagtttctctccaggagccctgcagggtacctacgcttgatatttcaacagtcagagggcagccaacaaagggactggtcttggaatgttgtgttgcctctgcccaaaacactctcccttttcctgtttggctaatttttactgatcctttttaagagatgggggtctccttctgttgcccagcctggagtgcaatggtgccacccctgaccaatttttgcttttaattttttgtagagaaagggtcttgctctgttacccaggctgatcctgaactcctgggctcaaagttatcttgttgccttggtctctcaaagtgctgagattacaggcgtgagccacggtgccaggcctaatttttactgatccttaaacatcactccatttgacagaaactttcctgatggtatggcccctttggcaccaccctccccaaataaacttgaggcccttaatctgggctcctaatcattggcttctcttgttacagcatttatctcaattgtattggtgttgcccctttaataatctctgccggcactagactgtcagctccatcagggcaggggccaggtaagtcctgcccttctgcatttccagcagcctgtacagtacagggcatataggaaatgcctaatacgtaatctgttattttttgttgtggtaagtctgatgctaaagctatagttggtttctcctatgctgtttgagcaggcaactaagttttcaaggtatcaataatttgattttttttccttctctttctttcattgccagctgatatcactaagtatcgtggtctctagtctaatagaggttggttcaaaataccatttgccaactaaggtctcccacaaaccagctagtgcaaattccagtagacttttaaacctcatcagtgactgggcacaaagatctccctgcgtcctgcgtgggatgtgaactccatgaagaccacaaggaggatttaatttatttctgcagtcacctaaagagagcccactcagaagccaaaggaacattaggacacttagttctcccacaccccctttcaggctctcagcatactcaaaacgtattgggtttaaaaaaatttaattcccagtacaggcaatgtggcccagtaatgtgacacagaagctgaaatctctatgatgaatgtgtcttcttttaatcctgccagagcctcactacaattgttcctatgcataacctaatttggagatacttatgtcaaaaacctaaatttgaagcactggccaaatgcttgctcatcccaacccccctaccacccagccctgcctcaaaaacaaacaaaaatcatcacccacgtttggcgcatgaatgcatgcatgcatgcatgaatgaatgaatgaatgaaacatcacacgcatttaacataggttaatcatgcagagagtattttgtaaactgcgaagtgcaggactttcgggaagcttattgtagcgcgtctaggtcggagtaacagtcccaaatgccctcggctgtctgcagtggctcagcacgtgggcccgctttgcaagtaagcccggctcccgtccgccccgtccgccccgccccgtcccgccccgtcccgtccgctccgccccgccccgccccgtccgctccgccccgcgcccgtcctccccgccctggcccggccccgccccccagctcgtgcgcgcgcgcgcgggagagcggccgctcgcccggaagtgacgtaactctacggcctagcaaccgttgccaaggagctcgactctgggagcggtctagagcccgggcgcctcctggggggtggggaaacggtttcgtgaggagaatttgaggtaacctcgccaactcgcggtcggaagctcctctgaaccccgaaataggagagagctcccgtcctctctcggtcctgatgcagcacctcgcaagtggaaggggtcgtcgcggttaagcccc

SEQ ID NO: 10471 - DNA, 2300 bp, Homo sapien
attgtggagaaattatcttttttattttattttttctgttgagacggagtctctctctgtcccccaggctggagtgcagtggcgcgatctcggctcactgcaacctccgcctcccgggttcaagcaattctcctgcctcagcctcccaagtagctgggactaccggcgcccgccaccacacctggctaatttttgtatttttagtagagaccgggtttcaccatgttggccaggctggcctcgaactcctgacctcaagtgatctgcctgcctcggcctcccaaagtactgggattacaggagagaacgacagctcccggcagcaactcattgcttaattcatttttaatccttaaagcatttacctaggtaaagctgtttcagcagttaataaatcagatattcagttttttaaaaagttatgatctttctcactgccagcctgatttcctttagatttaggcttatgttgtacttgtgcctgtgaacaagttcattcaatctagtggaaggaatcactgttttagacacaatggatgttcaaaaatggaattggacacagatacggaatttacagtttagcagggaagagaagatgcgtacctaaagaactagcacaagatcggccaggcgcggtggctcacgcctgtaattccagcactttgggaggccaaggtgggcggatcacgaggtcaggagatccagaccatcctggctaacacggtgaaaccccgtctctactaaaaatacaaaaaattagccaggcgtgctggcaggcgcctgtagtcccagctacttgggaggctgagggaggagaatggcttgaacctgggaggcggagcttgcagtgagccaagatcgcgccactgcactccagcctgggcgacagagcgagactccgtctcaaaaaaaaaaaaaaaaaaagcacaagatcaaaagtagtgctaggagagaagcacagataaagtgtggtcagctatgaaggacaggtgttggcactgctgcagaacctggaggatagcttgagaaaggtttcctgggggagctggcgtttggtgggcatggcttgaaagatggttgggggggtttgtgcctcttgagatgaaggaggggtgcgcagtcattttaggcagagaaagcaacattaactaaaggcagagtgatagaaaaactaaggagcagtgactgtttcaataggctgaagtttgaaggggtagaaagatgacaatttggaaataaagttggaaagggataagttgtgccagatcataaagagtctggaaatccaagaagtttgagctgtattttgtgcgcaataaggagcatacagatgatttggaatggggagaggtggagaccagagaacaagaggctgtggcctcattgaaggccaaaggaaatgaaggcagagtggatgcctaccggccacaccaataacagaaatggaagaagggtacttgaagtgtgcagcctctactcagatgcagttggttgtgggcatgcacaaatgtgggcccacggttgccagatctgattttcaagagaaactggaaatacagattttaaagtaaaaaatctctcaatgttttttgggagatttgggagaaacatctgttaggcttgcagtcaggctcctaaaatttaggagcatgtttaattcctgggtagaaattatgcaccggtatgggagagatgttaatgtagggaggatttattattcatttgtccacattaactcagatgattactgttacaccagatgcatatacaaagcatttgatgttaaaattaacagtatatactgcagttttcatagtaaagccattatacttggatttctttcaacaaaataacccttttcacagcattttgtatgccatgtaaaattatacttttcatgcctacgttgtatgaacttaattctggtttttacccaggacttttgttgccagtattaaggatttttttttctatttttactctttagttaaaattataagacctaattatgagtgatcaaattaaattcattatggacagtctcaataaggagccctttaggaagaactataatttaatcacgtttgattccttggagccaatgcaactattacaagttctcagtgatgttctggctgagattgacccaaaggtaagagttttctctttctttttgatgggtagcagaaagccaatttctccctctaaatagctgtgagtcttgggcacattatttaacctctctgagctttattttccatgtctgtaaagtaatagtaaataatgcataacatttctct

SEQ ID NO: 10472 - DNA, 2300 bp, Homo sapien
aacacaaatgtgctggttggcagctttaccttgctgcattataactggtttttgttgcatttctggatgaacaccaagctgccaaaaaaattaccctgcataagaagccctgggggaaaaatagaaatgaccttcatccaaaagaggatcttggttgttaatgctgtggttataaatgatgaaaatgttagatgcataatcaaaataaaaccttatctgtttcctacagactgagaatactttttcttataaggtcttctttgccactttttaggatatcagtgcaatggaagaagaaaaggatcagctcattaagagagttgaacatttgaagaaaagggtaaggcagaattagtactgtaagactttggccccaagtcccaaggacttgcaaagatttaggaatgcaaataaagattcagccaagcatgagtgtacatctgaggatggactcaaataacattgacgaaaagggaatctctctagacagtagcccagcactttcaaggacctggagcctagagctttactgtcatctctagggagtactgtttaccaaaaggaaatgataagtggatgtctgagtcacatgacatgctaatttttttcttcaaacctgacagtaacatgtactacttattcccttactgtaggttgagacagctcagaatcatcaatggatgcttaaaatagcaaggcaacttcgagttgaaaaagagagagaagaatatcttgcacaacagaaacaggaacaaaagaatcaggtatccacataaaagtttatattctcagtatgaaggaaatagttccttctcataatccaaatgtaaagaaaagagttttaaaattgtagacgttcacgttccttttgctaacataatggaatactcttttaattaagataaatatttcaggccgggtgcagtggctaacacctgtaatcccagcactttgggaggctgaggcgggcgaatcaggaggtcaggagttcaagaccagcctggccagcacagtgaaaccctgtctgtactaaaaatataaaaattagctgggcatggtggcacatgcctgtagtcccagctactccagaggctgaggcaggagaatcacttgaacccaggaagtggaggttgaggtgagctgagatcacgccaccacactccagcttaggcaacagagtgagactttgtctgaaaaaaaaaaaaaaaaaaagataaatattttgtggcaacaacaataccactttttgggttttatactctgaattgtatctatacactgtcttttggcctatgcttacctcgtgttgttccaacattacagaagagtcattgtaatgttaacagtaagattaactgctaataaaacttctagaatctctacaggatgcttttagattccagggctatgagaccattctttttattccagtgatcacagtaccctctgcagtttactacaatggcaaataagtcatgaaaaggctcaaaatcacctacactccatgtttttaaactttgccttaaagaaaaataatttgctaagaaattattacttttacttattaaaaatctattttaaaatctgagtagacttatacattaaaatatatttcacataagcttcatttactactaaatcagcagtttaaatgtttgattttgctggcacttgacttggcatcgaagtagtttcactgcagcagtaagctgcatcgcctaagccctgaatggttacttggcgttggtttgtgattctgaaacatcactatatcaatgttaacattacttggccttaagaaaaccatgtataacaagaaaaatctggtgtgtgtgtttctttgataagtatttttccttaaaccgcaaattcagtaaataactaaagaaaaatttgtgaaaacttccttaaaaaatgtatgtgaaaaggtattgagagaaccagttacattttgggtttaatatgggaattttccgagttcttattatttgttccttttatatcataagaattatatggaacttgtatttttcattgcttgcctaagtgagaggtaagcttcagtagactaagcaagtaatctatttaattgtattttaaagctatttcatgcagtgcaaagattgcaaagagtacaaaaccagctgaaaagcatgcgccaagctgcagcagatgcaaagcctgaaagtaagtggaaattattatatggtatagatgattagaaaatattaatttaaatcacgatcttcctaaaaaatcaatttgtgagaattagttatcatcaagtgatgtctcagcat

SEQ ID NO: 10473 - DNA, 2300 bp, Homo sapien
gtagctttcaatcctttatacatagtgttccttttttttaaatactgtcttccccttgttcatcttccacctaactgttcttactaatccttcgtgattagcttagatatcaatttctccaggaaattgtccccactgatccccaagcctgggttaggttcccgggagtcctgtgtgccttctgtaacaccttgtgttttcctatcatagctctcagcagcctgtttacttgtctgaacattacttgagaggaagaatttttggctgttttattcactattgtctccccagctcctaacaaagaacctggcacacagctcaatacatggtagctattattattatcagcaccttcatctatcataattctcaaatgtctggttgttgcataaataactcttaagtatgccaagaagcttagagttaagttacaagactgacaagggcatgcattgtttcagagccatgtttgggacctttgtttttcacttattcaatcattttccctttttatactaggaactgacccaggagtgtgatgaaaagaaatcccagtatgatagctgtgcagcaggcctcgaaagcaatcggtccaaattagaacaggtaagaagagagtttttattttaacaatttagcaaaaactacctgtgtgtacacctgtagtcccagctactctggaggctgaagcaggaggattgcttgagcctaggagtttgaggctacagtgagctatgatcacaccactgcattctagcctgggccacagagcaagactctctctctaaaaaaaatgttttaaatactgcccgtgtacgcacattttcactacatcaatgtcaaaagattcccaaatctttatcatcatctcctaagctccagagatctttatttctttaatttgtacacacttaatttcccatctgtaccactcccagcaaagtacaaggctcattatctgctgcctggcctcccacagtaaactcttacctattctcttgcttctactcttgctctcctaaggtttattcttcatagggaagcctaagaaacctgtttaaaatttttgccacccttcattggcttcctgttgcacttaaaataaaatctaaccaccaaactatggtctacaaggccccacctgccttatgaacttcatgtccatgtgctctactcctcatccatggagcttcagccactctgaccttcttcctgagctttaaacaggccaagcttgttttcactttgggattttgcatgtactcttcccttctgcgtgatatactctgctcctaactcttcgccctcccttctccttttcatcactaggtctcagccttagtgtcactgcctttcagagatctctgatcacctgatgttacccactcttcttcccaacctggcccacccagtccctctatcacattctactgatggatttccttcatagcgcttatccccatctcaaatatccttcattatgtttccttgtttatgttggtttcttctacttcagtgaaagcagggaacctgcctgttcacttctgtgtcctcagcacttagaacagtgctggacacacagtaggtacttaataaatgtatgattgggccagatgcagtcgctcatgcctgtaatcccagcactttgggagtccagggcgggaggatcacttgaggctaggagttcgagatcagcctggccaacccggtgaaaccctgtctctactaaaaatacaaaaattagccaggcgtggtggcacgtgcctgtagtctcagctcctcaggaggctgaggcacgagaatctcttgaacctgcgaggaggaggttgcagtgagccaagactgcaccactgcactccatcctgagtgacagagtgagactctgtctcaaaaaatacaattgaacttgcaggttatagagtgatatgtgtattctctagaaaaagattatctcttattgtgctagaataaacaaagttaaaattgcagaagaggaaatgactctgatggtagtcctttgttgtacatctaaagtcatcgtcgccatatctgtctcattctttcgataatgtcacctatctaaaattatatattataggaagttagaagactccgtgaagaatgtcttcaagaagaaagtagataccattatacaaattgtatgattaaggtaagacaaagtagatcaaaaacatttctgagttttttctatatcaaagtcttccctaaaactgaagtctttctatttagaacctagaagttcaacttcgtcgtgctactgatgagatgaaggcatatat

SEQ ID NO: 10474 - DNA, 2300 bp, Homo sapien
gtgggaagagcattccatacaaaggctgaggtcaggaactcctccagaagctcataattgcaccagaggtgcttacaaccccaagcagtgacagtggcacagaatattcaacatcaaatgcctaagctaatttccaggctgagaaaggtaaaccatccttctcctgcctgcagtgcttctatcggtcctgaaagagacagaggaggtaagggagaagaattggtacgaaatggtgcagagctggtctcagagggcaacaacagccagccctccatgaccacactcccaccgtgcactcacgtgcccctcttgaagcggctctgatcctgtgacctaaccagtttccacctggcttctctcagtgcgttgccatatagtataattttttgtttgtttgtttcgtgtagggttttgttggttcttttccaagtatcaatcaaaactacatgccaacgtccactccttggaaataattaaatgacatgacgtgcctgattttttcagctggtgatgcactgtaatttgcatctgctgaaggaatttatcttaagtcctgaagcccagccacttgagacaactgaggtgatttttctgctctgcttttgctcatgcggatggtgcgttattgttaaacacaaaagtggactaattgcttcattctgcaacctactccgtgaagaaagctgctcttctttgtgaagagaatatgttcatgttttgttcatgaattccatgcaatttcccatccccttgttaagtaatgtagcttctttatattggcaaaattccctttatcttgctgtgacctgcgctttgtcctcccgagcagagcaaatcatctgtggtttaagagcagctttggattcaagtccccttttctcctgtcgagggaagtgagtctatgaaatggccttcatctgaaagccacagcgaagcacctcctagcccaagtctagctgctgtgtggcagctccagcggcgtgaactgtgactgccctgcagacacctatcaagcgctgcgtcagctattaataataaaatcaactcttctccctcccccccgcgaggggggttccctcgtcagggcccagaacccgctggggaagaatcggggctggcgtgcgaaggagctggcggcagggggtgtaggatgcggtgttcccgaggcgacagatgaaggatttgggttgtgtgggaagtgaactgcggaattcctccccttggtttctgaggggggctctgaaggagccagattaggatgcagagcgcagcccgggcgaccgagggcgaggaggcgagccaaggacatcagcccgagggcgcctcgagacgccccgcgtggaccgcgctcccagctcctcggcctcgccttccaaccatccgcccaccggccccagagcagcgtgcccactgtgagcgccccaccctgcgtctgcaggtgggtgggtcagagaaccgcaggcacagaagagggtacccagcttcccctccgccagccccgcgaccgcggcgcgcgcggcctcgatccgggttcctaggggcggcgcgcgggagggggcggggcctgcgcggcagcgtgggcgccaggcgcgcgggaggagggagccgggaggagggggcggggccgcgccgcccgcgccgcgctgggcgctctcggccaatgagcggcgtccacatgccgcggcggcggcgaaaggggaggcagcggccgataaatgctattagagcagccgccgcggagccgtccccgacgccacctccttttccttcgccgcagtttcctccgccgctgtcgggcgtgcggcgctgagggacccgggcgagcgcgccgcgcaccgccccgccggctcgcctccctcgccgcgttccgccctcagtggtctgccgggcgccccctcctccggcccgggcggggcctctgatcgcctcaagagagcggggagggggctcgggggccgcggcctgccctcccggcgggcggctgagggcgagggaggccctcccttctggcgaggggagggagggtgggtcaggagcccccaacccgccctgcggagctcggggccgcgcgaggggcggttgtctgggggagggggcgcggggtgattcagcgcccggcgaggcggaagcggccgcaagaggaggaggggagagcccgtccgcgcctgggctcccggggtggcacgagcccgcggccggagtgcgaggcggaggcgaggaggccgcggggacgggaggcgaggccggccgggcccccgaagccatggagaacgcgcacaccaagacggtggaggaggtgc

SEQ ID NO: 10475 - DNA, 2300 bp, Homo sapien
tagacatcgatatttttggaggtccccaggggttaccaatgtgcagacaggtttgggaaccactgcattaggcattttacatttatttagggctttcactggatttgtcaccccatactttcataatccattttttctgattttttttctggtttttggtgagggtatagttgggatggggttttttttttttgtcctcccaccgctcgcccccatccagtgtggcgtactcattaatatgaatctctctgtgtcagacaccatgcaagatcacttagtttgcctattttttttctcttactcctcttttttttgagacagagtctcgctttgttgcccaggctggagtgcagtggcatgatctcggctcactgcaggctccacctcccgggttaatgccattctcctgcctcagcctccccagtagctaggattacacctggctaattttttgtatttttagtagagacagtgtttcaccgtgctagccaggatggtctcaatcttctgacctcgtgatccgcccgcctcggcctcccaaagtgctaggattacaggcgtgagccaccgtgcccgggtcctgttttttttttttttttttgagacagagtctcgccctgtcacccaggctggagtgcagtggcatgatcttggctcattgcaacctccaccttccgggttcaaaccattctcctgcctcagcctcccaagtagctgggattataggcgcccaccaccacacccagctaatttttgtattttttagtgagatggagtttcaccatgttggccaggctggtctcgaactcctgacctcgtgagctgcctgccttggcctcccaaagttctgggattacaggcatgagccaccacaaccggcctattttttttatttttatttgagatagagtctcactctgtcacccaggctggagtgcagtggtgcaatctcagctcactgcaacctccacttgccgggtttaagtgattctcctgcttcagcctcctgagtagctgggattacaggcatacaccaccacacccagctcatttttgtatttttagtagagatggggtttcgccatgttagccaggctggtcccgaactcctgggcttaagtgatctgcccaattcagcctcctaaagtgctgggattacagacgtgaaccactgtacatggcctgttaggcctattctttttcgtggccatcttaccttgggccagagttagtactcgtgggataactccacatccatatgatagtgttggctgtgggaatgggtctgttcattgtgacctccagagtgggcacaatcagggtccaactttgttttgttatgtaatattttaagttcatgtgaattgaccctgggagttcaaaggagctgtgccagtttcagcaacgtttggtgactcagtcacagacattaaaatagatcttacaagatgcagttcctccaaaacatatttttataagcatttaaaaataaacctaggagtctaggagtgatttgctcttaacaggaagatgagttcaaatttgagaaataaaatttggatgttgggaaagagaacaaatctgcttatatagccagagagctatgcctctggatttgttgagggggaaagagtattgtctttgttctgaaagaagctctagcaaaccaaccattgatttcagattaacttcttgatcctgaaactgtaacttccctgtcttcccagctgctgttaatcatgttaattccattatactgcatgcctatttcaccagagctcagggatgcggttgaatagtccgtcctataatatttggacagcggatgtttcccagttggccagtgaggcttcttaagctgccatttggagatttaggtcagggcaactctgactacaccctttgatatttcttacagtttccagttggagcttccttcttttgctggtagagatttaggttaggcaagtgcattctgtttttttctgaagttccagtagggctttagcagggaagtaaaactattcagtaagtaattgcaaacaactgtatgtggaatccaacatgttgcccttaagagttaggtaattggctgggtatggtggctcatgcctgtagtcctagcactttgggaggctgaggcgggtggaacacctgacgtcaggagttcgagaccagcctagccaacatggtgaactaccatctctactaaaaatagaaacaaatttagccaggcatggtggtgcacgcctgtagtcccagctacttgggaggctgaggcaggagaattgcttgaaccc

SEQ ID NO: 10476 - DNA, 2300 bp, Homo sapien
tttcatggcatgtttactgtcaaagatagtagttctcaatcttgcctgtacattagaataactttattttttttaaaagttcccctgaagagagtgatttagtaggattcctgttgtcacatattcaatcaagaaatacttaattatggtttttggccgggcatggtggcttacacctgtaattctagcaccttgggaggctgaggtgggtggattgcctgagctcagcaggtcgagaccagcctgggcaacatggcacaaccccgtctctactaaaaatacaaaaattagccaggcatggtggcgcgtgcctgtagtcccagcttctcggaaggctggggcatgagtatcgcttgaacccaggaggcagaggttgcagtgagctgagattgtgccactgcattccagcccagggggacagaacaagacactgtctcaaaaagaaaagaaatactaaattatggtttttctctcatgcatcgctcagaatagggaagcagttgccttttagccaagggaagatgtagcccgttgctccttgcatgtggaagagagatatcgtgccttactttctttcttctgctttctgttggtttaggcttgttgtccctttctgtaaaaggggcagaggtggcatccatgacaatgaatgtgatccaaaccgtgcctaacttggactggctctctgtgtggatcaaagcgtatgcttttgtgcacactggtgacaactcaagagcaatcagtaccatctggtgagagccacaaagttaattcagtgttcttgaggccctttgcttgtctggaagtctgatgtatctgaagtagcaaaaagaaaaatgagatgctttgctgttggtgctgcagccagtctctgggatgtgttagtcttttatactgaatggtcccaaatgtaatcatgtaatcatctctgttggagacctgtaaaaatagaaatctgactgagtttagctctgtgcctgcacaggtagtaacccttgcaaagcaaagcaggctaccttggtgtgtcatttttttttttttttttgagacaaggtcggtctctctctctctctctctctctctctctctctctctctctctctctctgtctctctctctctctgtctctctctctctgtctctctctctctctgcctctctctctctctctgtctctctgtctctctctctctctctctctctgtctctctctctctctctctctctctctctctgtctctctgtctctctgtctctctctctctctctctctctcccaggctagagtgcagtggcgcagtcacagctcagtgtagccttgacctgtcaatctcccgggctcaaaccatcctcctgctcagcctcctgagtatctgggactacaggcgcatgccaccacacccagctaatttttgtatgtttttgtagagatgggatttcaccatgttgcccaagctggtcttgaattcctgggctcaagtgattctcccacgtgggcctcccaaagtgctgggattatagacgtgagccaccatgcctggccttggtgtatcattcttcagcctggaagaaaatcattttgcactcaccagaagcttggtttattgcagtgtctaacctagcttgcctgcttaggactagggattttctttatattcagataaagttcaaggacaagaagagacttgggcttgtgttatgcaaagtcgtttacttgagtaataaataggtgtcacttgtgaatgacattacctttaacaccatgtagcgtatgttgtgttctgaagaactgcaaccacagagttatttgttggtactgagagacttctgctttattctttgtttttgctatcctgtcctatataactttttttaaagtcataagcttaaagttttttattacgaagaattttatatttatgcaaaagaaaatagtatctgtatgaccaatcatccagattcagcaactaagaggatttataatagatttaaaggttcaatgtttaataaatatcttaaagttcactagagaaaaaatccttattgcgagataacgtggacctattgggaagcttggcagatctgtacttcagagctggagacaataaaaactctgtcctcaagtttgaacaggcacagatgttggatccttatctgataaaaggtaagtaattcttggggcaggaagacagtggctgttgttgggggggatcagagataatagggagaatatgcagcattaatactcgataccaagtttcatagaaatggtgtataaaacttatactagtcttttactt

SEQ ID NO: 10477 - DNA, 2300 bp, Homo sapien
tgtttttgtgggttttttttgttgttttttgagacggagtctcgctctgtctcccagtctggagtgcagtggcacgatctcggctcactgcaagctctgccttccgggttcacgtcattctccttcctcagcctcctgagtagctgggactacaggcgcccgccaccacgcccagctaattttttgtattttttagtagagacggggtttcactgtgttagccgggatggtctcaatctcctgacctcgtaatccacccacctcggcctcccaaagtgctgggattacaggcatgagccactgcgcccggccagaacttttagattttctcatttcccagttgcatgttaggtaggattattttaatttagctttacaaagttacatatttaaattacgctaaaatgcagctgtctgcactcactggatttaaatagtgtagctgatttttgtagcattactttagtgagttagtacctacgggccaaagccttaagtgttagaaaggctagagtctagccacaagtcgaattgtcaaagaaaagccaagtattatacttctttatctgtctttctgtatcatttccttattaggaaaaactgagctgatccttcttaactagctatgtcaagagtttctcactttcttatgtgagatagttcatcttctgttttaagatcaagaaagaatcaagttaactagcgttctctaccatttcttaaatgaatgttattccagtttccagagggcagcgtcttttgttcagatattactgggccttgtgggaaggtaatgtgactttcctcttagggaaggcaggagctagggaaaggaagggtagtaatttcttttcttttctttttttttttttttttttttaagatggagtctcactctgtagcccaggctggagtgcagtggcgtgatgtcggttcactgcaagctccgcctcccggtttcacaccattctcctgcctcagcctcccgagtagctgggactacaggctcccgccaccacgcccagctaatttttttgtattttttagtagagacggggtttcactgtgttagccgggatggtctcaatctcctgacctcgtgatccacccacctcggcctcccaaagtgctgggattacaggcgtgagccactgcacctggccaatttcttctttcttttgaagaatggggtcagtctgcctttatttgcacagggttgtgggtagattttccagtaaaaagtaaataactggtaatgaaaattaggactttttcatggtgagagattttctttgcaatatacgcttattttgctatctgttatttgtgtttgtacagataaacatgatgctggcaaacctgtacaagaaggctggtcaggagcgcccttcagtcaccagctataaggaggtgctgaggcagtgcccattagcccttgatgccattctaggtagagatatttcctgcctgttttcatggcatgtttactgtcaaagatagtagttctcaatcttgcctgtacattagaataactttattttttttaaaagttcccctgaagagagtgatttagtaggattcctgttgtcacatattcaatcaagaaatacttaattatggtttttggccgggcatggtggcttacacctgtaattctagcaccttgggaggctgaggtgggtggattgcctgagctcagcaggtcgagaccagcctgggcaacatggcacaaccccgtctctactaaaaatacaaaaattagccaggcatggtggcgcgtgcctgtagtcccagcttctcggaaggctggggcatgagtatcgcttgaacccaggaggcagaggttgcagtgagctgagattgtgccactgcattccagcccagggggacagaacaagacactgtctcaaaaagaaaagaaatactaaattatggtttttctctcatgcatcgctcagaatagggaagcagttgccttttagccaagggaagatgtagcccgttgctccttgcatgtggaagagagatatcgtgccttactttctttcttctgctttctgttggtttaggcttgttgtccctttctgtaaaaggggcagaggtggcatccatgacaatgaatgtgatccaaaccgtgcctaacttggactggctctctgtgtggatcaaagcgtatgcttttgtgcacactggtgacaactcaagagcaatcagtaccatctggtgagagccacaaagttaattcagtgttcttgaggccctttgcttgtctggaagtctgatgtatctgaagtagcaaa

SEQ ID NO: 10478 - DNA, 2300 bp, Homo sapien
cgcctggcctttctttagtatttgaagagctttcaggttttttcaaacttctttttgtgcattggtttttttttgttgttgttgagacggagtctggctctgtcgcccaggctggagtgcagtggcatgatctcggctcactacaggcctcctgggttcatgccagtctcctgcttcagcctcccaagtagctgggactacaggcgcctgccaccacgcctggctaattttttgtattttttagtagagatggggtttcaccgcgttagccaggatggtctcgatctcctgacctcgagatccgcccccctcagcctcccaaagtgctgggattacaggcgtaagccaccgcacccagcctgtgcagcctgtttttaaaaaggattcaaagtggtgaggtttctctgtacttcatcttaatatgagaatatggatagatatatctcagactgttaaaagggcctggtggccaggcatgatggctcacgcctgtaatcccagcactttgggaggccgacgcaggtagatcacttgaggtcgggagtttgagaccagcctggctaacatggcgaaaccccatgtctactaaaaaaaaaaacaaaaattagctgggtgtggtgccatgtgcctgtaatctcagctactcgggaggctgaggaaggagaatcacttgaacccgggaggtggaggttgcagtgagccgagatcgtgccactgcactccagcctgggtgacagagtgagaatctatttcaaaaaaaaaaaagaagctgggggagcttggattgaaagggaggaaaagatgtattacattttctcttgttttctagtgagttattctccccacctcagaagtaccagcttttggtgtatcatgcagattctctctttcatgataaggaatatcggaatgctgtgagtaagtataccatggctttacagcagaagaaagcgctaagtaaaacttcaaaagtgagaccttcaactggaaattctgcatctactccacaaagtcaggtaattggagatagaattgtgattttttttttttttttttgagaaagactccaagaatttagaacagggtccccaggccccagtgcctggtctgttaggaaccaggctgcacagcaggaggtgggtggagggctagtgaatattactgcctgagctccgcctcctgtcagatcagctgcggcattagattcttataggaacacaaaccctattgtgaactacacatgctaggatctaggttgtgtgttccttattataatctgactaatgcctgaagatctgaggtggaacagtttcatcctgaaaccaccccctcaccccccatctgtggaaaaattgtctttcatgaaactggtcccctggtgccaaaaaggttggggaccgctgatttagatgatagctgattagatgtagaagatgaggccagaagctgggcgcagtggctcacgcctgtaatcccagcactttgggaggcctaggcgggcggatcacgaggtcaggagattgaaaccatcctggctaacacggtgaaacgccgtctctactaaaaatacaaaaaattagccaggcatggtggtggatgcctgtagtcccagctacttgggaggctgaggcaggagacaccagcctgggtgacagaacgagactctgtctcaaaaaaaaaaaaagaagatgaggccaggcacagtggctcacacctgtaatccaagcacttccagaggcggaggtaggaggacttgaggtcaggagtttgagactagccttggcaacatagtgagacccctgtctttacaaaacggcatggtggcacatacctgtagtactcagaaggccaaggtgggaggatcgcttgagactaggagtctaagactgcagtaaatcatgtttgcaccactgcattgcagcctgggcaacagagcgagaccctgtctcaaaaaaaaaaaaaagaattgctgggtcatatgataactctatgtttaacgttttgaagaactgtcatattgttggaataacgtttcaaagaaatatttccattgtcttttagtgtcttccatctgaaattgaagtgaaatacaaaatggctgaatgttatacaatgctaaaacaagataaagatgccattgctatacttgatgggatcccttcaagacaaagaactcccaaagtaagttgaatgtttatgtgtttttctcctcagctctcctaaccctgctccctctctccatgttttctcatgcattaaggagtccgtgtgaacattttacccatgattctaattctcat

SEQ ID NO: 10479 - DNA, 2300 bp, Homo sapien
ccaattcttagttatttaatacctgtttttctccttctcttaattcagaccttgtgtctttcatttagtttctcaattcatacaaaactgcatccaggccatcaccaatcattctatacgacaaatgctccttttaacaaccccacaatattgtcccttaccacaaaatcttctttcagcttaatctctcccactctaggttcccacacaccacccccaatcccacttgaagcagccctgaaaaacatcgcccattatctctccataccacccccaaaaattttcgctgccgcaacactttacgactatttcgttttattcttcttgttaacgtaagaagacaggaatgtcaggcctctgaacccaagcctgcatgtgtacatccagatggcctgaagtaactgaagaatcacaaaagaagtgaaaagggccggttcctgccttaactgacccctgacctagcaactgatgttatctacagattatagaaagacattgtgaaacttcccggtctgtttcactctgaccaccggtgcatgtcatgtaccccctgcttactcaatcgatcacgactctctcacgcggacccccttagaattgtgagcccttaaaagggacaggaattgctcactcggggagctcggctcttgagacaggagccttgctgatgctcccagccgaatatactccttccttctttaacttggtgtctgaggagttttgcctatggctcgtgctgctaccatcctgcctgcacccaggtgaaacaaacagccttgttgctcacacaaagcctgtttggtggtctcttcacacggacgcacatgacagtggtggcaggcgcctgtaatcccagctactcgggaagctgaggcagggagaattccttgaacccgggtgacagaggttgcagtgagctgagattttgcactccagcctgggcgacaagagcaaaactccgtctcgaaaaaaagaaaaaagaaaagttcacagtgatgatgcccaccaaaatcaaatagaaggtctcacacatccaggaaactagagtaggggatgagatgggaaaaggatctacaggagcttcaactgtgacaaaatgttaagagctgaaaaagttgctgatgaagatacactgtgattttttcagagcattttttttgcatctactactgtaaaaatcaaatgaaaacaaaatctagaccaaaacgactgtctcctttaagaaaggagcgataggctagatctgagaggatgactgtggagaatattcggactctgactcaacgacctaaactgcctcattggctcagttacctccctggtccctgtatacatttgagtttgcgatccaacataattaaccagtcgatctgattccaagtcaaccatttaacaacctgagcacaaaatttaagcaggcagtttcttcccttgtgggaagggaatgacaacttcaactttatggattgttgtgagcgtcccaataacttgtgtaaaactttcctaaaacgttaagtgtgccagacacatactggtttatatgggtatcagctaattcctggatccagcctttatttccacggatctagggaataattttacatggggaaatatacccctcgaaccaaggagttcccccagggccgaagcctgacttggcaggaacacaaaacacctgaggaggggcgcggcggccctagcctggtgcgcatgcgccactgtaaaggccgttaggtctgtccctggcgcccgattagaatatttaattccagttggagcgtttttcctcaccttactgtattttatttcggtaaatacccacacattttaatttctgagaggcacaaattcctctcagactcattcaaattgaccgagtagtcttataaggtgccttttgtctcattgtaaatcctcagtaaagtttgcagtttaggatgataacgtgatttttgcgtaaaaataacaactcatttcacctgaaaaggaccacgacaggagcagggactcgagtttctttttattcgggcacttcagtagttacctcttgcttgggggtggtgccgcgtgtggacccgatggaccccggcgacgccgccattttggagtcttccctaaggatcctctaccggcttttcgagtcagtgctgccgccgctgcccgcggctttgcagagcaggatgaatgtgatagaccacgtgcgggacatggcggccgcggggctgcactccaacgtgcggctcctcagcagcttgttacttacaatgagtaataacaacccgtgagttgaggcgggtagc

SEQ ID NO: 10480 - DNA, 2300 bp, Homo sapien
aagcaaaatgtggccaagcgtggtggctcacacctacaatgccagcactttaggaggccgaggcaggtggatcacctgaggtcaggagttcaagaccaacctggccaacatggtgaaagcctgtctttactaaaaatacaaaaaattagctgggcgtggtggcgcgtgcctgtaatcgcagctacttgagaggctgaggtgggagaatcccttgaatccagaaggtggaggttgcagtgagccaggatcgcaccattgcactccagcctgggcaacagagtgagactccatctcaaaaaaaaaaaaaatgtgaggacctgtaagtatcggtggtagcttatgcctgggggccaggctagagggaagggtcgggtgtctaccccatggtccactcagggaggagcatgatgagtgggcaacatggggatgtgctgggctgcctggggaccttcctgtggcccttagaggatagatagtgtggaaacagcctgatctcccagggttgctaattcttagaaacttattgtcacatgggaggggaagaaagaagaggcagattttcagttgccctcttccttggtcctccctggtttagcttctagagagtatggtatgtgcctgtggagaaaaagtgaaggacccgattccagtgccttccccactggacactggggtttcaaagatgaatctgacaattccagtcctcgaggatttcactgtctcataggcagggctgacagaaattcagtaaatttacacaaatttactgaagttccgtggatgccagacactggggatagaacagggatgcacagtgcaggcagggccttgctcacgtggggctgccatgctgggcctgtgagactgaccatgaggaaggaaacctcagagagaggatggaaagaaaagcagaaaagaaatggagagtgattatggggctactttgggctctttgtcaaaaaagaccttgcctaaaaggtgctatttgcccagtcagctgaatgtgaaatcagatgtgggaacatggggtcctatttcaggctgggaactggcagaagaaatggctctcaggcagcaatgaacttgacttttaacataagaagttttctagtaataaataagttaaaactctgggctttcagtatgctccaagcatgtaagttctaagcattttacatgtaattcatttcatcctcacaaaactatgaggtaaatactgttactgccattttcaggtgaggaactgaagcacaggccagttaacttgctcaaaattacagagctagtatgtattggagctgcgattcaaacctggagtccagtgcccttcagtttctccatttttagatgcagtgcattgggttcattcattcactcaaatattgatgtttcctacataccgtcactgttacgggcgcaggtgacaaaacggacgaagtgctgcctttttggcattcacaagcactaagagtaaactaaatacaagaatcgtaagaactaagggaaaaagcgggagagaaggataaggcatggggctggagttgggtgaactgaaaatagaatgaacggagaatgcttcacaggaaaggtgattttttttttttttttttttttttttttttgagagagtcacactgtcatcccggctggagtgcagcggcgcgatcttggctcactgcaacctctgcctcctgggttcaagcgattctccggcctcagcctcccgagtagctgggatgctaccacgaccagctaatttttgtatttttagtagagacggggtttcaccatccaggctggtctcgaactcctgacctcaggtgatccacccgcctcgacctcccaaagtgctgggattacaggcgtgagccactatgcccggccctgaaaaggtgacatttgaaaaaaatacaaaagaggtgattgatctcagattctggaacctcaagacccatctccattctgggcgctgcctcacgctgcaccactcaaggcccctgcctagtgctctggcgcctccttcagatccgcgcggccgctgcaaccagaagcggaactgcaaggccggaagctccacgtccgcacccgccccttccgtttcgcttccgcctacctcgcccaggctgccagaccggaagcgctccgctgtacctggatcctgctcctctgggttgaaacccgggcgccgccaagatgccggtgagggttcgatccacggtgtggggagacagcggggattgcgaagagcagagagaaaccgtgtgtgtgccgagagaagcgggcggcggaaggcagagagg

SEQ ID NO: 10481 - DNA, 2300 bp, Homo sapien
agcgtgaggcagcgcccagaatggagatgggtcttgaggttccagaatctgagatcaatcacctcttttgtatttttttcaaatgtcaccttttcagggccgggcatagtggctcacgcctgtaatcccagcactttgggaggtcgaggcgggtggatcacctgaggtcaggagttcgagaccagcctggatggtgaaaccccgtctctactaaaaatacaaaaattagctggtcgtggtagcatcccagctactcgggaggctgaggccggagaatcgcttgaacccaggaggcagaggttgcagtgagccaagatcgcgccgctgcactccagccgggatgacagtgtgactctctcaaaaaaaaaaaaaaaaaaaaaaaaaaaaaatcacctttcctgtgaagcattctccgttcattctattttcagttcacccaactccagccccatgccttatccttctctcccgctttttcccttagttcttacgattcttgtatttagtttactcttagtgcttgtgaatgccaaaaaggcagcacttcgtccgttttgtcacctgcgcccgtaacagtgacggtatgtaggaaacatcaatatttgagtgaatgaatgaacccaatgcactgcatctaaaaatggagaaactgaagggcactggactccaggtttgaatcgcagctccaatacatactagctctgtaattttgagcaagttaactggcctgtgcttcagttcctcacctgaaaatggcagtaacagtatttacctcatagttttgtgaggatgaaatgaattacatgtaaaatgcttagaacttacatgcttggagcatactgaaagcccagagttttaacttatttattactagaaaacttcttatgttaaaagtcaagttcattgctgcctgagagccatttcttctgccagttcccagcctgaaataggaccccatgttcccacatctgatttcacattcagctgactgggcaaatagcaccttttaggcaaggtcttttttgacaaagagcccaaagtagccccataatcactctccatttcttttctgcttttctttccatcctctctctgaggtttccttcctcatggtcagtctcacaggcccagcatggcagccccacgtgagcaaggccctgcctgcactgtgcatccctgttctatccccagtgtctggcatccacggaacttcagtaaatttgtgtaaatttactgaatttctgtcagccctgcctatgagacagtgaaatcctcgaggactggaattgtcagattcatctttgaaaccccagtgtccagtggggaaggcactggaatcgggtccttcactttttctccacaggcacataccatactctctagaagctaaaccagggaggaccaaggaagagggcaactgaaaatctgcctcttctttcttcccctcccatgtgacaataagtttctaagaattagcaaccctgggagatcaggctgtttccacactatctatcctctaagggccacaggaaggtccccaggcagcccagcacatccccatgttgcccactcatcatgctcctccctgagtggaccatggggtagacacccgacccttccctctagcctggcccccaggcataagctaccaccgatacttacaggtcctcacattttttttttttttgagatggagtctcactctgttgcccaggctggagtgcaatggtgcgatcctggctcactgcaacctccaccttctggattcaagggattctcccacctcagcctctcaagtagctgcgattacaggcacgcgccaccacgcccagctaattttttgtatttttagtaaagacaggctttcaccatgttggccaggttggtcttgaactcctgacctcaggtgatccacctgcctcggcctcctaaagtgctggcattgtaggtgtgagccaccacgcttggccacattttgcttaattaaaatgaatcaaattagacactgcagtgtacttgttatctaggtccaagaatcattaaaaacctttgtttcttttatatatacacatacatatctcaaaacatagttatttttactttttaagttatataaataatatacattttcaatataggaaaatgggaagatacagataagcagtggtcttatatatatccttgcagctttttcccttcggacatacatattttgttacagtaattcctgcatctcaaaaataatacaaaaagtgaaaataagtttagaccagccttaaccttagctcaggtgctaattt

SEQ ID NO: 10482 - DNA, 2300 bp, Homo sapien
aggaatgtttctgatagtaagcatcaaaagcttataaagatacttgtttaatacaatcagcccaaaaattaaaatagactatagaaaaaacatccatcatgctgtcctctcagtgcctttacacatactgttgtctctgtctggaatgccctctccatacatcacacactgtatcttttttttttttgcaaagggtctcactgtcacccaggctggagtgcagtggcaccatcatagctcactgcagctttgacccaggctcaagcgattctccagccttagccccccgagtaggtgggactataggctctcgccaccatgcccagctaatttttgtatttttggtagagacagggcttcaccatggtgcccaggctgaccctgaactcctgggctcaagtgatctgctggcctcagcctcccaaagtgcgaggattacaggcttaagccaccacacctggccacatcacactgtatcttaattgacaggtcatctatttgtcttccccaaaagactacagactctgggtaagttaaaggccataggtatcttagttacatgtacatgtttttacccagaataagtcaacagcttagaacaatgtgtttgttaaagactgaggccacacaacacctccacagactctagtgtttccacacttcttcttttttttttttgcgacagtacctctgtcacccaggctggagtgcagtggcacgatcaccactcaccacagcctcaacctcctgggttcaggtaatcctcccacttcagcttcccgagaagctgggactagaggtacctgccaccaggcctggctaatttttgcatttttttgtagagacagagtttcgccgtgttgccaaggctggtcccaaactcctgggctcaggcgatccgtccacctccatctcccaaagtgataggattacagacgtgagccaccacgcctggctatgtttcccacacatatgttatttgatccatatcttcaccattctcactgtatttgaatgttcctaacattcccttaatatttgtttacaagaaaaaattttatccctactgtaaactgaaaaccacttatatttgacataacgtgaaattagacataaaattatataaaatctttaaatgttctatttttagctaaatacaggtgcctattaaaagctctgagactaagaactgctctctgaaaagacctggggattaaagaagtgctgaagatacacactagcaccgagcacaacttctcctaaatgcgaagttgagaactgaaagagaaatgaaaagggaacaatttccctaacacattatctgatgctccttaatgtggggtccatgtaccacctaccacctaaaagcaccttaaataccaaaagtccatgtcccaagttctgagaaacagtaattaatgagaccccactttaccctcctgggagcgagacagggccggattctggagttgagacaaaactggatttatatttttttgcggggcaaagaacttaattaacctttctgtatctcgttttctgtaaaatgagaaaaatgagatctctctcacagggttgttgtagaaataagcgaggcgtttcatctgctgcctggggcttaagtatacaataaatattaacaactaccattatttccctttcaaaacaacaacaaaaaagaacgtgaagccagacagcagaaatgagttgcgtggggtctcagggttcccagtacacacacccgccggctcactccctcaggacccaatctcccgccttccacgaactcctacttttctctccttgtccccgcagatcctcaccttcccgctgcccgcggggcccatgaccagctgcgcataccgaggcatgttggctcccggagccgcccgccacactcccttagccttcgcgcgacgcccactgagctccgggaaagtgaagtgcgaaccaatcgcaatccacattctttctacgcctccagttctaccacacctcctactacggggcagcccgcgggccaaatcccgtgagaaacgcgtcctgagaaaaaaggggaggggcgagggagaggatttgcgcgtgcgcaaaagtagttgatggaaatcggccgttgggatgctgtctaagcttggatacctgagtaataacggacaacagataaagctccgcatccttgcgccacgtgcttcggtccgtggtttgcgtgcagacgtttgacctgtatggtgaccctcgcgatttgcaaatgtgctgaggatctggaatactgaagtggaaggcacctcttgttttgggga

SEQ ID NO: 10483 - DNA, 2300 bp, Homo sapien
gagacaaaaaggacggccatgcgggcggatcacgaggtcaggagatcgagaccatcctggctaacacggtgaagccccgtctctactaaaaatacaaaaaagtagccgggcgtggtggcaggcgcttgtaatcccagctactccagaggctgagggaggagaatggcgtgaacccgggaggcggagcttgcagtgagctgagatggcaccactgcactccagcctgggcaacagaacgagactctgtctcaaaaaaaaaaaaacaaaaaggatggccatgggtgcaacaggggccctgactgcgggttgtactgaacggcaaacatatcgcagttcttgcttttagggaataaagtagggagaggaagaggaggtagagtctccagcagtgacttcaacagctcgctgtcttcactatctaggaaataggtgtaaaaacctgctcaaaacgaaatagatttgtgaaaaaaggaacttcagtgtgaagaaaatgtcaagatcaaggcacctcggatattcagtcattggtctcattggcgattagaaatcctcgtttgaggtcgggcgcaatggttcaccccgtaatcccagcaatttgggaggccgaggcgggcggctcacttgaggtcaggggttcgacacaagcctagccaacatggtgaaaccacctctctactaaaaatacaaaaattagccgggcgtggtggcaggcgcctgtaatcccagctactcgggaggctgaggcaggagaatcacttgaacctgggaggctgaggttgcagtgagctgagatcgcaccaccgcattccagcctaggcaacagagcgagactgtctcgctctcaaaaaacaagaaagaaaagaaaaaaaaagaaaaagaaatccccgtttgacaggaaggtggctcatgtcactagagggaaggaactggtttatgggcctggatgcccccagttgaaccgggggacatcttcctcctctgtccctcccgcctcgcctttcggtggacacacagtcctgtgccagacagcaaacgtcccagcagggctcgcagcgccccctcggggcagagagatgcacgcgggcgactgtcgcagtcacctcgtggccactgcaccaaacgctcctccgaagcttccctcagagaccctccctcaaccgcgaggcagtcctcccctctgccctctgtccacaacaaaactgctccccgcctctcacttgagggcaccggggccagcccccgagacgagaggtcggccgcagccctcctccacggggctcacgacccgggggcctcacgacccgggggccccatgctgccacccttaccccggggcccccaacctcacccgccgccgccaccctcggtcccggccacagcgggcggctctgcagaagagctacgctccgtccagtcggaccccggaccctggccgggcatctccgcggcgccgagaccgcgagccgtgtgcgggagcagctgtcccagcatccctcccccgacagcacgcgtgcgtcaggctgctggtattccggagaggcggctcggatgctggcttctcgcccctccgaagccgttcggacactgcccgaacagcttcgggagagcggggcgggcagatccgcgaccccggagttacggtgggggaggggcaggagcgctgcggtcgctgagcgtttgcacgtttgcacctctctgtggaagcagtgcgtcacaggagggaaatatacatgctccccaaaacaagaggtgccttccacttcagtattccagatcctcagcacatttgcaaatcgcgagggtcaccatacaggtcaaacgtctgcacgcaaaccacggaccgaagcacgtggcgcaaggatgcggagctttatctgttgtccgttattactcaggtatccaagcttagacagcatcccaacggccgatttccatcaactacttttgcgcacgcgcaaatcctctccctcgcccctccccttttttctcaggacgcgtttctcacgggatttggcccgcgggctgccccgtagtaggaggtgtggtagaactggaggcgtagaaagaatgtggattgcgattggttcgcacttcactttcccggagctcagtgggcgtcgcgcgaaggctaagggagtgtggcgggcggctccgggagccaacatgcctcggtatgcgcagctggtcatgggccccgcgggcagcgggaaggtgaggatctgcggggacaaggagagaaaagtaggagttcgtggaaggcgggagattgggtcctgagggagtgagccggcgggtgtgtg

SEQ ID NO: 10484 - DNA, 2300 bp, Homo sapien
attctacccttgctccttccagtttattctccaactagcaaccagcgtgatcctttttaagtaaagtaagatcacatcacttctctgctggcaaccctcctgtggcttcctttctcaaaggctgactttatagggcatgagggagttttgaaggagtgatagagctgctctgtatctttagtgtggcagtgcttacacagccgtgtgcatttgtcaaaacccatcatattatacatgaaaaagtaagattttactttgtgtaaattacgcctcaataaacctgactttaaagaaaaaaagtaaagagttctgggccgggtacggtggctcacgcctgtaatcccagcactttgggaggcctaggtgggtggatcatgaggtcaagagatcaagaccatcctggctgatacggtgaaaccccatctctactaaaaatacaaaaaaattagccaggtgtggtgctgggcgcctgtcgtcccagctacttgggaggctgaggcaggagaatggtgtgaacctgggaggcggagctagcagtgagctgagattgtgccactgcactccagcctgggcgacagagtgaaactctatctcaaaaagaaaaagtaaggagttctggagttcccattagttaataatgggatttttggcagatcacttcccctttctgatccttagtaaatatgactggaatggatgatttttaaaacccctgccagtgccaacattgtatggtgtagcataataaacctgattctagtttgaaaattttattttaggccgggtgcggtggctcacgcctgtaatcccagcactttgggaggccgaggcaggtggatcacgaggtcaggagatcgagaccatcctggctaacacggtgaacccctgtctccactaaaaatacaaaaaaaattagctgggcatggtggtgggcgcctgtagtcccagctactcgggaagctgaggcaggagaatggcgtgaacctgggaggcagagtttgcagtgagccgagatcgcgccactgcactccatcctgggcgacagagtgagactctgtctcaaaaaaaaaaaaaaaaaaatttatacatatagtatttctgggaatataagattttcatcaattaatcttggtttgtgttatttaatggggttccttaaaccaaactgaaggggcatactgtctttttattgtattttaaaaagagtttggataaatttaaaggtggcatggaggtgaaagacggggagatgaaaggacaaacaacctctttgcctgtttcatcatccataaagtggggatcataatagaaccttctaggattgtttgtattaattaagttgatatttgtaaaacccctacagtagtgcctggctcatactaagtactatgtaagtgttagctctcattattttaagctatctataaaagtattaaggctacattaagctataatttgaacacaccctaacttacatgccttaggtaaaggaaaatcacaagtttggggggaataattatttacagcatgcgcaaaagaacccatattctataggaataaacacaataaaggggttgcatgataaattccagtttatattgagtaagttatgttttaaaatatagatgcagccttggagaccaagaagaaataaaatatttataaatgtggggtgggcacagtggctcaggcctgtaatcctagcgctttgggaggccaaggcaggtggatcatttgaggttaggagtttgaaaccagcctggccaacatggtgagactccgtctctactaaaaatacaaaaaaattaggcgggcgtggtggcgggtgcctgtaatcccagctacttgggaggctgagacaggagaattgcttgaacctggcaggcggaggttacagtgagccaagatggtaccactgcactccagcctgggcaacatagcaacactctgtctcaaaaaaaaaaaaaaatgtataaatgtgtgtgttgtggggtactacatcaaaacatccataggagattgaatatttaaggaaactgatttttttaaacatcagtatctctaaaatacatattttcttacgtctttttcttatgttagaatctgaattatccagaacagaaagttgtgactgttggacagttcaaaattggtctgatccatggacatcaagttattccatggggagatatggccagcttagccctgttgcagaggcaatttgatgtggacattcttatctcgggacacacacacaaatttgaagcatttgagcatgaaaataaattctacattaatcc

SEQ ID NO: 10485 - DNA, 2300 bp, Homo sapien
gagctaagtgaagaaacttactctgtgcccagccttagtggaatgaagaagttgattgcagacaggggggatgaaaaaaaaagggtgaaacatgaccaatgttaaaagaaagcaacaaaaagaaaccaaaaaaaaaaaagagaacaaaaaacccataccaaatgagcaaacaattgttaatgatttctgagtgttatgaaagaaaatgttaaaaatcagctgtgctcaaaacaataccaaaataaatatttgctttatttttgaacatgacacacacactttttaataaatttgtcttgtcagtttctcctacttttcctaatcttgttctgtacatcgacttccatctctgttttccattctgtttagatttttataagattttataaaataatgaatttggatttctacaagacactgtggaaaatttatcatcagtaatagctgaaaggctaacattttctggattcttagggtttaattattcaagtatatggatgttaattatcttacattcaaaattctagtagctggaaaattatgctgcggctaggtgattttttgtagctgatgcaacacagcaccatgaatacattatcaagtgttgaacaaatcaactaaaggtgaagacaaaataataaaaacaaacacatttattcaggtaaaactggacctttcccacacttgaatttgctgcccacagactctggacactgtactgagtgttgaacgtctgtatcctttgccaaataaaatgcttttaatcatgaaagaactggctaatgctaaatttttcccagttctatttcatatgaaaaatgatgttccagtacaactaccctaaataagagggatcacttctcaaacaacttgagaaacattaatattttgaaaccatggcaagtaattatgtcttctcccatggataggtgtctcgaaattactgtaaacggattactttaaattggagtctgtttagaagcaaaaattaaaagtgagattaaagattttaaagaagcatgcaccataaatctctggctgccatgtctgtaagtccccctcttgaaaaggctgtttgtcatgcaatagtaataatcttaaaaatgcatagcttctttggtttccttgtaaaaataaaaaagaatgcaataaatgcctgtcagaggtagacgtccctttacagccaacctccatcaacacaaatatgaagataatcacagctccatttcaaacaattgattttttttttttttttgagcagcagcaagatttattgtgaagagcgaaagaacaaagcttacacagggtggaaggggacccgagtgggttgccccaaacaattgactttttaagagtcaaaggcacctttgaaaatatgattacaggccgggcgcggtggctcacgcctgtaaccccagcactttgggaggccgaggcgggtggatcatctgaggtcgggaggtagagaccagcctgaccaacatggtgaaaccccgtctctactaaaaatacaaaaatttagacgggcttggtggcgggcgcctgtaatcccagctactcgggaggctgaggcaggagctgaggcttgaacccgggcggcattgcagtgagccgagatcgcggcattgcactccagcctgggcgacagagcgagactccatctcaaaaagaaagaaagaaaatatgattacagctctgagtcctctctagtagaggcccccagtttttatgtaggaaggtctgaggggcaccaaactactgggggtgaaggggtgattgcttgaaggtggctgggggagactaggtaagtctccaacaccggcactctccccagaaaaatgtgtatattcacaaaaatttcccaacagtttcaatgagttcacacatcattaaggaatcctaccctaaagaggcgtagcaacccgtggaaagaaacagttccagcaattgcaagcgccaaatcccgccctctgagagcacacctgctcatctcaatggcagctagatgttatttcaggagcgaggagggtggtttattccctttccctagatggcaaagttaaacgggtacgaaattctgctcgctacttcctgttctgcattcgagaggccagcttccaccactacaccccaaccagcgggaggtgctttttgcgggaaacgagtaggaaccgtctggaaacggaggaccgtgcccctatccccggaacattcgaggtataggaccaaaggccttccctggctcgggcgtgcgtgtctcgtgacaggtcgggctgctagaggggcctttttaccccttg

SEQ ID NO: 10486 - DNA, 2300 bp, Homo sapien
tgaatacattatcaagtgttgaacaaatcaactaaaggtgaagacaaaataataaaaacaaacacatttattcaggtaaaactggacctttcccacacttgaatttgctgcccacagactctggacactgtactgagtgttgaacgtctgtatcctttgccaaataaaatgcttttaatcatgaaagaactggctaatgctaaatttttcccagttctatttcatatgaaaaatgatgttccagtacaactaccctaaataagagggatcacttctcaaacaacttgagaaacattaatattttgaaaccatggcaagtaattatgtcttctcccatggataggtgtctcgaaattactgtaaacggattactttaaattggagtctgtttagaagcaaaaattaaaagtgagattaaagattttaaagaagcatgcaccataaatctctggctgccatgtctgtaagtccccctcttgaaaaggctgtttgtcatgcaatagtaataatcttaaaaatgcatagcttctttggtttccttgtaaaaataaaaaagaatgcaataaatgcctgtcagaggtagacgtccctttacagccaacctccatcaacacaaatatgaagataatcacagctccatttcaaacaattgattttttttttttttttgagcagcagcaagatttattgtgaagagcgaaagaacaaagcttacacagggtggaaggggacccgagtgggttgccccaaacaattgactttttaagagtcaaaggcacctttgaaaatatgattacaggccgggcgcggtggctcacgcctgtaaccccagcactttgggaggccgaggcgggtggatcatctgaggtcgggaggtagagaccagcctgaccaacatggtgaaaccccgtctctactaaaaatacaaaaatttagacgggcttggtggcgggcgcctgtaatcccagctactcgggaggctgaggcaggagctgaggcttgaacccgggcggcattgcagtgagccgagatcgcggcattgcactccagcctgggcgacagagcgagactccatctcaaaaagaaagaaagaaaatatgattacagctctgagtcctctctagtagaggcccccagtttttatgtaggaaggtctgaggggcaccaaactactgggggtgaaggggtgattgcttgaaggtggctgggggagactaggtaagtctccaacaccggcactctccccagaaaaatgtgtatattcacaaaaatttcccaacagtttcaatgagttcacacatcattaaggaatcctaccctaaagaggcgtagcaacccgtggaaagaaacagttccagcaattgcaagcgccaaatcccgccctctgagagcacacctgctcatctcaatggcagctagatgttatttcaggagcgaggagggtggtttattccctttccctagatggcaaagttaaacgggtacgaaattctgctcgctacttcctgttctgcattcgagaggccagcttccaccactacaccccaaccagcgggaggtgctttttgcgggaaacgagtaggaaccgtctggaaacggaggaccgtgcccctatccccggaacattcgaggtataggaccaaaggccttccctggctcgggcgtgcgtgtctcgtgacaggtcgggctgctagaggggcctttttaccccttggatggcctctggccccttggggccgggatacgagacctaggccagccgcacccagaggtggccgctcccttccttccctagacctcttctgggcctttcccaggccagcgcctgggccctgacgccgaggcctccgggatttcccaattcctcgccctcggcctccccacggctcccaacaacgcagcaccccacccgagagccaggccttggtcgccgcaactgcagccctcaccatcctgtcaccgggctccgctcagtcaccaccaccgtcgccgccctcttcctcaggctcctcggcgacccgcccacttaaccgcaaccaatgagagcagagggagacagaaattgccgtacggaggcccgcacggacccttctccgccgtaaagccgtttgggaacttgtggaggcggggtggtagagtgcagagacgagatcgcgaagctttgaaaagcgcgggcaacatccgggcacctgggccgtcgagctgaggcgcgccttccgagcctgctttttagggcggatggcagccatgctgaagtgcgtgatgagcggcagtcaggtgaaaggtggagcggcctttgt

SEQ ID NO: 10487 - DNA, 2300 bp, Homo sapien
aagtgctgggattacaggcgtgagccatcgcgcccggcctcaatttttaaatgttggaaattatttcaaattaaaaaaaaaaaaaaacagtgcaggccaacaaacattcctgcagaccgtagctagtctcttaactaccagtttgtgacttccagtttaaatcaatcaagcttatctgcatattttcaactttaccatgctctaagtgtattcagatatgtaaaataaagataaacagtgaaagggataattacaatttctggatttcctagttaacattcaatctggactgggatctttaaacatctcctcttgccttgatacgtgatctgttaactttcttacttacaccttttttagatgggtctagccagaactcgtcactaattcgtgatagagcttgaactgctttcccaaatactatggagaaaaagaaaggtgatgcttatattctttccctctaacaataaaaacaaatcacaagactagttcagcattcagaggactcaagagaaattcaaaaataacagtatcttacagactaatgctacattactttaatacagtataatacccttggcaaaatgccagacacatagtcagggctcaataaatttgtagtgtgtgaaatgataaaattgaccgaaatttgtccttctatatgtttacagtgttgcatggagctactgtgcaaaccaatttccatactaatgtattttacaacttgatttagataaatgtatttgaccccccaaaaactgtgaaaacagtgcatggagaagataatctgaagtggttttaatagcttgatagccaagtcacaacaagtcatgagagagaaattaggggtatccaacatacatctctgatgtttgagggcagccagatttccccaccacagaacacatttagggctggaaaacacactagtctgatcccgtacgacattgttaatgttctttttattttttattttttttgagacagagtctcactctgacactcaggctggagtgcagtggcacgagctcaactcactgcagcctcaacctcccgggctcaatcgatcctctcgcctcagccttccaagtagcttgggattacaggcgcccaccactaagcccggctaatttttgtatgtttagtagagacggggtttcatcatgttggtcagggtggtctcgaactcccgacctaaggtgatccacccgccttggcctcccaaagtgctaggattacaggcgtgagccactgcacccggcctaacttccattttgaaagcgccgtttacaacactaatagttcttgtacattccatctattactgggctctttacacgcatttccatttcattgcctccaaacaaactctgtgacgaaggtgctgtcattacccctgtttccgttttagaaactgagccccaaagagatttagtgacttttccaagttcatacatttttaaaaatggtagaatctggggaaaaaaaaaaccaggttaatgctgttctcttggcacaaaaatacttttactgtccaagcattatttttttctctcaactcttccccatgcagtcctcagcatcccgagtttgtggcccgatggtacaactctatttcccggataccacccatattacatctgcctctaagtcacacgagatgggtcctcatcctcccctcagaagttaacagggacttgagtgggtggggctgtggccagggcgtgcgtcctcagtcattgcgcaaaaaggcaaagaggaaaaattagacaatggtagggacgacctattaacgtctgcttttctctctgctaaatgggaagacaacaaaggccgctccacctttcacctgactgccgctcatcacgcacttcagcatggctgccatccgccctaaaaagcaggctcggaaggcgcgcctcagctcgacggcccaggtgcccggatgttgcccgcgcttttcaaagcttcgcgatctcgtctctgcactctaccaccccgcctccacaagttcccaaacggctttacggcggagaagggtccgtgcgggcctccgtacggcaatttctgtctccctctgctctcattggttgcggttaagtgggcgggtcgccgaggagcctgaggaagagggcggcgacggtggtggtgactgagcggagcccggtgacaggatggtgagggctgcagttgcggcgaccaaggcctggctctcgggtggggtgctgcgttgttgggagccgtggggaggccgagggcgaggaattgggaaatcccggaggcctcggcgtcagggccca

SEQ ID NO: 10488 - DNA, 2300 bp, Homo sapien
gcctcggcaacatggagaaaccttgtctctaccaaaaatacaaaaattagccaggtgtggtagagtgcgcctctagtcccagctactggggaggttgagatgggaggatcacttgagcccaggagttggaggttgcagtgagttgagatcacaccacaacagtctagccttggcaacaggttgagaccctgtcaaaaaaaaaagaaagagagaaaggaagaaggagggaaggaagagagaagaggagagaaaagaaaagaaaagaattaacaaaccagatgttgaaatctgtcaaaagtcctgtttagaaatatcagtcctggatggagggtactgaaagagagtaatagagatatgatctgtagtctgcaatcactattttacacgcaatttaagaaactacctgtattttggagatttcttaaaaaactaaaaatagaagtaccacatgatccagcaatcccactactgagtctttatccaaaggaaaaaaaaatatatcaaagaaatacctacatccctgtgtttattgcagcaccatttataatagcaaagttacggaatcaagctaagtgtctattagtggactaatggataaagaaaatgtagtatatatacacaatggaatactatttggccataaaaataatgaaatcttgtcatttgcagcaacgtggatggaactagaggtcactatgttaagtgaaataagccaggcatggaaagtcaagtattgcatgttctcacaatgtggacgctaaaaagttgatctcatggaggtagagagtagaatggtagataccagaggctggtaatggtgtgtgggtgagtatgaagagaggttggtcagtaggtacaaacatacagttaggtagaaggaataagttctaatgtggggtagcagagtagggtgactataagttagcagcggtgtattctgtgtttcaacgtagctaaaagagaggacttaaaatgttcttaacacatagaaatgataaatacttgaggtgatggacaccccaaatatcctggcttgataattacacagtctgtgcatgtaacaaaatatctgtcacatgtaccccatacattttttcttttttttttgagacagagtctcgctctgttgtcaggctggagtgcagtggcacgatctcggctcactgcaacctccacctcctgggttcaagtgattctcctgcctcagcctcccaagtagctgggattacaggcgcatgccaccacgcccggctagttttttatattttagtagagacggagtttcaccatgttggccaggattgtgtctatctcctgacctcatgatccgcccgcctcagcctcccaaagtgctgggattacatgcgtgagccaccgtgcctggccttttttttttttttctttttgagacagagtctcactctgtcacccaggctggagtgtacagtggcacaatcttggctcatggcaacctctgcttcccaggttcaagtgattcttgtgcctcagcctcccaggtagctgggattacaggcatgcaccaccatgcccgactgatttttgtatttttagtagagacagggttatgccatgttgaccaggctggttttgaactcctggcctcaagcgatccacctgccttggcctcccaaagtgctgggattacaggcatgaaccaccgtgcctggccacatgtaccccataaatattttaaaataccatgtatcaataaaaatatattaacaaaagaagaacaagaagaagaaggaaactgcttgtatttcaaaggagtctgggaactctcctgcctgattggtcagaaggtatgacatattgcttggtgtccactagggagcgataaacacatttaattaaggaatagtgcttctccaaggtatatgcacttgccagatagtaaatgttactttattactttaatttggctgtgaaacttaaagacttctttaatttgttagttttgtacttaaaattattaagaggtggctttattctttttaaggtattaaaagaactcataatatatgttttcaagaaagtcagcctttgcaagttatttttgacaagaatgtttgtactaatacgctaatgattcaaccaaggtaatgagttctctgttgtcagtttttttcacctgaatacagtatgatcatggagtgaagaatcaatgccctagagcttttcagtcggcacattttttttttttttatatggagtctcgctgtgtcgcccaggctggagtgcagtggcgcgatcttggctcattgccagctccgcctcct

SEQ ID NO: 10489 - DNA, 2300 bp, Homo sapien
tgagccctcaatctggagtattcccattcttctcatttgcctcagcttactgaaaaacccttctcttaaggcctgacgttgtgcccctacaatctcatgcgtttttttttttttttttgagacggagtcttgctctgtcacccaggctggagtgcagtgccgcgatctcggctcactgcaagctccgcctcccgggttcacgtcattctcctgcctcagcctcctgagtagctgggactacaggcgcctgccaccacgcccggctaattttttgtatttttagtagagatggggtttcaccatgttagccaggatggtctcgatctcctgacctcgtgatccgcccacctcggcctcccaaagtgctgggattacaggcgtgagccaccacgcctggccctcatgcatattctttcacaccagtcctgtgcatgtttgccttccccacaggactatgaaacatcagggttgaagtctgttttgttcattggtctttaaaacaactgtcagggactaataggaagcaaccaataaacaatgaattcagctgaccacactgaaaagttagaacaccaatatctggtatacaaactttcagccaaaaactccaaagggattgaacctagtaatggatcctagcgtttcacaaggtgtcattccctgggtcagaactcgctacaagatgttcctctaacaggccattcaaagagaaggctgccaggcaaggtggctcaagcctgtagtctcaactacttgagaggctgaggcagaaggatggcttcagtccgggaggtcgaggctgcagtgcactacaactacacctgtgtagagaatagctactgcactccagcctgggcaacacagcaagaccctgtccccgcccccccccctcaaaaaaagccaggtgcagtggctcacgcctgtaatcccaacactttgggtggccaaggtggacagatcacttgaggtctggagttcaagaccagcctggccaacatggtgaaaccccatctctactaaaaatacaaaaattagccgggcatggtggcgggcacctgtaatcccagctacacggaaggctaaggaaggagaattgcttgaacccaggaggcggaggttgaagtgagcggagatcacaccactgccctccagcctgggcgacagagtgagactctgtctcaaaaaataaaaagtaaaaataaataaaaataaaaaaagagaaagagagggctgagctgatggaaagagcattaaagaaaagtctggagataacactgctcccaactttctttgccactaactggacctaagacactggtcagatcgtttctctaagctttagtttcctcatctgtgaaatgaggggcaggaagacacagtctctctagagtccctttctcggatccaagactgtgggacttataagtcacactgcaggaaaaaaagagccagtttaagaaactttataaacaaaggctaacaaataaggctatcctgtcttcattcacttaggaaaagaaaacaaaacaaatagggctatactttgcatttcacatacaatattacatttactgcatgaactagttttgaaacaaagccttcatttctggcttcccaatttatctcttgtccttattgcactgccacatgtatatttccagtgaagtttcaataatgatttagagagtggaaacagtgccccttgtcctttcactttagttttaaacacctaactaaaatgttggcaaagtttttcttaaagccactaacaaacacctcaaccacttttcaatctgaaatcctaataaaagaataaaagatgatggccaagcacaagatcctggaacaacaacaacaacaacaaagatggttataaattagtatttgtggggaaaagcaagagagatcagattgttactgtgtctgtgtagaaagaagtagacatgggagactccattttgttatgtactaagaaaaattcttctgccttgagattctgttaatctataaccttacccccaaccccatgctctctgaaacgtgtgctgtgtcaactcagagttgaatggattaagggcggtgcaggatgtgctttgttaaacagatgcttgaaggcagcatgctccttaagagtcatcaccactccctaatctcaagtacccagggacacaaaaactgcggaaggccgcagggacctctgcctaggaaagctaggtattgtccaaggtttctccccatgtgatagtctgaaatatggcctcgtgggaagggaaagacctgaccgtcccccagcccgacac

SEQ ID NO: 10490 - DNA, 2300 bp, Homo sapien
aactcacttgcaggaaattcatttgccggaaactcaaggcactggtatcacttaatcatgaaaacagcagccccatcggagcagaagttactggctttagagtcacattttaggttcctactcatcccatcaaaccagttcttgtgactgacatggaaattaggtaatatatgccctgaaaaggaaaagtaggagcagtctgaaggagtttgacgaggcaagaaatagggttgacatgctattttaaaaagtttgtccttggggtagaattacctgccagactgactgggatctggtagtggtatgtgtacttgaaagagctacctttagcacagctggcagcaatataaatgccaagtagaggattccgagaggcactaccccctcttctgggcactctccaattcttgtgccattaaaaaaaaggaaggtgtgaatgcattattgtcattactataccatttatccagtaaatgaacattttctgggttctgtatatttgacaaaatgccactacgtgaagtcatttcttccgtccaattttgatgaaagctcttaaagacagaaacatatatatagacagtacttggcacactgtgaactgcaaaagtgtttaatgatgacagtaattaggataacggaataatatgtgttgagttgatagttggcagcattttaaatatattaagaaagcataaaaaaggaccatttaaaaacgaggtgggaatccccaaagtaacaatggtcttgttaaaagtgaactagaaaaagactgctgtttctgagaaatatatgtttcaatcaaactaaaaattactctaaattgaattacttgccccaaagctcattttctgttgtttgtgaaccccattcactcaatcattcctgtattcaacaaacatgactttcttttatcatttgtgttcttattccattactccttcctttttttttttttgagatggagtccagctctgtctcccaggctggaatgcagtggcgctgtctcggctcactgcaacctctgcctcccaggttcaagcgattctcctgtctcagcctcctgagtagctggcattacaatcgtttgtcaccaagcccagctaatttttttttgtattttcagtagagaccatgttggccaggctggtgttgaactcctgacctcaagtgatctgcccacctcggccttccaaagtgctgggattacaggtgtgagccaccacgcccagcccattattccttcttttattccacagacatttacacactctcctactgtgtgccaggcattgctttagattctaataattgagcagcaaatgatccttgtccttgggaaacttagaatctagtgaaatattcattcattctttcattcattcacatatttactgggtgctcacgtgttctggggatacagcaacagaaaacacaggaccctcaggtaaacgaattacattccaaagggtagaagcgaaagcaagggcaaaggtcttgagacagctgtgagcatggctagaggccagttagcaaaagggacatgacaccatctgtgtcccctcccactctgatagggacacataacattttctcaatttttcctaaaagactacaaaaagtctcttctttccaaacagtttgccgccctaaatccttccagtatattacttggggaggtgtcactagatctgtgtacctctgtttctcattatgtgactccattctggtttcttgcaggtttttgtttaaaggaatggtggcgttatttatttaaaacaggctttaaaagatacggttaaaacagggtagaaaaccctcacgtggcccacctgcaattcctactaacttaacataggtcccgcgtctgaggaatccccctaggtcctaaatctttggcagccaagtcaaaagtgactacgactccgggactataattcccaagagacactgcgtccgcaccctctgcgcatgttcaaccttggtgactgcataaggcagcgagcccaaggggctgggcttgggcctgagcggtgaatcggggcggggctaggggcagggccagggagggggcggtgctgccggcaccgcccggaacacgctagtggagcggaagatggcggcggcggcggcggccgctgcagccgggacttcagttgggctgaggcggaggagccgccgcttctgacctcgctctggctccggtgcgcgcggctgagcgcgtgcgaggccccgcgcgtcgggcaggggcggcggcggccactgcgcgccgccctgaggagcgccccagcggcggcgcg

SEQ ID NO: 10491 - DNA, 2300 bp, Homo sapien
aaagacggggtttcaccatgttggccagggtggtcttgatctcttgacctcgtgatccacccgcctcagcctcccaaagtgctgggattacaggcgtgagccaccatgcccggcctacttttggttattttttttaaaaggggaagcatttaatcagttattaaaagcagtccagaatttcagtcagatgctaaagcaatcctttgcagaaaaaaagaagtatctgtcttacacatttgagtgattcaattatatttttatacactgtctctggaatgccacaggaaggtgctaaagatatcactttgatgatttagttttgctaaatacatttaataaactagatatatatactgtttgacatccttttgaattggtatatacatttcttgaataaatactgtgttatgtttaaggtttttttgttttggagtgcagtggcactatcatggcttactgcagcctcaagctctccagactgaggcgatccttccacctcagcctcctgagtagctgggactacaggaatgtgccaccatacctggctaatttttgtattttttgtagagatgtggtttcaccatgttgcccaggctggtctcaactcctggactcaagcgatcctcccaaagggctgggagtacaggtgtgagccactgtgcctggccacgtctaagtacttcgacatctacttctgaactgtatggagattaagtgtcaaaggtgcagccaacattcttgggcttgggtacctcctaaataagcccattcagaatggagagggtttcctaaatcgtagggtctccaggtcgttttgtagcattacagtggatttgctttgttttcccctttaagatgtctaaattattttacttaatttttgtaaaagatttttgtctttaaataggttcttaggcctggcgtggtggctcatgcctgtaatcctagctctttgggaggctgaggcgggaggatcacttgaggccaggagtttgtgactagcctgatcaacatagtgagaccccctctctacaaaaaataataaaaggtattaagtgttcatttgtcccctttatcacaatacagcagacagaagttatctggcaaccttgtgagatgcagctaaaataaaaaggtgaagccagtgttgacagagtctgggatagagaaaattcagagacagtgatctcacagatccctgtgctccttccaaacacccacgttagtggcgttgggacggcgcttcctaaatttccgtccaactcatctgcttgcgtccggacatttgttaaaaatatttattcctggctgggagtggtggctcacgcctgtaatcccaactactcaggactcaggaggctggagcaggtggatcacttgaaccaggagttcgataccagtccgggcgacggagggagacctcgtctttacaaaaaaaaaaaaaaaaaaaaaaaaatacaaaaattagctgggtatggtggcgcgcgcctgagttcccagctactcaggaggctgaagtgggaggattgcttgagtcccagaggtcgaggctgcagtgagccgagatcgcgctactgcactccagcctgggcgacagagtgagaccctgtctcaaaaaaaatcccccaaaaactgattcctgggtcctgccctagactaactgactcaggatctcctgaggtggtacctggaaatccgtcttttttttttttttttttttttttggttgagacagagtgtcacactgtcgcccaggctggagtgcagtggcacgctcacggctctctgtagccttcacctcccgggttcaagcgattcttctgcctcagcctcccgagtagctggaactacagaaaatctgcattttttaagcaagcgccgcggaccggttggaaaccacagccgggatttacacgcccctcgtttacgccagcttcacacccgctcactagtgctcgcccctgtgcctgccatcgctgcctcacccaggcgccgccctccggcctcatccgggatccgccccctgcctcatccaggcttcgccccagtcagtctccggcagcttctcgcggcttcgcaagccccttcccgtgatgccccgcgcctggctgtcgcggttgccgggcaacgcgctgtccatgtcgcgggcctcgctgggactccctgggagatgaggccgcgaggtctcccgccgctcctggtggtgctcctgggctgctgggcctccgtgagcgcccagaccgatgccaccccggcggtgacgacagagggcctcaactccaccgaggcagccctggcca

SEQ ID NO: 10492 - DNA, 2300 bp, Homo sapien
tagtgaacagagggctttgtgtagcctgtgcatttgtaatgaaaccaagcattctccttgtatcttttttccttttgggaaaagattcccttccacattagcttgttcttttacagtatgatgtactcctacacctggcagatgtatttatagttctgagtagggagggagaaattcttttattggttggtaattccatattttattatgaaagaagaatttttcttcctgccatttccttattaaaatgagaattatttgggggcatttctgcattgtctttcaggaaaatacccagccagtccctctcagtggaaaccctggttatgtcgtggggctcccattagctgctggattccagcctcataagggatatcctttttggttctgtagagggtggatttatttctctctccatgtgcgtgggctgcactgctctttatcgctgaggctcccctgggctgcttgtgggaaggagagagcagtccaggccgagcttcctgcaggcggctctggtgggcggccagtctggctacacagcaggtgggctggggggagactggcagttgggggtgagacagcacgtcctgggaaaatgtcagtgttttttttttttaatctccttttttttttcagcctgccattaagccacaaaatatgtcagtgttttacaacgaaaatcttaagagagaaaagttgacatttaaatgtttttaatttcacatttaaacagacactcctaaacagatgtagtgattttgaaaatttagaatttcaaagggccagtttctgagaatttttcttctgagaatccatttattaaggaaaatagaactgtttttttgcctgctcctgggaaatagctgtcaaaatcccagaggcccagaaaaagtgtatttgggtctccctcatgtcacacaagtgacactgtcttcttacctgagaaccaggctgctctagcactaggcagttgtcccttaactgtctgtgaatgtctgggattattcagaccacaaatagatatggacagcttactattcttcatagcacaactgagcaagactgcttagcactggagggggtccggaccccagtattatttggttacactatgcaatctggctgtaaactaaggtaaaagagtcacttgtttctgtttgaacttgtgctgatcagaaaacaaagcattctcacttttccccattttaatcaaatctctgcatcagctgatgagctcacatgaaagccacatatagtatatcatcatgcatgaatagtagcaaaactgttacaatcatttttgttattaaatacggcaaagcaaaaatttcaaggctttgtatgtttctttttctttttttaagagatggggtctcgctctgtctcctaggctggagtacagtggtgccattatagctcactgcagccctgacctcctgggctcaagggatcccgcctcagtctcccaagtagttgggactacaggcatgcaccaccacatccggctttttttttttttgagacaaagtctccctctgtcacccagtctggagtgcagtggtataatctcaactcactgcaacctctgcctctgggttcaagcaattctcctgcctcagcctcctgagtagctgggactacaggcatgtggcaacatgcccagctaaattttgtatttttagtagagacggggtttcaccatgttggccaggctggtctcaaactcctgacctcaggtgatctgcctgccttggcctcccaaggtgctgggattacaggtgtgagccaccatgcctggcctaatatttttgaatttttttttttttttgtagagacaggatctcactatgttgcccaggctgatgttgaactcctgggctcaagcagtcctcccatctcagcctcctaaagtgctgggattacaggtgtgagccactgtgcctggcctgtatgtttcatttttaaggttgtttagcatttgagttcacagcaaaaatatttcccctgacaatatttcctgtgtttctcaattttaatatacacagcacatcaaaaccagtgagaggaagcctgaatatgatctgtttttatcttatcaaatatgtacataatgtaaaatatcaaacagcgctgcgcagcttgttataaaaatagttcttaccctcatttgccccaccttggaggcaaccactttcaactcttgtagctgtttttttcaaattctacccccaaatcttgaaataacctgcatataatgctacttcttgatttttttggttttatgaattttttattgtttc

SEQ ID NO: 10493 - DNA, 2300 bp, Homo sapien
cgcctgtagtcccagctactcaggaggctggggcaggagaatggcatgaacctgggaggcggagcttgcagtgagccgaggtcgcgccactgcactccagcctgggtgacagagcgcgactccacctcaaaaagaaaaaagaaagcctgctgcagtccaggcatggtgtttcacgcctgtaatcccagcactttgggaggccgaggcaggcggatcacttgaggtcagaagttcgagaccagcctgaccagcatggagaaaccctgtctctactaaaaaaacaaaaattagccaggcgtggtggcaggcacctgtaatcccagctactcaggaagctgaggcaggagaattgcttgaactcaggaggcagaggttgcactgagccaagatcatgccattgcaccccagcctgggccacagagtgagactgttgccgggtggagtggctcacacctgtaatcccagcaccttcggaggccaaggcaggcagatcacttgaggtcaggagttcgagaccagtctgacccacatggtaaaaccccgtctctactaaaaatacaaaaattagtcaggcatggtgatgctggcctgtaatcatagctactcgggaggcttgaggcaggagaattgcttgaacccaggaggcggaggttgcagtaagccaagatcgcaccactgcactccaggctggacgacagtgagactccgttccaaaaaaaagaaaaaagaaaagaaagccagctgcccagcagaattggggaaagccgagtcagttgaagcagacaatacccctatgggaggcagaagaatgcacccccctaccaagatatccacatcctaacccctccaaacctgtatgttgccttaagtggcaaaggggactttgcacatgtggctatgtgaaggatcctgagctggagagattagcctggattatccaggtggatcccatataatcacagggctccttagaagggagaagacgctgtgaccatggaggcagaggtcggattgagacagccaaggatcacaggcacctctccagccgggaaaagcaaggaacacactaccctggcgcctccagaaggcacagccccacccacaccttgattctggccctgtaggacccatctgagacttctggcctccagggctgtaagataacacatttgtgttaagccactaggtttgtggtgatctgttaacagcggcatgaggaaactaacacaaccccaaggaggtgagcctctccccacagccccgactcaaccggaagggagaggtgtgcagaagacggctttgcaggatgtttgggacaaatggtctctgggggaagacagaagctaacagaactgattcgactgtgtgaacagggtgctgggagggcccacaggggagggacttcagagctgggcctgcgcctgcggggccgtacgagttggcccggagcaaggcggcccaggacaggcaggggctgcacgcggtaaggctccctcttgccagtaccatcccatgagcagcctcagagccctcgaccaagggaagttctgagggctgagaggttgctcattcgtcagagcgtgctgcccaccctccacccctgcatggcagaaactgtgcaggggacgaggccaaggaatcaggagacccagaggcaggggtggcccggagacggtgggatggagcagaagctccccgaaaggggttggcggggtggattcgccccgctccagccggcggaggaaggaagtggttcccccgcccacccttcccttaggctggcccggggcaggatttttgtgatccgcgattcgctcccacgggcgggacctttgtaactgcgggaggcccaggacaggcccaccctgcggggcgggaggcagccggggtgagggaggtagggacgaacgggtggactgaccacaggcagggacaaggggactaagacccgggccgaggcctagaagcccgccgaccgttgggggtctgcgggctgtgggggcggggacgggggcgggggcggcccgggcgggggcggggcctggtacggtacggggcgggacgggctgggccggacctgctctgaggctcccagtcgcagcggtgaccgcgggcgggtggggcgccgggtaagtgctcgggccgggcggggggcgtaccccgtttggcgtgcagccctttctacaagacccccagtgcccgatccttccgagaagaggggacccccccccgcatctccgctgtccaggcctcgccgtggagccccagcaggaccccagccctcggttgccctcggctct

SEQ ID NO: 10494 - DNA, 2300 bp, Homo sapien
gccctgggggaggaggagaatttttaataaaatataaggaagttgaagttgaaaatggaccagactatgccttagaaactggcatggggctgttgtaataatacatgactgagaagtcaggagatctgaccaaaatgtttttaagaaagccttctggccagacgcggtggctcacgcctgtaatcccagcactttgggaggccgaggaggacggagcacgaggtcaggagatcgagaccatcctggttaacacggtgaaaccccgtctctactaaaaatacaaaacatttaaccgagcgtggtggcgggcgcctgtagtcccagctactcaggaggctggggcaggagaatggcatgaacctgggaggcggagcttgcagtgagccgaggtcgcgccactgcactccagcctgggtgacagagcgcgactccacctcaaaaagaaaaaagaaagcctgctgcagtccaggcatggtgtttcacgcctgtaatcccagcactttgggaggccgaggcaggcggatcacttgaggtcagaagttcgagaccagcctgaccagcatggagaaaccctgtctctactaaaaaaacaaaaattagccaggcgtggtggcaggcacctgtaatcccagctactcaggaagctgaggcaggagaattgcttgaactcaggaggcagaggttgcactgagccaagatcatgccattgcaccccagcctgggccacagagtgagactgttgccgggtggagtggctcacacctgtaatcccagcaccttcggaggccaaggcaggcagatcacttgaggtcaggagttcgagaccagtctgacccacatggtaaaaccccgtctctactaaaaatacaaaaattagtcaggcatggtgatgctggcctgtaatcatagctactcgggaggcttgaggcaggagaattgcttgaacccaggaggcggaggttgcagtaagccaagatcgcaccactgcactccaggctggacgacagtgagactccgttccaaaaaaaagaaaaaagaaaagaaagccagctgcccagcagaattggggaaagccgagtcagttgaagcagacaatacccctatgggaggcagaagaatgcacccccctaccaagatatccacatcctaacccctccaaacctgtatgttgccttaagtggcaaaggggactttgcacatgtggctatgtgaaggatcctgagctggagagattagcctggattatccaggtggatcccatataatcacagggctccttagaagggagaagacgctgtgaccatggaggcagaggtcggattgagacagccaaggatcacaggcacctctccagccgggaaaagcaaggaacacactaccctggcgcctccagaaggcacagccccacccacaccttgattctggccctgtaggacccatctgagacttctggcctccagggctgtaagataacacatttgtgttaagccactaggtttgtggtgatctgttaacagcggcatgaggaaactaacacaaccccaaggaggtgagcctctccccacagccccgactcaaccggaagggagaggtgtgcagaagacggctttgcaggatgtttgggacaaatggtctctgggggaagacagaagctaacagaactgattcgactgtgtgaacagggtgctgggagggcccacaggggagggacttcagagctgggcctgcgcctgcggggccgtacgagttggcccggagcaaggcggcccaggacaggcaggggctgcacgcggtaaggctccctcttgccagtaccatcccatgagcagcctcagagccctcgaccaagggaagttctgagggctgagaggttgctcattcgtcagagcgtgctgcccaccctccacccctgcatggcagaaactgtgcaggggacgaggccaaggaatcaggagacccagaggcaggggtggcccggagacggtgggatggagcagaagctccccgaaaggggttggcggggtggattcgccccgctccagccggcggaggaaggaagtggttcccccgcccacccttcccttaggctggcccggggcaggatttttgtgatccgcgattcgctcccacgggcgggacctttgtaactgcgggaggcccaggacaggcccaccctgcggggcgggaggcagccggggtgagggaggtagggacgaacgggtggactgaccacaggcagggacaaggggactaagacccgggccgaggcctagaagcccgccgaccgttgggggtctgcg

SEQ ID NO: 10495 - DNA, 2300 bp, Homo sapien
tgcaccgtggagcagaggcaagtacccagggagaagactgagcgatgcctctgtaggggaagggatgggggaaggtagccaggggatcaagccaggccagggtttgagccttgccttgccttagcagggtctgttgaggtcaccacctgtctgcactaagggtctaactacaggcaagaccagatgttaagacagagggctgcaacttccaggtgtgcaactaggggacggggtacttgttcccttttcccttcctcaaccagaggggagtgaacacagaggaggggctgttgggagcagtccccacatcctctccactctgtctagctggccctgggggaggaggagaatttttaataaaatataaggaagttgaagttgaaaatggaccagactatgccttagaaactggcatggggctgttgtaataatacatgactgagaagtcaggagatctgaccaaaatgtttttaagaaagccttctggccagacgcggtggctcacgcctgtaatcccagcactttgggaggccgaggaggacggagcacgaggtcaggagatcgagaccatcctggttaacacggtgaaaccccgtctctactaaaaatacaaaacatttaaccgagcgtggtggcgggcgcctgtagtcccagctactcaggaggctggggcaggagaatggcatgaacctgggaggcggagcttgcagtgagccgaggtcgcgccactgcactccagcctgggtgacagagcgcgactccacctcaaaaagaaaaaagaaagcctgctgcagtccaggcatggtgtttcacgcctgtaatcccagcactttgggaggccgaggcaggcggatcacttgaggtcagaagttcgagaccagcctgaccagcatggagaaaccctgtctctactaaaaaaacaaaaattagccaggcgtggtggcaggcacctgtaatcccagctactcaggaagctgaggcaggagaattgcttgaactcaggaggcagaggttgcactgagccaagatcatgccattgcaccccagcctgggccacagagtgagactgttgccgggtggagtggctcacacctgtaatcccagcaccttcggaggccaaggcaggcagatcacttgaggtcaggagttcgagaccagtctgacccacatggtaaaaccccgtctctactaaaaatacaaaaattagtcaggcatggtgatgctggcctgtaatcatagctactcgggaggcttgaggcaggagaattgcttgaacccaggaggcggaggttgcagtaagccaagatcgcaccactgcactccaggctggacgacagtgagactccgttccaaaaaaaagaaaaaagaaaagaaagccagctgcccagcagaattggggaaagccgagtcagttgaagcagacaatacccctatgggaggcagaagaatgcacccccctaccaagatatccacatcctaacccctccaaacctgtatgttgccttaagtggcaaaggggactttgcacatgtggctatgtgaaggatcctgagctggagagattagcctggattatccaggtggatcccatataatcacagggctccttagaagggagaagacgctgtgaccatggaggcagaggtcggattgagacagccaaggatcacaggcacctctccagccgggaaaagcaaggaacacactaccctggcgcctccagaaggcacagccccacccacaccttgattctggccctgtaggacccatctgagacttctggcctccagggctgtaagataacacatttgtgttaagccactaggtttgtggtgatctgttaacagcggcatgaggaaactaacacaaccccaaggaggtgagcctctccccacagccccgactcaaccggaagggagaggtgtgcagaagacggctttgcaggatgtttgggacaaatggtctctgggggaagacagaagctaacagaactgattcgactgtgtgaacagggtgctgggagggcccacaggggagggacttcagagctgggcctgcgcctgcggggccgtacgagttggcccggagcaaggcggcccaggacaggcaggggctgcacgcggtaaggctccctcttgccagtaccatcccatgagcagcctcagagccctcgaccaagggaagttctgagggctgagaggttgctcattcgtcagagcgtgctgcccaccctccacccctgcatggcagaaactgtgcaggggacgaggccaaggaatcaggagacccagaggcagggg

SEQ ID NO: 10496 - DNA, 2300 bp, Homo sapien
cagggcttttgccctaggaagggaagtggtcaactgtagccgttgataactgccttggaggaaccaaaaccagcagaggcagccctctctcttcccgctggggaaagccagagctggccactgccctggcccggccccagctgtcctggagcccagggatggcccagtcccccagggctgtactcagatcttcctcaaaatgctccatgtggccaggcgcggtggctcatgcctagaatcccagcactttgagagaccaaggcgggaggatcccttgagcctaggagcttgagactagcctaggcaacatagtgagaccctgtctccacaaaaaaataaaaattagccaggtgtggtgatgcatgcctgtggtcccaggtacccaggaggctaagatgggaggatagtttgagtccaggtggtcaaggccgaagtgggtagtgattgcaccactgcactccagcctgggtgacagagcaagaccccatccctaaataagtaagtacacgctccatgaacatcaaaaggcaggacacccagaaaattcaagcaagctgggctcactgcttggtaagaaatgcggaggaccgggggtggggcaaggactgccttgtgtaagagaactgctttggtattgcccaaaccggaacaagtccttcatctaacgcagttcctaatctttttgtaatctggggcctttgacatctggggaagcttctggacctcttccaagagtaatgtttttcaatgcataaaacagaacgaatgcatcgtattacaaatgatgccagctatcttgcattgaagttttgaatttttttttacttgtaataaatagatggagttcttatagtacacattaaactataagaacagctggctcagtaactactataattttgaagtaatgatacatataagttatattttgagatatctccaataactatactgtggtttaaaaacatctgtgattttgactgatgacaaagttagtgggtttttttttccgttttttttttcttttgagatggagtttcactcttgttgcccaggctggagtgcagtggcgtgatctcagttcactgcaacctccacctcccgggttcaagcgattcttctgcctcagcttcccaagtagctgggattacaggcatgcgctaccacacccggctaattttgtattttttagtagagacagggtttcaccatgttggccaggctggtcttaaactcctgacctcaggtgatccaccggcctcagcctcccaaagtgctgggattacaggcatgagccaccgcgcctggccagttagtgacgtttgtaatgcaactgtaatttgttacctacattcataattgaaggaaatattaaatttcagttaaaggccagtggctcatgtctattatcccaatttaaaaaaaaaaatttggggaggctgaggccggaggattgcttgaagccaggagtttgagaccagcctgggaaacaaagcaagaccccatctctacaaaaaataaaaataaataaataataaattagctgggtacagtagcatgtgcctgtagtcccagctacttgggaggctgagacaggggtatcacttgagcctgggagtttgaggctgcagtgagctgtgctcgagccactgcattccagcctgagcaacaaagtgagaccctgtctctaaacaaacaaacaaagtaataatacgtttcagttagaggttaatgaaaataaagaatttttttcccacccaagttaatagacctcctggattctttctgtggacctcagcttactcttccctaagttgttttgtttttgtttttgtttttgttttttaagagacagggtcttgctctgtcacccaggctggagtgctgtggtgcaatcgtagctcactgcagcctcgaactcctgggctcaagggattctcccacctcagcctcctgagtagctgggactacaggggcacaccaccatgcccagctaattttttaaaacattttttatagaaatggggtactgttctgtcaccaaggctcatcttgaactcctgggctcaagcagtcctcccgcctcagcctcccaaagtgctcagactacaggtgtgagccaccatgcccggccttctcctttaagtattgttggcctcactttcccaactaaaatgggagctcactaagaacaaaggctgttccttcatcttatacttagtaccttgaaagggcctaccacacagtaggtggtcacgtgttagtctgttaggtcttttggattttctaggtagacaatc

SEQ ID NO: 10497 - DNA, 2300 bp, Homo sapien
catgaggaaaattatggcactcgtattgtgggcagagacacaattcagtcattccactgggttccaaattgatatgtgcccagtatgtgccagggatgtgaacactgctgggggttcactgccgggttttactgaatatgaacgagggctgtggtttcaggctgtcctgagttccagccctgactctgtaacttcctggctgtgtgaccttcagcaaccaccctagcctctctgtgcctcactttcttcatctgtaaatggggatgataggaataggacataattcctaggattatcttggggattcaatgagatcattttttggcacatactaagaaatgaacacagtagcattttttttcttgtttatttttctccactgcacttatcagaagctgatatttttatttgcatctttgcttaccatctgactgactaaatgactctccatagaaaaaagccttgtctgtcttgatcacccctgcttccctgtctagaacaatgcctggcacagagtgggtactccataaatatttgtctgctgaatgaattgctgtctttcatatttctaccctaaatgccattccgatgatgcaccctgccctggagtagcccaaagtcctgtggactccagcaagagccccccctgacctccatagccagatgttcacagcagcgctgggcaccaactccgaatgtcaccaactgggctcattgccttggcctgacaaatggcacttatgtgacttctggtggacagagctgtagcaggggaaagtgagttagtgcctgaggaaagtggatcgataggctgagttctgaaactcaagggccctgcaccagtagcgagggggcccaagtaaggggacatggagcccgcaccctgaggacattgctttggaagaggatgcctgggtggtgcaattacctcgtggcatactgagatggggattcgtgcatcctgcacgccttgggaaacaaaatgaatttctcggagagagggggctttgcaaaatgtaaagcgctgcaggaagcaacgtacatggaaaggtcaggaaagagagccgatctgtttgctgagtgtgggctgtacttccaaacccagccaaagtcgacgcgcagcccctggaggtggcacagtttgggggccccttggataggagtgccctcggggaggctgggaagccagagaggaatgggccaaagtttcttcgggtgtctgcagaacccaggaccgcccgcgcagcttgcatcttctcttcccgcccccggcctgcacgcgtgaaatctgcaaattccccttttaactgctgcacgcgctcgttcaactttgccctggctagaatcgggataaccgtcccgatgattacataactttccgagttcagggaagataaatccaagggacagaaatgataaaattttctttgagtatggattttttacccctaaagttacagaagtgcacaaaaaatatatatacaaatacccatatacccaccactcacaatgagttaactgttacattttgacttatctgaaagagggttttttctttttagttaccaaataaacctttctcttgtcccaagttccagtatatctgaatccaaaataagtcaaccttcttttctttattattcttttccatcctcaccccagatttatcttaaagggtaagttccaggacccccgaaatccctcggtgagctcccacctgtccaggtctgcaaacatctagactcaatgcacaagatccggcgatggccgcaaccggcggtgtgcacagctgcatttcctcccccagccccaactcccgcgtgcaactttgcaactctcgctcgggcccggcattgggggcgggcctatttactcggcccgtttggcggaaggatcccatgcggggacgcggttgcgctcagccatctgcgccccgcccagcgcccgggccccgccccctccagcgcccgggccccgccccctcccgcgccccctatggcccataaagaagtcccggccgggccgctgcactccccgcgcgcatccgtgcgccgcccgaggctgtctaaggagtcggcggccattttgttcttctcgtggttccagtggggagagaaggaggaagtagggagcggggtggcaggggggggacccgccgcggctgctgccaccgccgccaccaccgcctctgctcgtggcgtgggaaaggaggtgtgagtcccgggcgcgagccggcggcggcgccgctgcgggagggtcggcggtgggaaggcgatggcggatttagataaactcaacat

SEQ ID NO: 10498 - DNA, 2300 bp, Homo sapien
ggtctgcgtccaaatgcctctgcctggtccctctgcggcttggctctaatttcctcctgtgttctggaggctctgctgtcgccaacatttcccaccgctggctcatcgctttggcaagctggcatctcaccctgctccaagtcccgctgataaagcagaaggtccctttagcagaatcgattctgacatgttctaattaaaaaagcctgatacgtctctgcatggcggctgctgagagctgcgcccataaagacaaagagagtaaattcgtcggaggaaggtctatttttaacaagtcctgaacctaattgaacttaatcatttttcagtcgttgacacttgaaatgtgtgagtcattgggctctgcatggagctgagtgctggagcagccctttaaatatcagagatgggagatatcagcttgcagggctgctcagatttggggctgtggtttcagtcagggtgtggaaaagcgtggggctccagagacagggagccttgggttcaaatcctggctgctccactgactgcaaaactcggtttctctaagtctgtttccccatctgtaaaatgaggatggtcaagtgtatccaaaacacttcatatgaatcatttggaggcaaggcctgacatgtagctgttcataatctatccttatcttacttgacatgaatattgatgtttccttgcagaaacagtaattcgtttgatctggactgtgtggcccgaaccctgtatgtaatatactgtcccactgacttccctcatggttacaacgtggctgccagcaacattaggggcaacatactcccttgcgtaccatattatctttctgaaaccaaaaacatggtaagttcttttttttttttttgaaacggagtctcactctgtcacccaggctggagtgagtgtgatcttggctcacggcaacctttgcctcctgggttcaagcaattctcctgccctagcctcccgagtagcagagactacaggcacccaccgggtgtgtgccaccatgccgggctaaatttgttatatttttagtagaaatacaaaaaaaaaaaaaaaaaaaaaagaaatacacagggtttcaccatgttggccaggctggtcttgagctcctgaccttaaatgatctacctgcctcagcctcccaaagtgctaggattataggcatgagccagcgcacctggcctccaaaatatggtaagttctaaaacacacatcctgtcccaagaatttacggatgaagtggagaccttagcagggctgagctactacaatccactcagggggctaggagttaaagtggaaatcacatggaatcaaaattactgtagaaaacaggtacccccaataattttccattaattctgtgattgtttctagagcttagccccagagaaagtagttgacttgtgtttcagggccgattgtatgaaaaatgtgtatctttaaaccactaaactccgttagggcagtgaaaagctcacttgcctggatcacacttgggttcccgtgttatgctcacagtgggtgggggtcaggtggatgttctgaagaaaattctcctgcactgatgaagttatttttctcatgaaatatctctttccccccccgccccaacatttttttttaatttatttttactttattttatttttcagagtagaaaaaactgggctcctttgagttagctgcgtgtgaagtctgtacctagcagggctgctgtgagcatgagtgtaggtgtaggctaagaagacggtgaatggggtgtgagtggggcgaggtggaccagcgattgcatggcgttggccgagggaggggctaagactgttgattgactcaagaagtcacttagcgtcatgagggtccgggtagtctggtaaggggtcgctggagagtgtgtcgcccctctcccccaaccaaaagcttccctccaaccagctgctcttgtcctctcctcccgagggccctgtgccctcccagcggacttgcaggggagaacgtccatgtttgtgcgagtcacaaaggcgcccgttccaggggtcccagaacgcccgggcgtggggctgggggtgtggcgcagcgaggccgcgcagcaagcagtcctcccggcaccgtcggaagcgcagttgcagcagccgtcggacaagcggccggagcagccacggacaagcagtccgggccccgccactggtaagtttcgccgcccgcccggccgcgcctgctgcgccacagctccccctgccagggaaaaggaaagagcggtcgcggtccccagtccattcatatctcgc

SEQ ID NO: 10499 - DNA, 2300 bp, Homo sapien
ctagccactttccactagatactgcctatacttgagcgcaaatcgttttctgaacactcctttcagtcacttccttctcaccctttgcccgagcagttctctctgcccagaatacgcccccaacctccaacttttcttctctgcctggtgaactcctattcattcctcaaaacccaagttaaaagtcatcttctttgtggagccttttttactattttgtcataggcaggatttatggcactttgcaggctgacttaccactgaattccacagtgtgtagcatacagtgggggctcagtttatgtgctaaatagatgtaagtacttcaggtatgagaactcatttggttgcaagcaatagaaaatgcatctcaggttgctttaatggaatatactgatttctgtaattggacattacccagaggtatgttcaggcttggctaaatgctggtgcttgcttggatgatgttctcaagcctcaagattcagtctgtcttcattttgtcttctctcctccattttagcttggttctcagcctcttgcagaggcgagatggctgtcagcccctcctgaccttatccaccgaggttcaagtgcagcaggaaacaaagtctctctcttcttgagtgttccagcttaaattccaccattcactctggttggactagctagcttcatgtgcccatccacccccgaagaaatcccaggctagagggctgagatcatgcagattgactgggatctggtgctctgattctcccatccagagtcggatgccccaatcttgaaggtggtggggtatggtcagcccccaggagtgcaggaaggtgtggcttcccatgggaacttcagggtattgttaccaggagatagaggaacacccctctcaccctcatcaacattcaccaccctgcaccttcgccctctgaaacaatccatatcctgccatatcatcctagccactgtgtactgagcacttactacgtcccaagcacagtgctgagtgtcttacacactcaatgacatggcttctagaatttctcccattttccaggtgaggaaaatgaggactacagaactgaagtggcttgcccgaggttaataagtggctttggaggaatttgaaatgagatctgatgattggcacaaccaatgctttaaaccattgcattgcaggaccctcaatggtggcaaagctggaatttctgcttttggaacccagctcctgcagtctggaattggctgtgcagtgggtctcacaacctcaaaggatgtgatgtgtgggattaatgctgtcccttgctctgaataactatgggctagatgaagttcaagtggtgacatgataagaatactgactcctgctctaagatgggagggtggggattccctgacagctgcaattgaagttgggcacatttctatttaaccccatcaggggacacactgccccgatgcctttttttttgtgagatggagtctcactctgtcacccaggctggagtgcagtggcgcgatctcggctcactcactgcaatctttgcctccagggttcaagcaattctcctgcctcagcctcctgagtaactgggattacaggtgtgtgccaccacacctggctaatttttttgtattttttgtagagacagagtttcaccatgttgaccaggctggtatcgaactcctgacctcaagtgatctaccgaccttggcctcccaaagtgctgggttacaggcataagccaccatgcccggccccctgatgccattttgccccctctttgggtacacagggagcaggagggtaactgacacgccagaaccatctgcccagctcctaataataaatggtgagagaaccaggttccaggcaaacattgctttaaaacaaataagtgccttttgtcacacccgggcagccatctgggtatcctcctcatgtgccaaggtgtgggtggaggaagggatggcagggggagggaggaggtgccgttctgacctgcacccccagcaggggtggcttacaagttctcttccttttgccaccatgaacagggcattgcagagagacagagagagagaggaaggctcactggctttgagctctctgggtacagtgtctgagtggaggcaaagtgcggttccttcaagatgtctgtggtaggtgatgccagctcccagccacagagcacctactatggggtcaggcactgtgccatccactttacacgttagctcgtctcatcctgacaaacagatctgtgctcacccattttgtaggtgggaggctggaggctcag

SEQ ID NO: 10500 - DNA, 2300 bp, Homo sapien
tccttcttagaggtgtggcctctggcactcaggcctgccacccacggacactaaataaccacaatgattccaagccccgagttcttgctccctgaatcccaaggctgtctttaagggcacaggaagatggccatcttttgttgttttggtttagtttggggtttttttggtctttgtttttgagatggagtcttgctctgtcgcccaggctggagtgcaatggcacgatctcggctcactgcaacctccgcctcctgggttcaagcaatcctcctgccttagcctcccaagtagctgggagtacaggcatgtgccacaacgcccagctaatttttgtatttttagtagagatggggttctgtcatgttggccagactggtcttgaactcctgacctcaggtgatctacccgcctcggcctcccaaagtgctaggtgtgagccaacatgcccgtcctttttttttttttttttttttttgagtcagagtctcactctgtcgcccaggctggagtgcaatggcgctatctcggctcactgcaacctctgcctctcggcctcaagcgattctcctgcctcagtctcctgagtagctgggactacaggcccgcgccacaacgcctggctaatttttgtatttttagtagcgacaagtttcatcatgttggccaaggtcgtcttgaactcctgactcaagtgatccacccgcctcagcctctcaaagtgctggcatttcaggtataagccactgcacccagcaggaaagctgtcttcagtaaaagtattatataatgacaccttgcattctgagagcagctgctgttttcaaggctcttaaagagcctggactctggagacaaaggggcctccagaggggtccacgcctagctccatcactgtgtgaccctgggcagctcacttcgcctctctgagcttttgtttccgcatctgtaaaatgggggcatggatgatgaggtggtccccaccctctagggtggctggaaaattatgtgtgggagccatgagcacatagtgtccggcacgtgccagtgctcagtcaatgagatttgtcatttcttcagtcaacaaatatttatttttgagctgctgctgtgtgcatcatgagctgggagctggggagacagtcagtggtgagggaaactaaagtgatccctgccctctgagctgacgctccacagatgctgaagaaaatgagtcagtgcactgtgggcagtgttcgggactgcctcacgctgtgcagagaaacaaagaagggagatcggagcgcaggaggtgcgtggctgtgttatttgtttgttttgagacagggtcttgctctgtcacccaggctggagtgcagtggtgtgatcgtggctcaccacagcctcaacctcccgggcccaagtgatcctcctgtcccagcctcctgaatagctgagactataggcatgcaccaccacgcacagctatttttttttcttttgcgtagagacaggcatctccctatgtcacccaggctggtcgcaaactcctaggctcaagcaatcttcccgcctcggcctcccgccgtgctgggatttcaggcatgagccacagtgccagccttcatggttattttaaagatggtggtcggggaggcttcactcaggagatgacatatgagcaaagatgcagtgaaggaggtgaaggaaggagccgtgcgatgactgacagaaagacattccaggtagagggcacacaggtgcaaagaccctgaggccagatccaggctgataaaacagagcattttagcagtctcctctccctgccattttttttctcaaaattgacaagcacaagtgtccccggcccaagcaccgcagagagcgcgcagcatctctccccgtgaccatgacccagctactgcctctttaaccttgaatgcctttttgggggctcacgtgtcacccagtggcgagtgagccacccttacttcagaagaacggcatggggtgggggggccttaggtggtgcccgcctcacctatgactgccaaaagcggtcatggggttatttttaaacatggggaggaagtatttattgttcctgggctgcagagagctgggcggagtgtggaattcttctcgggaggcagtgctgggtcctttccaccatggtgagtacaagggctccaggaggtgatgatgccgggtgggcgaggagaggaagccactacaagcgagggaccacggcggagggggaggaaggcggccctcaaagcctccagccccttgtggaaaaagccccattgactgcgcgggca

SEQ ID NO: 10501 - DNA, 2300 bp, Homo sapien
ctttggacaagggaacaggagcccaagggattaagggggagggtgtgctaatacctctgtatcctcacagggggccagggcatttcacaaaggacaaaaatagatgagagagaagaaagacaaagagggatggctcatggaatcctctctggaatgaaggtgtgtggccagcaagggcctcggaggtgagtcatggttttacaaagggaacaggccccagggaggggtatgggctgcctggtgcaatgcccagacactgtcctcaaggtgaaccagagaatatttagacaaatggagaaaaccaggatgattttaattcggaacagagaactgggaccctggatcagtgaggaatgttctgggatgcaggtgatggaaatccattagcagcagcttaaacaaacggggggttcgttttctctcaagaagttggagaacagacagttccacggttgttcagtagctggacatgattggggaccccagagttgtctctgtgactctgtgggggttccctcttgtggtcccaagatggtggcagcagagccaagtgtcctgtcctcacgacactacgttcaaagcagaagctggggcgggggtggtggcagtgggggtggggtcaggtgcaaatgtttctttacttcttatggaggacaatatcttcatggggaagcccctaggagacttttcatacatctcactggccagaacaaggtaaggcgcccacatctagaccaagtctgacctacctgctttgacatccaaggttctttggcctaatcctgaacataaccagagttctattagcaagaaaaaagacagcaaatggacttggggtaggcaatgaataatgtctgctccacccacacccccagtaactgaagtaatatttccccaatatatatggtacagcacacaatatcctgcaacaaaatggttctataggctgggcgtggtggctcacgcctgtaatcccagcactttgggaggcagaagtgggcgaatcatttgaggtcaggagttcgaaaccagcctgcccaacatggtgaaactctgtctctactaaaaatacaaaaattagctgggtgtggtggcgcatgcctgtcatcccagctacttgggaggctgaggcagaagaagctcttgaacctgagaggcggaggttgcagtgaactgagatgatgccattgcactccagcctgcgcgacagagtgagtctctgtctaaaaaaaaaaaaaaaattttctgtagccaacaagagagtctagttcaacaggttccccagttgcagatcttctcagagcctttaaacaatgatgactacttattgactatttgccagctgctgtgtccatagctacatctctattatctcattaaatccttataataactctaagggacagaggaaatagaaactaaggaagggggcagagccaggaattgaacccaggactctgattctagactcctatgctgtccttttactacagagcaaacatctactaaaagggacaagttattcttctctgggggatactgaattaagactgaaagcctggaaacttccagcttctctcttgctattcctttctccccgtagattgcccctggctcctgggagaggaattcagattaaatctcatgtcttcggtgtggattcccaaaattgaagtctgctctttttaaaatttttttggtaacaccttgtttttctctttcagggcacttaccttagtttttagtcaggtattttcatttatttgtgcgttagggacttgtctcttttactgtaatatcggctccataaaggctgaggtttttgtctgtctgttttgctgctgtagccccagcaccaagaaccgtggctggcacacagtaaattcacagtaaaaatgtcgagtcaatgaacaatcttgacttggctaattgatagggtttggctgtgtccccacccaaatttcatctccaattgtattccccacttgtcgggggaagggcctggtgggaggtgattgtatcatgggggcggagctccccctcccccttgctattctcgtgatagagctctcctcacttctctctctgtctctcctgccaccatgtgaagaaggtgcttgtttcccctttgccttccgccatgagtgtaagtttcctgaggtctcccagtcatactgctggttaagcctgcagaacggtgagtccataaaacctcttttcttcataaattacccagtctcaggtagttctttatagcagtgtgagaatggactaatacactaatacatttcctctttctg

SEQ ID NO: 10502 - DNA, 2300 bp, Homo sapien
tagccatttaaaaaattgtaatgtgatagttatgaaatttccctaaattcattttgcagaatgagagctgtaatttaaacctgaagttatcgagagctgagataaaccacacatcacgtgcaatttaatctggcagggaaacaggccactcggaattgctaactaggcctaattcattacatctcggtgaatgcagtacttttggtcttacgcgtctttcaactcctgcattaatatatttacccagacctcatggaaaatgtatgggaatggaaacagaaatactgtatccttgtttaaatcacatttcattttttaaacagctcaaatgattgctcagaaagatcacaccttcttccgaagcatttatgaaacaattatttacattacattaaaaactttaattgcctcaaagcacgtgctctgagacacaaatattggaaaatcatcaaaaatatccatcatgattctctcttctttataactcttctaaactttatcttttttataacccactgtattgatctattgtcccagaccaagagtgatgtcagaagtctaggctgggtcataaaaagaatataatttccatttgctgtccataaaagcaaatcttttgatcagagaaaaaggaaaaacatgtcccctttttttgagtggggaagagggtgcggtgctatgtatcaggggaataagccagagaggaagggtgacctcacctttaagggtggtggcagggataggcaagggggttggtgatggagggggctgggagtatgagttccccctggaggtgacatctcacctccaggggaagtggaaacagaggacctcgagcttgcacagaggcaaaaacaaacaaacaaacaaacaaacaaacaaacaaaaaagcagacagaaaaatgtaaaacaagaaatccagtcaccccggttgtcaagagtccgaagaattgcaaaggaccggaacctccctctagccatgctgaagaccctctccccaaagacaatcacaataaaggaatgtcatgttgcaaagaacggagccccggataataatgatgataacaacagcagaaacctccgaggtttttaaggatccggagcccccacagcaggggtagggcaccctcaacagtcataacaataaaacaagcccactgggggaaaaggccctccagaggtttggttcagaaccaaataacaaaacctccaataatcatcatcacagtaaaagggtttcaccttgcaaagctgtgggggagtccctataattgggttaaagaccccccagataataacaacagaaatccctattccaaaggacctgaggccccgccctcggcccccgcccgtaaagaaccctgagctactactcagacgaagcccccctccccgccaataataataatataatggcgcggaaactgtgggcggtggtggtgacatttcccacgactcagtggcgcccccgggcggctcccaccctccctccggccggcgcgtctacgcagccccaagtgctggctgcgaccctcggatcccaagcatatctggcgatggagcggcggcagcccgaggcacgtgttgtgtgtgctccgattgcaaaagaaaaaaaaatgcatttcaaactattaacttttttttaagcgtgcaatgccgggagctgggggtagacaggtgcaagcgggggtaggcgccccgcgcgcccgcctcccgcagcgccccctcccaaacttccctttgcattgatcagcacgttacgtcagtattgataagtttgcaaaaagccaaagtcaagtgcaatcgcgcggcacaccgaccccggacttgggggggagatgcagcgagcgctccgcgggcccgggagccggcggcaggcagggcagcggcggcgccggcgcctctcggagaggctgcctccccccaacccctcccctcccaccccatccccggctgcctcccccgggcgggcgccgagctccccgcccggcgcgctccgcccgcgccctccgggggtcgggggggcgcacggctcccgggcccgttggcggcggcggcggcggcggcgcggcggcggcgaggggcagcgggtggcaggaggccggagggcgcccgaggggccccgggccgcggcgctcagggcccgggcggccggcggcggccccggggctggggggagtccagcccggatattgagtgcagccattgagaaaagccaaactcttgtgtgtgcgcgtctcgatagcccccaagatggccgccaatgtgggatcgatgtttcaatattggaagcgatttga

SEQ ID NO: 10503 - DNA, 2300 bp, Homo sapien
aagtgttttgggaaatgacacactgctcacctgcttgtccccaagccctccatctccagagagcaggatgggaagttggggaggaagcagaggagccagggtctttctttttggctttatttattagcaacaaatacgagagcttagagcaaggcaccagcagcagagggagcctaaaatgatattaatcacagcagcaataactaatacatattcatgtgcctacccggggccagatctggggagctcctagataactaaaatgggcttctgctctcaggggggtcactggcgtgagcagaccacccgtgactgcacaagacagcgttttctcacagcagcaggtcctgctcggcaagcgaggcgctcagagtcaggagccagggaggatccgcaaagagactgcagcgagcaggcaggggatcggggtggctgttttgtacctggggcacagcattgggcaccaggaatggcgtgggcattggcacagagaacccaggctccagggcgtgtgagtcgttttgctgggttagaggtgagcttggagtggttggtgggtgtcagatcagacaaggccccaaggccaccacatggagtttggacttttccccgaggctcagagtaaggatttggggagtttagttctaagagctacaggaagccattgaagggcgtaagcttgggacagtagtgacaggatccacttaccttttgcaaagaagtctcaggccaccatggagaggagggtcgtaggggtaagaacagagtcgggagctgggcgctgtggctttacgcctgtaataccaccacttgggaggccgaggcaagtggatcacttgaggtcaggagttcaagactaggctggacaacatggcaaaaccctgtctctactaaaactataaaaattaaccgggtgtggtggtgcctgcctgtaatcccagctacttgggaggctgaggcaggagaatcacttgaacctgggaggtagaggttacagtgagccaaaatcatgccactgcactccagcctgagcgacagagcgagacttcgtctcaaaaaaaaaaaaaaaaagaactgagtgggagagacagggaggagctgctgcagtcatcggccttggcaccggggattcccgggtacaggccaacgagggacctttcaaagtagatacgcatctctggagggaggccactgaggctgctgtgagctgccttgccagcatttctcctttccatcccacatcttgacgctcggggactgcggagccccagttgacaatatggtgacatgttaacgggggaatggccggaggggacctatacccccagccccagagcagctcagacaagagcaggaagccaacgtcacctccctctctctagcaaggactcatgttggtctcctgattccctttctcttcgtgagttcagaggaggaggacagtgagccacgctggagggacttggcctcggctggcacaagctgggtattcatttattcatgcacttagcagccgcccatggggctcatgcctggtgcaggggaaagggggagcaccgcagactgcctcctcccctcagggagcccccagacaggaacggccagaagtgcagcatgtagaaccagcctgagaagagctgtccctgagtaggagccgggaggcctctggagtaaggataggtgctcaatatagcctggaaggccaaggaagtctcccagaggaggccacctacatcatctgctcagtgaaggcaggaactgggttgcccattcaatacaggatcccaaatgctcagcagtgtggaaggaagtgacttggaagctcagacctgaagggcgaccaggtcctgccccagcagaggcaggaacgtgtgttcaaggtggaggaaacggcctggccaaaggctcggaggtgggctttgtgcaaatcactgttcagagtgcctgggacctccgggtgagcagggtgtggcaagagctgaggctggaggccagaggcagtgctgcattttggggtctaggcctctgagctcataaaaatagctcggtgctttcttaaaccgttatgtggtttctcttcttccttcatttcttgccaagcccggaaagccaggttgggtcactgctgggaggtatgaggtgagactcgggtttgcaggcagggcaagttgtggggaggtgggggtggccccctatttgttgggggcagacctgccatttgaaagccaccatcctcatgtgtagccctcacatgggagaacaggattggacctgcagggatcctggctggggtgagatgg

SEQ ID NO: 10504 - DNA, 2300 bp, Homo sapien
gctgcaccattgacccgttctctaagttccctcccctcacccccgatcccccaacaggccccgatatgtgttctgcccctccctgtgtccatgtgtctcattgttcaactcccacttatgagtaagaacatgcggtatttggttttctgttcctgtgttagtttgctgaggatgatggcttccagctccatctatttccccgcaaaggacatgatctcattcctttttatggctggatagttttccatggtgtgtatgtaccacatttcctttattcagtctatcattgatgggcatttgggttggttgatctcagtttctaagtcacaactcatgttccgtcttctaggaagccttccctgactgcctatgtggctgacaggaggtggcaaggacaaccccctccaccctaggacaggtagtctggcagggcctcactgcggtcacctgctcccaggagagccaccaccctgacctcattccaccaggctctgagaaagacaccacccaggcaggggaatgaacactgagtgcctactgcgtaccaggactttatatcctttgcttcttgaaaaatgtagctaccatcctatgcaggctgaggctctgcagtgggagataaggcaggctctcaaaatggccatggaaaaccccaagggaaggtggccaggccagggacgcagatgccacctcccgacaagtccttcctggccagcgttgccccatcatatactccttgggggaaggtggatggggtcactgtggccgatggcatggagttagagtcctctatgctaaatggcacgggtcgaccccctgcccctccttcctgtaagtcagcctagccctgggcctgcatctttccccaaattctttctttttttttgagacggagtctggctctgtccccaggctggagtgtagtagtgcaatctcggctgactgcaacttctgtctcctgggttcaagcacttctcctgcctcagcctcccaagtacctgggattataggcaccccccaccatgcctggctattttttttttttttttgagatggagtcttgctctgtcgcccaggctggactgcaatggcgcagtcttggctcactgcaacctccgcctcttgggttcaagcgattcttctgcctcagtctcccaagtagctgggattatgggcgtgcaccacctcacctggctgttttttagtagagatggggttttgccatgttggccaggctggtctcgaactcctgacctcaggtgagaaggattggccttggccttccaaagtgctgggattacaggcgtgagccactgtgcccagcccctgtcttactattttccatagaacatgagactacctggcagacgtcttatctgtttgttaactgtctgctccctttcacttgccagtggcatttcaacaccacgagggcagggaccgtgtccatctttttttttttttttgagacagagtgtcacattattgcccgggctggagtgcaatggcataatctcggctcactgcaacctccgcctcctgggtttaggtgattctcctgcctcagcctcccgagtagctgggattacaggcgcccgccaccacgcctggcttattttttgtatttttagtagagaaggggtttcactgtgttggccaggctggacgaccctgtccatcttgttattgctatatccctaggcctggaacaatgcctggcacccagtagatgcttaataaacattttatgaatgaaatcaatctctacaactctccaaagttggttctgctcatccatttcatggatgaacaaaccaaagtcgaaccacaaagtcagggctgggacctggcagggactgcagaaggccagctggtcttgttcttgggatgatggaaacagcagcgcctgaaatgaggcctgggtttggatttcagccctgcccaacctgctttgtgacaccagggaagcagttaacctctctgtgcctctgtttcctcatctgttgcactggtgccaggccagtccctgtgacctaaggtctattgtgagataaagtgagttcattcctctgaaatgtctggcatgcagcaggaactcacaacattatttcagggatacaggagggtaggaggttatgaggctgtctggggaggcccgtgagacccaggttccagtcctgtctctgcttcttaggagttgtgggcgcataggccagctgcttccaccctatgagcgtcagtttcctcatctgtgaaacggggatgtagagtggctgcaaggtccccttggggcactgggt

SEQ ID NO: 10505 - DNA, 2300 bp, Homo sapien
caccaccatcacttgcttggactactgcagtagtgttctccctgatcgcctggcttctactatcattccctgcccatagcagtcagggaccatgttaaatctaacacagaccatgtccctcctctgctcaaaaccctcccatggctcctcattcttcttagagtaaaagcaaaatctttcctctggtccttaagcccctaggtcacctggctttctggctttgccaataatctctgatctattgtgtttttttttttgtttttgttttttttttgtttgacagagtcttgctctgtcacccaggctggagtgcagtggtgcaatctcagctcattgcaacctctgcctcctgggttcaagtgattctcctgtctcagcctcccaagtaactgggattacaggtgtacaccaccatgcctggctaatttttttttttttttttttttgtatttttagtagagaccgggtttcaccatgttggctaggctggtctcgaactcctgacctcaagtgatctacctgcctcggcctcccaaagtgctgggattataggcgtgagccactgcgcccagccagctgacctattttcctactattcttcccattgctcacttggctccactggtctcctcgttgttcttcaaacatgcccaggatggccccatttcagggcttttgcacttgctgttccctctgcctgggacctccttctcccagataaccacatggctccctccctcattcctccaggtctgtcctcagagaggccttccctgaccaccttgtctaaaagctgcacttccagcttgggcaagatagcaagacccccccgatctctacaaaaaattaaaaaaaattagccgggtgtggtggtacacacctgtagtcccaactacttgggaggctgaggtgggaggctcggttgaacccaggagttcaggttacaatgagctgtgattgtgccactgcaccccaacctgggtgacaaaaaaacacaaaaaacaaaaaacaaaaacaaaaaaactgcactcccaggctttctgccccattgccttagcgtacagtcctagcatgaatcacttccagaactcatttgtgttgtcttgattcctggctgcacctgcttacctggttcaggtacagtgcctggcacacagtaggcgcttagtgagaggctgtacaatggagagctgaccctggtctgtcctgttcttcctgctttcaggccaggacttaatagtgattgggaggtggcgggtggtggagaagaggcggcaggaacaggaaggaagggttcaaggaggtgggcagggcaaaaacaacagcaattcctatttcttgagagctttctgttgtgccgtgcactttacatatcatgatggtctttattttccggatgaggaaacggaggcttagagaagtgaaatgatttctctaagctcacacagtgttcagtggcctagtgcgactcgaactcaagtctgcctaattccagaacttcctctcttcacctggagccaggggaagcttgcgaggcgccctgtccgtatggaacagtgctgtacgcaaatgtcctggattcagctgttttttctgccactcacacatttttcaggaattagagctatttttctaatttaactgggcattaaatttgctaaacctggcaacccaggtttagcaaatatttttattatttgtagagatggtggtctccctctgctgcccaggctggtcttgaactactaggctcaggcaatcctcctgcctcgtcctggggggagttcggacttaagcctaggacttcagcgaatggcccgcccaggacccccaaatgcttttgcaggctaatccacgacctgggccagtccttacctttggaatcgcaatgagcttcccgggctccaatccgcttttctgggctagggaactggggagtcgcgagccaggagcggaccctttaagagtgatttcgagggcgggctcacgggggcgtgccggttcggggcctgccaatcgggaggtgggaagaacgcgggggcgggcccggcgcgagcaggctgggaagggttaaaggggcgcgcccgtgggtcgcggactgtccggttgctcccgcctccttccgtcggatccgcgctctcccgcggctgcgccggcccggccgcccaggagacaaagcgctgccgccgccgtcgccgccaccgggccagtcccgaaccatggccgggccaccccgcaacctcgcgcctcccgtcccgtcgccgccctaggcctgcgctgcgaggtaaggcgggcctggc

SEQ ID NO: 10506 - DNA, 2300 bp, Homo sapien
ctggctaatttttgtatttttagtagagacagggtttcaccctgttgaccaggctggtctcaaactcctgacctcaggtgatccgctggcctcagcctcccaaagtgctgagattgcaggtgtgagccactacacccggcctcgtttagacttcattgacattcccccaccccacccctcttcccacatcctcagatgccgtgtgaacagcttgaatcccacactccacaggtccttctcctcacaaccctccatggcaccctactgccttcaaaataattcccaaagtccccaccaagaccttcaagacaccatgtgatgggcccacctttgaaacatcatctcttaccagtataggtgtcaccactgcctttatgactttattccaaagcaccacatgtattcccacctcagcacctttgcacatgctgttcctttggcctggaatgctcttccctcagacgttatagcacctggatccttcttgtcatggagggttctaagctcacatgttagttccgcagaggtgtccttcctgagccctggatctaagacatccccttccagctctccatcccgtaactgttttgtcattgtcatagctgatcccacttgcttattcgtgccttatgtccccccactagaatatcagctccacgcaggcagggatatctgtgttgttcactgctgtgttcccagcgcctagaacagtgcctggaaatgtgcggaaagcagatttttgtggcctttttcttcaaggtcattggacaccaggaatcctgtagcagaccgctcccttcccccatctactcggagtctggaaatccccaccttctggggaaccccttcctgtagttctaaggtcaggactggggccgatttgtttaacacagagagcttcctggagccaagcctcgagctaactgctttaatgcattaactcacttaattctcactgccaggagagtgggtacacattatttccatttcataggcaaggaagtggagaggtacggagaagtcaagtcatttgcccgggtaggaagagggggaggcagtggaatggagacacttgctgcctgggaagactcgaggtggcccctccaagctgggggcgtgggcgacttgtttcctgttgggggagggggagaagagtacattcctccctccccgccctcccacatgttgggggagaggctggctgagagcatgtcccactccggactagggggaaccccactgtccgtctcagctccccatgaggccgtggagaaaatgtaagtagcccgggggcgggcaggggggtgggcgcagaggccacggaagccagcggtcggagagggcttcctggagaaagatgcacccctcctagaattgggggacaggacgggcggccggagcgaggctgggctatacgggcaccggctgtagcaaaggcaaagctgagggctggggccagaacccaaatcgggggcctggggccgtggcgggtcgggtcagcatgatcgcagatagtcagggtcgggcagggctgggctccctccctggggcgatgatgaaagccgtggtcgctattgcaccgcccagccctgcgggcactgataaggccctgcaggagggagtcagcaagggcgcgccccctggaggccaggcccctcgaccctgcccgccctaggccccgccccttcatctggccccgcctccaggcgctgaggcacctggtgacctgccggcgttgagtgggtggggctaaagtcgccccgcccctccgatcctcacttctatcttcagactgtgggacgcgaaatcgggtgggcacgtggtgggcgtggcttcgcaaggcctcgcctttttccggacccgcgccaggagagccctccgaccctggcagccgcggactagcgggattggtaggcggggccagtccgggctccgccctcatggcccgcccctccagccgaatctccgactcgcgcgcggcctgaggcgtggctcctggtggccccgcccctgccccgcccctgtcgcggccggcctcccccgccgggctccgctcgcacggccggttcctctttacataacggcgcggggcggcatgggcccgggccaccgcctccgcccggctgcccgcccggactgtcgcggcccgcggtggcgacggcggccgctgcaaagtttccccggcggcggcggcccgggggcgcatcctcccgcaactgtcaagcgctggcggcggaaatgatgaggcgctggccattttccgagcccgggtttcctgcctgagccccgctcgagcgagc

SEQ ID NO: 10507 - DNA, 2300 bp, Homo sapien
ttcatgatgttgagtcttcctgttcaagaacaaagtataccttcaatagcatattaaagtttatccttggctggatgcagtggctgacgcctgtaatcccacctctttgggaggcagaggtgggcagatcacctgaggtctggagttcgagaccagcctggccaacatggtgaaaccccgtctctactaaaaatattttaaaaaaagtattagctgggtgtggtgtgcacctgtagtcccagctactctggaggctgaggtaggagaatcgcttgaacccaggaggcagagagtgcagtgagtcaagattgcaccactgcactccagcttgggcaaccgagcgacactctgtctcaaagaaaataaataaataaaaataaagtttatctttaaggttttgtacatttttttcagtgtatgccttaggtaggttcttttttaatgttagtgtaacccagggacttctcttccattgcatcttctaagtaattacttatgaagtaccatatatgaaggctattgctgtttatatgttagtttttaccctgctcctttactaaattccaatcctttgaggtattggataaaaatatttttagcatttttcaaataacaggcagagtcaagggcttggtttcttttcttcccctcctgtcccctaccctccccttttttgagacagggtctcacttcttcgccgaggctggagtgcagtggtgcagttacggcttaccgcggcatctgcctccctggctgaaaagttcctcccacctcagcctcctgagtagctgggaccatagatgcacagcaccgcagctggctaatatttttgtattttttgtggaggcagtgtctccccatgttgcccagggtggtcccaaactcatgagctcaagcagtccgctcgccctggcctcctaaagtgtagggattataagcgtgagccactgcgcctggcctggggatcatgttttaacatgagaattagtggagacaaacacatgatatctaaataatagcaccatagtatacttgactagctttttaattattttttaaatatacaggaaggtaataagtaacaaagtaataatagtgaatagtttaagctcagttagcataatcgggcaaactttcatttgataaaagtgataagtagttttcagtggcttttttgtttaccagaaggaggtggtttttaaatacgtgcatccaagataaaatataaaaaaatgttcaggtttgctttcctacatagataaaataatatgtaactagctctcccaaatttcagcaacagttagtgaatgtttagccacaaatttgcagttaattatataatcagttcttaggattttatgaacaagttctatattctttgtgccttatacctagttgtaagcagtcattccacaattattttcctgaagtggcttggttaatgccacaccagaaacaggtcacagacaatagtgctgtaagaaatgtgtgaggaaagaggcacatgggaagtagctagctcgtgctggaggaactggaaaaaaacctcacatgggagatgacagttgagctgaattcttaactagagttgtaacagggcgaggcccttacatgcagaccacctgtgtggattaagataagacataaagtaatcttttaaaagaactattatttagaaacctggtatatgctacatggtgctgtgttatactgggtttgagaaagaatgggaagtgttacaaggattcagtggttggaaattaaggaagatagaaagttagtgttggatctgttttggctctttggtcatgcctttgtttttctcaaaatgaatgcagtgcccgtcccagaaaataccatatgagaagcgatttcataatgctgtgagagtctgttacagggacttgatcaagtctgagggccatgagagaaagtccctctgaggaagttgctttcaagctgacacctgaaggatgaagcagaattatcccagctgggatttgggaactggtgtttgaggctgaggactagcatgcatgataggaaaataacccagagtggcagaagtgggagtggtatgagatggcatcagagacgcagattcagggtcaaatcattcagagcctcctagaccatgtgaacacatgtattatgctgtggagatactgtttaataggcagtctgcttttttttctgcagtaccaaatatgccccaacagcggcaagaccagcatcatcagagtgccatgatgcacccagcgtcagcagcgggcccaccgattgcagccaccccaccagct

SEQ ID NO: 10508 - DNA, 2300 bp, Homo sapien
ctggttcaatcattctccacgtttatctaagtctttacctttatctggacagttctaggacattgaggggaattttggtgtttcttcccctattatttcctgaagtcatttcactttaaaaaacaatagattcactgctcaaaaaaaaaaaaaaaagttacctactttctacttgcttccagtttaactgcaacacattttaaaaagagtctactgtgctggctgggtaagttaaattaaaacttctaaagggtccaaggtctaaagttcgcacattgttttgaggtcggctctgtctctaccgagggagatcccattatccgtagttctaccagtcccaatcccatatatttcctttagaatctcatgaatgaggaaaaagaagttcaagtgagggaacataggttcaaatgaaggtcagatacctaaaagagttttctggtgactgtgcgcggctggggtggaaaaagtggggaaaaggtacccagatgtgggtggccccggagggttgctccactccagccccggcagggcaggacagcgcggcctgcctggtagatgccccgagccactggagcgcctactgtgtggcgggcgggggacggcaggaaaacggcaggatgctgtgtcccctgaatctggcagggttctaggtgctttacacgtagcaagacacattctccgccccaaggcactcgcagtcagtccattttctgggttgcatcaggtgggggcaaactaggtccccgcagaagtgaagatgctgaaggaatacagtaggagaagaaatgcttctctcctgtcctccacaccaggcaggccccagaggctgagaccgacacgccctccccgaagggcagacccgccttgaggaaggcggatccgggtagggaccgccgcctggccctcacccgacccccgagaaagcaacccagcgcgccgcccgctcctcacgtgtccctcccggccccggggccacctcacgttctgcttccgtctgacccctccgacttccggtaaagagtccctatccgcacctccgctcccacccggcgcctcggcgcgcccgccctccgatgcgctcagcggccgcagctcctcggagtcccgcggtggccaccgagtctcgccgcttcgccgcagccaggtggcccgggtggcgctcgctccagcggccggcgcggcggagcgggcggggcggcggtggcgcggccccgggaccgtatccctccgccgcccctcccccgcccggccccggcccccctccctcccggcagagctcgcctccctccgcctcagactgttttggtagcaacggcaacggcggcggcgcgtttcggcccggctcccggcggctccttggtctcggcgggcctccccgccccttcgtcgtcctccttctccccctcgccagcccgggcgcccctccggccgcgccaacccgcgcctccccgctcggcgcccgcgcgtccccgccgcgttccggcgtctccttggcgcgcccggctcccggctgtccccgcccggcgtgcgagccggtgtatgggcccctcaccatgtcgctgaagccccagcagcagcagcagcagcagcagcagcagcagcagcagcaacagcagcagcagcagcagcagcagcagccgccgcccgcggctgccaatgtccgcaagcccggcggcagcggccttctagcgtcgcccgccgccgcgccttcgccgtcctcgtcctcggtctcctcgtcctcggccacggctccctcctcggtggtcgcggcgacctccggcggcgggaggcccggcctgggcaggtgggtgtcggcaccccagccccctccgctccgggcccggcgtcccctcccccgcggcccgcgccgccgtccccgccccgtgacccgccgggctacccggggtgggctgggggccggcagcgcgggggagactcgctcgggcctgagccccgaggctcggccggtgggcgcagccggggtcctctgggattgtcaggcctgtccagcctcccgcagcatccccgccccctcccccggcggtcaagatggagggagcgggcggcctcccctccccacgcgtgttgggaggggttctcgggtagcggcgatggtcagccccggctcccccttccgcacgatcctccgcccgcagcgtggggatgctcgggcagctcctccactcccggtttaggtgtgaacgttggaggggtctggaggctgtggtggcgttttccggaacatgtccccctccatgggggacatctctggaggggagaagttagggccgcgtccc

SEQ ID NO: 10509 - DNA, 2300 bp, Homo sapien
gcatcaccacacccagctaatttttgtatttttagtagagatgggctctactaaaaattggccaggctggtctcgaactcctgacctcaggtgatccaccggccactgcctcccaaagtgctgggattacaggcgtgagccaccacactggccaaaacttgttcttaagattgtattctgggaccttgattccaatcagagaaaagtgattgtatttttttatttttattttttttagataaagtttcgctcttgttgcccaggctggagtgcagtggtgccctctttggtcactgtaacctccgcctcctgggttcaagcgattctcctgcctcagcatcctgcgtagctgagatcacagatgcccaccaccacgcccagctaattttttcgtatttttagtagcgatggggtttcaccatgttggccacgctggtcttgaactcctgacctcaggtgatccatccgcctcggcctcccagagtgctgggattacaggtgtgagccaccgcgccaggccaagtgtttgtatttctattaaagaaagaatataacgggacaccattgacgacctgctccattgcaggcctccttgctgttcctcagactcccccctcagagcctttgccctcgctgtgccctccacctggagcgtttctccccaggatcctcatgcccatgctcatttgggtccctgccccatgtcaccctctccaggagcttcccctcacagcagccctggcctgtaccacagccgggtacaggtatttttttgtttcaactggttttttagttccagtttcctttaggttactttatttatttatttatttatttattttttgagacggagtctcgctctgtcgcccaggctggagtgcatgatctcggctgactgcaacctccacctcccggattcaagcaattctcctgtatcagcctcccgagtagctgggattacaggcgcccaccaccacacccggctaatttttatatttttggtagagacggggtttcaccatgttggctaggctaggttaatttttaaagggttttgcaatggtcccttgatctactttttaccttagatgggaaataaaactgatttcctacattggcagaatacaatgatcatttttgcctggactatctaggaggttaatttcagttggactactgaaaactgctggttcaatcattctccacgtttatctaagtctttacctttatctggacagttctaggacattgaggggaattttggtgtttcttcccctattatttcctgaagtcatttcactttaaaaaacaatagattcactgctcaaaaaaaaaaaaaaaagttacctactttctacttgcttccagtttaactgcaacacattttaaaaagagtctactgtgctggctgggtaagttaaattaaaacttctaaagggtccaaggtctaaagttcgcacattgttttgaggtcggctctgtctctaccgagggagatcccattatccgtagttctaccagtcccaatcccatatatttcctttagaatctcatgaatgaggaaaaagaagttcaagtgagggaacataggttcaaatgaaggtcagatacctaaaagagttttctggtgactgtgcgcggctggggtggaaaaagtggggaaaaggtacccagatgtgggtggccccggagggttgctccactccagccccggcagggcaggacagcgcggcctgcctggtagatgccccgagccactggagcgcctactgtgtggcgggcgggggacggcaggaaaacggcaggatgctgtgtcccctgaatctggcagggttctaggtgctttacacgtagcaagacacattctccgccccaaggcactcgcagtcagtccattttctgggttgcatcaggtgggggcaaactaggtccccgcagaagtgaagatgctgaaggaatacagtaggagaagaaatgcttctctcctgtcctccacaccaggcaggccccagaggctgagaccgacacgccctccccgaagggcagacccgccttgaggaaggcggatccgggtagggaccgccgcctggccctcacccgacccccgagaaagcaacccagcgcgccgcccgctcctcacgtgtccctcccggccccggggccacctcacgttctgcttccgtctgacccctccgacttccggtaaagagtccctatccgcacctccgctcccacccggcgcctcggcgcgcccgccctccgatgcgctcagcggccgcagctcctcggagtcccgcggt

SEQ ID NO: 10510 - DNA, 2300 bp, Homo sapien
tgaagctatcaagtccattaaaaaaacaaaatttcaaaaacttgtaggggtagtcttaaacatcctggcttatgctcatgccatgaaccaagccatgaacatctgtgattactgtcttaaatcaatgaaacacatgaaaagggaaacggaatttggagacttaactgaaatatccctaatacatgctctgtcagggcagggacaaggcctgttttgcccaccactgtattcccagcccttataccacagtgccgagcacacagaggaagccctctaaatgtttgatgaataaatgactacatgactgacccatgcagatgtctatatgcggctaatatcaatttagctgactctcagaactcagaagccacttttagcctttggaaaggtgctcataagctataaagtcatattcaatctttaatttgcagcttcaaaggtcacgtcctcaggaagttcccaatgacaccatccctacctgcccccatccctctctccaaaccaaacacatcttcttgtaatactttcccaaattgtttctcctttccttcacagcacttaccacagttgtaattctacacatattctgcacttatttaattcatctgtttcctccatgatactgctggtgccattaaaacagagacgctgtctgattcagcacacaaggaaggctccagcagatatgagcataagttttttttttgtttttttttttgaaatggactttatctcttgtcgcccaggctggagtgcagtgccacaatcttggctcaccgcaacctccacctcccgggttcaagcgattctcctgcctcagcctccccagtagctgggattacaggcacctgtcaccacgcccagctaatttttgtatttttagtacagacagggtttcaccatgttggccaggctggtcttgaactctcaacctcaggtgacccgcccgcctcggcctcccaaagtgtgaggattacaggcgtgagccaccgcgcccggccaagtatttcttgaatgaatgttagttaattatctgaggaccaaggaacagagccagagctgcattccccactaaggagcttcctcacttgtgttaatggtgtaaaaagctcagactcaagtccagctcactgagttagaatcccagtttcacccattacagataaccttgggcaaatcaattaatcactaagcttcagtttcccaatgtgtaagaggtacatgtcacatccatctgcctcttagggctgttgcaaagataattaaagaatacaatacacaaaaggtgcttagtacagtgctgggatataggaagtgtccaaattttagttatgactatggttagggggcacttcaatggatatcgttccaaaagggaacaatttaattaacccagggaccgtccagcgttgctggggacccagtccctgcctttacgaagcccatagggaagcaagtgagacaaacacaccactcgactatctcgagagggagacgcgccaggtataaactaaatgccctcagacggcacagggagggaggttcggggcagggcttccctgagataacaaacgggaaggcctctcaaaggcggatgggaaagagagggatcccgattacctctccgtgtcttcctgggcaacagccctcgccgcgggcttttcccgggccagtgctttgggaagggaagccctccgggcccagacccggctacagggaatgcggcgaggccgcgggactcacccgcggcgctgaagccgaagccggcggggacaggcgagtgttccgcgagctccaatcggataacaaccagtgacacactcatagggcaggcgctggccggcgcgggccccggcgggctcaggcgaggctggaaggcgagccgagaggccgagcggcccggggccggcagcgccgccaccacctcaatgcagttgccgccgcctcagcagcagcagctcctcgaacagccctcggagccacaacaacctccacttccgcctcccggccgccgtcgctgacctgcggtttacgcatgcgcgcaggaccgcgcacagcgattgggcggcgtggcaggggtcacccactgctcttccggacgcaattttgaggaggtcggagcggaaggacgtcgtggagattgcttgcgctggggtgccacacttaggctgagctgcaggttttcgcacagtcgcgagttaacctctgcttgctccagaggcctcgtcctaatccacctcggctgacggcgcgggatccctggctccgcgaggtctccgaattgtccgagctatctgcta

SEQ ID NO: 10511 - DNA, 2300 bp, Homo sapien
gagacaagtctgaccaacatggtgaaaccctatctctaaaaaaaaatacaaaaatcagctgggtgcagtgctgtgtgcctgtagtcccagctacttgggagactgaggcaggaagcttgaacccaggaagccgaggttgcagtgagccgagatggcaccactgcactccagcctgggcgacagagtgagactccgtctcaaaatacaaaaaaaaaaaaaggtttgtttggtaaagagataaagaatgttcgttctggattcagattgcctgaatttcagttccagctctgccactactacctgtgaaatcctgagccagttactcttcctccaagcctcaggttactcctctgtagaacagggacatagtaccagtttcataaagttgttgtgaccattgcatgacacaaggtatatgaaacactcaaattagtacctggcacatgttgaaatgttatctactatagtaatatactaaaaaagttcacaagaggtctcataggttttatgcatacagtatgtgtgtatggtttatgcactttcacataaccctgtgattcttcaacagggttatgttttctaaccccaaggagacatctggaaaggtccagagacattattggttgtcaccacctggggagaggtgctactgacatctagtgggtcaggccagggatgtttctaaacactctacaatgctcaggacaccccgcccccttgccaaaaacaaaaaagaataatcaggacccaaaatgttaatagtgcagagttgagaaaccctgatttaaacagggcatatggaaacgtatttcataggatgtagtcacaagatctatatacgcatgtatcttgtggtcatgtcatagtccagatacacacacatctagaacgcactatgtccacacacacacacatctagaatgtactatgtacttacatatgtatcattatacaatgtacctagagtagcatcctgtcatgtatgtgtcccatatgcattgattgtgtcagtatctacatacaaaagccactctgacatactggaaagaatgctgagcctcagaaaagctaatgttatctccatatacataattccatttcatcctcacaactgcatgaggacatgatatcatgccaactttatgcaatgactatactagttcaagactgcacaactgctgatgtaggtcaacctcatagtacggacaggaactgtgtttatcttatacgccaacgtatctcaagcatcccaagggtgtctagactctcagtaaacatttgtgaagtgacagggtggggaggaggaccccggtctaactgcagcactatgctcgtaaccagcagatcaccatcttttctctcttttttttgagacggagtttcgctcttgttgcccaggcgggagtgcactagcactatctcgactcactgcaacctccgcctcccgggttcaagcgattctcctgtctcagcctcccaagtagcttggactacagacgcgcgccaccaagcccggctaattttttgtatgttcagtagagacgaggtttcaccatgttggccaggttggtctcgaactgctgacctgaggtgattcgcccgcctaagcctctgggctgggattacaggcgtgagccaccgcgcccagccagatcgctatctgaacagcgatcgactctccactctctacggccccttagaaggaacttcacctctctgagcctcgttgtacctatctgtaaagtgggacagaaacaaaaccatccagactagggttagagacaggagtcaaacacaacaaaaggggcaaagttctgcatagcagatagctcggacaattcggagacctcgcggagccagggatcccgcgccgtcagccgaggtggattaggacgaggcctctggagcaagcagaggttaactcgcgactgtgcgaaaacctgcagctcagcctaagtgtggcaccccagcgcaagcaatctccacgacgtccttccgctccgacctcctcaaaattgcgtccggaagagcagtgggtgacccctgccacgccgcccaatcgctgtgcgcggtcctgcgcgcatgcgtaaaccgcaggtcagcgacggcggccgggaggcggaagtggaggttgttgtggctccgagggctgttcgaggagctgctgctgctgaggcggcggcaactgcattgaggtggtggcggcgctgccggccccgggccgctcggcctctcggctcgccttccagcctcgcctgagcccgccggggcccgcgccggccagcgcctgccctatgagt

SEQ ID NO: 10512 - DNA, 2300 bp, Homo sapien
tggcccattcctccaaggatattctgagtcagtgcaaaagggaacagctcatgaaatatagtgagagtcatggtagcctctagaacacatcagattaaatttctctgataactcaagtattggacattttgctaccagagcccctttctgattctttccatctttggaagagctacttttgctggactccaggaagtggcatattaccttagccctacatctgcctatgcctgggtgtatttgtacccttcgttgggccagtgagattaaagattttcaactctgcctacacatcacatgacctgggagtttgtaaagatgctgggtctgtttccctggaggctttcattgagtatgtctagttgggatccaggcatgtgtatttcgaaaaagctccacaggtgattctgccttgcagctggggtgagataccccaagacgcagtgagggacttcagattctgtccatgcttttctcttatcagacagcctctgtcatgcttaccttgagaaggaggcttcccctccatcttcctgggatagagccttgataaataaaatcatttttatctgatctacatttggaaaaacactgaccttgttcccacagttcctgctttgccaagaaagtaatagaagccctgaataagttcatgccatcatgtgcaaaataagaaagagaaggctagagatcttatcaaataaatcttaagaatttattttacttcccccagatgtaattcacctagtgagaggagccgaatgcttcctggaactttgccccatcccccccaattccctccactctcctagctcttgtctcagccagtacagctctgccacttccatctggtacgttacatcgactggtgtctgaaacaccctgcttctgtacttctcactattgacgttttctttagggtagcctcttagactttttttttttagctcattcaggtccttaggagacaagagaaagtagaaaggtccagtttattccagacatttatttacctgaaagggcagttctcacccaacccagaatgcaagtgtagggtagagagaggggccactgggtttgtccttggccttggagagcttgggtcattccaagtggcaagtcagagatttagttctgttcttagggcagatcagagggtattggttataggctatgtggctataggagattgggcccactctataggagattacgccctggggacactgtaaaaggactttcggggaatcagtggatcagagacagcctgacactgagaaggctttcccgtgttctcctgaactctcaccagcaccctccacccattacggatcagatatgtggctgaagcaaggtcgtcagagtacaggagcctcttagcatgtcaggaacagtgtcagccctcccatggaatttctgtctaaatggagtatggatgggtttttaacctctgaaataaacactaagttcgtatttattttatacctgtaatagtgtcttctttctgcaaaaaaaaaaaaaaatggcgaaatgctttccgtcaaactgacatgtacagcttttcttctgctctgtttagccccaagatgtgacattagccaaatgctttgtcattttggaacccacttaagtttcatttaagtttcacaacttactgagctaagataggtacgatgactattaatattattcccattttattgatgatggcactgaggcccattatggctttgctcgtttgcacagggtcacagtgtctgaaacagacactttggtttctcgagtttgcccccacgttgtaacccagtattgtcaaattactcaatgtaagaaggcaacatcattttatatcataacactcttaaattacttgttataataaatctcaactgtccttcttatgcttttcctctcaaaaagtttaccagcatgcatgtgggagctccacctttcgggacattcatctctcattcctgtccctccatcagattgtggagtcctgcatggaagggatctgtaagccagaccctaggatctacaagctgtgcttggagcagctcggcctgcagccctctgagtccatctttcttgatgaccttggaacaaatctaaaagaagctgccagacttggtattcacaccattaaggtaatagtcactaatttttgaactccctcccatgcaccagccactaatgcaatgtttctctgtaatctttttacatttgtagctctagctttccttagggtttccccctgtgtttccatagtcatcttattttgtgttaattatgaaatctat

SEQ ID NO: 10513 - DNA, 2300 bp, Homo sapien
gatgggcctgtagggtaagagcaaacgttgtaacataatcttctttcttcttggcacaagagggtattgtgaaatttttttttttttttgaaacagagtttcactttgtcacccaggctggaatacagtggcatgatcttggctcactgtaacctctgcctccctggttcaagcaattctcgtgtgtcagccccctgagtagctgggactataggcgcacgccaccatgcccggttaattttttgtattttagtaaagacagggtttcaccatgttgcccaagctggtctcaaactcctaagctcaggaaatctgcccgcctcgcctcccaaagattcacggcctcaccacgcccggccgtgaatcttttttgagatgaggtcttgctaggttgccgagggctttgaactcctggactccagcagtcctcccacctcaggcttcccaagtggctggaactgtgggtgcacaccatcatgcctagctgttttgtgaaccgttgaccagtgcttctctctgcaggatagaaagttcagtgtggttaggagttaaatgggaagaggaaatgcattctactgctccctcattagctaaatatcctgggttcgaaggccttcctcagagtactgacttctttgataatttccctctaaaggactaccctttgtaaaaagtaaagtagaggttcttctttaaagactttccttattatttaattaggaataaatagtaacttcttttagaagcaaaatttatttaaagacctgtgctaaattttttgttgttgttgttgttgagacggagtctcattctgtcgcccaggctggagtgcagtggtgcagtcttggctcactgcaagctccacctcctgggttcacgccattctcctgcctcagcctcccaagtagctgggactacaggcatccactaccacgcccagctaatttttttgtatttttagtagagacagggtttcactgtgttagctaggatggtctcgatctctcgatctcctgacctcgtgatacgcctgcctcggcctcccaaagtactgggattacaggcgtgagccaccacacccagctgacctgtgctaaaattttttttttttttttttttgagatggagtcttgctctttcgtccagtccagactgcagtggtcctatcttggctcactgcaagctccatctcctgggttcgcaccattctcctgcctcagcctcccaagtagctgggactacaggcgcctggctaattttttgtatttttagtagagacggggtttcactgtgttagccaggatgatctcgatctcctggcctcgtgatccacccgccttggcttcccaaagtgctgggattacaggcgtgagccaccgcgcccagctatgctaacatttttaaatatttgctagctgcaataaagaaattaatgtattttatgtttttagttcctgcaatttagtctaaatatttgccttggcctgctaatactggtccaagcaagtattgggtcatagcttgttcctcttctttatttgaaggtgtttttatttttctcagcattttacaagttacttccttcttcctttgttttcctctacctttgcctcttttaaaaagttttaagttgctagccaattaggacaaatacagaatgtaaagtctcgttccagccaatggaaactggacacagcagtaggatggatgcgtcagcttataaatgaccctgtctcctttgtttggtgtactgttgtggcaaaactgctggtgagtgtaccctttctgcaggaagtaaaaatggccttgctgagtaaattaaatttatgttcaagtgctatgtctttgtggcaccggggaacaaacatttcagacacctcctaggaaacagataggagcccctgaggccaggattgactgctggcacctgttcaatatatattctctgcacctgtactaccatgaattgtaaaattaaaaatatatacgtgtatatattctcaacatcctgtgaaaggaagggaaaaataacaacaacaaaaaatatacatctacatattctctctgaaaccaggttaatgacccagagactgcagtaaaggaattagaagctctcttgggttttacattgagagtaggtgttccaaacactcggcctgtgaaaaagacgatggaaattccgaaagattccttgcagaagtacctcaaagacttactgggtatccagaccacaggtatgtgggcttctttcatgttttggtagctctctccaaggcgaaggttttggtctgtttctcact

SEQ ID NO: 10514 - DNA, 2300 bp, Homo sapien
cttgaggccaggagttcgagaccaggctgaccaacatggtgaaaccttgactctactaaaaatacaaaaattagctgggtgtggtggtgcacaactatagtcccagctgctctggagactgaggcacaacaattgcttgaacctgggaggcagaggttgcagtgagccaagattgtgccactgcactccagcctgggtaacagagtgagactccatctcaaaaaaaaaaaggaaaagaaaaaaaaaaagggctgggcgcagtggctcatgcctgtaatcccagcactttgggaggctgaggcaggcggatcacctgaagtcaggagttcgaggtcagcctggccaacatggcaaaaccccatctctactaaaaatataaaaattagctaggtgttttggcgggcgcctgtaatcccagctacttgggaggctgaagcaggagaattgcttgaacctgggagactgaggttacggtgagctaagatagtgccactgcaggcctgggtgacagagcaagactccgtcccccccccaaaaaaaaaaggaaaaataatgttgctgggtgtggtagctcacccctgtaatccccagtactttgggaggccgagatgggcggatcatctgaggtcaggagtttgagagcagcctggccaatatggcgaaaccccatctctactaaaaatacaaaaattagccgggcatggtggcacatgcctgtagccccagctacttgggaggctaagacaggagaatcacttgaacctggaaggtggaggttgcagtgagctgagatcatgccactgcactgcagcctgggcagcagagcaaggctctgtctccaaaaaaaaaaaaaaaagttgcatgattttaaaacgcaacaaattgtctccatttcttggagacaagttttctctttcctccttcacattcccccctcagaaaaccaggtgccttgtgtgctttagaggacacttttgggccaggggtggtggctcatgcctgtaatcctaccactttgtgaggctgaggtgggcagatcacttgaggccaggagtttgagaccagcctggtcaacatggcgaaactccatctctactaaaaatacaaaaattagccgagtgtggtggcgcatgcctgtagtcccagctactggggaggctaaggcagaatcgcttgatcccaggaagcagaggttgcagtgagctgagatcacgccactgcactccagcctggacgacagagggagagtccatctcaaaaacaaaagaaaacaaaaaagaagacttacaaaattttttaaattaaattaaattaaattttttttgagatggagttttgcccttgttgcccaggctggagtgcaatggcatgatctcagctcactgcaacctccgcctcttgggttctagtgattctcctgcctcagcctcccgagtagctgggattacaggcacccactaccatgcctggctaatttttgtatttttagtagtagagacggggtttcaccacgttggtcaggctggtctcaaactcctaatctcaggtgatctacccgccttggcctcccaaagtgctgggattacatgagcctccgcacctggccaaagaagacatttttcccaggtaataaaggcttcacccacttgctccgtgaaaaaggcttttattgatggagtttcatgttaggatgttttccagcaattggattattggtagtggcctctgcacagctgaggcgcccactctggccagccagaagaactcaggccgagttctgttgcttgcctactcttctaaccaagtgaaatcagtctatacccagggttcagtcttcttatggagctgagaatgaattagtttcacctcagccaggatcctgcaagggagccacagaattcagcctagtgcagtgggaaattacatctcatgaaagcagctttgggtcaggccgaaggcctctgtgtcactcctttcagctgtcccagcagtgtcaggcagagggacgtgcaagggcacctttcatcctcaggcttaaagcattccatttggcaagatgggttgccatggctgcgtttgtgcttgataaacagaatgaacatgtttttattcatggagcaggagctggcaggaaggacaaaattggacacctgcacaaactgagaaaattactgtggtataaaatgaatggcctttgacaaactgtagtggcatgtgatcctggacctgagttggcggagtgtagacctgggactcagtcactcctagtaggcagagaagaggtacttttcttgcactgc

SEQ ID NO: 10515 - DNA, 2300 bp, Homo sapien
cccaggttcaagagatcctcccacctcagcctcctgagtagatggaactacaggtatgtgccaccacacccaactaatttttcgtatttttggtagagacaggttttcactatgttgtccaggctggtcttcaattcctgagttcaagtcatccacctgcctcagcctcccaaagtgctgggactatggtagctactgctcctggccttccaaattcttattattaaacaactttatggtgagcatattaatacatacagctgtttccccctacttagaattatttctttaagacagagccccagaattggaattattaggtctgaaagtatgaaaacgctgaggcttttaataaattgtatcatattgttttccagaatagttctaatttacatttggctttttgggggattggagcagggtttcacaatgtctcccaggtgggagtgcaatgatgccacagtaactcactgtagccttaacctcccagctcaagcaatcctcccacctcagcctcctgagtaggtgtgactacaggttcatgccagcacacccaggcttttttttggggggggatggggggtagaaacagggtcttgctgcattgcctaggctggtcttgacctcttgggctcaatgatcctcttgcctcggtctcccaaggcactgggattataggtgtgacccaccaagcctggcccataattgtagttttaaatgtcttggggtatttttatggagtgctgacttttcagtttagggctgagcttgtgcacagtggaggctagtgggcaagtgctcccctggccctgaaaacttacctgaactccctctctatggcatgggcagatggaaggagtgtccctgggggcttcttcctcagaactagatcacgattagccagcctgatgtagtaagttggatttgactgcccgtgatcaaactgaagtagttccaatgggcctgcaagtttgaaaacaaagaaaactcaaaccagccctggaggacagatctgagcagacattctttctttctaatgagttctgcatttgggcttcaaaatatcctcatctgccatgcagtgcaagaaaagtacctcttctctgcctactaggagtgactgagtcccaggtctacactccgccaactcaggtccaggatcacatgccactacagtttgtcaaaggccattcattttataccacagtaattttctcagtttgtgcaggtgtccaattttgtccttcctgccagctcctgctccatgaataaaaacatgttcattctgtttatcaagcacaaacgcagccatggcaacccatcttgccaaatggaatgctttaagcctgaggatgaaaggtgcccttgcacgtccctctgcctgacactgctgggacagctgaaaggagtgacacagaggccttcggcctgacccaaagctgctttcatgagatgtaatttcccactgcactaggctgaattctgtggctcccttgcaggatcctggctgaggtgaaactaattcattctcagctccataagaagactgaaccctgggtatagactgatttcacttggttagaagagtaggcaagcaacagaactcggcctgagttcttctggctggccagagtgggcgcctcagctgtgcagaggccactaccaataatccaattgctggaaaacatcctaacatgaaactccatcaataaaagcctttttcacggagcaagtgggtgaagcctttattacctgggaaaaatgtcttctttggccaggtgcggaggctcatgtaatcccagcactttgggaggccaaggcgggtagatcacctgagattaggagtttgagaccagcctgaccaacgtggtgaaaccccgtctctactactaaaaatacaaaaattagccaggcatggtagtgggtgcctgtaatcccagctactcgggaggctgaggcaggagaatcactagaacccaagaggcggaggttgcagtgagctgagatcatgccattgcactccagcctgggcaacaagggcaaaactccatctcaaaaaaaatttaatttaatttaatttaaaaaattttgtaagtcttcttttttgttttcttttgtttttgagatggactctccctctgtcgtccaggctggagtgcagtggcgtgatctcagctcactgcaacctctgcttcctgggatcaagcgattctgccttagcctccccagtagctgggactacaggcatgcgccaccacactcggctaatttttgtatttttagtagagatggagtttcgc

SEQ ID NO: 10516 - DNA, 2300 bp, Homo sapien
aatcaatttcagaaagaccaacaatccaatagaaaagtgagccagagacatgagcagctagttcatagcagaggaaacatgcatgacttcatctaggcagagatgctcaagctcactcgtaaaagagaagcaaattaatgtggtagtgaaatgccactttttcgtctctcagattagcaaagctaaaaaaaaaatcctgaaacttctactggtgagggtgtaaggaaactcagacatgacaggtagtggggcataaattaaacttctttggagggtaatatatctgtatttaaattgtaaatattctttgttccatttctactaatttctttcttttcttttctttcttttttttttctttttttttttcttttttttttttttttgagacgtagtctcactctatcacccaggctggagttcagtggcacgatctcagctcttggctcactgcaacctctgtctcccagattcaagcaatctcctgcctcaccttctggagtagctgggattacaggcactgcgaccattcctggctaattgtgtgtgtgtgtgtgtgtgtgtgtgtgtgtgtgtgtgtgtgtgtgtgtgtgtgtttagtagagatggggtttcaccatgttggccaggctggtctcgaactcctcacctcaagtgatctacccgcctcagcttcccccccagagtgctgagattacaggcacgagtcatggtgccagcctcatttctattaatttcttaagcaaatcaagagcatacattgtggcattgtttgtagtggcaaaagattggaaacaacctaaatgtccatcataggaaattcatgaaataaaactacctcatgtatccagaggaataccatgaaactgttgaagagaatggggacatagtccttgtgtgctgtgacaaaacgatctccacacacagtattaagggaaaaaaagtacctggcacggtggctcatgcctgtaatcccagaactttgggaggccgaggtgggcggatcacctaaggtcaggagttcgagaccagcttgaccaatatgatgaaaccccatctctactaaaaatacaaaaattaaccaagtgtggtggcatgcgcctgtaatcccagccacttgggaggctgagacaggagaatcgctagaacctgggaggtggaagttgcagtgagcccacatggtgccagcctgggcaacaagagtgaaaccccatctaaaaaaaaaaagcaaggcgccattgggaaggggaagtggggcctgcatggctgaattcagagaaggaagggagtcttggttatcagattatctctgcagctgatctccaaacctatttcccttcttcctggcacaggggccactcatttcccagactcttttgcatggaggcatggttgtgtgattgaaatccagccaggcgagcaggctcagcccacagaaacctcccatgggccacccccatgccttttcttcctctggtttgtgtggaatggtgctgagcccccagggcgactttggtggaatctggtgttgaaatcagagtcccaccgccgggcgcggtggctcacgcctgtaatcccagcactttgggaggccgaggcaggcggatcatgaggtgaggagatcgagaccatcctggctaacacggtgaaaccccgtctctactgaaaatacaaaaaattagccgggcgtggtggcaggcgcctgtggtcccagctactccggaggcggaggcaggagactggtgtgaacccgggaggcagagcttgcagtgagccgagatcgtgccactgcactccagcctaggcgacacagtgagactccgtctcaaaaaaaaaaaaaaaaaaaagaataagcaaatcatgcaaatcatcctgttctaaactctgaaccgctgcttccaagaccgtccctgcccttgccctggccgcctctctccttgttaactgggctccattcattctttccatttctctaacacgtgccaggtggtctcatctcctggcctttgcccttgctgttccctgtcatcattcaggtctcacttgtcatttcctgaccatggtacttataaaagcagtgccgtctgccccatccatgtcacctcgttcatctccttcacctccgaaatgatctcgcttttgggtttacggccggtctcttcacctggagcatcagccgggaaggtcagggtcgccctggctcgggcctgttcacattggggtcaaaggcacacattgggggctcaaccaaggcgagctgcgttcgcggggccgggtctttccgcacaggcggagggcgg

SEQ ID NO: 10517 - DNA, 2300 bp, Homo sapien
ccttctccagagcctggtcaccatctgcttccagttggcagaaggagtaacagcacaggggagcacctgttggaggtctgtatgggccaggcctggaaactgcacacctcttctggtcactttccgctggggagagcataggcacagagccacacttaaattttactttgaggaatgcagtgtaggtgtatgtccgacaaagaaaacaataattcggtagacaaataagtctccactccaatattcaattacttacttaacttatgctctggtatgtctcaaattaacctagatagaaatgaactctgaatcttccacttccatcaagtttttcactcactcaatggcatcattatccatccagttgcttaagcatacatttgaaagttatccttggtctgtttcttatccttcccttccacatctaatccttcaggaagtcctgacaatgttacctccaaaatatgtcttaaatccatcttctcagccaggcacggtggctcacgcctgtaatcccagtactttgggaggccaagggaggtgaatcacttgaactcaggggttggagagcagccggggcaatgtggagagacccaatctctacaaaaaaaatacgaaaaattagccaggcatggtggcatgcgcctatagtcccagctactcaggatgctgaggtgggaggatcgcctgagcccaggaggtctaggttgcagtgagctgtgatcacgccactgcactctagacagtgggaccgtttaaaaaaaaaaatccatcttctctacacctttaccgccacctccttagttcagacagtgtaataatctctcatctgcattattctccaatagcctcctaatagctctgtttccattcttgctttcctatattctattctctacaaagcagagtgatcttttaaaacaaatttgttcacatcactctttactttaaaaccttacaatagcttagaataaaatccaaagtcctgattatgacccccaaaggccacatatgatgcagcccctgcccacatctccaacctcatcctttttatacttttttttttctttttttgaaatagagacggggtttcgccatgttggccaggccggtctcgaactcctgacttcaagtgatccgcccgccttggcctcccgaagtgctgggattacaggcgtgacccaccgcgcccagcctccaacctcaccctttatcagtctcctcctactcgatctactccagctacaatgaccttcttgctgattcttgaacatatttagcttatttccaccttaaaatttctacccatctgcccagaaatctttccttggatttccaatagccagccctttctcattcctcaggggtctcagcttaaatgttacctcctgagattccttccttaatcatctaatacgaagaagtccccacatccagttattctcttacctcagcatcctgtttatgttcttcttagcatcagactcgggctttttcctgtttattacctacttcgttttcctgaaagatccatgtgccggtaccatgtgttgttcctactgtttctccaatgtctagtagatttggcacatactgatgtgcaattaatacgtgaatgaagaaccattgacagacgattagtcaaaagctcttgcaaagccctttgataggttatcggtggagagtagggagcacaaacctggggtcccattctagcttgaccacttctcggctgtgcacaaactagtctagctctcctgagcctcagttacctattttgcaaattagggatgggaacatccatacctcacgacgccaaacggctaccttgtaaagacgaaaggaggaaatgcaggaaataactccacgtaaggttaatgctccgtaaacagagctgctactgctattatatattctatacaatcctgcgcccttaacggcaggaccctttcagtgcttcagtcctgtcttctctctcctgggttgacctccacagatcctctcagaagagcgttttccaggcgtgaatctccgcagagtggagataaaggctgaggccccaacgcacgcgcactcacgcgagtccgggcctatgacgtcattagcgcagcgccatcgccgcggaaggcccaggggcctgtcctgtatgcggcgtgtcttagggaggcccaggcggacgcctgcaagtcgggtgcgcggttcgggggcggctcggaaaccccagcggaaggcagcaaggggcgcgtggggccgtggagtcacgaagctgggcggcaggaggggcggcctggagctcccgc

SEQ ID NO: 10518 - DNA, 2300 bp, Homo sapien
tgtggagagacccaatctctacaaaaaaaatacgaaaaattagccaggcatggtggcatgcgcctatagtcccagctactcaggatgctgaggtgggaggatcgcctgagcccaggaggtctaggttgcagtgagctgtgatcacgccactgcactctagacagtgggaccgtttaaaaaaaaaaatccatcttctctacacctttaccgccacctccttagttcagacagtgtaataatctctcatctgcattattctccaatagcctcctaatagctctgtttccattcttgctttcctatattctattctctacaaagcagagtgatcttttaaaacaaatttgttcacatcactctttactttaaaaccttacaatagcttagaataaaatccaaagtcctgattatgacccccaaaggccacatatgatgcagcccctgcccacatctccaacctcatcctttttatacttttttttttctttttttgaaatagagacggggtttcgccatgttggccaggccggtctcgaactcctgacttcaagtgatccgcccgccttggcctcccgaagtgctgggattacaggcgtgacccaccgcgcccagcctccaacctcaccctttatcagtctcctcctactcgatctactccagctacaatgaccttcttgctgattcttgaacatatttagcttatttccaccttaaaatttctacccatctgcccagaaatctttccttggatttccaatagccagccctttctcattcctcaggggtctcagcttaaatgttacctcctgagattccttccttaatcatctaatacgaagaagtccccacatccagttattctcttacctcagcatcctgtttatgttcttcttagcatcagactcgggctttttcctgtttattacctacttcgttttcctgaaagatccatgtgccggtaccatgtgttgttcctactgtttctccaatgtctagtagatttggcacatactgatgtgcaattaatacgtgaatgaagaaccattgacagacgattagtcaaaagctcttgcaaagccctttgataggttatcggtggagagtagggagcacaaacctggggtcccattctagcttgaccacttctcggctgtgcacaaactagtctagctctcctgagcctcagttacctattttgcaaattagggatgggaacatccatacctcacgacgccaaacggctaccttgtaaagacgaaaggaggaaatgcaggaaataactccacgtaaggttaatgctccgtaaacagagctgctactgctattatatattctatacaatcctgcgcccttaacggcaggaccctttcagtgcttcagtcctgtcttctctctcctgggttgacctccacagatcctctcagaagagcgttttccaggcgtgaatctccgcagagtggagataaaggctgaggccccaacgcacgcgcactcacgcgagtccgggcctatgacgtcattagcgcagcgccatcgccgcggaaggcccaggggcctgtcctgtatgcggcgtgtcttagggaggcccaggcggacgcctgcaagtcgggtgcgcggttcgggggcggctcggaaaccccagcggaaggcagcaaggggcgcgtggggccgtggagtcacgaagctgggcggcaggaggggcggcctggagctcccgcggggcacagcgcgtgcgtgagggcggccggcggggctgcccggcgcgggtgtcccggcgatgtgtggcgctgaggcggcggcgggagcagcggcgccgagctctgcttcggcttcggcttcggcttcgcggcggtgcaggcggcggaggcggaggcgcaggctcttctttaggacctggcgagcccaggtctaagcggcggccccgcgaggcccttgcacggcgccccgggtcgaggccctccccgcctcgccctaccccaggagcctgcctccccagctggggatgaggctaggaggcggccgcgtggggcccagcacaaagacctgtccccaggggccgccgcctccgccgctgctgctgccgccagcctagagccgcccgccgaagcagagccggcgccggggtcctcatccccaccggtcccgaggggcggctgctgcccgtcgccacgaggcccaggggcccgagtgccgagccctttgctccctcggccgcgcggggacagggctgctgagcagcctccgcctctcccggctgtgggggccccactgagtatgtcggaggagagcgacatggacaa

SEQ ID NO: 10519 - DNA, 2300 bp, Homo sapien
cttttaatcagggtcaaacccaaagttcttacgatggcctacaaggccctaagtgccttgcttcccattgctgctctacatcatctccactgacccactgcattccagccaccttgctcttcctacatcacactacacctgcttctacctcaaggtctgtccttgctattcccactgcctgttatactcttccctgagacagtggtggcttgctctcgcatttccatcagaactctacagtgtcacctcctcggactaccctatttaacacagtactcctcaccctttccacacttaattaaaaccacctagcagtaaccccaccctctagaatataagctacatgacagtagggacatctaggagtctggcttgtaccatttgtgtctaggacaccatctggcacacaggagacaatgtttaaaaactggccacatacgctttgattcacaacccaattaaataacttcaggcggcatatcatgcctctgtgccaataaaacccaaaccaaggctgggcgcggtggctcacacctgttatctcagaactttgggaggccgaggcgggcaaatcatgacgtcaggagatggagaccatcctggctaacacagtgaaaccccacctctactaaaaatacaaaaaaattagctgggtgtggtggcacgtgcctgtagtcccagctactggggaggctgaggcaggagaatcacttgaacctgggaggtggaggttgcagtgagccaagagcatcccactgcactccagcctggatgacaaagccagactccgactcaaaaaaaaaaacaaaacccaaaacaaaagaaggatatgtcaaggcagtcttttagaatctttatgatttaaaacctcgtcttccttgggccaggcacggtggctcacgcctgtaatcccaccattttgggaggccaaggcgggcagatcacgaggtcaggagatcgagcccatcctggctattacggtgaaaccccgtctctactaaaaatacaaacaaaagaaaaaattagcagggcgtggtgggtgggcgcctgtaatcccagctactcgggaggctgaggcaggagaatggcgtgaacccaggaggcggaacttgcagtgagccaagatcgggccactgcactccagcctgggcgacagagtgagactccgtctcaaaaacaaacaaacagacaaaaaacctggtcttccttaatgtatatgttatatgttgatgcctcctttaaagggttaagtttctttggaatgacttgatgattttgagaaactatatacaccacctaaagaattggtagaaatgtaaattcttaatcattactagtaactgtcttgaaggggaaaataaccccaagctgccaatagatgcctgtccttcaagataaaatgaaattattcaatgcactgggctgacttaacactacaaataagtaaataatacatcaaactttaagcgtcaatgtttaattttcataagactaatttcttagctacagctgtcaagacagataactggccctgagtgggcaaaatgtgcctttaaaaaaaaaaaaagttaaaaacaggttttagaaaacttattttatttgtgtaattttcgaacacacatttgcttttcttttggtttaagtgcagttaagtcacaggaactgttaacttttcctaagtaaactcaatgcttcctaggagaaagaagaggaaaaagaaaaaggggagaatacacggaaaagtgaggacaacctattccccaaaggacaggttttgtacggcgaaccacctttttccaactgcagatttccagaaggctgatttcaaacaaatcgggagggatggataaattccaactctccaagttctgtagaccatccggaagcaaatgctggcggccttggggagtgatcgaaacgtgtagtagtagtagtagggctctcttcgtcccattcattgacacttaatagtgtctccaggccactcacctctgttccagctgagcacaaatcacactcaccagggaagctggcgggagtcggacacacacctacacccacacccataacccttggccccagggctgtaaagcgcgatccacggaatccgggggaggccgaaacccggtagtcgatggaacctctcactgcaaaatctccctgctttttgaggctagagccgagaagaacgccacaggacaacgcgggggaagagggggcacctcccccttaccttgatggctttgtccatgtcgctctcctccgacatactcagtggggcccccacagccgggagaggc

SEQ ID NO: 10520 - DNA, 2300 bp, Homo sapien
ctagatagtgcccataactcactgtgtgaccttgacaagctccataatcctgacgcacagtttttcagaagggagtttgtatagcgatcttttgggtcctcctaactcaatatcccttcatcacaaggctttagtctgcctttctagggattaattcctttctagtcattcattccatagttatttactgtatgctgagaacctttaccaagaattggacacagaaaggggtggagatgaagactttccaagcctggcacattcactggatagaggccttgttttcatacctgaacttagcctggtatactagctgctcagtgagtgtgtattacgtaagcaaatatcctattcctgtatactagcgagcgggattcttgtgctacatagtctatcagattttcattgcaacaaaacaacgtgaaagtcttatggattttgatttttttttttttttttgagatggagttttgctcttgtcgcccatgctggagtgcaatggcgtgatcttggcccacagcaacttctgcctcctgggttcaagccactcttctgcctcagcttcctgagtagctgggattacaggcatgcgccaccatgcctggctaattttgtatttttagtagagatggggattctccatgttggtcaggctggtcttgaactcccacctcaggtgatcctcccacctcggcctcccaaagtgctgggattacaggcatgagccactgtgcccggcaggattttgatttcttaaggtctgcagttggtttcctattttacctgtggaagcctgcaaaaatgaattttagactatcacaatttaaatatgtgactttcttgcctgtaaccccagctatttgggaggctgaggcaggaggattgcttgaagtcaggagtttgaaaccaacctgggcaacatagcaagaccctgtctctaaaaaaagaaaaaagaaaaaaattagccagatgctgtggtgtgtgcctgttttcctagttacttgggaggctgaggtggtaggatcatttgagcccaagagttcaaggctgcagtgagaaatgatcacaccactgcactccagcctgggtgaccctcggtcttctcggctcactgcagtctccacctcctgggttcaagcaattctcctgcctcagcctcccgagtagctgggactataggcacgcgccaccacgcccagctaattttcgtagtttttagtagacacggggtttcaccatgttggccaggatggtcttgataccttgacctcatgatctgcctgccttggcctcctaaagtgctgggattacaggtgtgagcccggccgagaccctgtctcttataataaataagtgagtgaatgaattaattaattaaattcttttttatctaaaagcatatggcaacagaggctaacatgcaatagttagccaagaattccattacaactttcattaaactgtagaggctctatcctaaactgttgaaagttatttatatcagaaatatacttacataatgaaattgacagaatatatctgtacacaaaatggtggtgttggaaattagatgtttactatgatattgattagttactattttttttgaacttttaagtctcagtttattcagttattccaataatgtaatcaacttgttcagggatataggcctctacagcttggcagcatatatctgactagtctttctagaatctcataaaatatacttgaccattgtagcaaagaggcatttagtaattgatgcattttgaaagagtatcttcctctcagaaccccccaaaagcattgattgtctatggaaatgtaccttatagatgagctgaataatttccttttatcgtgaagtctttgctttcttgttggaaaattgggaaacaatgtctgagtcattgtcatttagacaaaatgtcataaagccctgtagaacacaaagttctgcttatcagattctcttagaagatgagctgttgagtgacaggtcttctgttgtcccatctctgcttattcagtttgttaactgaggaatcattctctgtcctctccctttttttatattaataggaaacttccattttagaagaatacagtatcaattggactcagaagctgggagctggaattagtggtccagttaggtaagagatccatatgagaaactatggcaaattgttggcatgtgcaaactctgagaagggccatttgaaatacatcttgaattagacacatcaggtgtgccagatttgaggaataggctgaatttaacaagtacaggtttt

SEQ ID NO: 10521 - DNA, 2300 bp, Homo sapien
tatacatacatatatatatatattttttgagacagagtctcactctgttgcccaggctggagtgcagtggtgcaatcttgactcactgcaacctccgcctcccaggttcaagcgatcctcctgcttcagcctcctgaggagctgggactacaggtgcatgccaccacacccggctaatttttgtatttttagtagagacagggttttgccatgttggccaggctggtcttgaactcctgacctcaggtgatccacccacatcagcctcccaaagtgctgggactacagacataagccaccatgcccaaccatagcctaagatattaactccactacctattagtctgctgttgtagtagctccatacacacacacacacacacacacacacacacacacacacacacacacacacacacagagctttgaagatactttttcttctttgggttttcttttctttttatttttttgatacaaggtttcactctgtcactcacgctggagtgcagtaatatgatcacagttcactgctgcctcaatctcctgggcccaagtgatcctcccgtctcagcctcccaagttgctgggaccgcagatgtgtgccaccatgcctggctaattttttcttttttttttttttaattgtagttttgtagagatgggcggagtaggaggtcatactatgttgcctaggctagtctcgaactcctgggctcaagtgatccttctgccttggcctcccaaagtgctgggattacagatgtgagccactgtgttaggcctgagttctctttgaaatactctagcaagacttctgccataaactttttttttttttttttttttgagacggattctcattctgtcaccaggctggagtgcagtggcatgatctctggtcactgcaacctccacctcccgggttcaagcaattctcttgcctcagcctcctgagtagctgggactacaggtgcatggcaccacacccagctaatttttgtatttttagtagagacagggtttcactatgttggcccagatggtctcaatcacttgacctcgtgatccacctgtctcggcctcccatggtgctaggattacaggcatgagccactgcacccagccagcaataagctttttatcagagattcattggtacccaggtaaaaataggagttaaacactggataaccacctgacagaggaaagaataaaaagtgaagaagggaagtgagtgggaggggtcacaaaaaacaattttatttattttcctaaagtcaatgctagctgtcctattcctgctccaaactgtttggggcaaattaattaccaatatctgattattgattaattactcacttaatgcttattgatccctaacaatgccattccaaatatatgttttctatcttaaattagaaaaaagcttatttttaattctattatttctttaagatgttctgttcaaagtcttacatcataaggtcctagagggtaggaaaaactattctgtaagttgttttacagtgtctaacacaagtcaagattttgaaaatgttctatcgtgtagtgtctaacagtcttatatccaaagggcatatttgaccctgccctattatactaatcctggactattacactttttactggtcgtcttataagaagggtttcattccactcataaagtctgaagaagtccacacatctctgggtctaagagaaaagagctgaactgttattagaagatagagggttactatatgatttcatatatgcctttctttttaaaagaatttgtttgagtgcccaaagtccatattaggctacttcctgcaggctttctttgtggctttgttgttgttgttgttgtactttttagaatatagtaatagagataaaattctattatatacagtgctaataaggaactatctatttgatgaattttatagcaaatattgcttgacagaagcaaactggcttttggaaatctttttgttctattgagtgttaactgatgatctggtatttattattatatgattgacaatgtcttaagacatttctcacatttattcttttcacaggtgatagattatacttgtcgagtttgtcaaatggcctttgttttctcaaggtaaaattttttctttacttcttagcgaggtgtagactctcattattctggtgttcaggtgggaacaaataggacagtgccctttatttccattgtcagtcctaagtcctcacagagcctaacttagaaacaacaaatacgtgttcattgcttccatttt

SEQ ID NO: 10522 - DNA, 2300 bp, Homo sapien
ccagtcacacctccctgctgcagctggctgccatcaatagggcaaactcaaaatttttcttaacttccccagacacattcacacatacacacacacaaacacacacacactttctttcaaaatttatatccaatcaaactggttgtccatgattggatcctgttatcactgttgactatttatacacatacattttggaaacatacaatggttaattatagcagtaagtcccttacaatgcattgtatatgttctcttacatgcatttgttcatcaaatcttgtgaattctaccctttaaaagtttgtcaattccatccatacttcttcagccctattatgtcctactgcatgaccttaacctcttccaactagactattgccataccccattaattggctttagtcccgtcttctcaattccaatccatttccttcattcctgagtaatgttgtttttgttttgagacagtcttctctgttgcccagactggagtgcagtggcagcaatcagggctgactgcagcctcgacccctcaggtccaagtgatcctgctgcctcagcctcccaagtacctgggaccacaggcatgcactaccacacatggctaatttttctacttattgtagagacgaggtttcattacgttgcccaggctgacctgggtgctgtttctacacacaaatctaacctcactctcctagttaaaacttctggtgactccaaaccctttagcttggtgagaccctttcgaatccgccccatggaagctcagtaataatcaatcaaaataaaaaagagcggcagcagctgttgcgccagttcgcctttacatagattcatctcaaccagttccccaacatgcctgtgcataattttcccattgttagaaatgccctgtttctctttgcctcatgcacgccccctcttatttcaaggtccagctcaaaagtcacctcctgtctacaacttcctctgatgctcctgagcagggatggctgaatctctgtctctttacaataagaaaatacggtctttttttttctttttgagactgagtctcgctctgtcacctaggctgaagtgcaatggcgaaatctcggctcaccccaacttccgcctcctgggttcatgcaattctcctgcctcagcctcttgagtagctgggattacaggcacgcaccaccacactcgcctgatttttagtagaaacggggtttcaccatgttggccaggctggtctcgaactcctgacctcaggtaatccacctgcctcggcctcccaaagtgctgggattacagacgtgagtcaacgcgcccagccggaataatattttacagcaattacactgcactgtttagatcattattcctatgccgcctcctcccccaacaaagtgcgtgccttcagcacacaacggtcttgtttctgcttattccgtagccccgcaggcaaagccagagtctggcacaagccagggaccgagtgactacctgcggaacagaatgattagaattgcgtctggggttcctggagggtgggccttggctgggcggatcccaggagcctggcgtctcccaggggaggcgctcacctcagatcgggcctaagagggccctgcttgccacactgaccgccaagcctggccaaaaagctcagggaagccgcggagccactgcccgcctgggtcagggtggtgacggagcctgactgagaataacggctgaacttgactaatagactgaccgagggttggagcgggtcccaaccaactgcctgacggcccaaaggcaggaagaaacgatggtaggccttgtcatcttcgaaggagaggaaggacagcaaacgaattgctatagcgtccccatgcgcacttggcgcttctcctcaagcggagcaggaacggaactgggcggacccgccggaagactcggcgagtgcgcgcgcgcaggagcccattttcccgcccgcaacgtggccccgcccttttacccaggccctacgcgagcttcgccgagtacgcgtgcgcagcagcttcccctccctcgccccgcccctcacgtggccccaccctctcaccctagacagatgggagcctcctggggtgtccacgtgagcgcgcgtgagtccgcccccccagtcacgtgaccgctgactcggggcgttctccactatcgcttacctacctccctctgcaggaacccggcgatatggctgccgctgtgccccgcgccgcatttctctccccgctgcttccccttctcctgggcttcctgctcctctccgctccgcatggcgg

SEQ ID NO: 10523 - DNA, 2300 bp, Homo sapien
caactcctgacctcaggtgatctacctgcctcagcctcccaaagtgccgggattacaagcatgagccaccgcacccagcccacacttttttttttttttttgagacggagtatttgctctgtcgcccaggctggagtgcagtggcgtgatcttggctcaccgcaacctccgcctcctgggttcaagcaattctcctgtctaagcctcccgaggagctgggactacaggtgtccaccaccacgcccagctaatttttgtatttttagtagggacggggtttcaccttgttggtcaggctggtctcaaactcctgacctcaggtgatctacccgcctcagcctcccaaagtgctgggattacaggcgtgagccactaagcccggcctacacttttaaattcttgaaactttgccttgaatgagctgcaagtgccaaatccacgacagggaacgcttgaaaataggagacttcaaccactggagacaactacttcttggtttcacttccccacaatgagtacaaaacctgaaaatgaaatgactggctctctcgcaacactaagcttgcccatctcctagaggaagttaaaagctgctcgtgggtgaagacaggtgcaagaggaggggactgggactgcggtgttgcattcagccaccatttccaaccgtccatttactcaggccaggatccctaattctgcaaaaatggaaggggggaaaggcggaggtagtggcaaattcttccatgccttgacccaattttactgattttgttgccaaccccaagatgtttcctacaacagctatccccaacctttttggcaccaagaactggtttcatggaagacaacttttccacggggttgggtggtttcgacatgaacctgtttcgcctcagatcatcaggcattagattctgataagaagcacacaacctggatccctcacatgcgtagttcacaataaaggtcgtgctcctatgagaatgtaatgccgcagctgatgtaacaggaggcggagctcaggctgtagtgctagctcgcctgccgctcacctcctgctgtgcggcccggtttctaacaggccaccgacgggcctggtggttggggacccctgctttacagggtggctgaactgaagcttattcttcacgcttgcactattcaagatgtatgatatctgatcattgtttgcacactgcaaagcaggctgcaatccaaccctgggaagaggggcgcggacacgcaggctaacgcgcctgcatttccccccgccaacccctcccagcttccacagccgggagcccggtggcgtcgacctcgcaccgccctccggttctcccacttgggactcgagggttggatctcgccaggcaccgccctctccccacaggtgaagggaaggggcacccagttccctcggctgcatctttgcaagggtggatgcaagtataaatgctgcaaaagcaagggtgcgccggggccctgaagcgtgcatgcccggtggtcataacattctccgctcagagtccactaggcctgtaggacgccgggaagctctgggaccgttgctacagaccacctcccgtcagctcccggaatccagcgtctccccacgggcgcgcgctcttccgggcgccccggcggcacctgcgcgcgacgtcccccgccccggttaccttgtagaaagtgaccgtatccaggggaagggcgcccttggtgtgcaggccgctgccgccatgcggagcggagaggagcaggaagcccaggagaaggggaagcagcggggagagaaatgcggcgcggggcacagcggcagccatatcgccgggttcctgcagagggaggtaggtaagcgatagtggagaacgccccgagtcagcggtcacgtgactgggggggcggactcacgcgcgctcacgtggacaccccaggaggctcccatctgtctagggtgagagggtggggccacgtgaggggcggggcgagggaggggaagctgctgcgcacgcgtactcggcgaagctcgcgtagggcctgggtaaaagggcggggccacgttgcgggcgggaaaatgggctcctgcgcgcgcgcactcgccgagtcttccggcgggtccgcccagttccgttcctgctccgcttgaggagaagcgccaagtgcgcatggggacgctatagcaattcgtttgctgtccttcctctccttcgaagatgacaaggcctaccatcgtttcttcctgcctttgggccgtcaggcagttggttgggacccgctccaaccctcggtcagtctattagtca

SEQ ID NO: 10524 - DNA, 2300 bp, Homo sapien
ccaggtagctgggattacaggcatgcaccaccatccccagctaatttttgtatttttagtagagacgggtttcaccatgttggccgggctggtctcaaactccttacctcaagtgatccacttgccttggcctcccaaagagctgggattacagccgtgagccaagtgcacctggcctcctcaatcaatcttaattctccttttacctaccaagagttactcgctatcctgaatattttttattctcttgcttccctttaaatgtttattacatttatttctcttagtaatacattattagttttgcttaattttaaacttttgttagtgcatctgtactatgtatattctatgacttgcatttttcatctaatagccaagtggctatagttaatccattttcactaccacaaaatatttcactgggttacattacaatatctaggagtagaattttcaagtcatggggtaagtgtatgtttagcttaaagcaagataatgtcaacttcttttataaatagaatagcagtttttgagttctgattgcttacatgcttgtcaacacttggtattctttctctcttcattcattcaaatagctcagattgtaacatttggtatttgtaaccttaatcatttttgccaatttcttttgagacaggattttgctgtgttgtccaggctagtttggactcttaggctcaagcaatccgcctgcctcagcctcccaaagtgctgggattataggcacgaggcactgtgctcagcttcaattttgtttttaatttttacaaaagataaaacctaagagttgaggtattatatctgagtatttacagattgtgttgatttagggatatggattcttctccagtgttttaaaaaaaatcatttactccacaaatattggtggcatgtttctctatgactggtattctatcagagtcaaagataaaaaatgcactttcagccgggcgcagtggctcacgcctgtaatcccagcactttgggaggctgaggtgggtggattacctgaggtcgggagttcgagactagcctgaccaacatggagaaaccccatctctactaaaaatgcaaaattagccgggtgtggtgatgcatgcctgtaatcccagttacttgggaggctgaggcaggagaatcactcgaacccaggaggcagaggtttcagtgagccgagatcgcaccattgcaatccagcctgggtaacgagcaaaactctgtctccaaaaaaaaaaaaaaagcactttctgttgtcatggcactcattgtctataaggggaaatagatcactagacagtatactacattatgtgttaataaatgctatagtacagcctgggcaacatggcgaaacactgtctatataaaaaataagccagttgtggtggtatgtgcctgcagaacagctacttgggaggctgaggtcggagaattacctgagcttgaaaggtcgaggctgcagtgagccgtgattgtgccattgcactccagcctgggcgacagagtgagaacctatctccaaaaaaaaaaaaaaaaaaaaaaaaaactacaatatacttacttatataagattccaagatggcagagggaggcagtggtcaaattgcagtggagaagcagagatggtgttcagagaaagtcttacagttcagcttacatttgaattgggtcttggctgatgttcactaagataaaagagagaaaaggagaattcaggcagagcgaagagtttagaggcatagagttatgtatgatacatcccagagaatctggtggaactacaaatagtttgtggctacatgataaagtgctgagggaaagaggagacagaggccagatcctataaggtcttatatgttgtaaatgctatgagaaggcttgacctattccatgcttcatttaaacaccacctaaccaagagatgaatgatgattggatgaggcaaagcagatacttcttctataatgataggagacatctatttctgccaaataggaagaacattaaatgccattagaatgttcttgaagtataacttaaatcttatttctctttatcttagcggagttagttacaaaactttatgaggcagctgtgaagaaagttcccaatagtgaggagtatcactctcacctcttcatggcctatgccagagtgggtgaatacaagaaaatgcaacaggtaatttgatccccaaacctactgggctatgggatttactattagaggcaaaagtctctttcttgtgatttaactgcactgggtatgtgtgtgtg

SEQ ID NO: 10525 - DNA, 2300 bp, Homo sapien
tttaaaattacctccctctctcactgcccccctttcctgctttatttttctcagtagcatttatcaccatgtaataggctatctacttatttattgtctgtctccctcactacaaataaaaactccattaagtctctgtctattttatttattgatgtatcctctgtgcctaaaacaagagtgtgtcaaataataggcactcaataactcagtgttgtacgaataaatctatctgtaaaaagagaggtaataataagatctacctcccagggaaatacgatgacagttatgaaaattaaatgagagaataaatgtaaagaccttgcatttaaatactctaggcagataccgagtaagtattcatctaggatgcttctttgttggctgagtcctgggagaagggtgtgtggcaggccaggtctcactaacacaggcctccataacaactgtttcagtactaactgagtggttaagttacatattaaaagctaaaaaaaaaaagccagtgcccttatacaaaggatggaatgtaacaaaagcccaccaagagttttgcctaggcctttccttggccttaaagcatgacaaaataacgaaagaattcctaacaggacccatttaggattaaacaaattttattgggggtctgaagtaactccccaaacctccgtgatttagtaggaggcaagataaggataatcaccccagcacctattgccatttagattaagtaaatttactgaggcttcaaaggaaagtcttcaggactcaaaccttagttatagactaaagtgagttaatcaattattattattattatttttttttttttgagacggagcctccctcgcccaggctggagtgcagtgccgggatctcggctcactgcaagctccgccttccgggttcacgccattctcctgcctcagcctccctagtagctgggactacaggcgcctgtcactgcgcccagctaattttttgtatttttagtagagatggggtttcaccgtggtctcgatctcctgacctcgtgatccgcccgccttggcctcccaaagtgctgggattacaggcatgagccaccgcgcccggcgagttaatcacttatgtctttagatgaatgcacatttacacgtagacatatagcttagaaggtatataagctctggaaagctttgtaattttaagttggtctggtgataatttccaggccttctccctgtaactggttgcagaaataaaaactcgcttcctctccagttcatctgcatctccttactgaaccaggagaaacagcagcctgacgctcagtttggtccaggaacaggtggtggagggctctcgaacttttttctttttttttttttttttttgagatggagtctcgctctgtcgcccaggctggggtgcagtggcgcgatctcggcttactgcaagctccgcctcctgggttcacgccattctcctgcctcagcctcatgagtagctgggactacaggcgcccgccactacgccccgctaactttttttgtatttttagtagagatggggtttcaccgtgttagccaggatggtctcgatctcctgaccttgtgatccgcccgcctcggcctcccaaagtgctgggattacaggctgagccacagcgcccggctctctcgaacttttttggcagatttttgctgttgatcagccccgcttccccaactttcccctgggtctctctcccccgggagtttctggttcctctgcgattaatcacagccaagtctagctggttcttcaggacggagaataaataggataaacaggagcagccgaaccctaactttgagagctttctcccctcctctcctaacttcccagtcagtgactcggaagactttaacagcaacagctgcctcctcttgccagcttgatcccacctgctaagtgaaggaacagcgtttaaagaggtggcaatcggcaagggtggatgcttccctttccgcgcaggcgcgttcagtcgcagcaccgcgactatcgtgatagacaagcgagatcgacgctggccctttaatagccctttcccggggtcctgccccgcgcgtgcgcactgtggttctgcgcttgtcatcatggcgacgcggggccatgtgcaggaccctaacgacaggcgcctccggcccatttacggtgagtgtcttggaccagcccgctcgccagcccgacgcgccgagggctgccgaggctggggcgaaagcccaggaggggtgctgagggccggcgcgcgggccgggcaggcgcaggggggcggg

SEQ ID NO: 10526 - DNA, 2300 bp, Homo sapien
gcctcccaagtagctgggactacacgcatgagccaccacgcctggctacatttttgtattttttgtagagacagggttttgttatgttgcccaggctggtctggaactcctgagctcaggcgatccacccaccttgacctgccgaagtgctgggattgtgggcgtgagccaccatgcctggccaaaaactagaaccagctctaatgtttgtcagtataaattgtggcatatccatgtgctatgctacttggcactgaaaaggaatagacttgatattatcaacagcatggataaacctcaaaaacattatgctgagttaaaacaccttattcataaaagaacacactatatggttatcttttttctttatatatacttaatacattaatatacttaattcatattaatacacattttttctgattgctttttaactgttaatgattgtgctttcttttgaactccagtaagttttgttattaaaatgtaacatacaatgtaaagtgcttaagatataggtgtgtagcttaataactatttactaattaatccatctgtgttaatcactttgctgatcaagatataaacatttctagaaaatctttctcatatctccttacaggctatataccctctgaatggaaccagttacttacttctctcactttaggttaattttccctggttttaaactttatatgtttggaatcacacaagttatattgcatatttaagctaaatattttatcttgttataaatattgctttgagacggagttttgattttgttgcccaggctggagtgcagtggctcaatctcggctcactgcaaccttcacctcctgggttcaagcgattctcctgtctcagcctcccaagtagctgggatcataggcgcctgccaccacggccagctaatttttgtatttttagtagaaacggtgtttcaccatgttggccaggctggtcttgaactcctgacctcaggtgatccaccagcctctgcctcccaaagtgttggcattacaggcgtgagccaccgcgcccagcctgttagatgcttttcttgcttagtactatctcattaacattttgcaattatattatattatattatattatattatattatattatattatattatttttgagacggggtctttctctgtcccccaggctggagtgcggtagcatgatcagggctcactccagccctgcctcctgggctcgagggatccttccacctcagcctcccaaggaggtggaactacaggtgcgtgccaccacgcctggctaatttttgtattttttttgtagagatatggtttcattatattgcccaggctggtctctaattcctgagctcaagagatccacccgccttggcctccatattttgcaattataatctgcaatggaatcataattttaaattgctgtattgtttgtaatatgtgcttggttatacttatataattataagttggtttgtaatatgtgcttggttatacttatataattattctctcctttattatacatgaggtaagagaagctcagggaatccattcaggcagcaagtggagaaactagctctcaaacctgcatctcaggctctcattcttccactgcaaaaaagcaaagtgctcaaaaaatatggtcacagatctgcagaagtcttgcacaagggcattatcatagcaataagaatgactaataagtattaacggcccatgagaaaagaacaaataccattaattatctcaatatattaagcatattagtaatgtttgtacagaattattcatgcaaatattattagcctgtgtcggggacagttgctaaactcagcaacaggctcacagctcagcttcgtgcctctggttccagatgtgcaggggccagggcttccagggacacgcccccgtgggcctccagggagccaatcgacgcgcagaaggcggggccctgggagcgacaacggtgttatccaatgggccgacagctggagccgcccctggccaatgggcgcgctcctccgcgatgggcggaagtggtgaggcagctctgagggccgttgttcagtgcggggtctgacagaggaggctccgtgtctgcagctagtgtgtcaactcagcgtttctcctctcgtccctggtgaggtgtagcggcggcacgcggctggagatcccctgtggcctccagtttaggaagggtccagcatcccaagggaggggtgtgtgggcgaggggtctctgggcccggggtcgcggctgtgaggagaggatgcccgcgcgg

SEQ ID NO: 10527 - DNA, 2300 bp, Homo sapien
gggcaggatttaagaccatttttgtatcatggaaaggaataatctaaactaaacaatggtagtaaagttgccagtgctttgctttctgcattgacatcttgtttaaaaagcaggagaaactttatagtgaagaaatttggcagacaccatatcaactatgtgatcatggtttacatcaatagtaaaataagactgttgacatcatgtaccttctgatataaggcactgagatgagcacaacatgatttctatggtgttcttgccaaaaatatataacctgaatttaatcatgagaaaatatcagacaaacccaaattgaaggatattatataaaataactagctggctgggcacggtgactcatgcctgtaatcccagcactttgggaggctgaggctggctggtggatcatatgaggtcaggagtttgagaccagcctggtcaacatggtgaaactccatctctactgaaaatacaaaaattagctgggcatggtggtgcacacctgtggtcccagctactcaggaggctgaggtcgaggttgcagtgagccgagatcgcagtgagccgagatcgcaccactgcactccagcctagacagcagagtgagactctgtttaaaaaaaaaaaaaaaaaaaaagccagtatgcttaacaaggtcatgaaagagaaggaaagactgaagaactctcccaaatcaaaggagattaactacaagtaatagccaaatgcagtgtgtgatcctagattgaatgctgaaccagaaaaagggtgggatggtgattttttttttttttttttttttttttgagacaggatctcactctgtcacccaggctagggtgcagtggtacaatcactgctcactgcagctttgacctcctgggcttaagtgatcttcccatctcagccttctgagtagttgggaccacaggtgtgtgccaccacgtctggctaatttttaaattgtttgtagagaagggtttcaccatgttgcccaggctgatcttaaactcctgggttcaagcgatcctcttcagctcagcctcccaaagttctgggagtacaggcatgagcccctgtgcctgacttgttggtgaaatttgaatgaattctatagattagttactagtattgtattagtgttaatttcctctatttgataattttactattgttatgatgcttttagggtaattggatgaagtctgtaagggatgttattttatttttatttatttatttatttttgagacggagtcttactctgtcgctagggtggagtgcagtggcacgatcttggctcactgcaacttctgactccctggttgaagcgattctcctgcctcagcctcgcgagtagctgggattacaggcatgcgccaccacacccagctaatttttgtatttttagtagagatgggggtttcaccatgttggctaggatggtctcgatctcctgaccttgtgatctgcctgcctcggcctccctaagtcctgggattacaggtgtgagccactgcgcctggccaggatgttattattattattatttttgagacagggtctcactctgtcacccaggctggagtgcagtggcatgatcatggctctctgcagccttaaactcctaggcttaagcattcctcttgcacattcctcctgcctcggcctctcgagtagctgggactacaggcacacatcaccatgcctgggtaattttttttttttgtattttttgtagacatgacgttaccccatgttgtggccaggttggtcttaaactcctgggctcaagtgatccgcctgcctcggcctcccaaagtactgagattacaggcatgagccactgtacccagcctagtaaaagtattttattttattatttttattttttaaaactcccttatccaataaaattattttaaattgaaaattttaaaataagaaaatcccaagggactggatattgaataaaatgctttaacatgcaggtttgggtgacagtttctgtatactagttttttatttgtttttttgcatgtcatctttaaagcagaaatgaaagagaaagttcatgtcttcctttgtggttttcaggaagagctaaagatggctgaatttctagatgaccaggaaactcgactgtgtgacaactggtaagacattaaatctaagaaatgttagtggaatgaggacagtcaagcttaatcactatcatttcctgatttaaaaactgttagtgaagactggcacagtcttgagttaagctttctattttggtgtttataacccacatg

SEQ ID NO: 10528 - DNA, 2300 bp, Homo sapien
ccaactccaacaagctttagaaaaaaattgtttaaaatgagttgctcttaggccgggcgcggtggctcacgcctgtaatcccagcacttcgggaggccaaggtgggcagatcacgaggtcaggagattgagaccatcctggctaacacagtgaaaccccgtctctactaaaaatacaaaaaattagccaggcatggtggcgggcgcctgtagtcccagctacttgggaggctgaggcaggagaatggtgtgaactcgagaggcggagcttgcagtgagctgatatcgcgccactgcactccagcctgggcgacagagcaagacttcatctcaaaaaaaaaaaaaaaaaaaattagttgctcttaaaacaaaaagcatgatgggtttgacttcaggcagggccaaatccaggtgttcaaacagtatcatctggtattggtctcaggcctctgatccagattgctttaaaaaaaaaaaaagaaagaggacaggcgcggtggctcagctgtaatcccagcactttgggaggctgaggcgggtagatcacgaggtcaggagttcaagaccagcctggccaaggtggtgaaaccccgtctctactaaaaatacaaaaattagccaggcatggtggcgggtgcctgtaatcccagctactcgggagcctgaggcagagaattgcttgaacccaggaggcagaggttgcagtgagctgagattgcgccactgcactccagctgacagagcgagaatctgtctcaaaaaaaaaaaaaagaaaaagcggtctgggtgcagtggctcacacctgtaatcccagcgctttggaaggctgaggcaggtagatcacctgaggtcaggagttagagaccagcctggccaacatagtgaaacccagtctctactaaaaatacaaaaattgaccaggcatggtggtgggcgcctgtaatcccagctactcgggaggctgaggcaggataattgcttgcacccaggaggcgaggggttgcagcgagccaagattgcgccattgcactccagcctgggcaacaagagcaaaactccgtctcaaaaaaaaaaaaaagcaagcataattagcctcaagcagtctctcccagcgcacgggcagaggtggcctccagtggtaaagggtttcccatcatagtcggtccatgccagtgagagaggatcgctgcctccaaacagacgtgggaagaggcctggaatgtgggtctctttagcctggcctgggtcacacgcccggccctgaactgatggcaggttctgattggcgaaagctgtgtcacatgctcatctacacggccgagggtagaccccaccagctgcgcttggggtttacccagccacctggggatcagggttccacctcccatggcctcataatgagcctcgctctgcctccaccctccagatcaatgatgagaccgagctggaggccctgtgcgctgagatcgcctcccagcacctggccacggagagccctgacagccccaacaagccctgctgcaggttcacctacctgaccatgacgggcgaggaggtggagctgtgcagccggggccggcacatccttgtggcgtgagtgtgtgcgcgtgtcaggggctggcaggggctggcccggccagccagccagggtatgacagcagcatctgttcctgggcaatgacacgaggacctaggtcaggtgacaggtggatttcaccaggagagggagatgaggcaggatggtgggtgccaagaaagagggtcctcagcagaaggggtttactaagaaaacagcagctctgaggcggcggcaccagaggcaggaaaggactgggatgaccagggcggctgggccccaggcctctcccaagagaggatccgggacctccagctgagtgggtgtggcccccagacccagcctcttcggcggtgttctccctcacctgtgctcctcacccgggcaggtgggagaacaaggacatctacgcggcagccatccggagcctgcggctgcgggagctgcagaatgtggagtgcgtgacggccgtgcgggccggcctgggctccatcatccccctgcagctgctgaccatgctcagcccactggagatggagctgcgcacctgcggcctcccctacatcaacctcgagttcctcaaggtagacatcccagggccaggctgggcggggaggtggtgagccccaggcgtgcctccctgtcaccctcaactccagcagcaggcatcggcagtggcctgtctcagctctgtccttgccacagacctgtatcattgtcatcat

SEQ ID NO: 10529 - DNA, 2300 bp, Homo sapien
aggtccatggcaccagtaagtggtggcccgccaggctccacgctggaggagctgtgtttagtgtccagccttagccccagctgcccaagacctccatttccaagagtaaaagccacatcctcagcacttgtgctgcagaagccaggtctgcacccagagtggcctcacgcccgtgtcctccagaccagccccctgtggaagcctcggccagtccctgctgggcttggggacggcacctctgctcagggccctcctcggtgctgattggccccctccccgggaagggccctggctgaggagttggtgggcctaaaggcttgtgtgtgccccatgagaggcagggtgttggggagtccttggttaagatggcaccatagcactcttcagggatgaggactggcagctgagcaagtgctcccttgtgacctcttatgcttagccccagacattcaggaaacgtgtccactgcagatggagaagaaagctagtttctccacagccgggcacactggaaggaaaggctgtccgggcaggagggagcccccacccagctccttctcccctttcctctgatctgcccccacgggaacgcagctgcctcccagacgggggaccctggcatcctatgggcaggcctcctaggcctctctgagagcaactctggttcactgacagcccagactcacgctcgacaccttatccttcccacagcagcgaacctgcccagagtgccagccctggcccatcctacacatagggaaactgggactctacaaagccaagtcacttcccaaggtcatgcagccagctggggttccagggtccaggcccctggccttccaggcgtcagcagtcaggacgctcctgcttctccttgaagcagaggtgagggccaggcccaccatctgcccctgcactgggcccccacactgggtttccacatggctcttaccaagcagggtgtgggcacagctgtgctcagagctccctgacctcagggtaccgatagggaacacagggaaggccagaggagatttacaacaaaaccaaaggcccatcttgaatggcggcgggagaggatgagcagttaccgttgccctttgcacattcacacatttgtccattcactcacgcattcatcggacatacgcgagcccgggcactgggggaggcagtgctgagtgaaacaggtggtcctgccctcagcctggcccagagggacagacatggaccaaacaagtccacaactcaggcaggcttgcagctgtgagaggttgcctgtgtggggacctgcggtgacctcactgaatcttcgaatggccttcggggtaggtacggtcactctcccatttgacagacaggtgactgagcctcagggacatcttgccctccgtggtatccctgggtggccccactagtgagtggagagcaggattggacctgaggcctcccaggcctggggtggcttctttctaccccgccacagcggcaggtaggccgtggaaggagtagccgctccagccagcaggtgagagggagggaacggtgtcgcctcccgccgggacaccccaggtgcccatgtgtctcgtctgtcctacaggcggctctttccgccacttcctgtggcaggtgtgtaaggagctgcagagttcctcgctgtcgctgctgctgctgtgccccagctcagctgtcaataagaacaaggtaggcagaggccgggaggaggctccacgcccccgagctcatgtcctgcgcagtggctggggtggcgggcagtgtgtgtctcatcaaagccaaaccgtttcagaaaccctcccaatctgtggggacaggtccttgcctcactggatgggcaagctctgggagcttgcagtgacttctctcctgcctgccacagggtatggtggcttgaaacacatgttccctggcgggcacagaggcccacgcccaggtcacctcatgcccacctccacttccagggcaagtatatcctgaccccgagccccatcacctacggggaggagcagctgctgcacttcctggggcagctgctggggattgcaattcgggcagacgtcccgctgcccctggacctcctgccctccttctggaagacgctggtgggcgagcccttggaccctgagcaagacctgcaggaagcggatatcctcacctacaattacgtcaagaagtttgagagcgtgagtgcaaggcacagttctggggggctgcagaacccggggcctccccgccaccttgcttaggcctccatgcagacccgagctccccgctgaggctgg

SEQ ID NO: 10530 - DNA, 2300 bp, Homo sapien
tgttccctcagaggtaggatcagggtgaggtaagtgagatcttgggtacacaatttaatggggctccaaaaaactcagtcagtaagagaaataatattgtagtatagtttttttaaagtcaaaattaaagtatccatgatcagcaaagtgttaaaattttaaataaagataggattagcattactgatctttttctcttcctcaggctctgatatgggtcagcacagcactgtaaatattttgttcatcatggaggtttttttacgttaatttttttttttttgagatggagtctcactctgtcacccaggctggagtgcagtggtgcgatctcagctcactgcaacctccacctcccgggttcaagcagtggaggctggactcgaactcctgacctcaggtaatcctgcggaggcctgcctcggcctcccaaagtgctgggactacaagcgtgagccaccgtgcccaatttttttttttttttagctgacaagtgctactaaataattttgactgattaaaatactgcagtaaagtattgtttatcttgatgactgaggtttttggcgttttcttaaatcttgcctggcattgagcaaagacctcggtgggctcaccctggtcccagccttgtcccacattggcgtgcgttttgccccctcagctctcagctgcccccaaagtcgatgtcaggtctgcttaacaggaagcctgaggtctttctgccatgattatctttcccagtcttctcatacttagatactgaattttagttctagttcctgtttcttttacagtcaaactttccacatatggtacctggtcttttggtactgcatggatctgcctcatggtgctaggtacactcctcatgtgagggttgtttccttttttttgttgttgttgtttttttttttttaaacagtctcactctgtcacccaggctggaatgcagtggtaccatatcggctcactgcaacctccacctcctggtttcaagtgattctcatgccttagcctcctgagtagctgagaagacaggcacacgccaccacacctggctaatttttgtattttgcttcaccatattgcccaggctggtcttgaactccttacctcatgtgacccacctgcctcagccttccaaagtgctgggattacaggtgtgagctaccgcacctggcctcatgtgaaggtttttaacttgtgactctgctgagtcagctgaggtctcagcctctctcttccacacacctgcctctcccaccctcagcccagatatgctggagttgccacagctgggcctggcctaggccagactccccaggagagggagcagtccagagggaatgaggggcctgggctgctgggagaacggagtgattcctaagagcatgcagatgggttcatgactggcccttaggaaaggtgagagcaccttctggagtgcttgtttggggacaaaaaaatattttttctggtgcttatagacagtttttttgtatctcagaaaactctttttcacctgctcattgcgccagttttgaagaatatttcctatgaatgagatcacctgtttaacaagttgtacttcccactaaaaatacttgctggctatctatcctctgggattattctagactaaactgctatgataaatagccccaggaggacaatggctcaagtccagtggaagttaattccctgcagatataagagtgagggtgagcactgaggtgtgcccaccctcggggaggggcctgtcgtccccgagcaaccaggtaggggccaagtgcagaggacagcagcctggtccccatgtggctcacatcccacagtgaccacggttgcagggccgcaccttacggcaaggaaggctgggcatgtgctgggctgtgcccagggagggagccaggctttggtgggcagctcttccttccactaatgtccatccactgcccctttcaaacagtgtttggaaacagaatgctcgcagggcttgtcccgatgcatgttcacggcagaattgttttgccccctctccatccaacaggggagaagctggtgcccggagccagagaggttctgacggagatatttaagagttgtgcccattcagagcagacgctgagcctgacaccagcgaagcccatcagagtctctgacatttatcttagcaaagagcagatcaactcccagaccccaggcaacctcctccacctcttcttcaccaatgtccggccgccaaaaaaggtgctggaggatcagctcacccaggtagctgcccgtccccaccatac

SEQ ID NO: 10531 - DNA, 2300 bp, Homo sapien
agtccagttgcctgaaactacggatctgtaagcaattccccctttccacagccactcttcaaatgaaccccttatgacatgtcctgaaggtaactgagtgttgccaagtggacagtatgctgggatggttttccttcagataaatgattgtttcattttagaggttttagtgacatgatgtttgattctcccagttgtgtatttccaattttgtccagttacatagacaaatatgggcagatgtcattggccatacctgatagttttttggtccctcacatgtccagagttccttcaatacatgggacccaggcactgttgtagacactttatcacccttggcatcaaaacaaccaaagctttaactcctagtgcacgggctgcttctatatttaggttctgtctagagcactgatgtacattccacaattggggaaatacgcagaaagcattctggaaaatggcagcagcagtggcaggaaacttgccaaacttcagagaattgcacgccaggccgttgccgcactgtgtgcacttggaggcttcaaagagacaatcaagataggatccgaggttcaggtaccaaccaccatgttccccaaatcattgcttcccccatatatataagcatccattaattaattgatcatctgtaagacaagtattatccaaccagctgtacaaaaaaacctgtttcttcaagctaaataaggaatctgagaaattcttgaattcaaatccacactgtgccacacattattcagatattaatgcaatactgtcttaggttaactacaatacttgtgtcctgtagtgtgatcagtatcagtcttagaattgatgatggaattagaatggaaggaaaacagtgttttcctgcaaatatttatttaccattaaacagcagtaacaagtttgtttgtttgtttgtttgtttgtttgtttgttttgagacagagtcttgctctgttccccaggctgaagtgcaatggtgcaatctcagctcactgcaacctctgtctcccgggttcaaatgattctcctgcctcagcctcccaagtagctgggattacaggtgcccaccaccttgcctggctagtttttgtatttttaatagagatgggatttcatcaggctggccaggctggtctcgaactcctgacctcaagtgatccacctgcctcaacctcccaaaatgctgtgattacaggcatgagccaccacacctggcctagcagtaacgagtttctatttgagatgacagcatgttgtgatcaccttgcagttaggttttagggcctattataagtcatgtctagggcttggtatctgctaccctagtagtataaactattactgtaacgccaacaatgacaactataaatttactttttcctcttgtctcgtaagacagctgcccacacgtcagagctggttggtagtgctaatctatgtctgtctccaggttttaggtagaggaatttcaggaagcattggagtagtggcttctatcaatgaacaggaaggtatagctacagtcagattcccacccatagactgtagaaagacttcgcaagcgtcagacacattgactattccattgtctagactttgtgttccaagatcagaggtaaggtgatttttaaatgctttgtaaaatgtctgccaatggtaactgtactgtaatgagtctatgcacatgctcagtgcagaagcacaaatgcttgattatcttaaattgtacttgtgatgtatatttatgtattggttatagttatttaatagtaatgcttatgtgaaaattttcatctagatgaccaaattcatttctttgttggttagggctcttctacaatgtatttttaattgttttgatgtggtttgtagttttctgtatggtgattttatttttttaactgaaaatttaagaattaactccagataataataacaccctcatttcttataaactaactacttgaatttaactttttgccatgcccccccaccgccatcaggcattgcctcttcataaactgtccattactgagaaggtagtacaggcagtccagtccatgttgcttcctcaggagggaagtctctctattcacacctcacttcctgcaacaggagatgggtcagctcctgtgatggcagtcgttcggctccttgctgaaataaggacaaggtgagtaccctccccacattgccttatgtgctgacatggtgcaagctgacagaagaagggatccttggtgggcccctccactcccaacttagtgaatccacagcttgaagct

SEQ ID NO: 10532 - DNA, 2300 bp, Homo sapien
tgcttaaagtcaagtctgttttgcaggcctctgctctgcctcctgaggcaggttttcagagagaaaactttagagaatatatgaaatttaaaatgaaaaaaatacagaaaacactatcgtttttagcccaacatccatatgtactgaacactgcaggccataataccgcataaaattaattagtggatagatgctgctgaagatcttttcttagccttagccctcttccagctctaatatgtctctaactcaaaatgtagcaatcatagaaaatgaagtctcttttttttttttttttgagagggagtctcgctctgtcacacaggctggagtgcagtgatgtgatcttggctcactacaacctctgtctcctagtttcaagagattctcctgcctcagcctccctagtaactgggattacaggcacatgccaccacacccggctaattttgtgtttttagtagagacggggtttctccacgttggccagtctggtctcaaactcctgacctcaagtgattcgccagcctcagcctcccaaagtgctaggattacaggctgaagtctctttactcttgattttcagctttatcagccaatgtcagttttatcagtcaatatactaaattatttgccaacgtaagactccgacaatgccattatactattcatacctcttactctattgtaataaaggaggtgtggtgaatatttaatatctttagatcaaagcctaagttctccaacctgtaaaatactctcttgggcctggggcatggtggctcatgcctgtaatcccaatactttgggaggccaagtcaggagaatcgcttgagcccaggagttcaagaccagcctgagcaacatagtgagaaaccgccaccctaaaattttttttcttaaattagctgagcatggcagcatgcacctgtagtctcagctacctgggaggctgaggcaggaggatcccttgagcccaggagtttgaggctgcagtgagccatgattgctccactgaactgcagcctaggtgacagagggagaccttgtctctaaagaaataaaaaataaaaataaaatacagtattgagaagctgagagcatggcatatatctgactgatttccattgtgatcacagagaagtgattcagccagacgtgatggaggaaatggtggtatcttgtgttattaagcacttgaacttggttgatgcactgcagtctctaataaatttccaatatcaagaagaacatgctgaagaatatgatttattatgtaaaattatgggagagacctttaagaaactcaatgccatggagagacagctgcaggtaaatgtctgataactgttggaaacaatttcttttatggaaatttaaagaaatttagaatgtgatctaatttttaaaattactattgtgactaaaattttgaatcatacttgtttttattttgcatctattttaatgtatttattagagtgttgcagaactggaacaaaaatggcaaagtgaagttgatgatgccatgcaggggaaactggagaacaacatgcctttcttttatgattaccattttaatgaggtgagcaaattgtatgatttgtcactggggtattgccatttagagagcaaaggtatatactgtgtgtgtgtgtgtgtgtgtgtgtgtgtaggtaaaataatgtcatttcctaaaatgttgcacactccaaaaatgtacccattctttaaaagaggttaaatgaaaattgattagatcaacatgcagtatacaaataattactcattaggttgtttttttaactgattaatagttttataaagatatataaagaagttgtcatcatggtcaaattttgctttcaagccttaaaaaacaaaaaataggcaaaattataagccctgaaagaattcccagaaagtagtcaatgccatttttaatcattaaaatatcaaataataacttacaaatgagtttcaagcatagaaatgtggaccaaaggtggtggtttttctctgaaattttctgttcattttaatatatgtatagtaaaacttggttcttgcagattctgcataccatcttttttttctttagaacaaaatgaaagaactagaacttttatgttcaatgaaggaagtctcctttgatgggaatgatcttgaaaacatggtcctatcactgaggttagtcgtattaataactattaaggctattatcaccttgatgctcaaaacacactgtaaaggtctagtctcttaatagatatatttttaaatgttgtgaatttactaaa

SEQ ID NO: 10533 - DNA, 2300 bp, Homo sapien
gaaagcatatgtatggttaagtaccatgaaaaaagagatttggaggtctattttccactgtcccattttgtttaatgaaacagtagaaaatagaaaaaagagtatcatttatgttataacttaagttaggcacgatgcggatctgggctactagggtgattaaaatatgaaaaagaagaaaactcaagagacacagtgctaaagttttgtttgaaaatggggaagaaaataaaatcaatgatagcaattaatacatatatatatatatatatgctggtgtggatccttgacatattttaactcatttattctttaaaataactatataaggtaggacttttattatttccactctagaaatgaggaaactgaaatgttcaatgactttcccagggccacccaaaagttttagagctggaattcaaactctgaagcccaaagtccatgctctttaatactgcactatcctgtgttaagggaaaaagccagggtgtgtccaagttgtagagccagtattaggaaagattgcagctgagctgtgtttgagtatacaccaagctttattgaacactgactaactgccaagtgtttcttgtaaacatttgcatcttgtgatattagtgatcataacccctcttgcagttacccttttgataatgtatatcggaaagaaccgtcatgcaaaagttgccattttaaaaacactttgaaaactatggttcggtattaaatttaggaaaatttctggtggtgacagttttctttctgtggtcttatgcatgtattctccatctctttaccaccaattaccaccaatacacaacaacaagaaaagggtgtgatttttataaaagtcttgttaaaagcctaaaatttaaactttaaaaataatcttcaggctcattaaacagcttaatgtttgtttccaaagtcctagcctccagcttggtgtataatatttcggatggtcagtttacaagtcgtgcagatctcatagatgctgctggaagctcactggggcgtggtgctctcgtaccaggattgggtaagaaataaacttgcacatatctttggaaaatttcaagttttagcaaatttctcttgaactgtcttgccagttccctgtggcattctagttttcttgaaaagaaagacgttttttgttttgttttgttttgttttgtttgagacagggtctcttctgtcacctaggctggagtgaagtgttacgatcttggctcactgcagcctctacctcctgggctcaagcagtcctcccatctcagcctcctgagtaactgggactacaggagcacaccaccatgcccagctaattttgtttattttttgtagagccaaggtctcactatgtcacccaggctggtctcaaactcctaggctcaagcaatcttcctgccttggcctcccaaagtgctgggattacaggcatgagccattgtgtccagccagaaagaatttttttatattaaattttaattttgggaatgagtataagacattgccatatgtaaaattcctctgaataaactgcaattgaagatactattgattaggttgtgtgatgatgcctataagaaattctcaggtttatgccacaaaaagtttatttcctgtgaggaattggtatacctgttattgttagaaaatgaacattaagtaatatactggactttctctttgccgtgggtggtaggaagcttatttctaagttttgggctcagttattagggctttttattttgcattaatgttaattggtcctattatacctgtgtttttaatgtaagccacttaaatcctctttggaagtaggtcacagataaatcagttactaagagctatctattttgtgagatttactcctcacacaggagttaagcaaaattaaaaattaaatgctggcctttgccgagtcccaacctagtgccttaccaaataaatctgtgggactagggttgtgggttgtcaacattagagagcatccttgcccttccactttgtagcagtgcttgtgagaaatatgtatacaggtagctggtggcatggtgactgaatacagtatgctctttttgcaggagcgtgttatgacacagtgaacaacatgctatggacatgctcaaatgactatatcgatcagtggtgtaaccctgggaatcaagccttccattatgtctgccagagacttggagtcagtcacattatcactgagcccaaaggtgaggtgcactcagggtcttgcaggaaaagattttcctctgaaatatgagagaataccacag

SEQ ID NO: 10534 - DNA, 2300 bp, Homo sapien
tactaaaaatacaaaaaattagctgggcatggtggtgtgcgcctgtaatccctgctacttgggaggctgaggcaggagaatcacttgaacccaggaggcagaggttgccgtgagccaagatcgtgccaccacactccagcctgggtgacagagcgagactccatctcaaaaaaaaaaaaaaaaaaaaaaaaaaaaaaaaaaaaagagctaacacttatgtagcatttaccatccatcaaataatcaaatatgcttctcagtactgttgtatatattatttaatgttcccaacatccttatgaagtaagttactattgttatcctcactttaatttttttttactttttttaagacagagtctcattctgtaggccaggccggaggacgggaatgagaaaggccatgtacaagaggaagtagtcagccgctaaatccaaggtaagggaagaggggaccactgacctaatctcaagtgacaagattagagttcactgcactgcagcccagacctccaagactcaagtgatcctcccgccttagcctcccgaatagctgggactacaggcactaacaaccacactcggctaattttttttctttttttcttttttttgttgttgttattgttttgagactgagtctggctctatttcccaggctggagtgcggtggcacgcagtggcacgatctttggagtgctgggattacaggcgtgagccaccgtgtccggcccttttttttttttttttcttttttgagaatcttgctctgttgcctagagcgcagtgtcgcgatcttggctcactgcaatctccacctccagattcaagtgattctcctgcctccgcgcctcgactggctgtcattacagacacgcaccacccacgcccggctaccttttgtatttttagtagagacgggatttcaccatgttggccaggctggtctcgaactgccaacctcagaggatcctcctgcctcggcctcccaaagggctgggattacaggcgtgagccaccgcacccggcctaggatttactacttttttcttaacggggaaatactacattccccatgatgccccagatccggaaggaagtgagactcgcacttcccatgattgcttatagaccggaagccgggaccttaattctctttcccatcttgcaaggtaagaatcgcgggcctgtctgcaagacttgagttcaggactcccaatccttcgccatccgaacctggagggcatccagtcgacacctacaggggtcggacatgtccaaggctaactgagaggccttccagacgcttcatttttgttgtttgggtttgcggcagggcacaaagagggtgaggtagaatgccgtagtggctccctccggttcttcgccactctcttgggctgggggaacgaggccctttcggggacccgtagcagactggtgggtgttagaggaagcggggagacggcgcgtgcactgtgttcctggtcctgggttccagaggatgacactgagcctgtcgcagccacgttggggttccgcactgaagccaaaaggtttcgcgtctcccagcgtccccgaccggaagtcgcctcttggtctttgcgatctttttctctggctcaatttgggctgattccgtttgtgtccgcaattcctaaatcgagtttcttgaaaagagacactggtcttaagggttaagacgaaaggtactgaaagtaagggatttcaagttctggtcttggtgcttctaacctgtggacacattctgcatctaagttttctaattcgcaaaacagtaataaaaaataatggttgtacggacttctgaccgctcagtatttggcaaaaaacctaataggtgtgaggtagtttcaaattctcaaaaaaaaagtttatagtgtattggggagacaaaccccaaatgagtcatagtgaaggttggagtagaatgggtagagtttgagaggaaggcctgtatcttaccgggggagggattgtagtctggggagcccagcccattcatgtacaggttcattattgtcttgttagagagatgactggtgaaatgcctttttttatctacaaaaaaatatttttagatggcgggtgaaaaagttgagaagccagatactaaagagaagaaacccgaagccaagaaggttgatgctggtggcaaggtgaaaaagggtaacctcaaagctaaaaagcccaagaaggggaagccccattgcagccgcaaccctgtccttgtcagaggaattggcaggtattcccgatctgccatgtattccagaaag

SEQ ID NO: 10535 - DNA, 2300 bp, Homo sapien
attttgcaataccgcaacaaaacacaagagggggttcatctacgtttttattttaatgacaggtcattcaacacatattttggggcgttcactaggtgaaattatctgagattgccagcaattttgaggggcccacgtaagcaactgtgcatctcattcattcattgtggtacattttctgcagttgaagtttctaagaggtgctttgctgaggaagctaaacaaataaagctgctgacattcccattctcaaaaaaaagggcagtgttcatctgatcattgtatttgtatcctcagtgaatcagaaccagaaaaaggctaaatgattcccagagacacagccatgaagcaggtggtttcgatctgaaaaaatcaaggtgaaaagctctagcaaccagaaagaaacgaatggaggaaaatggaaaacgcaagctagaaggtattacaaatgtgtacatgttggcttaagggctttgaagcagtaaagaactatcacatatactgtgttgtgtattttgtaaaagataataaatattcttatttttaattctaacatgagcaaaactctcatgcatcttcattaatcatctctttaatcttgcagcctaatggttaagagtgcaatctttggaatcagatctatgctgtgagcaagttacttaatgtccttgagactcagtttcctcataatagtatcattcacaggttgttgggagaattaaatgaaataaagcaaggcacattgtatgcaatattgcctattatctcccatgcataaactttagcagaatacttgacaacaactaggatgttgatgatcagatgattgtagtggtgatggtgacaataacaagagctaacagttcgccaggtgcggtggctcacgcctgtaatcctagcactttgggaggctgaggcgggtggattacttgaggtcaggagttcaaaaccagcttggccatcatggtgaaactctgtctctactaaaaatacaaaaaattagctgggcatggtggtgtgcgcctgtaatccctgctacttgggaggctgaggcaggagaatcacttgaacccaggaggcagaggttgccgtgagccaagatcgtgccaccacactccagcctgggtgacagagcgagactccatctcaaaaaaaaaaaaaaaaaaaaaaaaaaaaaaaaaaaaagagctaacacttatgtagcatttaccatccatcaaataatcaaatatgcttctcagtactgttgtatatattatttaatgttcccaacatccttatgaagtaagttactattgttatcctcactttaatttttttttactttttttaagacagagtctcattctgtaggccaggccggaggacgggaatgagaaaggccatgtacaagaggaagtagtcagccgctaaatccaaggtaagggaagaggggaccactgacctaatctcaagtgacaagattagagttcactgcactgcagcccagacctccaagactcaagtgatcctcccgccttagcctcccgaatagctgggactacaggcactaacaaccacactcggctaattttttttctttttttcttttttttgttgttgttattgttttgagactgagtctggctctatttcccaggctggagtgcggtggcacgcagtggcacgatctttggagtgctgggattacaggcgtgagccaccgtgtccggcccttttttttttttttttcttttttgagaatcttgctctgttgcctagagcgcagtgtcgcgatcttggctcactgcaatctccacctccagattcaagtgattctcctgcctccgcgcctcgactggctgtcattacagacacgcaccacccacgcccggctaccttttgtatttttagtagagacgggatttcaccatgttggccaggctggtctcgaactgccaacctcagaggatcctcctgcctcggcctcccaaagggctgggattacaggcgtgagccaccgcacccggcctaggatttactacttttttcttaacggggaaatactacattccccatgatgccccagatccggaaggaagtgagactcgcacttcccatgattgcttatagaccggaagccgggaccttaattctctttcccatcttgcaaggtaagaatcgcgggcctgtctgcaagacttgagttcaggactcccaatccttcgccatccgaacctggagggcatccagtcgacacctacaggggtcggacatgtccaaggctaactgagaggccttccagacgcttcatttttgtt

SEQ ID NO: 10536 - DNA, 2300 bp, Homo sapien
tcaaactcctgacctcaggtgatccacctgccttggcctcccaaagtgctgggattacaggcatgagctaccgcgccccgagtgacccgcctagttttgtagtttagattactctggctactatgtggagattggattaggaagtttaggcctgcaggcctgagatcagttaaaatgtagcttgtcatctagctggccaggatttagggagagggacaactgcttgttaaatggctcttatgtgaattaaattggcatatattaaaggtgatctttgtaaggagcacatgatgctgaagcagttagcacacagtatgagactcacttgtatatgaatgaaatgggcaagcattaaaaaaatgaggattttggagctatacagatatgggttaaacttatggctctgccattcactagatctgtagcctttatttatttatttttgagaaagagtctcaccctgtcacccaggctggagcgcagtggtgcagtctgggctcactgcaacctctgcctgtccggttcaagcaattctcccacctcagcctccggagtagctgggactacaggtgtgcgccaccaagcccgactaatctttgtatttttagttgagacggggtctcaccatgttggccaggctggtcttgaactcctgacctcaagtgatctgctctccttggcctcccaaagtgctgggattacaggcgtgagccaccacgctcagctagatctgtagccttcaatgagtcatatgcgcatcaatcaagtaaaagctctactcttctcaatctggtctgagctaccattattcccagaccagaatactatagtattccgtattttgactggcttctctgtttctggccttgctctcttgctcgagcttcacagagtgtccaaagtaatacttccgtaccacccggcccggcttttttttttttttttttttttttttttaagagacatggtcgcaccatgttgcccaggctggtcttgaactcctaggctcaagcaatcctcctgcctcagcctcccaaagttctgggatgaaggcgtgagccaccatacctggcctgagtgcagtggcgcgatctcggctttcagcagcctcgaccttccaggctcaagcaatcctctcacctcagcctcccgagtagctgggactacaggcgcgcgccaccacgcccggctaatttttgtattttttgtagagatgggatttcactattttgcccgggctggttcccaactcctggactcaagcgattcgcccgcctcagcctcccaaagggaagtgctgggatttcaggcgtgtgccaccgctcccaccccaaagtagtatttattgtaattattattattattttgagacggagtctcgctctattgccaggctggagtgcagtggcgcgatctcggctcaatgcaacctctgcctcccgggttcaagcgattctcctgcttcagactcccaagcagctgggactacaggcgccccccaccacgccaggctaattcttgaatttttagtggagacggggtttcaccatgttggccaggatggtctcgatctcttgacctcgtgatccgcccacctcggcctcccaaagtgctgggattacaggcgtgagccaccgcgcccagcctattattatttttttaggcagtgtcttgccctgtcgctcagggtgtagtgcagtggcgtgatcacgactcactgcagccccgacttctcgggcttaagttatcttcccgccgcagcctccacgcccggttagttttttgcattttttgtagagatgaggtcttgcttttttgcccaggctggcctcgaactccttggcttaagcgaacctcttgccgcagcctcccaaagtgttgggattacgggcgtgaaccaccgcgcccagcctactatctttatcttacagaaagaaaagaatggaggaaaccgaggctcggagacagtaggtaatttccccaaggttccacagctaatgagtggagcggcgatttgtggaacgaaatgaatgaaatcgatgtggcagcgggcccggacgggtcggtggcgtagacgcggagcgcgcagctcacacctggcggccgcggtttccaggaggaagcaaggatgctttggacactgtgcgtggcgcctccgcggagcccccgcgctgccattcccggccgtcgctcggtcctccgctgacgggaagcaggaagtggcggcgggcgtcgcgagcggtgacatcacgggggcgacggcggcgaagggcgggggcggaggaggagcgagccgggcc

SEQ ID NO: 10537 - DNA, 2300 bp, Homo sapien
tgattaccatcatgatgacaattactaccaccaccaccaccaccaccactgaggcaggtggttcatttgaggcgaggagttcaagaccagctggggcaatatagtgagacccatctctgcaaaaaaaaaaaaaaaaaaaaaattagcagggtatattcgtgtgcaccttgagtcctagctactggacaggctggggtgggaggatcacttaagcccaggagttcaaggtttcagtgagctatgattgcaccactgcgctccagcttgggtgacagagtgagacactgtctttttctttttttttttgagatggagtttcactctcgttgcccaggttggagtgtaatggtgcaacctcggctcactgcagcctctgccttccaggttcatgtgattctcctgcctccacctcccgagtagctgggattacaggtgcacaccaccatgcccagctatttttttgtatttttagtagagatggggtttcaccatgttggccaggctgatctcgaactcctgaccttaggtaatccacctgcctcggcctcccaaagtgctgggattacaggcatgagccaccgcgcctggcagagacactgtctttaaaaaattgttttttaaatgagctctaaatgttctcattttaactcctgggtctcatggggagaagtaagtgacaaatgtagtagttaaccctgggccatctggatgggaagctttagatatgagtctccaatagagagagttctccttcactttgcagagaagttctaagcagatcttggtctgtttgagatttcctggcctttttccaatttgagccctttcccaaagttaggaggaataggactcttgagatatggagcactgggagccatgggaatccattcatctttatatatttccccttttgatacttttatttcattgtccatatagtgaattcacttcagaaagccagtctggatctttcggggaaggctctttggccaaggctcaatggtctgatttagacctaaaatttcccttcattctactcaaaccacctgctgaagggtgaggttggcacatgccatcctagctgggctgtcaattcctttatcactctgtccaaacatttgtgttttaggacaggttatggaccatgaaatcatggcagttcacagcttgggtattcttattgttgcattttaacctcttgcttcctatctttaggaaaaataaggtcattatgttatcattttcacagatgggacttggaaacattaaatgacttttccagagttgtaagggggctggatctgacttccagaaaaccatcaagtgcttattcaactaagccaccctgccccttagaaatttccatttcttaagcctcagcttttctgctctgaattctgagaaactccaggtacaggtcaaaaatctgcagcaatgggggtgaggacaggtcatctgggcgaaactttgaggggcaaaaccacttagggagccccccacaccggtgccaagctcttgtctgagcagagaggagcaatgcaggactgggggcgtgtgggagacaggggctgtgaagttatagttcctttgctctgagagtgagcgacagtattagaaaaagtgtgtggtaggtaagctgtcactgactagactgtgtgatgtcgagaagtcccgtcccccacccctccggactccccccttctctgctttaaccatccaattacttaacttctctgcctaggggttcgcttcccacccatcccctcctccaaggcatcttagcgctgtccgtggtgctgaccgccaatcccctggttgccgtttcgaccagctgggatctctggtgcgcccaacctcccctcccggcctcccacctttctttctccaggcaccgcacacataaatcacgggtgggaggcaggcttggttcccgcttggttccccctgcactgggaagctgccgccccgcttcccttgctcacacagggctttgcagtagtggtggcagccgcggcagaaactggctctggggaagcaattgattcgtctactgccagcagcccggagttgcctacgcggactggaaaggaagggagaagggagagagagagagagagagagagagagagagagagagactcacagagctaaaaccttcatccatgtggaggacagtctgagggagccactgtcccttgtccactgactcactggctggtccgagttttctccgcttctggcagtggtatttctttttgtcttggtcctgcatgatttaggggtagttgatgtgtctgtgt

SEQ ID NO: 10538 - DNA, 2300 bp, Homo sapien
aacacattcttctcaaactcacacagaacattcaccaagacatattatgttctgggctagaaaacacactttaacaaatttcaacagagatatgttatgcaaagcatgccctttactacaatggaattaaaaaagaaacccacaaaagaaagatagctggaaaattccaaaatatatggagattaaagaacacacctctaaataacacatggggcaaggaagaagtctcaagagaaattttaaaatattttgggccaggctcagtggcttacgcctataatcctagcactttgggaggctgaggcagatggatcgcttgagcccaggagttcgagaccagactgggccacatgcagaaaccccatctctacaaaaaatacaaaaattagccaggcatggtggcatgtacctgtagtcccagctacttgggaggctgaggtgggaggatcacctgagcccaggaggtcaaggctgcagtgagctaagattgtgccactgcaccccagcctgggcaacagagtgagaccctgtctcaacaaaataaataaatatattttgaattaaattaaaatgaaaaaacagcctatcaaaaagtgtgggatgtagtgaaagtagtgtttagagggaaagttatagcattgaatgcatatattaggagaagaaagatctaactcagagagggatgaacaggtgaggcataggggattttaaggtagtgaaactcttgcagggcaggggagccccaaaactgggacaccgtccgggaaggctcttggcttcgtccaggaaggaattcaagggtgagctagaggaggaagaaaaaggtttattgaggcagcagggttacagttctgtgactgtccctgcagagcagggccaccccataggcagtgcctggagagcagcagctcagggcacttctatagtcacattcatacccacttttaaatacgtgcaaattaagggcaggttattcagaaatttctagaagaagggtggtaactgggtcattgccagggaatgagtaaactgttcatggtgctggtgctcatgccagccagtcttcaatctggccctgagtcaagccccacctcctatctcaaaactattctgcatggtgctgtaatggtggatacatgacatgttatgtttggcaaaatccatagaactgtaggacacaagagtgaaccttaatgtaaaccttaatgtaaatggacttttgttaattatgatgtattaatatcaattcatcaattgtaacaaatgtatcacagtactgttaataatagaggaacttattggcaggagagagagcttatggaactctctgcacattcagctcaatatttctgtaagcctaaaactgctgtgagaaataaaatccaacctgggcaacatagcaagaccttgtctctacaaaaaataaaaaatgagctgggtgcagtaacgcatgcctgtagtcccaggtattcaggaggctggggcaggaggatcccttgaacccaggaagttgaggttgcacgagtcatgatcatgcccctgcactccagcctggataacaaagcaagatcctgtctccaaaaaataataaaataaaataaaaatctactaattgaaagggaaaaaagcatagtataataccattcttaacaaaaagaaaagagacctgtgtttgtgtgtgtgttaacatttgaaaaaaatctggaaagctctatatcaaaacgtttatagaggcaattttgtagtgttagaatcatagatgatctttccacttcctggtttttctgactttttttctttttgcagtgggcatgtattgctggaaaataccacagacaactgtgaaaggatttcatcaacaacaaaaaaaagataaagaaggaaacacaaaatctgttaaataagatttatgttggctggaggttaaaatgcatttccagagcagagttcagagaaaggctgggctgcttgttgctggctaaaggacaaagggtaagtttcaggaagcagaagagtgagcagatgaaattcagcactgggatcaggggagtgtctgatttgcaaaaggaaagtgcaaagacagctcctcccttctgaggaaacgaaaccaacagcagtccaagctcagtcagcagaagagataaaagcaaacaggtctgggaggcagttctgttgccactctctctcctgtcaatgatggatctcagaaataccccagccaaatctctggacaagttcattgaagactatctcttgccagacacgtgtttccgcatgcaaatcaaccatgccattgacat

SEQ ID NO: 10539 - DNA, 2300 bp, Homo sapien
gcacctttggatgtgtgctttttgctcactggggatgttctgcttgtctccctgtgaagttggtaccttcttactgcagctggaggcagagatgaggaaaggggatgtgccaggaatgagtcttctgcatacaggacttcctgttctttccagatgtggccaggtatgctgtgtacttccctgcctctctgccccaccctcactgctccctccttaggcaggcacctctgctgcctgttactcaacacagaaaggttggggcgggagaccacatgtctttagaggctgccattactatgccagcacaactgacaaccatgagagttaacctagggtcccttcttttccttcaatccactgcctggagcctgcagctcctcagagcctttccactctgcataggtaccccctcctttatgtgttttggctgcaatttcctccttcatccagtctcatatctctgacagggatctcagattccagtttacctgggacacctctggttaggacccagcaacattattaaagtttttctatcgctttcctgccacctctagaggcctgggatggacgttgaaggcttatgcatatgttcagtccaccatcatgacccaatattgacccttctgcgttccatcttctaaaaatgcctcaaatgtcccgcccccttgactccactttttctcagtttccaaccctgttgatttccattatgcttttaatatatctttgctgctattttaatagaattttgagcatgtgttcaatccactatcttgaatggaaagtttctaaagtggcctgtgactcaggaagaagactgtgattaatgggcgagaatgaaaatcattgctcaatcccttgacttaaatccccaccacaacacctgacctacaaaacctgcccatacttgaatattccaagtgatgcagcattcactactcaaaatattagctggtgtacatattacagacccagcatctctccctctagttgaccatgacctctgaaattcacactctgatcctatctatttcctttcagttaccgtgcagatgtcaggaagcacttgttaagactattacctgaagtgtactcagaggcagagtaaatgctgggtcccggagcagacaggagagaggacctgggagttttttagtaagatggggaggaggagataggctatggcttggaccaggcctggaagagagctcaggtgtgcagtctctaggaacccgggtggagaagcagcaggaaataagcagaaaaaggagacaggccatgaagatagaagcgcaatggtcctggattcaaatctccactctgcagcttatagcttacagtccgcttagctttgtgcccattccaagaggatttccctattgtagctttacaatgttttaatatgtagtattgttgtgcaaggtaccatcctaaactgactgactttccttcctccttctcctccaaaataatttttaattcttgcagacagactttagatcgtgtgtttgaagtttttaaagatggaatttttattggaactgcattacacgtataaattatttaggaagagttggcttctgaagagggcagctctgtgggcttgggctgggtttgaatccagccagacaactttccagctgtgttaccttggacagttacctagttcctctgtaccttgacttcctcatctgtcaaatgggtgatgataatagcacctacaccatggtcgttgggaggagtcagtgagagtctccaagtgtgctttattatcgttggtggtggtagtggtgtttagaacgcatccctcagtcagacagcgaggtaggacttctccgtttattaaatcctgaccttttttttccatgtaaaacctgcacgtttctgaaatgctcagagtacgttactcagtatgtacccatatgttctgtgggtatactttgttaggttgtgattagttcgttggagctggtggttgcagggacggctggaagcaaggagatgaaggagaggaagtcgtagctgggaaggggaccaggaagtgggtgtcaggtccaagagctgctagaaagaaacgaaactgaaagcagggaatttcccaagtttggggaagacaggaactgcagcgcccctccccgtttcacgccacgcgcgggaccgaggacctaggacctggccagctgggcgtggttcggagagccgggcgggaaaacgaaaccagaaatccgaaggccgcgccagagccctgcttccccttgcacctgcgccgggcggccatggacttgtacagcaccccg

SEQ ID NO: 10540 - DNA, 2300 bp, Homo sapien
gaagcatttaggagtaaagggacataaatcatgcaacatgcattcaaatggttcaggaataaaaatactcatgaagggctgggcgtggtggctcaggtctgtaatcccagcactttgggtggctgaggtgggaagatcgcttgaggccaggagttcgagcccagcctgggcaacatggtgacatcatgacccccatttctaccaaaaaattttaaaaatttagccaggcatggtggtgcatgcctatagtcccagctactcaggaggctgaagtaggaagattgcttgagcttgggagggtgaggctacagtgagctataatcacgccactgcactccagcctgggtgacagagtgagactctgtctcaaaaacaaaacaaaacaaaaacctcctaaaatgtataaatagcaagaaaatgaggggcaaatgtggtaaaaaatataatggctaaaaagtctaaggaagttctttgtgtgcatcttgtaaattttctcagcatttcaaattacttcaaaataaagtgtttttttaaataacaaataaagcacaggctttggagtcaggcagtgtgttagtgtgagaacctagcctgacaacttcctagctgtgtgatcacgggcaaatgtttccacctttgtgagcctccatgttctcatctgaaaaaggaaccttaggactacgcctgcccagcctgcctacctctcggtgttgcagtaaaagttggataagggcaggaaaggcccttaatgagcatgtgcattaatcgaggtttttccagaactaacagggtatttatatttattttgaggtatttattttaaggaattggctcatgtgattgtggaggctggcaaatccaaaatcggcagggtagactggcaggtgggagacccaggaaggagttgctgctgcaagtggaggccaaggcactgcagccgaattccctcttccttgggggagctcagtctttagtctattaaggccttcaactgattgaatcaggcccaccaccttacagatgataatccactttactcaaaaaaaaagtctaccaatgtaaatgttaatcttatctttaaaaaataccttcacaaaaagatctaggataatgtttgaccaaatatctgggtacctgggctcagccaacttgacacataaaattaaccatcccagtatggaagggccctggtcccccactacatcttggagatttttgccttctctgtgaattattattgctgggccaaggcagctggctgggagtcctctgcgagttttgttttcaaagctctgggcacaggagttgcatgtctgtctcctttctggctcacacacttggggtgtgttttcttgcccttgcgaggctggacaagtgcctcatacggtccctcggctgtccacaagtgtgctgagaaactggacacacagaggttcccacccgctgaccacacgggggcctgtgtttacccagaagcagaccaaaacctgagtccagctaggtccctgctttgctgtgtgtccctgagcaagtcagttccctctctgggtctctttttcctctctgccgctttccctgaatgtgagttccctggccactgagaacagggggaaagggacagagcctcaaaagatgacctgtgcgcccctgcttctaagcactttgcaggtattatttaatcatcaagctaatcctacgagagagctgccattttcccccagcttacagatgggggaattgaggcgcgaagagggcaggcgatgtgctcaaggacagacatctagcaggtatgaagccctcacaatggggttctagaggctgtttagttaacctcaagttttggggagcccctgaagggctggtcaccacgctgccggggacagggaaagcctctgagcttgagtcagttttggtttccctgctggggtgcaggagtcagtaaaccttgctgcaaggggcggggaagagcatttgagcttaagttagttttggtttccctgccccggatgcaggagttggtaaactcactgcaaggggcagggcagagcctctgagcttaagttagttttgtttccctgtcccggatacaagagttggtaagctcgctgcagtgggtggagagaggcctctagacttcagtttcagtttcctggctctgggcagcagcaagaattcctctgcctcccatcctaccattcactgtcttgccggcagccagctgagagcaatgggaaatggggagtcccagctgtcctcggtgcctgctcagaagctgggttggtttatccaggaatacctga

SEQ ID NO: 10541 - DNA, 2300 bp, Homo sapien
caatctgaaaaagcccatccaacactgggctgcaggtcagagcaggggcctggggaggggaggtccctccagctggccggagagccagagctggattctgggaaagcacccctgagcagcctgcccctgaccctgcctagtgtatccccatctgccccggggaggcaggcgtgggctgctctgggcaggcgcccaaacaggccactgacccccgtcagccacccaggctggagttcccggacgcatccttcatcttccccaatctaaacacccccaggccccaggtggtccacccccctcccagccaatgtgtgtctcagccgcatccagcttgctggaggacagggggactggccatcccgttaacacttgagccgctgccatttccagccttcccttccatccaaccaatgctcacccaccatttattgagcaccagttgtttgcaggtggctgtgaatgacatggcagagggcctgcccttctcttcctccaggatctcacctcctggccagggtcccctcccctggtcccacccctctcacctggagcaggtgggtgctttgggggaagtgggctcagggctgggaactgggtactggcaggagattcagatcggggttggtgtctgggcatcgctctaagcttttgtgatcctgggcctggctcttactctctctggcttcagtctcctcatctgtactcttcagattccacggttccaactgagtctgaatcaggccttgtcagcaccctcccacccccaggaatagttagaggaggaaaggaggctagctctgaatgcttcaagatctttctttagacagtctctggatcttattcattcattcaagcatttattgagcacctattcagtgccaggccctggactgggagactggaaataaagatgacaaagattcaagccggtgactcctaaacatcccactccctgcctcacgctctgcttggggtcagaaggccccttggggtctcgggagggcctggccgaggatttggggcgccccgagactcgcgtgtcagcgccggtggcgctcagggccgagatctgtctcctccccttcctcctcctccgccccctcccctctccctcccggagcacggccgaggcctcctcccacccgcgagatcccggcggccgccagccggctcctgcgtccgtccgtcggccgggcagtctgtccacgcgcggaaagctcggcgcggcggccgaggggcctgggagggaacgggcgcggaggcgggaccgcggctccctcccactccggggggagcccaggaggcggcggtgctggagcgcgagccggagccggagccggagacgaagagaggcggtgagaacgcgggtgcttagggaccccacccccggctcccgctgggggcccgcgagcggctcggggacgtctgggctggggaagcggggctgttacccccagggcgggaggcagagacgatccagctcctggcttcgccccctccgcgacgcgacccccgaggggccctgggccgcgcctgcagcgccgcgcatccccgtgcttcccggcgcaccccagcgcacccggcatccccccggcagggcgagggccccgggggaagggaaggctccgggagccaaggagggcgccccccaggcggagagtctcggaaaaccgcgcccccggcccctgccttccctccaggcctgccccaagggaaagcgggcggggcgaccccgtacgccccccttgctgtcccccttcggttccccattgttctcagccgaatgctctcctgggaaggggggagggggtgctgcgctctcctcttaaagggccctctcccctcttgtctcctggcaggtcgcgagcacgagtggggtggggcgtgcccacgggcccccgcccccctcgtccccctcgtcccccagcccagctccggagccgcagtccaggcgcgccgcccgagggtccacgccgcacccctcccccgtgcgttctgcggccacccaggccttccaggacaccgtggagagggaacaagggggcagggacgcccccttcggcaggagccgtcggagaagggggcccagaccggagggaggcgagaagccccactgaagccgggcgcagggtctgggacgcagttgggagtgcaaagggctggctgagagccgcaggagcagcaggctgtggcccaggcctcctgggtgacaggccctgtctggcggggaagagggaccaagagacaacacggaagaggctggacctcgaacaggggcggctgcctcactccctacctga

SEQ ID NO: 10542 - DNA, 2300 bp, Homo sapien
gacctggaaactagcatcagagaaagtaacaagtctaggcctgctgggggtgggaggggagagataaggagaccagactttggaggagggaggggacttggctgccctaaagggagggtcagttgtcagtgtttcgggatcctggacccctctaggggacagagagaggtggccaaagcaggccaatggatccagttagacagccctgatctaccctgcccaggcctgagccagctccaggatccaggtcaaagacttcagcccacctgtagagcacagagggctctctaggctggctcaactccagatggctccacagaccaacctggcagggtcagccctggcccctgactcggaaactccaggacccagtgccagctgcaccaccaaccagctgggtgaccttagtgaagtcatttcccttctctgggcttcagtcccatcatctgcaaaataaatgacaaatagagttcatctcatgtgccatctctgctccagggcagtgacttcctggagcactgtgttgaggaggattctgaagttgcatcttggcttagcggtaaggcatgccgaaattgattagtaatgcctgctgtgggtgctaggaggacagtagtggtatgcactcatatatttgacattcctgctctaactttgtctggcagaagaggcggcgtggaccagatcatacagggcctggtcatgcttaaagagggataacattaggagatatatctaatgtaaatgatgagttaatgggcgcagcacaccagcatggcacatgtatacatatttaacaaacctgcacgttgtgcacatgtaccctagaacttaaagtataattttaaaaaaagactataatgtcaggtcgtgattagtgctatgaaaaaagaattcagtaaggtaaggacaaagatgggctttttaaaaataaagtggttgcggccaggcacagtggcttatgcctgtaaacccagcactttgggaggtcgaggagggaggactacttgagcccaggaggtcaggtccagaccagcctgggcaacacagcgaggccctgtctcctcaaaagttttgttgttgttgttgttgttgttgtttaagctgggtgtggtggtgtgtgccagtagtcccagctactcaagaggctgaggtgggaagatcgcttgagcccaggagttcaagactgcagtaagcaatggttaagccactgcactctagccaggacaacagagcaagatcttgtctataaataaataactaaataaagtggtcgggaaggtgtctcagataagctgacatttgagcagagacctgtgctaagtgagggagtgtgccatgaggatatctgggaagagcaccttgggaaagggtcagcaagtgcaaaggccctggggtgggagtgtgcctggcatgcttgagaaagagcagagagaccagggtggctggagtggagtgggagaggggtgaacacataggaaatgaggttcagagggtagatgggggccagatcaggaggccaggtgttaactgtgagcaaagtgggagctgcaggaggagtgagagcagaggacagatgggatctgatttgggactgggaaaggcagagaggcttgcatggcagtggggcccatgcctgccttctggtcagagtagatttcggggagggcctgagggactcctcaggtcctgtgccagcctgggcccccaagaaggcagagctaggggtgaaggctggctccccttccgggaggcccgcaggcagcggtcgcttgtccaggcaggaggatgttctcactgactcggaggaaacagcgtgtcccacatcaaaagggggccgggtggctcccacgctcagggttcgtgggaactctgctaccctgggttctcgcaggaggcctgcagttagagagaagctggagactacctcgggactgtcccccaggctcactgatgggtaaataaataacagtcccacagtgacaccccactcacagtgctcttcccaggagcaagactgacttttgtaatctagggctatgtggtatttaaggggctccagaaattttagggcagctgagatctaaatccttcccttcctggagtaccctctgtctaactcctagaccaaacactcagcaagagcagggttacccactgggccagactgggcattatatagacctggggtagcaaactggctatactgattgatagaggctgcttggagagctgtactgaggactctgctaagcttgagagagtgctgtgatggattagtgatgtctgccacaggcagg

SEQ ID NO: 10543 - DNA, 2300 bp, Homo sapien
acaggtgctgaagtcaggaggactcaggcagacacactgtacacatcaccgcaagctctccttcagtcctcccaacgactataagtgaggtgttaatatgcctgttttacagataaggtaactgaggatcaagaagttaagtgacttgttcaaggttgtcactgcagcagttttgtggtttcctctctaagatggagagaagttacaccaggacttagtgcctgggaagcaaagaggtgaaattactcggccaggattgcacagctgacagtgatgataccgatggctgtgcttttagtagctgttaggtaccaggaactgtgcttggcccttgacacatataatttcacggaatcctcacagcagattaaaaaaaaaaaaaggtaccatattgtccccattttacagaccaccccttacaagagatgagatgatgtgctgtgtgtcgcccagctcattagtggttgaactgagatatgaaagcagctctggctgactccaaaagccaaagctcttttgagggccagaggaagaggagagtcaggataccttttcctaggggctcttcatttgaagagaggatagtaccttgtcacagaaactgacatcagtaaatattccagaagagaaaaaaaattcatcaccaaatgcttttgaaaacctggacttatcattgttaatgatatgttcttacgcagggcttgtcagagcctttaatatgctcagatatgttgtgaatttcagagagggagacagtgacgtgttcctaacttacttgattcctgaatccttctttcctggaacgttttatggaaattaataatgctacatctaacaagctttgagagatgttaaaatagctacaccactagtagttgggtttcaggcacagcggccaacgaaaggagccctcagagccaaagcgccctctcgagggaggagccggctgtagggtaaggaggtgtctgcactaaagtctaagggtgcatcccattggaacctgggcggaggtcctggccacccccgccccataataggatgtcagagtagaaagagagtttcctggaggtaactgcagttggcagagaggtacaaagaggccagggtgtgtggcccaggagccagagacagaaggcaagccaggtcccctgacgtcgcttcgggggctggagtccagctgcggcctcttctcttctccccgcagggtccccgcactcccggtgaagaacttgaatggtactgggccggtccatccggccctggcaggtgaggtctggcccagggcgggaaagaagggcggggcccactaggaggcagctccgcctgtcacccggtgaccccgcccccgagatgggctggtgagcgtggcccggaggaaacgcccccttccactgggcccaggacacagggcgggcgtggcccgcagaaaggcccttcaggggccttcaaggggctgagtgggtggggcccaagagcgcaaccctcccacccacccgagggccccgggattcccagggccagtggtcgggggtttgggcggggatggcgccccgccctgtgactgcgccccctaacccccagggatgaccgggatactgctgtgcgcggccgggctgcccgtgtgcctgacgcgggcccccaagcccatcctgcacccgccgcccgtgagcaagagcgacgtgaagcccgtgcctggcgtgcccggggtgtgccgcaagaccaagaagaagcaccttaaaaagagtacgccctccacgccctgcctcacacgagatgaaccccactaagccttgaccacaactctgtgacccctggtctccaacttattcttagcatttactacctcacctccattgcctgatctcagctccccttgccctggccccatctttcaccagctcctgttacagctaacctccagcaacccctgacctctgaccctggccaacccttgccagcctgaccccggccaacccttgccagcctgacccctgccctctgacccctgacccagttctgagccaagccttcggggacagactctgggtaccctcaaacccaccccgctgtgtccctgcaggtaagaatcccgaggatgtggttcgaagatacatgcagaaggtgaaaaacccacctgatgaggtgaggaggggatgggggggctgggggagggccctggcatggagggggcaggaaccctcacccctcctcctgggttctgggtgatacagagctcttctagtttgttcctttcttcactttatgaggttttttgatgaatagaaatacttacgtttaat

SEQ ID NO: 10544 - DNA, 2300 bp, Homo sapien
ccaccaccttaggtggtatattttctttggagagaatctggggtaactgataaagatcacagtgggccaggcatggtggctcacgcctataatcccagcactttgggaggctgaggtgggtggattgcttgagatcaggagttcaagaccagcctggccaacatggtgatataaaaatacaaactataaaaatctactaaaaatacaaaaattaaccgggcatagtagtgggtgcctgtagtcccagctactcaggaggctgaagcaggagaatcacttgaacccaggagtggaagttgcagtgagccaagatcgagccctgccctccagctgggcaaaaaaaaaaaaaaaaatcacagtgggatgactcctttggggctattactgttctggatctaaccctggattacccctcatgccccgctgaggatgttgcaatacttctaagccttggagcctgttctgctaggtccatttcccagatgggattaactgagaccccatctctggtgggtcagagactcaccaggcagccaccagctggggaaggaattccagggctctgagttcctcatcagcctgtctgggttgctgggtggggagtcaagaagggagactgggaagcagaccattgggctgctgacggatccaggaagggcactcctggtctcaccggtctgggcgttggctcccgcactcagtctgcaggggcactcccattggtgcctggcctttctaagaggtcttgggcaggtcaacaatgaattcacagggagaaataagtgtgcgaacggatctgttctgggacaggccctgcctgtcatattatctcatttaaaatcagaaaaatgtacaaacctggagccactggagcagagagaaaggaaagaaaatctctaccggagtggaagggcatcctggaagccttcccaggagaggtgacgcgtggcccacgcctcaaaggacaacaatcagaatatcaaacactttctggacgtgtattaggtacttgtcactgtcctgagacttttatcttcattaactcttttaattctttcaaaatcctgtgactgaaatgcaatgtcatcctcactcaacagatgagaaaaccaaaccaaagcacagagaggttgaatggcttacccaagtccagacagctaccaaatggcagagccaggattcgaacccctggaaggcaaatcagttactgactgtgagacctctgccaagttatttaatccctctgaacctcagtttctttatccataaactgcggataatggggtaacagtggagtagtgtgtagtgcacatctggagacaaaaatgagctaatcccagtaaagcgcttagaacagtgcctggcacccatgaagtgttcaaacaactgtagatgactttttatcatcgctgtagtggttatcttcaagccttcccctcccccatctggccgcggcttcctcccccgcagtgccagcccgtgacgttagagcagagtctgggttctgtgtttaactggaaactagaacgagatggaaggggatgttcaaggcccctcccttgactctgaacggacccccagggaacatgcgaccctctctctggcgacgcctcccacccaccactaatacttgctcctggaccggggggcgcggaggttggagagaggaggcaggtgtctgcatggtaggcaaggaggggtgggggcggagaggtgtgaatatgttggatgagggacaggcgggggcacagaccatgtcttttaagcccaatgccaactcaccaggagccagcggccacgcccatcaggacgggggcccctccccacctggcggtgcacccttgtctccgccgcccgtgcgctctggcgcgcatgactggggtgccggtagagggcgcgcgagggggcccggggtcaggtgggggaccccattggaggcgggattgtggggaggtccctgggccgcccctcccgccccctgcccgcccagcctgcttgtctggagctccagacgcctcggcaagagcccgctgcgccccctgcgcgctcctcctgctcggagcacggctcctacctgtagagtccggacgggcgctccctccccgggcacctacaccttctcctctttcggaaatctcccatccagctacccgggtctcggacaggcggcactgggaccacgaggcagggagccaggcttgaagcaggtgacatgtagacgtcccctggtccagcctcggaacctgagcgcccttctgcctggaaagtttgtggctaggcgccatggccaagagcagctc

SEQ ID NO: 10545 - DNA, 2300 bp, Homo sapien
caggtcacacactctctctggtctgccttttccgcttcggtcccttggcatggactgccctaggcaacctccaactccctgctagtttcaggtcagagattctcagaacaacaggaaatggccgggccatgtgcaaagtttggggactgtggccattgccccaggcaaattttggggtcaccctccagatattggacaggtaacagcgctggcttgctggaggcccagctggcacagtctatatccttggtatttccccgtggggagctggggaagggtgtttgggtatatgacttcctgcttagctctggaagatgggccaagatggctgcgtggcagtttggctggcatcccatgggggctggaggaacaggccccttaggttccatcatcagggggttccaaaaggggtcctgggggtctggaggcctgtctgcggtctttgcaggctcacagaagaaaaaggctcaaacagtagcttccactaaatgtgtgtggtggggggcggtgtggggcggggggcaggattcccgtcttaaagcttcagttacatagcaaataccttaagtaccattccccccaccaccttaggtggtatattttctttggagagaatctggggtaactgataaagatcacagtgggccaggcatggtggctcacgcctataatcccagcactttgggaggctgaggtgggtggattgcttgagatcaggagttcaagaccagcctggccaacatggtgatataaaaatacaaactataaaaatctactaaaaatacaaaaattaaccgggcatagtagtgggtgcctgtagtcccagctactcaggaggctgaagcaggagaatcacttgaacccaggagtggaagttgcagtgagccaagatcgagccctgccctccagctgggcaaaaaaaaaaaaaaaaatcacagtgggatgactcctttggggctattactgttctggatctaaccctggattacccctcatgccccgctgaggatgttgcaatacttctaagccttggagcctgttctgctaggtccatttcccagatgggattaactgagaccccatctctggtgggtcagagactcaccaggcagccaccagctggggaaggaattccagggctctgagttcctcatcagcctgtctgggttgctgggtggggagtcaagaagggagactgggaagcagaccattgggctgctgacggatccaggaagggcactcctggtctcaccggtctgggcgttggctcccgcactcagtctgcaggggcactcccattggtgcctggcctttctaagaggtcttgggcaggtcaacaatgaattcacagggagaaataagtgtgcgaacggatctgttctgggacaggccctgcctgtcatattatctcatttaaaatcagaaaaatgtacaaacctggagccactggagcagagagaaaggaaagaaaatctctaccggagtggaagggcatcctggaagccttcccaggagaggtgacgcgtggcccacgcctcaaaggacaacaatcagaatatcaaacactttctggacgtgtattaggtacttgtcactgtcctgagacttttatcttcattaactcttttaattctttcaaaatcctgtgactgaaatgcaatgtcatcctcactcaacagatgagaaaaccaaaccaaagcacagagaggttgaatggcttacccaagtccagacagctaccaaatggcagagccaggattcgaacccctggaaggcaaatcagttactgactgtgagacctctgccaagttatttaatccctctgaacctcagtttctttatccataaactgcggataatggggtaacagtggagtagtgtgtagtgcacatctggagacaaaaatgagctaatcccagtaaagcgcttagaacagtgcctggcacccatgaagtgttcaaacaactgtagatgactttttatcatcgctgtagtggttatcttcaagccttcccctcccccatctggccgcggcttcctcccccgcagtgccagcccgtgacgttagagcagagtctgggttctgtgtttaactggaaactagaacgagatggaaggggatgttcaaggcccctcccttgactctgaacggacccccagggaacatgcgaccctctctctggcgacgcctcccacccaccactaatacttgctcctggaccggggggcgcggaggttggagagaggaggcaggtgtctgcatggtaggcaaggaggggtgggggcggagaggtgtgaat

SEQ ID NO: 10546 - DNA, 2300 bp, Homo sapien
atgaggtctcttctagttcctgccttggagtgtgatcctttctcttcatataaatgtccacttactcatcttgccctgagcctacctggtgccaggcacccgctgggaacaggactgtgggaaataatgggcgcagcccttctgccccattggtgctcacacccatcccttcatgtgcatacacatgacattcagtaatggaaacggcacaggccttggaatcagacagtctcaagtttgaatctcctggctcttgtactcacaagctgtgaggtcttggtcaagctgctttctctctttttttgtaaagatgggatctcccttttttttttttttctttttttggagacagagtcttgctctgttgcttatgatggagtgcagttgtgtagccacagctcactgtactctccgccgcccaggtttaagtgatcctcccacattgcctctccaggaggtgggaccacaggtgggcgccaccaagccaggctaatttttattttttgagacagagtcttgctctgtcacccaggctggagtgcagtggtgcaatatcggctcactgcaacctctgactcccagtttcaagcgattctcctgcctcagcctcccgagtagctgggattacaggcacatgccaccacacctggctatttttgtatttttagtagagacagggtttcaccatgttggccaggctggtcttgaactcccgacctcaggtgatccgcctgcctcagcctcctaaagtgctgggattacaggcgtgagccaccgcggccatcctaattttttaattttttgtagagacggggtctgcctatgttgcccaggctgatcttgaactcctgacctcaagcaatcctcccacctcagcctccctaagtgctgggtttacaggcgtgtagccactacaccaggcctttgactatttcttaaccctctaggcctcagtttcctcctgtagaaaaatgaagatgacagttgctggtggtgttagcacaacgttggtgtgaggattaaataataaggctcgtacagctcttagcatggagcctggcacatagtaaacggtcaacaaacacaaactggccgggctcacgcctgttaatcccaacactttgggaagcagaagtgggaggactgcttgaggccagaagttcgagaccatcctgggcaacatagggagacccccgtctctacaaaaaatttaaaaattatccgggcgtggtggcgcatgtctgtggtctcagctaccggagaggctgacgtgggaggatcgcttgagcccaggaggcggaggctgtagcaaggcgtggctacacaactgcactccggcatgagcaacagagcaagactctgtctcaaaaaaaattgttttaattcgtttcccagaggtttggaggcgtcacactgtctcaagccacgcagtctggcctccccttaattcaacctcccaagaacgctccaaactctcaaagtcagatcttctgcacccgcacttttcattgggcgaaagggagccaggatccgccccacgagcaggaggcagccaatgagagacgcgcgaccaaaacccggcaggaaggcccgcaggctccagccccgggatcccaaggctctggccgcggaaccctgagcctgacaagccccgagacacgtgctcaggccggcggtcccaagaccggtcctcgggtcggcagcctccctccccacactctgcggagcccaatccccagctggggaaactgaggcctcgaggcgctgcccggagccgggtctcgggcccgaacatgcgtcccagccccacgcgcctaccttccgggcccgggcgtcatcttccgcctggatctcaaactcgccgtcctccgagtcgctgccgcgggcctgggaggccgcgcctcggcgcttccggagccctttcttcttcctccactgggccatggcagctcgcgaccgaggtccagccgccgggcccttgtcggccgccattcgggccgcgcgctgggaacgcagaagggggcgtggcctgaggagcgcaccaactgcgtgggggggggggaggtgcggtgaccacgtgacctccgctgagctttcgccagtgcctgcggccctcggcggcctagtacacacgcacctgagtgagtggcaccagaggaccctctccatgtttagggacctcctgggcctcaggagcgtggcgcccgcccctgggcggactccccccatccgcgggcgcgaatggtccgggccgcgtccgcagtgctgctggctgctccctggttgctgggtgcaaagtg

SEQ ID NO: 10547 - DNA, 2300 bp, Homo sapien
caccacgctgcccaggctggtctcaaactcctgagctcaagtgatcccacctcaacctccaaacgttctgggattacaggcatgagctaccccatgtggccaaaacccattttcaaaatgacttcagaaacaccacatctatgtcatttcaaggatcgaacacattaatattaataagcttatgcaaatttctctgtgatcttatgcctcagctgactcctctgggcctcagatgcccagtttgtgacatttggggatagggagttcaccatcacaaccatcaacactaccatttattgacagctttctaagtattaggttactgtgcgaagcactgcagacccctctctcatttaatccatcaacaatccccctaggtaggaataattggtcctattttccacatgagtaaactggctcagagaggtcaagatgcttgcccaaggtcacagagcaggtgaacaccagagctgtaactggaatccaggtggctgcactgagtacaggatttgcatctccctaccccattacctgtatttgttcttcttccttggtgtgagggtgggggtgctgccccttgagggggtggtctcacagctcccctttgcccccaaggccttcgatgcctccttgcccacgcctctggttctgttagccttctccacccagggcggatcgaagtccggtggggtaggccgggtgcctgctgggctgccaaacagagtctcatccacatatgacgtcctggccttgacccggtagccacctcggcagcggtgctgaaggccgagggtctgcatcccactgacggccagctccacgggggtcttcatgctgcctgtggtccctggtgacagcaggtgtgctctgccggccaggccctgcttccgaggctccctgtgagaggaggtcagagtagcacccctgagccacagaagtgctaatggaggaagaccggtagtgtctgaagttctcatcccaagggtttagttctctctcaaccagtctctcaaaggggagctgtcaacttcagggggcattttggaaatttctttggcttttttttagttgtcataatggtggtgaaaggggggctactggcaattatttacagaatgactctggcggtgaaggagagatgacacctgtgtctatttaggcaccaaccagaaaacacactatggtggtaggggagacaggcactttcctatgtgtactgatgggggtgggggcaatgacagccagcgtggatcccatgcctacctcctgcaaagagctttacaagcattgtttcatttaatcctctcaacagcactgtgaagtagcttcgaatttgtccattttacggatcacaaaactgaggtgaagtcacatgtgtaggtcacacctataaagctaaaacggtggaagtgaaatctgagtccagagcttgtgtacttggctacactgctatcgggagatcaccgccgcccccaccgccccacattctgcgactcccaaatcaatgacccgattaaaaagtgcccgaggtccctgcatttttgggttgttctcctacctgagcatcttggctcgtaggcatcgggatcctcagggacccgtccccgcaccttcttcccaccaggtctggacccgtcggtgagggcgcgggggcgcgcggtgcatccgggatccccgtcaatctgcagcccggaatgcctggggccccggacccccggcagcctaggccgtcccggggcaccgcgcgcggacggactcacccgaggagccggcacaggctacgtgtgaacggcccgcgaatccagaaacccagaacccagcactttgcacccagcaaccagggagcagccagcagcactgcggacgcggcccggaccattcgcgcccgcggatggggggagtccgcccaggggcgggcgccacgctcctgaggcccaggaggtccctaaacatggagagggtcctctggtgccactcactcaggtgcgtgtgtactaggccgccgagggccgcaggcactggcgaaagctcagcggaggtcacgtggtcaccgcacctcccccccccccacgcagttggtgcgctcctcaggccacgcccccttctgcgttcccagcgcgcggcccgaatggcggccgacaagggcccggcggctggacctcggtcgcgagctgccatggcccagtggaggaagaagaaagggctccggaagcgccgaggcgcggcctcccaggcccgcggcagcgactcggaggacggcgagtttgagatccaggcggaagatgacgcccgggcccgga

SEQ ID NO: 10548 - DNA, 2300 bp, Homo sapien
tgtttaactttttaagaaactgccaactatatttcagattggtggtaccaattggtattctgctgtacctaccggcaacatatgaaagctacagtttgtttatttatctacatgatgatacttggtattgtctttttgatttttaaatgtctactcaactcttttgcccattaaaaaaattgagttgtcctcttattgagttataagagttatttttatattctatatacaactcttttatgacacatgatttgcaaatatttcctccatgtctgtgtctgtggctgatcttttcattttcttatgaaaatatcttttgaacctcaaagttttttttttatatatttttttgagacagggtttttcgctctgtcgcccaggctggagtgcagtagtgcaatcatggctcaccgcaacctccgcctcttgcgatcaagcaattctcccacctcagccttatttatttatttatttatttatttattttttgagctggagtctcgctctatcacccagactggagtgcagtggcacgatctcggctcgctgcaacctccaccacccgggttcaagaaattctcccgctcagcctcctgagtagctgggatcacaggcacacgccaccaggcccggctaatttttgtatttttagtagagacagggtttcaccatgttggccaggctagtcgcaaactcctggcctcaggtgatctgctggcccaggtgatctgctggcctcggcctcccaaagtgctgggattacaggctgagccaccgcgcccggcccttagcctcatttaatcatcacaagaaactctctgtcttcagtaggtacaatgagatcacatcttaaggatggagatgggagttaaattccaaagttaggataaaggcaaaagtggtgtaataaaaattacctaatttatttatttatttgagacagagtcttgctctgttgcccgggctggagtgcaatggcgctatcttggcttactgcaacctaagtctcccgggttcaagtgattctcgtgccttagcctcccgagtagttgggattacaggtgcgcctccatgctcagctaatttttgtattttcagtagagatggggtttcaccatactggctaggctggcctagaactcctgacctcaagtgatctgcccgcctcggcctcccaaagtgctgggattacaggcgtgagccaccatgctcggcaaaaacaacaacaacaacaacaaaacaaacaaacaaaactacctaatttaaacactgaagtgagattgcctgctcaccgaggaacgtatggccgttgggtgaaatgggaggggacttataaactcccctcccacccacagctcccatgtttgacttgaaataagttaactacgatatgactctgcttgactgttgtcctcctcgttttagggatgagggagtggagccatgaagtgggcaggtagaagggcagaatggaggccggctccctgcaggttgtggagcgaaaggtccagactaaggcaggagctgagggacagggtcctgaagctgagacgagatcgcagcgggggcttctaattcctcagggagccaaaggacagagggctgaaccctattccacatctcccccgatccgcgaccctttcccaactggctactcacctgctctgaccgctccaggtttccctagccacagttaccgccgcggtccctgcgttgctaggttacccgccaatctcagaaggcgagactcggtgtctgactgacctttcttttcaccattcaatttattgttccgctcagttgtccccacctcctgaagtctgaccaatcagaagcaccgccattttgacctttcaccaatggaaagacttgggactccctctgggttggactcaacgagtaaggcggggaacaagggaggagtaaggggcgtggattcttcgtcccgccccttcttaaggaggcgggcagggagtaccgcatcggcggcgggcgagacctgcggaaggacgtgatagttggccaatcagagttcatcacggtagcccagttagccagtaggacgctgtgaaggggaaatggggcggggccagcggggttgagaggacggtaggcggtggataggagagctggcgcagctgccctggtggcagtggctgaagtggcggcggcttcggcggctgcggcggctgcaacagcttcgggctcggggttttggcggcggcgccggcgggctaggctgcgcggtgcggaccccggcgcgcggtccgggttgctggggcggcgcgtgtaagaatccg

SEQ ID NO: 10549 - DNA, 2300 bp, Homo sapien
aagcccgtagctctctgcccagcacacttcctgtgagtttttttttcttaagtttcctccagatctggggatttattttgcttttaaatctcagcagtggaaaggcagaagaggaaatcccagatgagacactactatttggcagtcttaagaattatggttgtattgtcgttttggtttaactttttaccacagatattttcaaacattctcaaaagtgcagagaatatatacgtgaacttccttgtatccattactcagctttgacaattatctcccatgtttactttgaaggcaggagaatttattaactcacagagaagaggtttcttaatgttaccattatcataatggctagtggtttctatgttttaactcacggctgtccaaccttttggcttccctgggccacgctggaagaactatcttgggccacacataaaatacactaccattaatgatgagctaaaaaaaaagaggcaggggggttgttcatgcataattttcatgatatctgccaccatagattaaagtcctcgcattcaaatgcttcaacacggttgtttaactgtttaatatatgactgcttgcctgcctgtactgcctttgcccactggctttcaactggggtgatttttgcccccatggggacatcggcaatgtctggagacatcttgactgtcacaacttgggagtggggggattgctggtgggtggagtccaggtatgccactgaacttgcttcaatgcacaggtgagacctcccgaaacagaattatgtggctcaaaatgtcaactgagctgctgttgaaaaatcctatcttagctaatatccccactttaggaatgaggaaattgaagcttggagtggttaacttgccttttataagtttcaacccaggcagtctgaatcagggaccctgcctgcttaaccattaccctatatacacctacgactagaaccagtcccctgatttgaattcaaacacgtcatttttccagacagacaaaaatgaggcccagagaggggaagagacttgcccaaggtcacacagtggaggagtagggctagaacccgggactcctgcgtcctggtccagtgttccctccgcgggctttgcttctgcctctacagaggacccaactggccagcgctggggaaagggcctaggggaagaggttcagctaccatcccgctgtccgctggggcagcctgacccaggcacaagactcctgtggggtcacctaagggcgccagggagaagagcgagggagggaggaagaaggaggcaggacagctggctccagctccacgtgctcccagcccctggctgggagcccacgtgagggtcgccctaagaagtcgggggcgaggagagagggtgcaaagccccggcccgggctggacggagagaagcgcggtggagacttccctgcgccccctctgggcccgtacggcccacctcccacaccagagtgctgcgccgcaaccccttactccgcgtcctctgacccctgatccctgccctctccctcgggccaagccgtcgcatccctcggattcttacacgcgccgccccagcaacccggaccgcgcgccggggtccgcaccgcgcagcctagcccgccggcgccgccgccaaaaccccgagcccgaagctgttgcagccgccgcagccgccgaagccgccgccacttcagccactgccaccagggcagctgcgccagctctcctatccaccgcctaccgtcctctcaaccccgctggccccgccccatttccccttcacagcgtcctactggctaactgggctaccgtgatgaactctgattggccaactatcacgtccttccgcaggtctcgcccgccgccgatgcggtactccctgcccgcctccttaagaaggggcgggacgaagaatccacgccccttactcctcccttgttccccgccttactcgttgagtccaacccagagggagtcccaagtctttccattggtgaaaggtcaaaatggcggtgcttctgattggtcagacttcaggaggtggggacaactgagcggaacaataaattgaatggtgaaaagaaaggtcagtcagacaccgagtctcgccttctgagattggcgggtaacctagcaacgcagggaccgcggcggtaactgtggctagggaaacctggagcggtcagagcaggtgagtagccagttgggaaagggtcgcggatcgggggagatgtggaatagggttcagccctctgtcctttggctccctgaggaattagaagcccccgctgcg

SEQ ID NO: 10550 - DNA, 2300 bp, Homo sapien
cttatcaggaaccatcagaaaatccagtatagaacacgttctgtgaaggagaacgtaaagcctctgtgctcaaagaactttgagggtgtttgtggaggtgtggacagcctccaggagtgtcccagccatcacagatcacatccgacaccaggctgttaggccggtgcccagaccacacatccatggcagagctaacggggagaggcttccgatcgagtcctgtgtttatttttatgcttctgcagagcattctcacaccagtcaccacagtcaggcccagtatagaaatgaaaatcatcttttccaggtagacttgtgaaatctaaaaaattttaagtccttttctcttttttgagatggagtctcgctctgtcacccaggctggagtgcagtggcgcaatctcagctcactgcaaccgccgcctcccaggttcaagcgattctcctgcctcagcctcccaagtagctgggactacaggcacatgcacatgccgccacacccgactaatttttgtatttttggtagagacagggttttgccatgttggtcaggctggtctcgaactcctgacctcaggtgatccgtccgactcagcctcccaaagtgctgggattacaggtgtgagccacagtgcctggccaaaatttaagtcttaaaaaggagaaaatatttcctttttttttttttgagacagagacttgctctgttgcccaggctgtagtgcagtggcgcgatctcggctcactacaacctccgcctcctggattcacaccattctcctgcctcagcctcccgagtagctgggactacaggcacccgccaccacgcccggctaattttttttgtagttttagtagagatggggtttcgcgctttgttagccaggatggtctcaatctcctgaccttgtgatccacccgcctcggcctcccaaagtgctgggattacaggccaccgtgcccggcctgagaaaatattttcttgttttaattcctcaaaaccaagaagaaatatgttgagtacttctttgtatttgatttaattcataatatatttagagctgtgaaaatttagggcagcagtcaacaaagtacgacctgctggccaaatttggcccatggcctgtgtttgtaaataaagtttcattgggacagagtcatgcccatttgttcatgtatagtctgtggctgatctcatgatatgaccacaggttagtagtcgcagcagagatcatttggccttcacagcctaaaacagttgctgtcgaaccctttacagaaaaagcatgctgacctttgatccacagggaaaaaatgggggaccagtttgagggaaaggaccagagagtttcccttaaaacatttttaaagacagagaaagtgtttctaaaaaggattctttcaagttcttccccggccttccatccccctctgataagctaacttttggtattagccaactctagaacgttatttccttgcatgcagagcctctcactcccctttttcctgggccacacgtgaagcagtgactcacaaggagaagtaacaaaggggcagggggaggaagggtccttctggatcggaggtcaggagggcagtgggcaggcagcctccgcctgccactggctggagtcggactgggctcagaatccagatgcgcccctcttgctactctctcctcccctggcttgcccctgcgcagcctgggacaagctgtagctggaactggggaaaggagtgtgggaaagtggaggggaacctgggaaagatggagtaacaatgccttcatgtatctgaagagggaaatttacaagcggaacaaagggccttcctctgttgagacttgggagactgacttcctaccccatgaggtgcaggcgagagggtctccccagggcctctctggggtgactgggtaagagccttgcctagatgatgaactcatacccccctgcactccctgccctaaccactcaaggtcctgagctagggctctgtgcttctctcccacagcttctggctgtggtgttcgacaccttcaatgacattgagaaacgcaagttcaagtctttgctactgcacaagcgaaccgctatccagcatgcctaccgcctgctcatcagccagagggtaggaactatgggccagggaggggcttggtccctgtcctccctcccttgcccagagcagcccctaagcatggccaggccagccactttagaaaccaggaaccctgcccttggaagaatgaacagagctggagtggatctggagtgggtgccccaagggaaggggag

SEQ ID NO: 10551 - DNA, 2300 bp, Homo sapien
ccttgcctctcctccctcccctgcaagcaacggtgagagagaaggccctgcctgcagcagacaacttccaggtgacagaggtgggtcaggctggccaggggatcccgccaagcccagcaggcaggaatagccaagggcattccttcagcagggacccaggcatgaggtggagagggttaggcaggaaaccaggctgcgggcagaacagaaggatccttggccagaactcggtttgtttcagacttctgtcctctctggaggtgactgatcgccttgtgaccctccctcctttctcccttgtgctccggccagcacgagtacagtggcagatgcctaccgctggcgcaaccacaccgtgggcaacaggaccgtggtggaggaaggctactattatctcaataattttgacaacatcctcaacagctttggtgagtgggaaaaatcacagggggcacattccctggggaccccacccttgtcacccttgtcaccacgggtcccagaggtggtgtagcaagtgtctgggccacactttctggaagcctccctggcccaggtggaggacttggtctgcccagctttggcagtacagtccaggctggatcctggagctcactcagttgcctgattccactctttcctgatattttctcagtaccggggaggacaagagttgcaagccttagctgggcggggtcccctcatcacagtgccacttgcagaatgggacccagccacaccactgctgctgcagctgcactgccccctggctcagactgcacacagccctctgcccactcccatgaagaggcgaacacagccaaaccgcctctccagaaaaagggtgtgcccccatgacaccccagatctgcacccagtaagatccagatagtctgatgtggcacaggctgctgaggcagagggtgtgttctcttgggggcaggccatgatgtcctgtggagccagcgccctaggagtgccttgcctggtctttcctggagctcacaacccaagcggtcatatggtgaccctctcatcttagcacatggcacccaggataggtggcaagaggccacttgaaattgactttgaagtggggtctcatcaggatgcttctttctctcttccctcggcagtgaccctgtttgagctcacagttgtcaacaactggtacatcatcatggtaagagctcgggcagctctgggggtatcttcccgccagccctggggtcggccctgggtctcccccaacccagagtatataattcttcccgtagcttgcagggctgggggtcttgagtcatgctgtgttggtgttcagtggggaggccacaggatggctgggccccaggagccacccctcccagtgttggctggactcggctgttactcccatctccctgcatgtccccagcagccaggagatgccacttagactctgggtctctgtcctgtctcgcccactgtagagatgacttttccctctagtgacaaagtggcgagcattgctgatctctttattccattccttaaactttcccgactcccagccctactgggataaaggctgccctggttctggatccagtcgtccaggggagtggccagggctccttcagcagtcaggaattagtgttaggcccagaggggcaagcttcctctcctccatctctcacaaccagccacaaatcacggtggggtctgcgaagagccggggccatggagcagcctgtgtagacggggacctgccctgcatgggcaccccctcactggctgcttcccttggtctccaggaaggcgtcacctctcagacctcccactggagccgcctctacttcatgaccttttacattgtgaccatggtaggtcccggaccacagaacgctctttgtccttcgtcttccacatcaccagctgcccctgctcttcagcctgcagcgtcagggagtggggctgggtcccatctggccggactctgttgggcgtgggctgcgcagccacggacacctacccaccctcctcccctgcctctgcccctccctccctatccctggccaggtggtgatgacgatcattgtcgcctttatcctcgaggccttcgtcttccgaatgaactacagccgcaagaaccaggactcggaaggtctgtgcagggatgatgccttgggcatttgatatctgccgcctacccagctctgtctgtctgtctgggtggctgtccagccagccatcaggctgtcatttttctgctgtctggctgtccagcttatctatctggcttgtctttctagatcttgtat

SEQ ID NO: 10552 - DNA, 2300 bp, Homo sapien
gtctgtctgggtggctgtccagccagccatcaggctgtcatttttctgctgtctggctgtccagcttatctatctggcttgtctttctagatcttgtatttgcattgattttcaaatatttaatgtcagaaaacgtaatctaactttaaaataagacagagcatgtcatagttggagaaaaatcaagaagtagagaaaggcttatgtggcagcagcagcccctgccctgcctttccctcccgtcctccagaggcttctccttcttggctatttcttctgttagtcatctccacgtttctcaataataggttcacactacggttcttgatttaaatggtgtaaatattgcttatggcacaggcgaatcgtattcctgctgcaactggatggtgctggctttagtgactgcctcactcttcccagattgcacagctttctgtgtgctgaccctcccttcttcccaaattctccatcaaaactgtctgcacttgatctcttgagcccaggaggtcaagactgcagtgagccatgatcacaccactgcactccagcctgggcagcggagtgagaccctgtctcttaaaagaaacagaaaaccctgtgcccacacttgttacctctcatcctcagatctctgtgctatcagaccatctgaccattttctctgtgcttagaggccccttcctgaaaccctctggccctgtaacagctgccagctagacctgcgctcctgacatcacagcagagggaggggaagggaaaggagggccaacgaggagagcaggacaccaatgcagtgtcggtttagagagagaaccttaagaccccctgcggaagggggcaaggaggtacgagacccagccaggttggcagctgcagccccgggcccttcccacacctgccttccatccctgcagttgatggtggcatcacccttgagaaggaaatctccaaagaagagctggttgccgtcctggagctctaccgggaggcacggggggcctcctcggatgtcaccaggctgctggagaccctctcccagatggagagataccaggtgaggagcccaggccctggtccgaaggagggaggcaggtttcagtgtgggtggcataatcccttccctcagatattggtaacattttgagtgacacagttgcaaaagccagagaagtgggagacgccaactgtggcaccaggggtgggacctgaatatctgcagccgagccctgcagcctctgctcttccttagcaacattccatggtgtttctgggacggcgatcaaggaccaagagcgacctgagcctgaagatgtaccaggaggagatccaggtaggagcctggccgaccacgctgcgaatcctcccccaagctatgtcctgggaggggcagggagctgctctctggccctctgagtagagggagaaggctggtagagagatgcagaccgtccatcgggaccactgctggggttgtgtgggacctgagcggggctcacttagccttgaacccttgactcgtgcccagcagaggcagctctccagcctgcctgccgccatatgtccctgccccttatgaattctccagaacctcctctccatctcttactctgagtcagctgcaaactcaaacatgtgtactaagaaacacagtgagcaaagaggaaagagcggcgaccgtggtgaactggcaaggatgtccctgtccaaaggagacagtctcctcccagctccaggatgtgcctgtccaaaggggacacagcctcctcccagccccagcgagtgctgcccaataggaagaaggccctactgcggtcgggctgcttggtgttttgttttgagatggagtctcgctctgtctcccaggctggagtgcagcagcacgatctaggctcactgcaacctccgcctcctgggttcaagcgattctcctgcctcagcctcccgagtagctgggattacaggcacacgccaccacacctggctaatttttgtatatttagtggagacggggtttcaccatgttggccaggctgggagtgcttgggatttttcataattgggtgttttttgttttgttttgttttagagatggtatcgctctgtcacctgggctggagtccagtggcgtgatcatagctcactgtagcctccaacccctgggctcaagtgatcctccccactcagcctacccaagcagctggaactacaggtgtgcactgtgacaccctaattaccttatttttgtagcagtgaggtcttgctggggtctcaaactcctggtctcaagcaattcttcc

SEQ ID NO: 10553 - DNA, 2300 bp, Homo sapien
tagccagtgccgggcggccacagattacactgaccaatctcctcccttggctctgcaagcctcccacccagccttctctggcttaacccttgttggcgaaaactcttccacagtggcctccttggggacccagaacccggaggaaggggcatgaggcaggaagtggggccgatgtctgcaacccagaccacttcgtggaatgggctcttgaccaaatccctttttttgcgatttacccgttcaagcaaaacaacgttttggttaactaaggattgtgctaaagccgataccaggtccttcacacgtgtgcactaggaacaggagcgaacagcacagagagacgctccctgtgggacgcagcagccccgtggccccggcccagttcccagccaccctccctggctctgctcacaccagagatttccatagcaggagcggttggtgcagaagtaggttcagatgaacctcagttaacgtcgccacccctcctcccaccatggtaccctgtaggagccctgtatgacatctgagcgtggtggaggtaggagggttgccagctgcagtgaccctgccacagaggcagggtcagtgcagaggtcgctttggttccgcttccctgggccacagaacggaacacagcataggttctgcagcaggagccgcagtggcaggatggagggtgcgaagggcaaggagtgcactgctgggcattcctggccagccccggccctctggtgcctgcttcctgtgacttcagaaggcaggtggacagagcctccctctggccttgtcctcttcccagccacagaacgggcagggtggcacccgaccccaggggagcagtacctggtcccccaccccctcctcccaaccacctccaaggccaagctgggtcccatagccagcacggcatggttctccccttccccccttcccaggtcaggggagttggacaagtagcaggtgtttgtttttaaagcacagccctttgggaaagcaacacattattgagactcactgtgattcccccgggagtcagactggctttgtcctcttcctctctggagggccatgggccatcagcaggagctccacatcgagccccaggccagaaccccctccctttcacagagagggaactttattgcacaattgggtgccttttagcttttgtgtgttgaaatgggcgttttggaagcaagggtcaggggacagcttctaaaggtgtgagtctctgacctgagcatctgggcctcgcctgggcccttcttcctccccaggggtggaaacgtggaggggccagcagcaccccggggtctgcccaggggagtcaaggccccgaggtgggggggcctattccaggaggagtgggatctcggccctgtccagagcgagttaatgtgtccatctgcccaaccctgtcctgagaaaggacctggttttggccaggacctgacaaatacccaatggcagcagtgtcaacagacgggagtccagccagggtgggtgcccttgtcattgaggttagggacagctatccccaggttatgcctggccccacccagcagggagttggggtccccccacaggctgtgagctctgtgggccctgggatgtgatctagctcagatgccctctcatccttgatgtcatagttgagtgcacccaagtggcacccactggcggccaggggcacagcctggtggtggtggcaatagaactgtgcccctcctcagctcctcgcttcccctcccacagccccagccttactccaccatgcggacaatcattttgtacggatcacgggagcaatgctgtacggttttgtacactggtggtttgtttcctagaaaacccattgtgtctctggatttctagcacattactaaaagagcctctgctttgtaaacatggctgctgcctcttgacttctgtggctttgggtattgtcgggagagtggccccatccaaggccatggccattcctgatcctgcctcagccccaccccgagctgtgccctggggtcagccacttggcactggccccaggtgaggaagaactggtaaaagttgggggtgtcattttctctacacttgaaattttgactttttttttatttggaaaagagacagttgaatcccttttctttaccagcataaggcagtcaggcaaacctaagagttgcttatttcggcaacataaggcggggtcattgcatgacagcaagaaggcacgaggtcccctcatctgtcctttcccagctcgcaggccttggaaccccgcccagggccccgctgag

SEQ ID NO: 10554 - DNA, 2300 bp, Homo sapien
gaacatttgaactattcatcgtctttaagaccagtaccaactcctagtggtgaaaagggtgatgtgtggagaattctagagtgttctcaccttagggtgtctccctttggtgtttaatatgaagcctctggaaccttcatatttgttaatggagagtggacttatttgggtacctctcagtgaagaggctgggtttgactgtcaggttcatctcatggagcgatgccatctactggtaatgcctggctggagggagctgcctggaaatgcagttggatggaagtattgtgcttgattagtgatgtctgccatgaaggtggaagagggtggtggtgttagtggttatagccattcctatcctagttccacagcaacaggctggagagagtcttttttgtgtgtctctctttttctttcaaatgtgactaacttgagggcaggggctgcattttaaatttttctgcccccatgaagtgtctaggacagggctgggcagataggaagtgtctacctgacatccaaatagtccattgtaagtgggtgttgaggtgctgggaaggtatcagctccctttctctccctttgcagatggtgtctatgagataggcggcctcgttcccgtctgggtcgtggtggtgatcgcaggcacagccttggcttcagtgaccttttttgccacatctgacagccagccccccaggcttcactgggtaagaagcccgggttctccgagatggggggggagggatgctgatgtctcccacacagatgtcctgtctgcatctctgaggcactttgaccagtttgatcaggagtcacacaaagacaggtaaccgaactttaaagctgcttttgagagtgtttgtatctatacagggtttttttctttttttttttggtaatagcttaattttgttgagatgtaattcacataccatacaatttacccatttaaagtatacaatttaatgttttttattatagttacagagttgtggaatcatcacaatcaattttagagaatttcatcaccccaaaaagagacctcatgcccataagtcactccccatttccccaccccccacatagcccctggcaaccacgactctactccgcgtctctatgggtttgcctatcatggacattttatataaatagaatcctacaatatgtgatttccttttttttgagacagggtctccctctgctgtccaggctagagtgcagtggtacagtcatagctcactgcagcctcgacctcctgggctgaagccatcctcccacctcagccccccaagtagatgggactacaggcgcaagccaccacgcccagctaatttttgtatgttttttgtaaagatgaggtctcactatgttgcccagactactctcaaactcctggcctcaagcaatcctcctgcctcggcttcccaaagtgccaggattccaggcatgaggcactgtgcccagccttgggtttctaaagacactccagggatagaatgggatggcctttgtgggtgtctttttccattttccctagtctaggcactctaaagaatatttaggggtttgtccagagactttttccttaaaagtttacttaaattagctgggcgtggtggcgggcacctgtaatctcagctactcgggaggctgaggctggagaattgcttgaacccaggaggcagaggttgcagtgagatgagatcgcatcatggcacttcagcctgggtgacagagactccgtttcaaaaaaaaaaaaaagtttacttaatattttcattttggctgggcgtggtggctcacgcctgtaatcccaacactttgagaggccgagacgggtggatcacctgaggtcaggagtttgagaccagtctggccaacatgtcgaaaccctgtctctactaaaaaatacaaaaattagccaggcatggtggcgggcacctgtaatcccagctccttgggtggctgaggcaggagaatcgcttgaacccaggaggcagaggttgcagtgtgctgagatcgcgccactgcattccagcctgggcaacagagtgagacatcgtcctaaaaaaaaagtttacttaaaattttcattgtttagtgcttaatgattttttaaaattttagtttttacttttggaaactcaatgaatgtaccaaccgaagggtgttgaattttcagcaaatggatcatttagggaagttgccttttactacttagggaaaattgtctttcactgttttttcaagtaccgacgtgtgccacaacatggatcacccttgaaaacatgatg

SEQ ID NO: 10555 - DNA, 2300 bp, Homo sapien
ttagctgcttagatgggcctagtctagttctcagggaagtctctgccgctgatgtccccctccctgtcttcctgcagtgccgcaaggtgtgtggcctgaatgtctctgaccgctgtgacttcatccggaccaaccctgactgccacagtgatggggggtacctggactacctggaaggcatcttctgccacttccctcccagcctcctccctctggctgtcactctctacgtgaggccctgccctggggggctggtgagaggggctggtgtctccagctggacttgactctcccttcctcgcccgctccccacccaggtttcctggctgctctacctgtttctgattctgggagtcaccgcagccaagttgtgagtttggctctgggctccggtctggcttatcaatgggaggaggggtcccaggaggctgacattcggtcaccctcagtttgggggaaggataggggtccggggccggttactacggaaatgcttcccgtccgctttttctccgtagtttctgccccaacttgtcggccatttctaccacactgaagctctcccacaacgtggcagtatccttttgtccagtgtcctgcaccctggagggagggcagttgtggggaggctgggagatagggtcatgtctatccccgtgtggggaagctgggggatagggtcgaaggcctgggtgggctgcagctgcgatcctggcccgccttgacatgctccccacatggcgtcaccttcctggcatttgggaatggtgcacctgacatcttcagtgccctggtggccttctctgacccgcacacagccggcctggcccttggggcactgtttggtgagagcagccccagtgaggggggcggggaaagcagcaggagagggtgcagggtggctgagctctggcctcctccccccaggcgctggcgtgctggttaccacagtggtggccggaggcattaccatcctacaccccttcatggctgcctccaggcccttcttcagggacatcgttttctacatggtggctgtgttcctgaccttcctcatgctcttccgtggcagggtcaccctggcatgggctctgggtgagcagctctggggctcaggcgtgagatcccagggctgatgggcaggaggtttaggaggtgcctgggacagagaggtgtgaggggtggtcagtgggggctttgatttgattacaagtgacagaaaccctcctcaagctggcttgagcaaaaatgggaacatgtgggtcacataaccaaagaggcctggcagagctgggggctggggagggagtattcaaaagtgtcacaattttttggccaagcgtgatggctcacacctatcatcccagcaatttgagaggctgaggcaggaggatcactttggttcaggagtttgagaccagcctgggcaacatagcgagactacatctctacaaaaaagaaaaaacttagctgggcatggtggtggtgcattcctgtggccccagctactctggaagctacggcaggaggatcccttgagcctaggagttcgagactgcagtgacccatgattgtgccatggcactccagcctgggcaacagagcaagactctgtctcaaaaaaaagaaagtttcataatttccaattttaacaagcagtaaagatgggacgctaactggggccacccggatcgtgacagcaaacatgttccattcagacggctcaaggggtatgaatggagggacaatttgtacagaaggaaaatgaaaccagcaagggaaaccgagattcgagatactcaggggccagcaacaatgggagctgcgaacgcactcatccctcgtggcagcaggggcagggaagggggtggtggagcccagtgagagttggagggctggaggcctggagctatactgaagagggttgcaagccctgccagagacacgcaacagggagggagtaggaagaaagactccagagtctctcccgctgcttctgatttcctgtctggcctcccattggctgaacctagctgtagccagagctacagggctgcctcctcccagggcacagagcaggacaccgacccttagtacttgaatggggacctggaggtctctcgctgtgcttgggtattacctccttgattgcaagggagacaggaagggagatggtcctggaaggcaggaggaaggagtggggagctcaaggaaaaggccatttacccactggtacctggatgggctaacacagattgccaccgctaacacgcaccactgatagaactgccagctgttgt

SEQ ID NO: 10556 - DNA, 2300 bp, Homo sapien
ttctcctatttcttttatttttttcttttgagacagggtctcactctgtcacccaggctggactgcagtggtacaatcatagctctctgcaaccttgaacttccaggctcaggtgctcctcccacctcctcctcctgagtagttgggactacaggcgtatgccaccaagcccggctagttttttttgtattttttgtagagatggagttttgtcatgttgcccaggctggtctcgaactcctgaggtcaagtgatcctgcagccttggcctcccaaaatgctacagttacaggcgtgagccaccacacccgggcccacttccctttctctatgtttgtgttcctcaggtctcccaaacatactatgtccatctcaatctttgtctctgagtcagcttctggaggaacccagaccaggataccctctgattcagcactttctcttctcaaatcttctctgacaacatttttctcatatgtgctcagagagtcatgtgtgaggaagctcattggctatattgaaaaactaggcatacccaaatgcccagtagggaaatgtttacctcagtgatgtatcacccatagtatgaaatactctgctgcagtgaaagactctgtggggaggcaggggagaacagtgggccctagagcctaaaactgcctgggttccaaccttgaccctcccactgagtgcacacggacattgtctcagtctccttaactgtttaatgggcatgataatagttccttcctcgcagactgttgtgcagagtaattgagatacatattttttttttttgagacaagatctcattctattccccaagctaaatgcagtattgcagcctcaacctcctgggctcaggtgatcctcccacctcagtctcctgagtagctgggactacaagtgcacatcaccatgcctacctaattttttattttatttttttgcagagatggggtcttgctatgttgtccaggctggtcttgaaatcctgggttcaagcaatcctcccacctcaacctcccaaagtgctgggattataggcatgagccactgcccccagccatcatagaattattgtacagattaattgagatacattttaagctcttagcactatgctttgcatatagaaatcactatagtatgtttcaaattctgtatattaaggtatattaatatatatatatatataatggtaaaagcaaattatagaaacaagagatttgggatggatccatttctgttaaacaaaacaaagtgtgtaataggatatatatacaaatataattgatctgagaaatgtctgtaaggatgtgcttcaaactaattatggtgggaccactggagagggggatttacggagggcagggataagaaagcggaatttagaaatcttatgtattggtttttttaaaaaacaaatatgtattcatgaattacttatgtcaatttcaagcagacgtttatttttaaaattaaaagtgcatccatagttggcacccagagggtatggtggccttggagaccaggctgaagggacattatgtttagctgcttagatgggcctagtctagttctcagggaagtctctgccgctgatgtccccctccctgtcttcctgcagtgccgcaaggtgtgtggcctgaatgtctctgaccgctgtgacttcatccggaccaaccctgactgccacagtgatggggggtacctggactacctggaaggcatcttctgccacttccctcccagcctcctccctctggctgtcactctctacgtgaggccctgccctggggggctggtgagaggggctggtgtctccagctggacttgactctcccttcctcgcccgctccccacccaggtttcctggctgctctacctgtttctgattctgggagtcaccgcagccaagttgtgagtttggctctgggctccggtctggcttatcaatgggaggaggggtcccaggaggctgacattcggtcaccctcagtttgggggaaggataggggtccggggccggttactacggaaatgcttcccgtccgctttttctccgtagtttctgccccaacttgtcggccatttctaccacactgaagctctcccacaacgtggcagtatccttttgtccagtgtcctgcaccctggagggagggcagttgtggggaggctgggagatagggtcatgtctatccccgtgtggggaagctgggggatagggtcgaaggcctgggtgggctgcagctgcgatcctggcccgccttgacatgctccccacatggcgtcac

SEQ ID NO: 10557 - DNA, 2300 bp, Homo sapien
tgagcctgacaacatgagtaagagtttgtcaggtggaaaagagatagggtgtcatcagggcagggggctcggaaggagcagaggcaggtggctgtgagcaagaggccgatacgttcagggaacagggagcactactgggcaggaggtggaggtaggggtgaaagacgatttcagaaaggtgtgctagggctggatgctgaagggccttgaatgccaggcttggcgttgggcctgggtcctgcccatgacgaggaagcaggtcctaccgtaaggataagagatggggtgactagatgcatgctaatggcagaagtggggctgcaggcaggagtggcctgggaggacacactccagccttaaggaccccaggtccaggccccatgcctgcctcctcccattcccccatccccccaacagaagaaaaggcaggatgaacagagcttccccaggaggctgggaaactggaaatagggggagatactggtacatccatcagcagatcactaactcctcggtcttgatttgtttgccaccttcttttaaaaacgatgctatgtgcccccttcggcagcacatatactaaaattggaacaatacagagattagcaaaaagaaaagggaaaaaattaaatacaaattttaaatattagataaaaaggtgggcatggtggctcacacctgtaatccaagcacttttgttacaggaaaggggtcctgatccagaccctaagatagggttcttggatctcgcgcaagaacgaattcagggtgattccatagagtaaagtgaaagcaagtttattgagaaagtaaaggaataaaagaatggctactccataggcagaacagccctgagggctgctggttgcccatttttatggttatttcttgatgatatgctaaacaaggggtggattatctatgtttcccctttttagaccatatagggtaacttcctgacgttgccatggcatttgtaaactgccatggcgctgatgggagtgcagcagtgaggacaaccagaggtcattcttgtcaccatcttggttttggtgggtttgggctggctcctttactgcaacctgttttatcagcaaggtctttatgataacctgtatcttgtgcccaccttctatctcaacctgtgacttagaatgccttaaccgtctgggaatgcagcccagtaggtctcagcctcattttacccagccccactcgagatggagttgctctggtttacacagctctgacactttgggaggcagaggcagaaggatcgcttgagaccaggagtttgagaccaacttgggcaacatatagagacctcgtctctataaaaaattttaaaaactagcctggtttggtggcacacacctgtggtctcagctacgtgggaggctgaggcgggaggattatataagcccaggagttcgtgaccagtttgaccaacatagtaagaacattttacaaaaaatgaacaaaattagccgggcatgatggcacttgcctgcagtcccagctacttgggaggccgaggtgggaggattgcttgagcctcggaggtcgaggctttagtgagccgtgacagctgctactgcattccagcctgggcgatagagtgagaccctggcttaaaaaattaaaatttaaattaaaaaaaaaaagctatgctactagaggggaatgttgaacccaattaggatctcagaaggatttcagtgaaaccgcgagaactttcctgggcagggtggggctttctccacctgggattttcccaaacctctttgtcaccattcattaccaggagcagcttgacaccctctggttcctctaccctcgggaaatgaacctcctagtttcaccctctaaatgtccctctccggcttcctgcagtccttacccatcggcttgtatctcagtttcaaagcggagggagaggacggtggagagtgggaagaccctacgaagctccccgggagctgtacctttaagggcaggggcggggcgagccccgagggggcgtgtcctgagggcgtggccgagaccggggcggggcgagccggggcgggcccggacgggaagagtaggggcccggacgctgcagcaggcggggcacccggactggcggcttcgctggcgcaaggtcggtccggcggccagggacctggaaggctgcgaggccctgcgaggtcgaggttcggagtttgctggtcccaggcccggcccgaggtaagaaagagccgcctccccgcacggccggaggacccgggcgccccgagttcgacttctcagcctccgtc

SEQ ID NO: 10558 - DNA, 2300 bp, Homo sapien
tccttccttccttccttcctttcttccttcccttccttccctttccctccctccctcccttccttccttccttttctctctctttctctctctctctctctctttcctttttgacaacttcttgctctgttgcccaggctgtagtgcaactcactgtagcctcgacttcctaggctcaagcaatcctcccccctcggcctcccagtagctgggactgaggcagaaattaaaataataataataataagtactacatatattcactccaagagaagtaagagctaaggcccagaatgtggcaaggcaagggttaaaaaagaagaagaacaagttttcctctgcttagcagctcacttcaaggacagttataagataacgctgtccgaaaagccaaggccagaggactgggctccagaccccgccctccaccccaccgcccgcctccagagcaaggttgaaggaaaaaaaagagagaaagacaaattattttattgctattcctttccttggtctcttaagcatgactatgttttacaaacctctctatttagccagttcttgttttacttttgatgcagctacaaggccaccagctatgcaaggccacaagttatgcactatatgattaactacttttgttttacctttctaagcttgcttataaaaaccccacaatatctttgttctaggctcagctttttggatgtgaatccactgagccagtgcgtacgttgaaataaacatcctcctgttctctcatattggtctctccgttcctcagtttcccacaacaggactacaggtgtgcaccaccaagctcagctaatttttatattttatagagacagagtcttgccaggtttcctaggctggtctcaaactcctgggctcaagcattcctcccaccttggccacccaaagtgctgtgattacaggcatgaaccactcacctggccttccctctcaaattttaagagttcctgatatattatatgatatatgttgagatatatatacatatatatatgtaatgtatatatatgatatatgttgcaaatagtttctcctggtctgtcagatgtcttttgactttgcttattgagttttttgacatgaaaaagttaaaaaatttatacagtcaaatgcattaatcttttattgcatctaggtttttttttttttttttttcttttgagacaaggtctcattctggttgctcaggctggagtgcagtggtgcaatctcgactctctgcagcctcgaccttccgggctcaggtgattttcctacctcagtctcccgagtagctgggactataggcgcgcctcactgcgtccggctacttttttgtatttttagtagagacgggggtttcaccatgttgcccaggctggtcttgaactcctgaactcgcccgccctggcctcctggagtgttgggattacaggcgtgagccaccgcgcccgacggcatctaggttttgagtagtagttagacagctttttcccacacacatgtaaaaagggtatttgagggacaatgggaaaagttggaataaagactgcattagataactgtattaaataaatggcaaataccattaaataaatctggccgggcgcggtggctcacccctgtaatcccagcactttgggaggctgaggcaggcggatcacctgaggtcaggagttcaagaccagcctggccaacatggcgaaaccccgtctgtactgaaattacataaatcagctgggcgtggtggtgcgcgcctgtaatcccacctactcaggaggatgaggcaggagaatcgcttgaacccgggaggcggaggtggcaatgagccgagatcgcgtcactgcactccagtctgggcgacatatggaggttttgtcttgtctcaaaaaaaaaaaaaaaaaaaaacttggggaagtgtgctaaaccgggtttgcgtaggtggaaggggcggccgggctctttaaggtgggtcccgccccgtaggcctcccctcgcgccagcccctcccatcccggaaaggctcagcccaagcccggccccgcccgccctcggccccgcccatggcagagcgcagtcacgtgacccgggctgcggggcgcagcattgtgcggtcatggtgggccagatgtactgctaccccggcagccacctggcccgggcgctgacgcgggcgctggcgctggccctggtgctggccctgctggtcgggccgttcctgagcggcctggcgggggcgatcccagcgccggggggccgctgggcgcgcgatgggcaggtccctccag

SEQ ID NO: 10559 - DNA, 2300 bp, Homo sapien
tcaaaagtaacacaaacatcaaaccagaaaggacttgatttaggaaccaagcccaggccacggtggtgaaaaaggaacagaatcttagctactgaactagcgtgaggtgacagccatgtagcctctttcagtttggcttggctagcaaaagatggccttgttatgtaaataatgcccctcaggtaatcaaaatccttgtctctctctctcttttttcttttgctggctgttttttctttttcctttttttttttttccagctgtgggtatttagccaattcatgagaccttgttcgccataatatgaaactttccttcagatttgaccaagtcaaatggagttggtccagtccaatggggaaaagacagaagcaacaaaacaacaacagaaacaaaaacagttaagcaagggaaacaaacaatcaagcaatttatacgattactgcacgctctaaaagtagggagaaattaagaccagctggttgttaaccctaacttctagtcatggggcccaggctgaagaccgctctctaccatcctagaagcggggaaatctcaaacttgccttccctgccggacacaagcgaaactccagaaaggagctgcctgcttgccatcatcatggaagccagaaaactcaccttccttgttggaagtgagtaaaacgcagaaaaggagctgttcagggaaatcaagcttagatatcaaccaattgtgggagatcaggagttctctggaggtggggagctcccaggcctcagcaaactgtcctattttggagggcaatcaagatcgctcaaggccggcatggtggctcacgcctgtaatcccagcactctaggagactgaggcgggtggatcacttgaggtcaggacttcaagaccagcctggctaacatggtgaaaccccatctctactaaaaatacaaaaaattagctgagtgtggtggcacatgcctatactcccagttatttggggggttgaaacaggagcatcgcttgaacccaggagatggaggttgcagtgagccaagatcatgccattgcactccagccagggtgacagagcaagacccaccaagcaccagtaggagacttgtcaaaggtcagggccacctccacccagggtccctttcatgagtctccaatctgtaaatcaaaaagaatcaaaaagattgagacaggactcaatccatttagaaatttatttcgccagggttaagaatgcacctgggagacaggtctgtgcttttctccagagatgactttaggtgtcagtatttaaaggagaaaagcaagctggaggggaaagaaggaggctatggccacattaccaaatccacagtttgtaagagaagaggggcagatagggaagtagccaattatgtatttgtcttgatctcaataaatcggcactttacataagataaggtgaacatagagtagcgacctgtggagatatttaacttttttttttctttctgttgtgaaggctggagtgcagtggcgagatctagtctcactgtaacctctgcctcccaggttcaagcaattcttgtgcctcagcctcctgagtagctaggattacaggcacgtgccaccacacccggctgatttttgtatttttagtagagacgggatttcaccatgttggccaggctggtttcgaattcctgacctcaggtgatccacccgcctcggcctcccaaaatgcggagccaatatttaacctttcatctgaagctatctgcttaggaactaaaggaaaggcagtttcttacatgactcagcttttagcttaattctttttcttttggcatagtgagttgggggtcccaattttttattttcctttcacgaaactgaggacagaaaggggaagtggaaagagggaggaggagtgggttgtgggaaaggcaggaggaagctgccaaagaagaaagcttggccagattccacctcccttctgacagcctcagtggcctcaagccaggggggtgggtcctggcaggagggaggggggggtgtagccagccccagggccccattggctgcccagaggtgccagaggaataaagcccaggaccaagtagcccctgggaccattcagaagactgtccacccgtcctcagccccctctcttcgtgggctatctactcagttgatccctccctcgctggcttggctctgactcctgctcagacccatcacctttgccgggtaagtggccccatcctcagtcccacctcaggactggagtgtcccgggctagcctgtggtttcccaggggaagagggaga

SEQ ID NO: 10560 - DNA, 2300 bp, Homo sapien
agattgccaactattaaaaaacctttgggggctgggcgcagtggctgttgcctgtaatccgagcattttgggaggctaaggtaggaggattgcttgaggtcaggagttcaagatcagcctgggcagcacagtgagacctcgtttgtaaaacaaacaaacaaacaaacaaacaaacaaataaacagtgtgggttacgctggacagcatgcacgtgttggtgtacagtagacatgcactaaatgcagctagtctgcttcttgtcaaagtctgagctgtgtgctgagtctctgcctacttcaagaagccctccctgatcttgccccatccccagctaccctatggggactttctgccctctgtcatcttaggaagtgttattgttgctaccgaattgggtgtcttcctctcccctccatgctgggggccacttcaaggcacaaactggattttatcacctctgtgtccccagtacccagtccaggacaaggcacccaacaaggatggatgtgtgtctaaagcgaggatgggtagaaacttgccagagtccacattaaggatcacggccaagcagctccatctaaccccaagtggctgggagttaatcatcaaacctggggagatcagaaacagcccaagaaggacacacaacatctgtgatgccaggtcttcctgttcccactttccacatagggaaactgaggcccagagatgggcacgagctgctcaggttcacccagtgagatggtgcagagacaagacatgaatttgaccatgtcattccccccacctaaagccttctgtggctccctagtgcccctgggtaaggtccaaactctggattggtacaggcatccctgtggactctgatctctgcccacatctccagcctcaaccccacttgcttccccacccctgccttctccctcccagccccactggatactaccctgaccctggaatatatcatgtttttcatttccagacctttgcactccctgtgcctgactcctggctccactcagacttcccctcctccaggaagcctccccagccccccagggccaggcggggtgcctgctctgggttccacagccctgccccaccctgccagctgctaacatctgatagcactaataagtgctctctaatggccctctctaagggctttgtgaaggcagaggacatgctattttgtttgaggccaaagttccagggattggcacatagtaggtgtccaataaacatttaatgaatgaatgaatggtcagtcattcatctgagtagcaaataattgcttgggttctcatgctgcgtgtaaaatatccgagacggagaggtgcttcagacaaaaatatacctttcccatgtcacaaataataattataataattgtttccttggccaggtgcagtggctcacgcctgtaatcccagcactttgggaggcagaggcaagcagatcacctgaggacaggagttcgagactggcctggccaacatggtcaaaccctgtccctactaaaaatacaaaaattagctggcgtggtggtgggtgcctgtaaacctggctacttgggaggctgaagtgggagaatcgcttgaatccaggaggcggaggtaacagtgagccgagatcgcaccattgcactccagcctgggggacaagaatgaaactgtgtctcaaaaaaaaaaagttcccttgtccttgttttcccatcccagacctaagctgaccccaacagtggttcagcatccgggacaatcactagacctaaaatgagaagacatggagatgcctgcatcccggaagagatggcccagggccaggggtaaaggctgtctctgccccttgctgtctgggaagctttggccaaataagttcccttttctgagtttcagtttgctcatctgtcaaatgagacagggtggtgcatgagtcataggcagtgcccgggaaagcggtgagggttgctctcatcccctctcctcctccgtcttcacccggaggcttagggtctggagctttctctttaacaaaggaggagggaccaaggttgccggaagctgcctgaagctggacagagccggttcctggaaagagctggttccctggcaggctggagggcaggagctggggccacgctggtctgggatagttgggcagggaggtaaggggtctggggccagctggggcccctggggctcagtgtgtgtgtgaatgagaggctgatgagaggctgcaggagtttgggaggctttgggcaaagtccaagctgagcaggtgggagtgagagggcctga

SEQ ID NO: 10561 - DNA, 2300 bp, Homo sapien
caagtgctgccagaaactgcagttccatttgaagtctctcatggccgagcctaggaggccaagtgagattcatcctgcctgttcctggttgagctgggctctaaccagcgttactactatgctctgtagatgcctgtcccctgacaagctagagggtcaggtaacagcaccaataagcagaagctgcccgggttagggattccttttccagcgggctggctggtgagtcaatgctccactctgtaaccagcactcaccaattccctgtccctagcaagatcacctcccctagatactgtgggggacagtgctaggcctgagaggaagggggacaagtgggcatccctgagccccaacacaggcatccacaaatcctgctccctcaacctccgaatccacaaaggtaagcgcagctaggagtacacacacaaacacaaatacaaacataaccccctcacacacacatacacacacacacacaaaagcctacaggagttgcataaacaaaaaactactgtttgcacaaatacacacatttgcaggcacacacacacagcgactggcacacaaacatagctcttcagaattctgcactcacaaacacaaccaagccagctcagtctcatacacacagggtctcaagcatgcacgccctcacctacacacaaacacacacattcagatttttcaaagtacaccttcacatcaatgcttgcaaacacagacacaaacactcttacgtgaatgcacacgtacacatgaaaacaccctcacatttatgcatcctcaaataagcaaacacacataggcacagaccaacaaaaataaaagtgcacacagtgataaacacaaacattagcaggaccatacacaattacaaacacacgaatctgcacacacgaaaacgcacacgcagaaatttactcacaggattgatggtactaacacaataaacagatgcaaaaatggaattctcaaacagcgagtatacactaacaagctcaggaaacacacccaaacaaacattcacagccaagtgctggcacaaacccctccagctccagcccttggtcccaggccctactccctcagccccctttccagaagcgaaaggcaaatcctggttgcccattcccggcttccccaactaggatccctggtggccacgctggccccaggggaaaggaggcctggtcccttctcctactcagacccacacaccccctcctcacgcacacctgccaacatcccccctcccccttaacacacacacactctctctcctcacactctgggcgccctgccgagcacggaacatacgtgcgccgcttctcctgcgcccaatgaggggacgaacttgcacacccagcccgcacggcgtgaatacaaacagcgctctcatagtcgctggtgtcccccgcctcagccgtacgacccactcaccacagtgccccataggctgacctggaatctggaaggtgcagcgaggaaaggagagacgtggtgagtgccacctccgagctgtctgcgggaagacccgtccaccctgaatctccccctgtccacatctccctcagagccccgtgagcagcgcactcaggcctgaaactctggagttcgggaccaggccaaatggcacccctcctgctcccccgcctccccaccctgggcctgggcctgggctcggcggccgggcggggaaaactacccaggccgcgcggtctccactagctctctccatgagaaaggcccggctgggccccagccccgtgtatgacaaaaagaagccggggccggctccaggagccgggagaaccgcgctgacgcagcttcagggcgcagagggggcgcgggggtgggggaatccaatctgggctggctgggctggagaaggggagcgaagtgtggggcgtggggcaacttctgcaagttccagggatggcgaagggggcaggggtacctcccggactaggccttggaacccgtgacccccaaatatttgtgaggagaaagagagaggaagagagacgcaattttcgtttcgcgctgcccccgccccgtcagccccaaactggaaggtaaatacttacttagcctccgaaccaggtacaagctaatactcaacaatactgatgccttgttttttttgctctgtccggacagcaacgctgtagccaatttagatatgctataaatttaagaggttgccatggccacggtgcgcccattggccgctgggccccctacgtgcagcgccacgtcaccaaatctgaataaggatgcgcgaattacgcggcgac

SEQ ID NO: 10562 - DNA, 2300 bp, Homo sapien
agttacaatcatgtctgcccagattcttctcctgctcagccctgcttccctaacctctcgtgggtttctcctgcaaacacagcctccataaaagacttcatgtgaatcctaaagctctaaggctctttctagaaagggagtctaatttaagattgcaggtgttcagtaaatgcttgttgaatcaacatgttgcctgttattcaaaaaaacaaacaaaaacaaacaaacaaaaaaaaacaaaaaacaaaacaagagtggaaccaggtgaggcaagagaggtgccgaaggcccaaactttaaggaagggtccattcttggagtcgcgcaaatgcccagccctgctgaaaaaccagaacccgtttaagcatcaatcaatcaagaaccagctatgtaaaccataggacatcctaagagaagaaggaaggtcagagttatgacattgattcctggggcagttggagacagaccttagttccaatcttggctccaccatgtaactgcaactttgcacaagtcacctcacttctctgaacctgtttcctcactctaaaatgtgcatgataatacttccctcatatggctgttggaagatttgatgagactgtgttaatgtactttgcacatagtaggtactcaagaaagagtagccactgtaatggcctttaaaagcacttagagcagttttctgaaagtgccttacatgggatgtctccttcgcatccctgccttgtgctcccatcccagttacctgctagacctgatgattctgattctcatgtagggcacagtagaacacagcattaatttctagtgatggatacattccctcggcttacccatgtgtggatgaatccatgtctaagggatcttctaatcagaattgtgattaaaatgaggtgtgcataaatgcatccattctatgaattggcccaagcagctaaaggaaaaacgacaacaaacaacatagatttacccttccagaggtgagatgacaaagctcaggctttgaagacccacatctggctgcgtctgattccaccaaccattacgtagcccaaagcaagctgtgttttctttctcagcctcaggctatgtgtctgcaaaatgggcgtgataaagctctaacactaacactgacataatgctatgtgcctatgtattgggctaaatttatttatttacacgacccctgaagtgtgtgaggttggtattagaatgatctccattttccagatgaggtagagaaaccatccagagagagaactggcagtttcagaagtagggagcatcttaatttctagcagaaactgggataaacccggggtatgagataaaaatgggagattcaaccataaaagtttgggaaattaaatgatgctatgactctctgggatgcttgctggacagagccctcatgagggcagggcaagttaaattatcttcataagcatccctgtgttcaataaaacccaagctttcttttcttttcctttttttttttttttaagacagagtctttccctgtcacccaggctggagtgcaatggcatgatcttggctcactgcaacctctgtctcccgggttcaagcgattctcatgcctcagcctcccgagtagctgggattacaggcatgtgctaccacgcccagctagtttttatatttttagtagagacatggttccaccatgttggccaggctggtctcgaactcctaacctcaagtgatccacctgcctcagcctcccaaagtgctgggattgcaggcgtgagccaccacgcctggctgacttttctattttgagttttttgggggtccagccattttttttttcctttccagcattccctgttccttgttcccattttcctacatgctcagtccatagagcttgggtgaggctgaaccatcttccgatacaagggtgatcacatgacccagcacccaccaaaggagtccagcccctggcctcattgattggttccaggataggcaggtgaccaaggtttggtcaattagaacatttcagctctctaactacactgattggctttgggatgggcacatgaccaagttggtccaatcggagccaacccagggacattttcctggagcggctgggaaagaggagtctctcgaaattcagcaactgctaacagcgaggagggggtaagtaagagacttccgggggccatctcgtgggacttgagaaggaagctaacacccaggaagcaggatcaggggaagggaaacacacacacaaagccctgattatcttgtttcagcctctgggtccagct

SEQ ID NO: 10563 - DNA, 2300 bp, Homo sapien
tgtttgagctggtcttagagaggggatgggaatgggttcagaaagatattccagtggccaaaagcacatgaaagatgctgtttcattagttatcggggaaatgcaaatcaaaacattgagtcaccactgtacacccactagagtggctatgattataaagacccaataacaaacactggaggagatgtggagatatttgaaccttcatataccgctggtaggaatataaaatggggaagccactttggataacaggttagcaggttctaaaaaggttaagcatagagttaccatatgatcaggcaatcctactcctaggaatatatccaagagaaataagaacatatgcccacacaggaacttacaggtaaatgttcacggcaagattattcacagtagccacaaagcggaaacaacccaaatgtccatcatcaactgatgaataaataaaatgtaatacatccatatatgtaatactattcagcaaaaaaagtgtggtggctcacgtctgtaatcccagcactttgaaagttcaaggcaggtggattgcttgagcccaggagttcaagaccagcctgggcaacatgttgaaacctcgcctctaccaaaaaattaccaaaaaaaaaaaattagccaggcatggtggcatgtgcctgtagtcccagctgctcaggaggctgaggtgggaggatggcttgagcctgggaggcggaggttgcagtgagctgagattgtgccactgcactccagtcggggtgacagagcccgaccctgtctcaaataaataaacagataaataaagtgctgattcatgctgcaacatggaagaactttgaaaacattatgctaagtgaaagaagtcaattacaaaagactacatattgtattattccatttacatgaaatgtccataacagacaaatccatagagacggaaagtagattagtggttatcagagggaagggagagggaggaattggaaggttatagctaaagggtgtggtgtttctttgggggtaatgaaaatgtcctagcattgattgtggtgatggctgcacacctctgtaaatatagtcagcaccattgaattgtgcactttaagtgggtgaattgcatggtttgtgataaagctgttaacaataagaaggggggacggaatgtcttttaggtgaaggaaattgcagaagcttggcagcaacgtccagtgcagctgaggcactgtggggaaacagaaaggaaataccgtcatttaagagtgaaaataggggttttcataggatgtctccatccaagagtaggtaccgagaatgctcagagaagcaataggaaaataacatccctttcacgttctcacctccttaacccctagcataataaagaattattcccattttatagaagtagacacaaaggctcagaggccattttggccaagatctctcagctagaagattggccagctgagagttccaaacattaggaagggaggcaaaatgcttgtggggctggggttgaaggcgtagagactcattgtagggccctaggcagtccctagctcgaatctgactttccaattcatagttataagactttgagcaagctgctttacacgcacgattcccagtttatctgcctgcaaaatgagagcgtttatttccaacatgttcattccaagtatttacacaaaaggctcaatacttgatttgtgttggctggcaatctctctaaacttcactttccccatttctacgaggaaggcaagggtccctaatcttgcccccgttctcaggggagtcctaaggctcaataataaaaataaaataagaaaaaggagagaacgcgattgcccggttggcgcgacccttaacaccgagctaaaccggcgcatgttagggaccggcgccccctgccgccttctccgctgcattggcgtctcacagaatccgcccaaggccctgcgcctgcgcaaaatgcaagcgcccaggcccaccccttgtggggtgtgacctccctgagtagttttggattagccacgcctacttccggacaggtcaggccaaggtctcagccacgtgactgtgttccggctcggtaaagatggcggcgcccagggcggtagcgtgaaacttggtggaagacgctgaccagtcgtgttggaatcaaaacagcggggaccctgcgccatgtcgcgactgatcgtgaagaatctcccgaatggggtgagtgcagaggcaggacttgggaatctgaaatgagaccagccgggagctgtgaggtagggaagagatgcctggaggtg

SEQ ID NO: 10564 - DNA, 2300 bp, Homo sapien
agaaaggacttcgaccattcactgggcttccaactttccctccctgggggtgtaaaggaggagcggggcactgagattatatggttgccggtgctcttggaggctattttgtgttctttggcgcttgccaactgggaagtatttagggagagcaagcgcacagcagaggaggtgtgtgttggaggtgggcagtcgccgcggaggctccagcggtaggtgcgccctagtaggcagcagtagccgctattctgggtaagcagtaaaccccgcataaaccccggagccaccatgcctgctcccccgcctcaccgccggcttccctgctaggagcagcagaggatgtggtgaatgcaccggcttcaccgaacgaggtaaccgtcccggcagatggcccgggaggctcaggagggagctcgtcggccgagtcggctggggcggcgggaatggcggattccagcccggctttgcattctgcagagcacagcttgcagagattttgcgcggctcggagctccccggcaaatggagtctgggaggccgccgcggctggcggagcggcattgaggtttgcagaagcacggcctggttctgtcaaaccgcatcttgttcgcctccgccagcccagagctccccgggaccctggcgagggcgcggggtaggattctccccgcggccggcagtgaatgggagcgcgtgtaggggcgccagccctgctttcttttgttgtgagtaggcagcggggctccagtcgccgcctccctgaagccccgagaacgaggcgaagaaagctgcttgcaagtcaggcctcagaagctgtccttctcctcggccccatttctagatctctggccacagcaggtcagggtgggatctggccgcttgcttaagcagctgctgaggttttgggggaccatcgcttgtgcccgcttcccaaagtcttcccgttctagggggaattcctacttgcgtatagaagagattggaaggagatcagagagcaggagacaggctcatcgggcttgaacagctctgcggcagttattttgtgtgttctaagctcatacgcctgcaaacccgggccgttctatgcattgcggggacccgggctgcagattcaatgtctccagcctaggacttatccgagaatgattttgtcctcgccaatcctgagcctgagcctgcagttttagcaggccaggcctggctgaagttcagagaaacccctttcggcctggtcactccacaaaatgcccgccatcccccgcccggcatcagagcgctggtggcgggcacccagtgacgagccttcctcggaacggctgcacggtgactttcttcatctagtcttctgtttggctactttttatcttttaacgaatcttacttaaggttgggataaagaaaaggatgtttaattttaaaggacttttaatgttaaggcctgtaactggtaaaaggtgtatatgaattctcttttgaacctagtctcaatctgcacaaccttccccttctgtgtttttctttttgcaagaggcgggttatttcacacatttctgcctgctgcagaaaactattcctcttgtgaggtttaataaaaagagtttcgacggcatcttgtaatttggcgaagaaagaaattctctaaaggacactgggtttttgttttgttttgtttttggttcctacccagtggcttccaaaaatacccacgccttatctttattggctcttccagaagtccagacaaatttgacgggcagcttgcttatcacggagagcctgcgcaggggagatgcgggcctcaccttctccgggtctgacgcgggtcttttgcaagaagttgtgcctgcttataaagtaatagtaatactactaggaatactagtaacagtaataattctagggccttctgcagtcaccttcggctgggaacggaggtgctggtagctggaaactgggggccaaactgctccctcctgtcactagaattgtgctctccaacctttctctcgttctctctctgtcctccccacccccatctccccctgcttcttgtcctcagagcagaaccttgcgcgggcacagggccctgggcgcaccatggccgacgcagacgagggctttggcctggcgcacacgcctctggagcctgacgcaaaagacctgccctgcgattcgaaacccgagagcgcgctcggggcccccagcaagtccccgtcgtccccgcaggccgccttcacccagcaggtaaggagacctcgcgcttcgggtccctttgcagagatcaaagtcagagtctg

SEQ ID NO: 10565 - DNA, 2300 bp, Homo sapien
gaagacggagagaaatttacctcccgccgctgccccccagccaaacgtgacagcgcgcgggccggttgcgtgactcgtgacgtctccaagtcctataggtgcagcggctggtgagatagtcgctatcgcctggttgcctctttattttactggggtatgcctggtaataaacagtaatatttaatttgtcggagaccacaaaccaaccttgagctgggaggtacgtgctcttcttgacagacgttggaagaagacctggcctaaagaggtctcttttggtggtccttttcaaagtcttcacctgagccctgctctccagcgaggcgcactcctggcttttgcgctccaaagaagaggtgggatagttggaggtgagtttcaccctggaggactgaggggggaaataggtttctctttgcacttggccctccttggcttttcaccccgtcttagtcttgctgaatcttctcttgctgtgctgctacttctcatgaacgaaataagaatggcttcgtgtgtcacctggcaagaatggattctctcgaaaggtttgaaaatccctattttgcttggtggcccagaccatctgtgctcaatgagctaagcaaatctggctgggctattacctgggagagtccagatttttcctctctggaggggcctgaagattatttatgggaattaattttatccccaaatctctgagaacttaaagggattgggaaggtctttctggatttccctttccctctactggagatgtagcggttcagccttcttccgatgccatgtttgtttttcgtgtcttcggcctagggtcgccttgccagcaagcctaaaggcctccaagctgacttggagggtgagggtgttttcacaaataaatacatcgcctgggcaaagggaaaatatctgtttgcaaacaaacctggaaggtggagtgagcaccatagcaaaggagggctggctttctccccggttgccccacattcagggttggagattctccactttggcattttgcagcaatggcctggcctgggattttagcagagcagtcacagagggttacacagctgctgacctcggggcatttctcctccctccatccctttctccagaccttgacttgcaggcccaagtctcttatcagaaccctagaaaaatcagtatgatgggggtacaggaggtaaggatgggaaacagaacaggactcctgacatttactccaagcaccaatattcggtgtcccaatctgggtctgctcagactgagacctactgactgtgtttgtgcttttattgacctcttcaactcaccctaaaaaaaaaaaatacatctcagagagggaaagggcaaggagaggagaccagtggagatgaaaaccctagccagtccccagtgactgtttgattattttaataaaactgggcactgccttgtgtacacctggagcaggggacgtctggtggccccactgggtggggggtgagggcccgcagcgatttcttagcatctttgatctcggcccccatcccaatgcaccttcaccctgccttcaccccagagtcgttgagagtaggggtgatgagtagggggtggaggggagatgtcaggaaggcgagcgccggccaggcggggtcaggcagctctccttctcgaggtcagcgttggagagaatgtctgcaaggctgcggaggcccgcggtgtgtttgtgtgtgtgcgtccagactcggttctctgcaccgccagcgtcactgagattacttcccgattagaagccgaccgcgtttgaaatgatttgtgcaggagtttttgcagccaccgcttgctcagagaagcagagatggatggaggttgggaaaggggtagagaggagggagttattgcaggtctgtgttgagagtcgtattgtgatttgagtgttcgggaaatctagtggaaatttggggtggggggaagggaggacgggagggtgggagggagagagaagggggagggcgacagagtgcagtgggagctagttggataggcgatttcagtactttgtgagcatcgaggcaacccaacgtcactgtgctcagctgagttggcttgtatttcagagagagagagagagggagagagagtgagagagactgactcttacctcgaatccgggaactttaatcctgaaagctgcgctcagaaaggacttcgaccattcactgggcttccaactttccctccctgggggtgtaaaggaggagcggggcactgagattatatggttgccggtgctcttggaggctattttgtgt

SEQ ID NO: 10566 - DNA, 2300 bp, Homo sapien
gggccgagatcaaagatgctaagaaatcgctgcgggccctcaccccccacccagtggggccaccagacgtcccctgctccaggtgtacacaaggcagtgcccagttttattaaaataatcaaacagtcactggggactggctagggttttcatctccactggtctcctctccttgccctttccctctctgagatgtattttttttttttagggtgagttgaagaggtcaataaaagcacaaacacagtcagtaggtctcagtctgagcagacccagattgggacaccgaatattggtgcttggagtaaatgtcaggagtcctgttctgtttcccatccttacctcctgtacccccatcatactgatttttctagggttctgataagagacttgggcctgcaagtcaaggtctggagaaagggatggagggaggagaaatgccccgaggtcagcagctgtgtaaccctctgtgactgctctgctaaaatcccaggccaggccattgctgcaaaatgccaaagtggagaatctccaaccctgaatgtggggcaaccggggagaaagccagccctcctttgctatggtgctcactccaccttccaggtttgtttgcaaacagatattttccctttgcccaggcgatgtatttatttgtgaaaacaccctcaccctccaagtcagcttggaggcctttaggcttgctggcaaggcgaccctaggccgaagacacgaaaaacaaacatggcatcggaagaaggctgaaccgctacatctccagtagagggaaagggaaatccagaaagaccttcccaatccctttaagttctcagagatttggggataaaattaattcccataaataatcttcaggcccctccagagaggaaaaatctggactctcccaggtaatagcccagccagatttgcttagctcattgagcacagatggtctgggccaccaagcaaaatagggattttcaaacctttcgagagaatccattcttgccaggtgacacacgaagccattcttatttcgttcatgagaagtagcagcacagcaagagaagattcagcaagactaagacggggtgaaaagccaaggagggccaagtgcaaagagaaacctatttcccccctcagtcctccagggtgaaactcacctccaactatcccacctcttctttggagcgcaaaagccaggagtgcgcctcgctggagagcagggctcaggtgaagactttgaaaaggaccaccaaaagagacctctttaggccaggtcttcttccaacgtctgtcaagaagagcacgtacctcccagctcaaggttggtttgtggtctccgacaaattaaatattactgtttattaccaggcataccccagtaaaataaagaggcaaccaggcgatagcgactatctcaccagccgctgcacctataggacttggagacgtcacgagtcacgcaaccggcccgcgcgctgtcacgtttggctggggggcagcggcgggaggtaaatttctctccgtcttcgcctatcagtgccgggtctgcgcagccacaggttccggacgtcttggccccgggaataaataaagacataaaccaacccggctttctccggaggaatgagggtgatgaacataagacacaaatagagccaagatcgactttcttaggaagggggagaggagggaactcttcacgaagggaggtgggagtccacctcagacctctattggaaggaaatcgagttgttccgggggactgaggtctcttgcataaggcatgggatccttattattattattattatttttaaatcccccgcggaggagctctgggcaaatgaataccgaggcgccgctctagctggttaggcttgggatgcgataactcagtgccctcttgcagacttgcatagaaataattactgggttgtcgtggaggggacacgagacagagggagttctccgtaatgtgccttgcggagagaaaggtccaagaatgcaattcgtcccagagtggcccggcaggggcggggtgcgagtgggtggtggagtaggggtgggagtggagagaggtggtttctgtagagaataattattgtaccagggcccgccgaggcacgaggcactctattttgttttgtaatcacgacgactattatttttagtctgatcaatgggcacaatttctaagcagcgcagtggtggatgctcgcaaacttttgcgcaccgctggaaacccactaggttgagttgcaaaacgtaccgcgtagacgcccctggtggcgccgaga

SEQ ID NO: 10567 - DNA, 2300 bp, Homo sapien
tctaaagcacacaaagcaacactaacatgaatgaggagagcagcgataataattcttggtggaaatattggaggagagtattggacactcaataatcataataataacagccagtattcttcccacatacttccggtcaaaagtggggaaaccagaaaccgaataaaacattgggaagagacatactgtgttcctggaaaaaatataacagagccagatttaactcggtgagagggaaagtgacccccttgagaaaccagggaatgtctcaccctcagaccaaccctttcttttgcaaattgaattggtcaaagtttagttttgtcatcatttctattgttataattcttattcattttcccagccccgtccacacttctatttttcactacccccacgccccacaagttgccaccgggtcaggtggggacatatccggagagaaatagaaagggatgcattttaaagcgagttctcttttgagaggaaaacaatgggtagttttggaagtgtctttcttaaaaacggaaggagaaggtgaagaaaaaaattatcaacagcaatgggcccctttggtttgggttttgactttttaaagaggaacctctgctgtcctgttgcagtattaaaatcagggcaggaattttgcaaaatgagaaaaataaacttcgggagaaaacccagctgggagcagcttcgggaaagcgacagttctccgaaaggaggaagggaggatgcgcgctgtagccggctccggagtttactgcccgaacgattggggaaaagaacgaggattctcaaatctagttgcgatctctcgtctctcctttattctgttcgtggtgcgggcttcggagcgtctgggaaagccagtctgtgaagctggacttgcagaatcctttgaatgccggtccaggtggctgcagggcccgcagtccgggatgccggagaaaggaaccacaaggaaaagacgctacgctcggagtttccccttttccttgcagccccggcggggcctaggcctcggtttccggcccacctcggctcagaggtcaagtaggaactcatctcgtcgacctagggtttgggagaaggatttcgggttgcgttcttggcatctgggagcaaacacgagcctcggatttggggacatatcgttattaacagcttgggaaacgaaagcgaagctcggggcagccactgcagcctggctgagagaaaggacgcgggttgtgctctctggaagcaaaggggtctgcggcccagctggcctgggagcttgtggccggcgctggaagctgcccgctctccccgcgggcctgaccttggctcccgccgcagctctgccggccgactgcctccctgcacattttgctgccgttccagtccttacaggaccgggcctggagccaggccatgcttcggaaagccctgggggttggggacgcgcaaaacccagaatcgaaccccgaagctgggggcaagtccagattcagacgtccagctccctcgggaccccttggcggagaacttacccttccggaaggcccgacgctctccggctctgtgctgggcaggcctagctcttctctcggcgccaccaggggcgtctacgcggtacgttttgcaactcaacctagtgggtttccagcggtgcgcaaaagtttgcgagcatccaccactgcgctgcttagaaattgtgcccattgatcagactaaaaataatagtcgtcgtgattacaaaacaaaatagagtgcctcgtgcctcggcgggccctggtacaataattattctctacagaaaccacctctctccactcccacccctactccaccacccactcgcaccccgcccctgccgggccactctgggacgaattgcattcttggacctttctctccgcaaggcacattacggagaactccctctgtctcgtgtcccctccacgacaacccagtaattatttctatgcaagtctgcaagagggcactgagttatcgcatcccaagcctaaccagctagagcggcgcctcggtattcatttgcccagagctcctccgcgggggatttaaaaataataataataataataaggatcccatgccttatgcaagagacctcagtcccccggaacaactcgatttccttccaatagaggtctgaggtggactcccacctcccttcgtgaagagttccctcctctcccccttcctaagaaagtcgatcttggctctatttgtgtcttatgttcatcaccctcattcctccggagaaagccgggttggtttatgtctttatt

SEQ ID NO: 10568 - DNA, 2300 bp, Homo sapien
cacagaaaacagctcaccctgcagtccatgagggtgtttgatgaaagacacaaaaaggagaatgggacctctgatgagtcctccagtgaacaagcagctttcaactgcttcgcccaggcttcttctccagccgcctccactgtagggacatcgaacctcaaaggtaaaccatgtcacctttgtgatcactggactccagtccctcgtggcctggaagagttgaagggggatggggcaccaaccagggcacttgccctttaaaagctagaagccttctaaacatccttaaacagaagccagagttcaaaaagggctatcaggtgtgtctccccttccccgctaaggcagtagaaggagagcacagaggcctttctcccagatccttatttggctggtggggaggggaggtgggtgtctgtttgcatactacctcttggcaagcagctttgaaaacttgcttgaagcgcttctctcttttctctctgtctctgtttctttctcctcccattctctccaaccaacagaggctccaactgctgacttttcactgtctttgaactctaggttacaatgtgttggactgggtgggggggaagcaagggactctgccacctggaaccgagaaggtggcctagaaaacatccagctataaagcaacaattgacctgggagaggaggtggagcactggggatctgcggtgggggtagagctgggggaggtgggtgaggagtggacaagatggctcaaatcccccctcagttacctgtgtttaaagagcaagcagtatttatttggaaagacacacacacacacacacacacacacacacacacacacacactctcaacgggaagaaacctgttttttagtgaaataaaatgcaagtcctttatgtcttcaatccatttaagctttaaacataaaataggatccctttttcttttcttctggtggaacacccacagagggtgtggtaaaagcgaaaaaagaatctatgatcgtccccgggctgtgagccatctgtccgacactcatctctctctgcagggactggggcaaatacaaacggttcaactgagtactggtgttgaaggacaggtgtccgttctgccattatcaattcagatgtcagggttcttgccaaacaaatccttccagagtaattcacaaatttgtggaaggtgctgctctctgtcattcactgattttttgatagtaattagaatatgttccagctgtgagttttaatgttactttttacttttaaaaagttaatttgcaatcgaatggggagatgcatgtgaaatctgccactgtaggaactcaaaaaaagaagtaaaattcattaaaataagaagagctactgattaggggattgtccatctaagggaaagtttaaactctgggtaaatactttaaattcataatcgcttattgaattttccagcaatgttgttgggcacgattatccccattttgcagatgacaacactgaggtgcagagaggctaaggggctttccccgggattacacagccactaagccacgagctgggattccaacttgggaactggagttccgttggctcatactggagataacgcccttctgccttggttttttccttcgcctgtggtagatttatgtcccagcgagggtgagagcgacgccgaggccgagagcaaagaggagcatggccccgaggcctgcgacgcggccaagatctccaccaccacgtcggaggagccctgccgtgacaagggcagccccgcggtcaaggctcaccttttcgctgctgagcggccccgggacagcgggcggctggacaaagcgtcgcccgactcacgccatagccccgccaccatctcgtccagcactcgcggcctgggcgcggaggagcgcaggagcccggttcgcgagggcacagcgccggccaaggtggaagaggcgcgcgcgctcccgggcaaggaggccttcgcgccgctcacggtgcagacggacgcggccgccgcgcacctggcccagggccccctgcctggcctcggcttcgccccgggcctggcgggccaacagttcttcaacgggcacccgctcttcctgcaccccagccagtttgccatggggggcgccttctccagcatggcggccgctggcatgggtcccctcctggccacggtttctggggcctccaccggtgtctcgggcctggattccacggccatggcctctgccgctgcggcgcagggactgtccggggcgtccgcggccaccctgcccttccacctccagcagcacgtcc

SEQ ID NO: 10569 - DNA, 2300 bp, Homo sapien
cctctgaccccgaccgggcgctgcggtaacagagttggtaattcggcgattggtaagatccggtcgtttccctcccgtccgcctaagaggaggcccccaccctacccgtactaaaaacagtcaactcgcctctgaggtgggggcgtttcacggtttgttttacaaattcaccctccctccccgacttctggccagattaagtccccggggtggagaaagaactgaggcaccgagagataagtgcgatgcctagagaagataccaggctggcgcgcctcccccaacccaatcgcccaccccttaccctgtgctgtgcacccagccgggcctcgaggtgagggcagcggcttggaggggacaggctcagaacccagtctctcgctgtgctcgctttgtccagatcctccattctcttctctacacccacacccacatccaggtggaatatgggggcccgcatgcaaatgaaagacgagatccaaaagggctggtaaatgcatttcataaaaatcccaaatccatcttccccaggagctcaggcagggccagccgcgcaggctgtgtacgtgtttgtgtgtacgtgtttttcggtgtgtgtttcagtcccagtgtgttggcgcgtgttcgagtacagatacaccgggggtgtttgggtacccgcacatggctgcgggtggggcgcagtggagaggaagcccacacatgcgtgtgctgagatatggccgcatccttgtgctcccccagcccagacgcaggggagaccagcaccgagacacccgagctcgggagcccttcagcggcggccgggcggagcttggctccacgtggggctggagagcacgcaagcctggagtctcggcgctcgcttctcggctgccgccggcttttgtagaaccgagtggccggatggcagctcgcggggaggctcggccacccgcccggctcgcccggggcggggagaagaaggagagctggagagagaaccggccgcggcggtcggagaggcgagcggagtgcaagagaggcgagcgcccctgcccggcgcccgggcgcgctctccgccttccccgcccggctcgcctgctcgctggctccctccctctctccctcccccttcctccttggccctgcctcctccctcgatccccggctggatgactgaggcatttcagacgtgggctgaaccagagcgagcgagcgagctcaggggctgcagcgatctctcgataagccacctagaggcgactctgtgcgcgcgcgctccccagtggctcccgcccgccctctgatcatgttgacatattcacaggacaggcagtagtaccgatgcggcgctgcgacgttacagtttccgacaccttctttttataactcagctctatcccccagcactcgacctgtgaaaaccacgcctatgcagcaacacaattggtccgaaagcgtcaaagagccaatcaagaggcctccggctccccgcagcccacagcgcagcccgaccttctagagccgccgagcagacgcccggtgaattctagaggcggcggagggtggcgaggagctctcgctttctctcgctccctccctctccgactccgtctctctctctctctctctctctcccctccctctctttccctctgttccattttttccccctctaaatcctccctgccctgcgcgcctggacacagatttaggaagcgaattcgctcacgttttaggacaaggaagagagagaggcacgggagaagagcccagcaagatttggattgaaaccgagacaccctccggaggctcggagcagaggaaggaggaggagggcggcgaacggaagccagtttgcaattcaagttttgatagcgctggtagaagggggtttaaatcagatttttttttttttaaaggagagagactttttccgctctctcgctccctgttaaagccgggtctagcacagctgcagacgccaccagcgagaaagagggagaggaagacagatagggggcgggggaagaagaaaaagaaaggtaaaaagtcttctaggagaacctttcacatttgcaacaaaagacctaggggctggagagagattcctgggacgcagggctggagtgtctatttcgagctcagcggcagggctcgggcgcgagtcgagaccctgctcgctcctctcgcttctgaaaccgacgttcaggagcggctttttaaaaacgcaaggcacaaggacggtcacccgcgcgactatgtttgctgatttttcgccttgccctctttaaaagcggcctcccattctccaaaag

SEQ ID NO: 10570 - DNA, 2300 bp, Homo sapien
tcgtaattttccctctctctcctttctctattttaaccactggcagagacagagaggacgccagagaaagacagactgaaagggaaagaaaggggcgagatggcgagccagacggagttcgcagaaccacactattctctctggtgacttcagggaattctcaacgctggcgccaagctctcttaaccatgtgcgtcaaaaatgcgaggctggagaagcctgtcgcctcaaaagatcctcccctatctcagcgtggttggcccacaagagcacttcattttcacccttcccttggtgccacgttggggtttcggggttgctgggggttgcgcgggtgcacaaggcaaaatgcgagagaggcctgtgctggcctacagagacacacacatccaaagccctgagtctcttaaacccctaagcccccagatcagccctttctccgttccctttccatcgaagaagctttcatctcaggaaagataaaagaacattgttttcaagatttccctccatctaagcaaggatggtccaagacattggcccccagaatcaagaactgtgggcttaggcgaatcctctgaccccgaccgggcgctgcggtaacagagttggtaattcggcgattggtaagatccggtcgtttccctcccgtccgcctaagaggaggcccccaccctacccgtactaaaaacagtcaactcgcctctgaggtgggggcgtttcacggtttgttttacaaattcaccctccctccccgacttctggccagattaagtccccggggtggagaaagaactgaggcaccgagagataagtgcgatgcctagagaagataccaggctggcgcgcctcccccaacccaatcgcccaccccttaccctgtgctgtgcacccagccgggcctcgaggtgagggcagcggcttggaggggacaggctcagaacccagtctctcgctgtgctcgctttgtccagatcctccattctcttctctacacccacacccacatccaggtggaatatgggggcccgcatgcaaatgaaagacgagatccaaaagggctggtaaatgcatttcataaaaatcccaaatccatcttccccaggagctcaggcagggccagccgcgcaggctgtgtacgtgtttgtgtgtacgtgtttttcggtgtgtgtttcagtcccagtgtgttggcgcgtgttcgagtacagatacaccgggggtgtttgggtacccgcacatggctgcgggtggggcgcagtggagaggaagcccacacatgcgtgtgctgagatatggccgcatccttgtgctcccccagcccagacgcaggggagaccagcaccgagacacccgagctcgggagcccttcagcggcggccgggcggagcttggctccacgtggggctggagagcacgcaagcctggagtctcggcgctcgcttctcggctgccgccggcttttgtagaaccgagtggccggatggcagctcgcggggaggctcggccacccgcccggctcgcccggggcggggagaagaaggagagctggagagagaaccggccgcggcggtcggagaggcgagcggagtgcaagagaggcgagcgcccctgcccggcgcccgggcgcgctctccgccttccccgcccggctcgcctgctcgctggctccctccctctctccctcccccttcctccttggccctgcctcctccctcgatccccggctggatgactgaggcatttcagacgtgggctgaaccagagcgagcgagcgagctcaggggctgcagcgatctctcgataagccacctagaggcgactctgtgcgcgcgcgctccccagtggctcccgcccgccctctgatcatgttgacatattcacaggacaggcagtagtaccgatgcggcgctgcgacgttacagtttccgacaccttctttttataactcagctctatcccccagcactcgacctgtgaaaaccacgcctatgcagcaacacaattggtccgaaagcgtcaaagagccaatcaagaggcctccggctccccgcagcccacagcgcagcccgaccttctagagccgccgagcagacgcccggtgaattctagaggcggcggagggtggcgaggagctctcgctttctctcgctccctccctctccgactccgtctctctctctctctctctctctcccctccctctctttccctctgttccattttttccccctctaaatcctccctgccctgcgcgcctggacacagatttaggaagcgaattcgctcacgttttaggacaa

SEQ ID NO: 10571 - DNA, 2300 bp, Homo sapien
aaaagactgtcagctgatgctagcagtaaatctcctttcattcaaaaaggctgacaagagagaagcagcttgagttttcactccaatcttgcaaacttgcagtcctgctgtgccgccttgtttttcaatacacaatccccaccctccctctgcaatgtttctatcccgtgatggtcaggtgcaaaactggagtccgaggtgtggtttcatggtggtagaagaaaggtcagattgtgttccttgcttcttaggctggtggctgttcatctcacacagcctctgtccttctgtgtctttgtgaaaaatggtgcacttttgctggcaaacaggtttttctggctggttactcttaaggtggatgtttcccttgactgagggaagccagagactgtcaggaatgtttgcaagtgaaggagggtcggtggtgttctcagagcctgagactgagaagtgagggagttagttgtagactcatatctgaacctatctctcaggttagtcatggctcccactggtcaaaaggttctagaaaaacagcagcaaccgggcttattgattgaaatttcatgatcaagtcagacaagcaaactggcagaaaagtgagctatgggttttgagtgaaaatatctggcttcagactcttctatcccagatatggtgagcaaagccggccagacaacctctccaatctacgatatctatcaaatggggctggagtgtcgtgctctatctcctggggcctttggataaaatccttggcaaattttacattgcagaatgtttggagatggttgttactattatggtagttatgacaataagggaaacaccttttgggagttaaattaattgacatttataaaacaaatgggaaatttcctgcacgctgtgctgggaaggtgtgcattgtggggaatttgcaagatgaagcaatagaattgatacagttccaggtgatatacagattagctgctcttcagatgtgtgaaaagagaaatcctagggtgccacattctttgaggaagatctgggcgtgttcctgtagaagcataaacatacactctcacacattcaaacacatgtagaactggaaggtatagggcatgtggaatttttgttatttttgccctttctaatctgttccctatagcagcagccagaggatcattttattttattttcatctttttacagaggatcattttattttatttatttttagcagagtcttgctctgtctcccaggctggagtgcagtggcgtaatctcagctcactgcaacctctgcctcctgggttccagccattctcctgcctcagcctcccaagtagctgggactacagcctcccaagtagctgggactacaggtgcccggctaattttttttcttttttttgtatttttagtagagatggggtttctccatgttggccaggctggtctcgaactcctagcctcaagtgatccacctgcctcagcctcccaaagtgctgggattacaggcctgagtcaccatgactggcccacaggatcattttagaatgcaagtcaaatcaaatcattctttatcgccacattatatatcttcaatagcttcccattgctcttaagggaaggaccaacatttaataggtctagaaagccccgcaggatctagctcctgctctctcttctccagctccattagtctcatgttctcagtcattttttctgctcttaccttgtgataaattgaattactgacaccaaaacttcatcccaggctggtgtggtggctcatgcctataattccagcactttgtttgggaggctgaggcgggaagatcgagaccaggaattcgagaccagtctgggtaacatagcgagacctcatctctccaaaaaaaaaaatgaaaaaaaaaaatcaaaacaacacttcacatccttgtattcatgccgtgtgcctgagattaggcaatttccctctgatctttgactttaagcttggtcatgtgatctgctttggccaatcaagggtgagcagaaatgactgggccagttctgaccccaggcttttggaggcattgcttgtttgtacttgtcctctcatgcttctgttactgctgtgaggagagctggtgttcctttggcctggggcccacccagaatggacacacttgggggcagactggagcccaccttgcatctggagctaagctgtcagacctgcagcttgaagcagggcagcctggctgaggcccacccagatcagccaacttgcaaacacagaagaaaccagtgcttcttgtggtatgtcactg

SEQ ID NO: 10572 - DNA, 2300 bp, Homo sapien
actttaatttttttctttagtctcttttttaatgccaaatttttttataatgagcaaactctatgaacaaaccacacaagatgtgctactttaaaaaatctgtcaaagacactaattttgagtggtctgaaaagtatcttctatagagaaaagtcaagtcaccagcaaagattatgaaatagagaaaaaaattacaatgaatggtgatataaattgggcattcaacgtaatcaaatatattgtggcatatgtaaatacttccaatttataattttatagacgtctcaacatactacacacataaacaattttgattgcatgggacaattatacacgcagatttggaagtctaaagttgatcaatattatctggatggacaataagctcataatgtagcataatggatttttaaaatgcagcataaatctgctttaaaaagtatctaggcagccaatattaagacacagccaccagtttctagactgtgacttcatgtcagcacctcacagaatcagcaagtgcaggaacttacacaatgagtaccttgctatggggcagaaaataagttcctaggatcttgttaaagtacccttgtattcaaactgacagatcaggatggttgtttttctttttaaaacaggaaagaagatggaaatgttcaaccaggctccttctcccaaaatgtagaactagtttatggaaaaatacaaaaagtatgagttaaggaaggcgcctttttaagcaaaagcagacagatggagtggctgatgtacagacagactttggatacatcaattaacgagagccattcattctagcagctctaagcctttgtccttgtggaaagtgggactgctttctgaggctaaagcaaataaattggatggattaatccctgaattggaggcccaggaaataaagaagtcaataaaggagagcttagggtacattactatttagtaccccctcacacactttttaaaagccaacttggaattttgttgagttattcatccctactgctcttctgcttctgacatcttaaaattaataagtaataaaaacagatatagaagctaaaataatttcacattattcacgcatgtatttattcctgccttcactgaatataattgccacacacctactgtgtttctggcccagatggaagaaactgaagttatgctttacatgctgtgtcattttaacattctcaaaatctcactaaaaatgggatccgttagatcaattcaagaatagataaaaccaaaacagaacaaaaataccagcagaaccaaaggtaactcaaagatgctgcaccagtgtagttagcacactcaattcagttcaattcaatttgtaaaaataaagttagaagggttcttaaataactttgaccttaaataacgacattcagtctttaatccagtttgagtgtttgtcgaggaatcctgccataaaaatgtttgactctctgtaattggtggttgggaagattagaaagacagtgaatctttggtacctattttctgaattgggtgaatgaatgaaagaataactgaaaagttaaatattgttaataaagccagatttcttcacaaagggtccagacacatgacaacccatgatgtggaaacgatctaataatagcaaacgatgacaagcatttaatgagttcttattatgtcctaagcatcattctaagttactccacataagctaagttgtttcattctcacataataactctatgggataatagtactattatcccaaccacattttattattgaagaaactgacacacagaaggagaaaggtcacaaagttaagtgtggcaatcagaatggacgtgcattgtcgcccagccttactattatcctctatatcctctcattatttcagtcaattccttcaataattatgtaaagtataatttaatcaaagagaaaactaagctcagagaagtgaccaaggtaggatttgaactcaggactaaagtcttaacatttctcttcagtaaggttatcttcacactcaaagccattatcccttatggaacttttggtagtcaatctaaaattgttcctttagaactttgtacaagagatcattgtcatcctgggtgttctttgtattcttcatactagaaatccataacacgccaaatgcccttagaaccatggacagcacccaggttttacaaatgtcttctccaggcttcagaaggaaggtggtggacattctttccatcatgacacaaaccaacaattacataccaggctttgttggtgagaaa

SEQ ID NO: 10573 - DNA, 2300 bp, Homo sapien
tgggactaatagtccctgctccatccgtatcaatgagaccatgagagggagagcgtcaggaaccaactccctcctctctctccctcaaatgtctcaagacaggatgctcctaatttctccagctcttttccttcaaattccttttgttaaagtctcaaacttttataagacacatggcaaaatactccagaacctatttcaatatctgagggttttattgagcacctactggtgccaggcactgaattaagcattaggggtacagcactatggcccgcaataatagtccctttccccatgggatcttaagttgaagagacaaaggttaaataaataaatgatcactcaaacagatatgtgatagctgctgacatggatgtgcattcttttttgttgttcaacatcttccccccacttttgagcctagacattccactttctttgaggaaatttctccttctccataccatgtggttagctgggcctgttgataatacctagctgcatccattttctcaagggtccacatgtgacccatgctggccaatcacagtcccttattctggctgctgtgactggttcaaaggtgaacacatgacccagacagagccaactggagtcccttcctgtacgtgtgtatgggaggaaggaaatggaaaggatgttagtatggagctgtctgtttgcagacattccttatttacctccagccacatggagaagaacggtttttcaggagaaaaaaaaatgatgagtcaacatacaagagggaagcagaaccaagatttggacagggagggagagctgtactttaacatctccaaagtctgtgggtagcgccatccctacatttagctgtcacatgcaacaataaagcatcttttaaaattagtctagcttgatttgggtgcctgtgacttacaatataaaagggtttggatctaagcaagtgctttgcaggaagcacgtagaactatacaagggtataagaggaagaatgtgtgtgtgtgtgtatatatacatatatatatatgtaagtcctatagttataggattttactgttacaggcttattgtagcctgaaacaagaaacaacttcaagttcaatagtcagcgtgcttgtttctggacatttatcaatcacatgccgccccaggaaatttctcactaactccgtctttctattttctcttgcctccacttatattctcaaatctccttctttccagacccttctctcttcttaccacttcaatctgtccttgagatcttacctcccatctccgatctgcctgcagaagctaaaagcccattcaggtatcatacagagcaggggttttcaaacttgaacatgcatcagaatcggaatcacctggagggcttgtgaaaacacagagtacctggtcccaaccctggagttcttgactcagcaggtctgggacctgagaatctgcatttctaacaatttcccaggcgatgctgatggtgccagtctgggggccacactttgggaacaattgctgtagaacaattggtttttctcagccccatttccaccatccagcccccatatgataacctcttctttctccactaaagagctattccgcattgcactccatcccaaaccaaataaccatctctttgcctcggtttactgatctgcaaagtgcagataataatggtacccacctgataggatagtttcacataatgtggttagaagagttattggtgcatagaacacaatacttcagtgttagctataatttttaggcactttgcatttcccaaagatggtcaacatctcccatcccgtatgtttgtctcatagtgtaacattgatgctcctcccattgtgtgtgagaactatgtcaccttgaacctggggggacctttgtgattgccttgactaataatagactagaagaagtgatgctatgtgactgctgaggctagttcataaaaatgccatgcactccctccttgttctcttagaggactcattcttggagcccagtctccatactgtgaggaagcccaaaaggcacacactaacagaacacgtggaaaagcttcagcctcgtgtagatgttctggtcaacatcccagttgatgtcacagccaacagcctgcatcaagtgcctgacacgtgagtgatgacacctccagatgattccagcccctagccattggatcacccccagctgtcaaatcttccagctgaggccccagacattgtggggcagagacaagctgttcccattgtgccccatccaaattcctgacccacagaatg

SEQ ID NO: 10574 - DNA, 2300 bp, Homo sapien
tttgttttgagacagattttcactcttgttgcccgggctggggtgcaatggcccgatctcagctcactgcaacctccgcctcccgggttcaagtgattatactgcctcagcctcccgagtagctgggattacaggcatgtgccaccatgcccagctaatttttgtatttttagtagagacaggtttcaccatgttggccaggctggtcttcaactcctgacctcaggtaatccacccaccttggcctcccaaagtgctgggattacagacgtgagccaccgcatccggcctatatgttttgcatgttaaccttttatcagatatatggtttgtacgaccataatgtttaaaataaaaagcacactatataaatacacacatataatttacatcacaacaaaataatcaatattctggaagtagaagttaccagattaaagaaacagaggacaagcgtcattgaacaagcatcatagaagacagtattcaaaaactttatcccccaaaaagattcagaggtcaattttaatagtcagtttttcaacgtggatacattggtaattttcatgccatacgtatacatttgttttagaccatagggaaagatgaatcactgcgtactgcattctttgcagctgtgacactggcaacacagcggaagaccaaattgatacaagaaaagaaagctacagactaatctcacctagaatcataaatgcaaaaatccttactaattaacttaaatattacgttaaaaacacgagtcttcatgttcagtgagggcttatgctagaatacaatataaaatagctcatctgtataccaaagtaaaaatgtataataatttcgatagattcataaaaggcattaaaaaacatcaacatcattttaccaaaacatctttcagaaaacttggaatagaaggatagatatttttcgtaaaactttctaaagattgcctatcttaaaaccacatgcagagtgctatttaatagcaacttgtataagtatttttgtcagaattgaaatattaggttggtgcaaaactaatggcaaaaatcacaattactgttatgtcaacctactgagacaatgatattcactatcaccattagcatttaacatctttcctgggagatgagatgtaggcaacataagaattcataagacagaaatagattaatagacataaaaaaggaaaaaaaaaagtcctttgcagatgatataatattctacctgaaaacacaaaggaaacaattgaaaatcatcaaaacccaataaagagtttagttgcattgccagatactacataaaacattcagaaatcaatagttttcttaaacagcaacaaatggctaaaaaataaaagggactcagcttcaatagcaaccatttttattaaatgcctagaaaacaatacaaaatatataataccatatgcaaaaaattactaaacattcctaaaaggcatatgaaaatatttgattgaatgaaaagattcaacattctaaagatgtcatttccttccaattgtttaagatgcaacgcaattctaaaacaaaataccagtgattacttttgtgagttgccactaaggggcaggagggtggcaaagtagttttcaagttcctttggatgagtaaatgtacaagtttagccaagaatttctttccaaggatgaaagtatttgcctttccagatgataatgttaactagcaacaataatcagatcatatgcattggaggaagggttgagagaatgtgctcgaagagatagaagagtggacacagaaatagactttattcaatgatttagtgtttgataaaggtggcagcatggctcaggggaaatgaagggttattcaaaacaggtgctggagcattggatctctgacaggtcctcatccgctctaaagactgcttttgagcttaatcatatttcattaacctccatggtatcttttgcagaatctgcatcaccaaattgcctttttaagggcttttcaggggtacgagaagaaagataaagtgataaagaagagcaagatcctatgagggtgaaattctgacctcatttcttttgctggttctcatttcaggtcatttgaggcagcagatactcgggtgctaaaaatccctccaaacatctcaacattttttccccctcgggatcagtatggtgtcacgggaagaagtttaaagaatgaatagcatgtccagccatcccactgtgtgtctatagatgccaggccagcccaggaggcaagatggtaccgtgttagaagtaccctggcagacct

SEQ ID NO: 10575 - DNA, 2300 bp, Homo sapien
gctactcagttcatttttattaaatgggaaaaatcagattacaagataaaccattcttactacccagggagcaatttaattctttaggttttcagttagtactcatagttccttttctgatctgaactgcgtaataattttagggttttgttgaacaggagaatttgaaaggagtccagttagagtaaagatcgttattacacacttaactattttggtctctaagagagcagtgattgccaatcaagttttctgggtcatttttttttttttatctgtactcaaagataccactgtgcctcagatttaatatttctttacagtgcctgatttggacttttaggctggtagtttaggcatagctaattaaaaatcacaaggaaattatttgaagagacatttctttatgacgtgcttctttcacattataagtaactgaatatgtagtttattggaggagcattagtttaagtacagtattaatatatataaaaggatattaaaaaattttaaaaatattcttttgataccttctaagtaggaagaatggactcatatgctaatatacatatacatctaagaaagtacagttgtcccttggtatccttgggggattgattccaggaccccctcggataccaaaatctgaagatgctcaagtaccctatataaaatggcagagtatttccttgtaatttacacaaatccctctgtataccttaagtcatctctggattacttgtaatgcctaatacaatgtaaatgctatataaatgttgtactttactgttttgatttgtgttttttaactgttgttttttttttaattgtatttttattttgattttccatctgtatatggctgaatccacagatgtggaacttgtggctatagagggccaactgtatatcaagaaaatgttttatgataatgaaacagcagaaccttgcagacagtgttttctgcctagctgttccaaaaagaagtcactgcttatgagaaagtagataacatagcccagtcagtcttgggcaactaaaataattacactatatgcaatgcataccatattgaaaagtgaaaaatgaagtgcttaccaccccacagaaagctgctggaagctggaaactctgatacagtatgtgtacttctgtgcaaccacctaattaatactgaggcctcttagccgcatatgtaatatttctatcagttgtagtatagtactggtaaatgggctacctaaaatataattccctcatggtcactcattactataaaaatgtaagcctagatagggctgcattttgaaaattagaaaaatgttaaattttcatgtgtatttgattataactactttgatatgatatatagattatagcctcagagaacaagtacactggcagactttgaatttcaaaaaaaaaatgacaaaaatgtaattgcaaattagatggaaatttcatcctatggtcctctagctaatttagtgtctgcacttatggttgaagttccatttagtagttaacttttcaaattacattgaccaaacccagtaccatgttttcttataaaaatagtaaaagttccttcaagaggttaggatgaggatgcttatatgtggaataagtagaaggaaagtgctgtgttgaattattcttcataccttactttcttcttctctacacactgcactgacctttgtatcttcttttttttttttaagagaaaattaaatataccagtgtatcccagtgatagcagaaacaaatgataagaaatacacagtacatggctggggtgatcatgtgtctagttcagcatctgtgacatgctgcccttcctcacttggtgccttctctttttgtagtaacgtgcctagtgttgggagcctagcagatccagactatctgaacacaccacagatgaacacacccgtgacgttgaacagcgctgccccagccagcaatagtggggcaggagtcctaccatctccagcaacccctcgcttctctgtccccacaccacgaacccccaggaccccaagaactcccagaggtgggggcactgccagtggtcaagggtctgttaagtatgatagcaccgatcaaggatcaccagcctccaccccctctactacacggcccctcaactctgtggagcccgccaccatgcagccaattcccgaagcccacagcctctatgttaccctgattctctccgattccgtgatgaatatctttaaagacagaaactttgacagctgttgcatctgtgcctgcaacatgaacatcaaaggggc

SEQ ID NO: 10576 - DNA, 2300 bp, Homo sapien
atatttcctattttctaaatttaatggagtcacagtccttacccctaaaaagcatttttttttaaacttataagcttaggaaaagagatttggttacgctgaaaatgattttcttcattgtgaacaatggaagatcgcagtagaaatttattttctaagtaaaaccagtggagcccagtgactttttggtacattggttctccgaattgactgcccaaaaggagttccattgtggtcatcagaaactattaccattcactaacccatctaacctgtaatgagttgggtgagggcttgaattgtttccatcctctttgatggtgtggaaattacagaggcaaaagccatgtgcagaattgcctcaatatggaataaagaattgctatataactcttttgctggtaggtaggaccctgtatagaagaattacattcagtgttctgacatcttttcttacaaaatatgtagaatttcactgaatactgttagagataactgtatttcagtagttccaaatgtgcacattttccccatttcccccccacatttttatgtttttgtttttatttttatatttatttattttttttgagatggagtttcgctcttgttgcccaggctggagtgcaatggcgtgatctcagatcactgcaacctctgcctcccgggttcaagtgattctcctccttcagcctcccgagtagctgggattacaggcgcgcaccaccacgcccagctaattttttgtatttttagtagaaacggggtttgaccatgttagccaggctagtctcgaactcctgacctcaggtgatctgcccgcctcggcttcccaaagtgctgggattaccggcatgagccacccacccagcctcatttttatgtttttaaaatcagttatactccttacaatccatggcatccgcagttggccaggtggcagttaagatacagttgtcatttgcctgcacatgagtgaacttgatcataactctgtgttgttgtcagttcagctgaattgtgtatgttattgttgttacaagagttgggttcacttgccatttaacatgtcttcaaaaaaacatgttagaataccttgtaatttgacattaaaatgacatacacaagtggcatggaaacagaagtgggccactgcttgtatatgaataaagcagatattcattattgaagacacaattgcaattccttgtttcttgcaaagccataatcaagtcctttattgtgcctacaaaaagaaaatacctaagataaagctgtgctgtatttttgtcactgagatcctcatcacgtaaaaagtattgcctatcacatgcaaagccaaaaaataaaaaataaaaatttaaaaagccagcattaaaacttgcaagatgggctgggcatgatggctcacacctataatcccagcactttgggaggctgaggcgggtggatcacttgaggccaggaattcgagatcagcctggccaacatggtgagaccccgtctctattaaaagtacaaaaattagccagacatggtggtgcacgcccataatcccagctacctgggagattgagacaggagaatcacttgaacctggggggtggcggctgcagtgagccaagattgcaccactgccctccagcctaggcaacagagactctgtctcaaaaaaaaaaaacttgaaagatgggtgttagtggcttggatgaatatctctgaagttctcttaagaaatgctgtattcctaacattcttgatgatgcaagaattgaaattatgcagaagtgtgattttatttgaagtaattctgaagcgtaagatgttttagaaatacatcaatcaatttattttgcttacttttgtttacattttcttttttacgtgggcataagaatctgtgcccagtgtcccagagttctttcggaaagtataacgtaaaaattttaagtgataaaacattttgatagtttaattggtggtgtttttatttttggtgatatatctcatctggtgtattgcttcagcgacttactaatttgttactgatactataaaagtaattcttgatgtaattattttaggtgcctaatggataagaacttcgttaggattgggaaatggtttgtccgaccctacgaaaaggatgaaaagccagtcaacaaaaggtgagcctttagaatgctcttggctttttggtttctttggccttgtgggtgggtgaacagcttattgatttatttatttcctaataatgttagtagtttagatatactcaaatagatcctggatcacagtgt

SEQ ID NO: 10577 - DNA, 2300 bp, Homo sapien
ttgatttttaccatcatttattttgatgcttaaatttttccagatttggtcagaggaagcccctttgtgatggctcgctcctatgtccttttgacatgatcccatcgttggagcatccccttactttctggcatagcaatatgttccaggctctgaatagtgttttgaggggagaagtggatgagaaagaatgggttcattaagagcttgtatgagaaaaactttttacgtctcttcctgagtctgtatgtagtactttcaggtaatcaaagctgtgaggacttaccagtttcttatccaaactattggctagggtggttaccactgtaatacaactgcttaggacacttgaactacagttgatatgttatttaagctactcagaaagacttttctgacggaagatttctctatttctcattctcaactttagctcctctgagtgttcctccaaatctgtcttttggagtagacctagaaatcatctgttactaaggtgtactatgcatgtggaaccattgatttaagagttgagtactcttaagtattctaaatatttggtaattctgtctcccactgtaaaacgaaacaaagtacacagaaactctatccaagaaaatgtggaaaacttactgttgccataatcctgtaccagaataaagctcttggtatctctgcaataattaacacacgtttaagcacaattctttttatacaaagttacaaggtatgtgaacaaagtatattttaaaattgtagctcactgtgtttttttttaatatcatgatttattcctttcagaagaatacgaacaaatgcgaaaatgaattacattcttttaagttttgtactggcaatggtagcatgtttctttgtcgagagacaattagaagagcagaaaaactgggagggaggggaaatgcaggtatttcatttatttatggctcatgaattcagaatttttttgttggaaattgaagtcaggtcaaattaaactattatttataagaaaattgtcagcctgggaaacatggtgagaccatgtatctacagaaattttaaaagttagctgagcatgatggtgtgctcctgtggtcacagctgcttgggaggttgaggtgggaagattgcttgagcccaggaggttgaggctgcagtgagctgtgttcatgccaccacactctagcctgggtgacagagtgagaccctgtttccaaaaaaaaaaaaaaaaaaaaaaaaaaaggaaattaattatgacatataaagtttgggatagttctaaagaattttgggttattccttggcttcatttcagggtctgttacttggacagttaccctaatctcactaagccttagttaacatttaagtacaggacaccatgtaccttgagcttttgctagatgatagatatatatcatgtgtgccacataatgcctcacatactgttaatgtcagtaattattttcaccataaattttttattttacatactttgatttgtattctttcaaatttcattaaagtagttccagaatgctctatttgagccctcctacaggagtcaattttgaaacaaataaaacatcttttcttttagaaaataatgatcaaacaaaccatcttcatatagtttctatggatgacttcagattcttttgaaaaatggtactaatcctgttgttctttaagataataattttctcttatcaaacttaatgtaactttgttctatgaatgaaaattaccctgctcatgagataggaaagctaatttaaatgattgttgttggctccgtttattcattgtcaacagaagttggaagggctaatatatgcttgcttatctgtggtgatggatatcatgaaaattacgcacagctcacccccaccccccacgcgccccccccccctttcttttaaagctcagctattgttaatgttagagtctattttatgtgtggcccacgacagttcttccgatgagacacagggaagccaaaatgttggatacctgtacaaccatttgttgtagtctttgaaaaacctgtttacaatatgaatttattgagaatttatttactgtcttattcctggcaattttctgttatgccttttcatttctattcagataagatgtggatattgtgagtttctggcttgaaagctagaactgaggggttttttttttttgtttgtttgtttgtttgttttgagatggagtctcgctctgttgcccaggctggagtgcagtggcacgatctcggctcactgcaacctccgcctcccaggttcaagcaa

SEQ ID NO: 10578 - DNA, 2300 bp, Homo sapien
aattagagggatggcaaagccagccagaggcatctttctaaggagcctcctgaattcatgctcgggctctggagtcagaaggacctgagtttgagccatgtactaactgagagattggagatgtcactgcacacctctgagttttacctaattacagcctaagaataataacagtatctactttaggtggttgttctgcggattatgtgaaataatgtaggtaacgacattcattgtaacaatatgttgcatgataatacacattataacatgttgctcatgagttttgctttagcagtatttgtggtagttccaaaactcagttcacgtgtcttaagacttctcttattatacactctcatctcttccctgctttctactcttcctttttttttttttttttttttttgagacagggcctctctctgtcactcaggctggagtacggtgatgcgacctcggctcactgggctcactgcagcctctgcctccagggctcaagttatcctcccacctcagcctttcgagtagctagggctacaggcacatgccacactacgcctggctaatttttgtatttttgtattttattttttttgtcatgacgggggttcttgctacattgctcaggctggtcttaaacctcggctaggattaccggcgtgagccactgtgccagccatccactcttcctcttttagcttaatctacctgaaacagctgattgttccatgtttggaggcgtattagtgaagacattgttttctcctcccccttttcggggatccatttcttgaggactgggagagcttctcttcatagcagcactcctccggactcccaggccatatacactcaggaaatgttggttatccaatgaatgacgccaggaagaagggtctgctcccaacacggccttagcacagtgcctggaagttataacagattctggcacacagcaggagctcaggaaacatttatgtaatgaatgaatgaatgaatgaatgagtgcacacagtaactaggagtaagggctcaataaacatttctgtattaaacgcacagtgtctggaacacagtaagcgctccgtctatggcagccgtgaatatccctgggcgaagcctgtgaaaccttgtccaagagcttggcttcactgtgcgcgggttcgaatctggactcctcttcccaagtgtgcgacctcgggcaagtgatttaatccctttgtgctttagttttctcctctgcaaaaggcggacggcggcgcgagcctctgaggacacattccccagggcactcggacccgctgcctggcccacatcgcggccgccgcgccacgccagccggcctgggctgcgagggcacaggccgggggtcccgcgccctcctccgcggccaccacgggcgcgcccgggacccacggtcccgccccgccacgatcagtgcaccgcgagggggcggggcggccacgaggggcagcccacggcagccacgggccggcagtccgccgcccgccggggagcccggccgcccgcacttctttctctccctctctgcctccctccctccctcttcccggccggaggacccggccgcgctcagctcagcagcgcctcccgcgagccgccgccgccgccgccactccggacccctcccccgcccgcccctcgctccccccgcgcggccggcgcccgtcacgtgaccaagcgccagccaatggcgggccgagccgcggtcggcggccgccattgctgtcagagcaagcgagcccggggagggaggagaagcgaggctgactggggaggaggggggggtgggggaggaagaggaaggaggggacgtcgctcggctgccggggtcgcccgctggcttcgtccgcaccccccccttcgcgagttcgcgctccgcggcggcggcggctccgaggcggcggcggcggctccggggctcgcctcccctcgcgcgccggcgggggccgagggggagtcggtggctggagataaacaaggcggcggcagcggcagcagcggcggcggcggcggctgaggagcagggaaggcggaggcggtggccggcccgcagcgccggcccggggcgcgcgccccccccgccagcccgggcccgctgcccccggcgcggcgtcgccgcggcgcctcccgcctgcccgccggccctcgcgccctcccccggcggcggcggcggcccggccgccccgcgctccccggcgaggcgccgccgcccggcccggcctcgcctcggacgcctcgctccgacatgccccgctctggcggccgggctcgcg

SEQ ID NO: 10579 - DNA, 2300 bp, Homo sapien
gcgtgatggcgcactcctgtaatcccagctactcggggggctgaggcaggagaatcgcttgaacccgggaggcagaggttgcagtgagccgagattgcgccactgaattccagcctggggaacagagggagactctgtctccaaaacataaatagatagatagataaataaacaaataaataaatgcaaatattcaaatgaaaacttacccacaattgttcatagagcactattcacaatagccaaaaggtggaaacaacccaaatgacccctagccagtgaatggatcaacaaaatgtggtccatccaggcaatggaacagcactgagccataagaagaaaggaagcactggcatgcgctacagcatggatgagccttgaacacatgatgctgagtgggagaagcagacacaaagattatatatcgtaggattccacttacatgaaatatccagaacaggcaatccatagagacagagagcagattggcagctgccaggggccaacgggagggaagaatgggaagtgactgctaatgggtaccgagattctgtttggggtgatggaaaacttctggacctggccaggcatggtggctcacccctgtaatcccagcagtctgggaggccaaggtgggtggatcacctgaggtcaggagttcaagaccagcttggccaacatggtgaaaccctgtctctactaaaaatacaaaaattagccaggcgtggtggcaggcacctgtaatcccagctactcgggaggctgaggcaggagaatcacttgaacctgggagacagaggttacagtgagccaagatcatgccactgcactccatcctggatgacagaatgagactctgcctccaaaaaacaaaacaaaacaaacaaataaaaaaaaaaaaaagatggtggcagctcacacctgtaatcccagcaactggggaagctaaggcaagaggtgtggcagctcacacctgtaatccccagcaactggggaagcttgaggccaggagttcaagactagtctgggcaacatgatgagatttgatctctacagaaataaaaataaaaattagctgggcatgggggcaagcacctgtggtcccagctactcaagaagctgaggcaggaggattgcttgtgtccaggaattcaaggctgcagtgagctacgatcacactgctgcactccagcctgggcaacagagggagaccatgtctttaaaaaaaaaaaaaaaaaaaaaaaaaagatggcgctagagagacagttgatacagggtatggatggtgaccatcattgatcatcatggctgctggtgggtagtggatgggagtgagaacagcattaagaggaaggccagtgatgaggcggggacagtggtccaggaggaagatgcaggtggcctggaccagggggcacacagtgagccacgtgtgtcaggcaaaaccaagagggcttagtgaggatctggatgcacaatcattcaatatagactcaactctgcccctcctattcagcacctgtatgcacttatggatgggaggagagtgttggagggagaaagtatatgttctcatagggatgctgaagaacaggtcagaagacccctggcttcaaattttgactttttcattgccagatcccgagagagtaacttcgtttctttgtgcctgtgttccttcccctgtaaaatcaaggccccaacatgcacttcataggtcgttgtgagacggggacaacagcacctgccctggctacctcctagggctcttgggagacccaaatgagttgttaatccttcaaggacaacacagatcacgttgctgggctgatgtcattgcttttggaaagcaggtcccttgaacagattctcccaaagcagtgactttaggaacatctcgaaggcgacagattccagttgttaaggctacgatgaaatagcagaagactctgggaagcagcgtgcaacgagtggcaaaggagcccctaacgctctttcttctgtgctcgccccgccccctccggcgtgggccccgccccgactaagccccagccaggccccgcccccgatgttagcgcaagccacgcctcctcagctcccagccttctgggtccgaggctcccacctgctctaagcgcttggtaccagggagggaatgggaggacgcttgcgggatagggaggcgggggctggaaattggcagggtgagagctggggaaactagtctgggacgcagccctccttgtcccccttcttcattcacccccttgttgaggcccttggcttttgcataatgtaag

SEQ ID NO: 10580 - DNA, 2300 bp, Homo sapien
gttctgcatcttatttgctgcgcttgctggagttgtaaagattggtcctaacagggaaagaagcacacaagagactgtgaaaagggctctgagacaagcaaggacaaaagagggagggaaataccttccacagggcctgggatctggcaatgctagagccttttttttttttttttttttttgcgatggagtcttgctctgttgctcaggctggagtgcaatggcgtgatctcagctcactgcaacctccccctcctgggttcaagcaattctcctgcctcagcctcctgagtagctgggatcacaggcgtacaccaccacacccagctaagtttttgtacttttagtagagacggggtttcaccatgttggccaggctggtcacggactcctgacctcagatgatctgcccgcctgagcctccgaaagtgctgggattacaggcgtgagccactgcgcccggcatggagctgctattgatgggtgagctccacagcttttgcagaagcagaggatatgacttgagagcagtgctgtcacctctcagcatgtccccaagcccaactggggcctcctggagatgcctcagtcggcactggccccaagggaatcgtggggaacagttgcacaatttgcaagtttctgagtgcagcttttcccatccttgggatcagcagataagttgtaaacacagggaggtactgcttattggatatacttttcataagtaggacagaattcttttgggactctagagttgggaactaccacttactagcggcgtggctgaggcagtcttcctcctctgtggctcaggcccttcatctgtgaaatggggtcacagcatctgcctctcagggtcactgtgaggtgtcgatgtgagcaaggcctgaggcttggcaagaagtcaatgtctgcaactcagcagggagcaatggcaggggcagtcaggggtcggctcggataggggtgggtgggctcctgaggttggaagggtaggaattacagagctcttgttactattgttgttactgtttttaaagatacgatatttcagataattcaggagcacgtaaggatgaaacttaggataacctaaaatcacacaacctagagagaagcgcatttttgtcttcccccattttctaggcaaaaatgaaagtactttgtcctcttgaaaaacaattctctaatgaatatcctatgttacatagaggcctgtgtaatgcatttgtgtggccacatggtgtcaatttcatgaatatacaataatattattaattccctgctgaggacattaactggtttccaaggctgcttgttgtttttgctactacaaataatgcattgatgataaatacttttacatacatggttgtatgtttatctgaactattttcaccaatatattcacctagtgtgtatggaagtgtccatttttgtcatacccctggtaaccctgtgatattatttttaaacattttgctaatggatctctgttcttgtttgaatgtatttaatttccagcagaatgagccccattccttattttgattggccatttatcatgtacatatggtgaaatgcctattcgtgacttagccaatgttgtttctttttcttactgattactacagtacatttttatatgaaagcagcctttgtccccttctcttgtttttcagccctgtgttagaaacaactaagctcacatattcacaaaccaacttttccagttcatctagggcagtggtgctcaacaggggcaattttgccccccagggaacatttggcaatgtctggagacatttttgtcacaggtggggaggagggcagtactgtgggcactcgtggagggaggccagggatggtgcccaacagcccccacgacacagaattacctggctggaagtgggagccgggtggagggagggaagccctgctctggggtcatatctccccgttagattgaacagaggagctcctggtagctgagtgctgacttcattatttttccccgcccttgctttctaccctgctgaagtgctgctgattaaattaccctgaaatccccacaggacacattacttcctcacaggtctctactagcccagcgctgcctcaaggaatggcattattcctttgccactgtgtcctcaccgcactcttggactccgccgaatgcagacaccctcctgtctgcagaaggatctggaggggtagaacgcttcccctctacgacggattgactccccagcacctcaccagcagttctttgaatggagtggctttggaggtgg

SEQ ID NO: 10581 - DNA, 2300 bp, Homo sapien
tacctccagagatcacctgagtatttaaacaatggcccagagattacctgagtcagatagagaggaaggcagaggacggagtcctggcgcaccccaccactcaggggtcacaagacagagaagggacaacacgcgactgtgaggaggtgtctgaggtggcagaaaacacaagtcacagaagtctggtagtcacatgattgcccagacatcccggccaataaaagggacttacaacactcagcctctctgtttgcctaaggtggcaggtcacgtacaattccctattcttcccttttcacagctcccctgccaatccactaaatgtagagtgaccacatagttttatcaatgttctattcacttatatattttatttacacacttgagctttgagagtaaaaaggagagctttttataaccatgtcaggacaacagcataacccattatcctgggtgcaccctggggtgtaaccaccctttctacacaactaagcactcaacctggacttctagacaaacttattaatgctttgggtaagatttccccacccgtgctccttgctgtttctcccagaaattctcacatggaagaaaaatgaaagggtgcagtgtgttggaggggtggaattctaccaatcaagttatgcacaaaaagcataaaaggaactgtgggtccttttgagtcacccaggaggacacagagcccccaaattaaacgaagggcacccatgcgagggctggccgaccctcgccacctatgtcttggtttcccccactgtaatactgggaaccccacttctcccaggcctgctgcgaagatgaagccagcaaatgcacgccctctcttagctctggaccgggcaggtgaaaagcagggaggtgttcataaaagcagtccccaccgctgaagggtcctcaactcggggttctagtcccagctctgccctggcctagcaaccccttcccgctgcagggaccaaggcggtgggcaggtccctcacccgtgctgagaccgggacaggaatgcgcacctctccccaccctcggacgccccggcggcgccgctgcagaagtcgggaggtcggacaaacgcgaggagtaaggaaaaagaggaggaagggaaggaaggaggaagaacgaagtgaggaaagaggatgtcagggaagaaagggagtaaaggaagaaggaagggagagggggacagaaaggaggaggacggaaggaggaagggaaggaagaaagacggaagggaagggagaggaaaaaggggaggaaagaagaaagggaagggggaggaaggaaagggggaggaaggaaggaggaggaaggtgaggaaggtaaggaaggaagggaggcagggagaggggaaggaaggaggaagataaggaaggaggggaggtaggaagaagggaaggaaggaggaaggaagggaaggggagaaagaaaggaagggaaggggtaggaagacagggaggaaggaaaaaaggaggaaggtaacgaaggaaggaaggagaaagtaaagtaagggggaggaaggaaggaagaagggaaggggaggaggggaagggcggccactgacctgcttgaaggtgctgctgaggaagtagacgagcgacagcccgaagaccagggcgagcacccacctcttccgcagaagccggcgccacaccatggccgccaggttcaccatcccggcgcggacgtggggcgcggcggccggggcgcggaacgcggcaggcccgggtcccgggcggcatggcccctacgcgcccggcagccccatccctccaggcaggcgccggccccgccgcccgcagcccagtctgctcccggcagccttgggcgcagccccacgtgaccccgccctacgccccgcctccgctccgcagcgacaagggctagtcgcgcaagatcttctcaccattggtccctaaggaacggcggcctcctattggttaagtgccgggaaagggggcggacaatcgcgtgagtgctgcgggcgtagctgtgcccgggtcctagcgccggacccggcgacgccaagaaaccacccaataggaggccggaagcatcggaagtcacatgctgcccaggctgcgcgggtgattggcttggctggacctgaatgatgcggctgtgattgctgaattgtctgggcaggtaaaaagagaacgcgatttttttttcttttctcccatcatggtctgtgtagtctcctgcccttgcagtcccagagcgttttgcgctgtgtgttggttgcagggatgaaaagcgctcgcgacgttgttcccgaagtgcac

SEQ ID NO: 10582 - DNA, 2300 bp, Homo sapien
cctctgcctcccaggttcaagcgattctcctgcctcagcctcctgagtggctgaaattacaggcttacaggcatgcgacaccacgcccacccaatttttgtatttttagtagagatgggatttcaccatattggccaggctggtctcaaacttctgacctcaagtgatccgcctgccttggcctcccaaagtgctgggattacaggcataagccaccatgcccggccctctttgaaactcttaaggtattgtatttcatcctattgtcaaactaagagtcctgattggggaagccagaaaatatgttttaaaccctccaacggctgcccagtgcaatcagaatcaaacccgagctctgtccatagcctacgggttcttcctgatgtagcatcatctgtttccaactgcatttcctcccattctcccttttcccactcctgtccacccacagtggcccttctgttcctctaatgtgtcagcgtgtccctgcctcagggcctttgcacttgctgtgccctccccttggaatactttctcctctaaatgtggcagggcttggtcccgcagggcaaatgtcgtctcttcccagaggccttctcttctcattctcctgactccccgtaatattgccctgttttatattattcatagcacttatttgttcatgtttgcttatttatttatgatttgtcctccccattagaatataaatgccattcctgaaagtagggatcctgtctacttggatcacccctctgcctcagcatccaggacactgtttggcacagagtggcgctcaacaagtatttactcaatgaataaaacatctatgggtctcccagttccccttttctagatcccttgctccctgtcccacctttcaccctagcaaggtaataagggccatctacttcccatgaaaaggtttagcctccgtgaatatcttcttgtctctggaggcagagccaatattgtggatatagggtgtctatatcagtcagatggtgtctgacttcagtttagggcacgattattggctgttgaatgacttcctaatcctgaccaggcttcttgagggggcagcaatggtgtcactagggccactgattaaaaatgacccgccagtgaagcctcctttctcttttgaaaaattaggtaacaaaccggtcagcagcagcatcttcatatatcaagaaaaggtcattatataaatatttttcaagaatttgcaatctcaacttaatcctcctctcgcccctccctccattatcccacattgcaaatccttgggggaaaataaaattcatattccaaagttctcatccacacatttaactcctaaatcgaatgctcgaaactctactttcggatgcttgtattggaagaggcttcggattctttgtcggaagcaggccgtacataattctggaataaatttttgcacgcgggatgcatctgaatgaatgaaacgctttttaatcctctgctctgtacatcccactatgtccctttgaaggaccgcaccgagacttttcgatgcttgcgatggttcaagttgcgcccctggggcccgttacaggactgcaccgaaatgcactcagaggagcatcgcctgcatcacttggactggaagccggcaggtgcacttcgggaacaacgtcgcgagcgcttttcatccctgcaaccaacacacagcgcaaaacgctctgggactgcaagggcaggagactacacagaccatgatgggagaaaagaaaaaaaaatcgcgttctctttttacctgcccagacaattcagcaatcacagccgcatcattcaggtccagccaagccaatcacccgcgcagcctgggcagcatgtgacttccgatgcttccggcctcctattgggtggtttcttggcgtcgccgggtccggcgctaggacccgggcacagctacgcccgcagcactcacgcgattgtccgccccctttcccggcacttaaccaataggaggccgccgttccttagggaccaatggtgagaagatcttgcgcgactagcccttgtcgctgcggagcggaggcggggcgtagggcggggtcacgtggggctgcgcccaaggctgccgggagcagactgggctgcgggcggcggggccggcgcctgcctggagggatggggctgccgggcgcgtaggggccatgccgcccgggacccgggcctgccgcgttccgcgccccggccgccgcgccccacgtccgcgccgggatggtgaacctggcggccatggtgtggcgccggcttctgcggaagaggtg

SEQ ID NO: 10583 - DNA, 2300 bp, Homo sapien
ccattgtttctttgttgactttctgtcttgatgacctgtctagtgctgccagtggaatactgaagtcccctactattactatgttgctgtcaatctcatttcttaggtctgttagtcattgttttataaatgtgggagctccagtgttaggtgcatatatatttagaattgtgatattttcctgttggacaaggccttttaccattatataatgtccctctttgtctcttttaaccactgttgctttaaagtttgttttgtctgatataagaatagctacccctgcttgcttttggtgtccatttgcatgaaatgcctttttccacccctttaagtttatgtgagtccttatgtgttaggtgagtcacctgaaggcagcagatggttggttggtgagttcttatctattctgtgattctgtgtcttttaagtggagcatttaggccacttacattcaatgttagtattgaaatgtgaggtaccattgcattcatcatgctctttgttgcctgtgtactttggttttttcattttttgtttttgctttttaacttgtatttttgttttatggtcctgtgtgatttatgctttaaagagggtctgttgtgatgtgtttccaggatttgtttcaagatttagagctccttttagcagttcttatagtggtgacttggtaatggcaaattcttggtaatgggtgaattctcttagcatttgtttgtctgaaaatactgtatctttccttcatatatgattgttagtttcactggatacaaaattcttggctaatcattgttttgtttgaggaggctgaagatagggccccaatcccttctagcttgtagggtttctgctgagaaatctgctgttaatctgatgggttttcctttataggttagctggtgcttctgtctcacagctcttaagattgtttccttcgttttaactttggataacctgatgacagtgtgcctaggcaaagacctttttgcgatgaatttcccgggtgttctttgtgcttcttgtatttggatgtctaggtctctagcaaggccggggacgttttcctcgattattcccccaaatatgttttccaagctttcagaattctcttcttcaggaacactgattattcttaggtttggtcatttaacataatcccagacttcttggaggctttgttcatattttcttattcccttttctttgtctttgttggattgggttaattcaaagaccttgtcttcgagctctgaatttctttcttctacttgttcaattctattgccgagactttccagagcatttcgcatttctaaaaatgtgtccaaagtttcctgaatttttaatagttttttctttaagctatctatttccttgaatatttctcccttcacttcttgtatcatattttggaattcgttgcactgggctttgcctttctctggtccctccctgattagcttaataactaactttctgaattctttttcaggtaaatcagggatttcttcttggtttagatccattgctggtgaactagtgtgattttgggggagtgttgaagagccttgttttgtcatattaccagggatggttttctggttccttctcatttgggtagactccgtcagacggaaggtctagggctgaaggctgttgttcagattcttttgtcccagggggttttccctctttttggtactcttcccccttttcctatggatgtggcttcctgtgagccaaactgcagtgattgttgtctgtcttctgggtctagccacccagcgagtctacctggctccaggctggtactgggggttgtctgcacagagtcctgtgatgtgaactgtctatgggtctctcagccatggataccagtgcctgttgccatggaggtggtggagggtgcaatggactccgtgagggttcttagctttggtggtttaatgcgctatttttgtgctggttggcctcctgccaggaggtggcgctttccagagagcatcagctgtggtagcgtggcgaggaacccgtggagctctagaactctcgagtttctatggcctttgtcttccgctaccagggtgggtaggagggaaggaccatcgggttggggtgaggctaggcgtttctgacctctcactctccttgggcgggtcttgctatgggttaagtagatgacattcccaggtcactggtgttgtgtaccaaggaggattatggttgcttctgctgagtcatgcaggttgtcagggaagtgggggaaagctggcagtcacaggcctcacccagctccc

SEQ ID NO: 10584 - DNA, 2300 bp, Homo sapien
tgtgtgcaaattaaggactgccagacttaagagtgtcagggagagagaggtccttccttctctcccactttttcatcacccccttctcttccccctctgctgaacgttgcatccccacggccaagattgcaccccctcttctacagacaacatccaagctgctgggacccgacccagcgccaccttgcgagcccagcatttcgaggggcaggcttccaaacagggtaataatcgtcccattaaaattaatgtccatgaagtgagccgttaaaagcgtgcagattaaaaatggggggagggaattgttcaatttaaatccaaagggctttttaaatagacactgtgtcttcattcttggaacgctacacccgggcaatggatcaggtcccctctgtaaagactagggggattaaggaggtgagtcccaggagaatgggaagtggttctggcgagaagcaaagggaaccaaggtctatccagggcccactgcgtgccaggtgcttggcacacatttctctcatttaatctctgccccaatcctgggatggaggtattattattcccagattacagggggcagtataaaaccgtggttaagagcttagagcctgcggcatactgccctagttcagatgacggtttcattcttagctactctgtgagctagggcaagaacccttacctacctgtgcctcagcttcctcatctttgaaatattatagtaattgcatgtagaattgttgggagatttacctttaggcagcagaggcaagggcgcccaaagcccacaggtgccagacatagaagatgcgcagtaggtcttggccattatgaagcctagaataattggagctgggtgagggaaaaggccaccagaatcacacagtgttgtgggctttgagccctgactttgttgtcatttcaccacgctgtgggccaaaagggacatttctcctcctgatcaattcagaccaaaactaagttcacagactcgaagaatcttggttatactctgcggtgggaaggcaagaacggaagctccctcagcaggttccagactcccaacttggagccatctctggactcatcccgatggtctgaatcccaaagttgtctgaatcccagtcgatttaagatcacaggtttcattctcccccacagaatcctgacagccgcccagcccatctgaaccttcaccgtttgtgacaactgcagacgctccagtctggaggtgcacaggagtggctgtcggattggaaaagggggaattaaagtcccccgcgcccctcctctcgccgaccccttagggtctccactgcgcattaaatcggggtcatcgcagaaaactgtaacgccatcaggaaaataatgttcacaaagaaagcagacaagaagtttccctttagaaagccccttgcgagggtcttttgggtgcgggtgccgggcagcgagaatgcctccgtccgcgccccacgcgagctcaggtgggcccatccagcctcccaccgggcgctgggggcactttagggtcaggtttctagccaggcgctgggggcacgttagggtcaggctgaaagcctacaggtgccaagtcagacctgaaacgaggcaagttgggtgtaatctgacccttccataagattttgaatccacccacctcccccaaacaaaacaacagcctcggaatatttttgaataatgcagccgaattcagcatcagcttcatccaaaacggcaaacaagcctttttccctcgccaaatcggaactcgagctgaattcaggaaaaggggaaggagaacaaccttccctcgcgctccgcgcctccgcgggggtcccccgagacccccaaagcccaggacctccgctgcggggagccttctcgcgccgccccgcgccgcgctccccgtctcccaaacctcgcgctccctagctgccggcgccgctagggttaaaagttacctctcggtttcttctgcctgcagccccccccccaacccccgggggccggatgatgtaacccccctccccgcccccctccaccatgtgacactttaattaataatagcgccgtcagcacaacaaacgcacaacacaaggagaaacttggtgtccaggggaggcccccggcggctggagcgcggcggcagcgggcgcagaggccggagggagaggaggcgaggggcggcccgagcgcggggcgggagcgaggccagcggtcatgtgcccgtgccccctgcaccgcggccgcggccccccggccgtgtgcgcctgcagcgcgggtcgcctggggctgcgctc

SEQ ID NO: 10585 - DNA, 2300 bp, Homo sapien
tctgctgccttggtacggaacatccatgataatccgtttacttatacccaatctagaagtgggaggttgttaaagctccttggcttagcctttctctagtaggggatgagagtcactggacaaatgctttcctcttctggctcttatctcttgggaggacaattctgagctgtgttctaaggctccttagaaggtgctaatggaatgagcctaaattgccacagtaggaccaactcagagatgctctttcttttttttgtttttttgagacagagtctcgcactgtcgcccaagctggagtgtagtggtgtgaatatacgcccaaccatatactctaattttctacagtgaaggttgtccaagcctggtttcccacagtaagcaagcctgagccctgggtttgtaggcagctagtttatttacagaagtgattctagagaagaggcctgagagactaagaagagttagacaaggaataagggacagttaattgcaagagcatctttgagcctggagtggtggctcacacctgtaaccccagcactttgggaggctgaggtgggtggatcacttgaggtcaggagttcaagactagtctggccaacatggtgaaaccctatctctactaaaaatacaaaaacttagccaggtgtggtggcgggcacctgtagtcctagctactcaggaggctgaggcaggagaatggcgtgaacccgggaggcggagcttccagcgagccgagatcgcgccactgcactccagcctgggcaacagagcgagactccgtctcaaaaacaaaacaaaccaaacaaacaaacaaacaaaaaaccatttattgagcatgtattaatcaccagtctcaaagctaagagttgccaatctagaagggaagggatatatatatatacataaaaataaaattacaaattgtgttatgtattatgatgagaagtacaggatgctgtgagaatgagtaacagggatacctgatgtttcttgagtggaggttggaagattaagtgaaatgtgagttgagatatgaaagatgtgtaggagttaaccaagtcaaggtggggggaaaagttccctgctgagggaatatcaggtgcaaagaaaacatttttaagtggaacgccatcgtatgtcattttctttcccatcttaaagcccttggatttccttctggaaatctctctcctaagatctgaccttcccttggctggtttctctttcagatttttaaaaaaaaatttttatttccacaggttattgggaacaggtggtatttggttacatgagtaagttctttagtggtgatttgtgagattttggtgcacgcatcacccgagcagtatacactgaacccaagttatagtcttttatccctccccaccttcccaccctcccctcgtccccctcccctgttccaaagtcccataagtcattcttatgcttttgcatcctcgtagcttagctcccacttatatgtgagaacatacgatgtttggttttccattcctgagttacttcacttagaataatagtctccaatcccatccaggttgctacgaatgccatgaattcattccttttttatggctgagtagtattccaccatatgtatatatcagtttctttatccacctgttgattctcttttagattttaatttaaataacatcttaaacagactttcactatcaatccttactccccttaccttaccttattttgttttcttcctaatacctatcactgatttaaatgttcatatttctttgtttaaagtctccctacttaaacgcatgctccaagacgtcagagtttttgttttgttttacagatttaaatgctgaattcttggtgcctggcatatagtagttgctgaatgaatgtttgttgaatgaaggaacaatgcttggcgcaaagtcagagcttagcaaaagtgataggcagcagagctgacgggctgaggggcagctgcgtaaacctctgctttgggcgccacaagccacaagccggaccaccacgtgcgtacaggggcagcgccgggggcgtggcgggggcgtggacgcccacccggaaccctagagcggcggcggcagcggcttccggccgcggcggacacttccctgggcgggactgtctcgtggcacccggtggaaccgaggagaacgtggagcgccgggagcggcgaatatggacgactacagcctggatgagttccgtcggcgctggcaggaggagctggcgcaggcccaggcgccgaagaagcggcgacggcccgaggctgccgagag

SEQ ID NO: 10586 - DNA, 2300 bp, Homo sapien
caagtacacatcctagagatacactatatataaaaggacttctgcaagctgcaatatgcattgtagcattgcttatagcagccaacacagtgaaagcaagctaaacacctaccagtgaggggcctggctaaacaggctatgagctagaagcatatgctggaatcctagagagggagagcttggtaaaagctgacatggaatcctctctccaaggcacattatggagtaaaaatgttgggtacagaacactatgtatactatgatcccatctctacaacaatatgtttttagtatacaaatgtacctatatatgcattaaatttttctagatggatacctaaaaactgttaatagtttcttctgtgcagggaagttgggggaagggaggagaaagaaaatgattacttttcatttgcaatccttttgaagttcttgaattttttgaccatgcttatatactggcctgatatatctggaaaaatattgaagagctttaatttttcaattcccttctaaaaaataaatctatattcttttttgttaattatatatcttgctagttgtgtaccttgcttccttcgtacacccatcccagaccctgtacaccaaaagcaacttggttggccgagacgtctagacatgtgacaggcgggccgtgggcgtaaaggagggttctggcggagtcttcggctttgagcaggtacatcagatctccagcagcggctactgccacagggtaccttctggtttctggaactatttcaaggtactgaacctgttaaaaggtaagagttgtttagtcccataaattcatcctgacttgatcaaaaatatgcaattccacctacacatcaatgagaagaccagcaacccaacagaaaaagatgggcaaatgaaacactcacaggaaatgaaacacaaacagctcttacacaacagaaaagatgctcagtataagagaaacataagacacacctaaaaagagaaatataaaatgaaaattcattgaaatatgatgcttcacctttcatatcggtaaagatcaagaaatctgataacaccctgggctggaagtgaaggagggaaaaccatgttccatgtttctggatcccacttactgctggtggggatataatcttgtccaacttgtatcaagggaactttggctactcttatcaaaataccaaatgaacatgcactctgacccaggatatccacttctagaagttacttacaaataaactcacatatataaaaaatgattatgtacaaggttattcatgaactgtagtacaattgtgtcttagctaaaaactagaaaaacagaaacacccattactaagggactaattaaataactcagtgtatctatacgctggaataccatgcagtcctagagggaagcatgaaaacgttctttataaaacgaaacaaatggcatggttctcccagataagcttagcgggtaaagcaaggatgcaagatgagttaggtaaccccacctgctgacatgtgtacaaggtgggggtggagaaagtacacaatgcgcttgactcgcacatccatacatcttctaacaatggctgccttcaaggagggaagtggattatgagatggggagatttcccaccatcagctttattgtgtcttttaaattctgaaccatggggatgtaatagcaattcaaaaaataaaaggttggggtttttttggttttgttgtgttttttgtttgtttgtttgtttacaatgaactgaataaataacattcagctccaaattcgcaaaaaaaattttaacatttgtgtcaaaatgtgtggccaaaaggttaaaaatatccaagtgatctgctgtctcctggtttcaacgtcatcagggtccatttggccaccagagggtaaggaaggctctacaaacacgcatgtttctacccaccccgctccccagtcctgactgcgtcaccgccggcactttctctaatgtgcacgagtctgagacgcacttttcaagaataatttgattctgtccatccacaggcggcccatttctccgcggtgccgttcgcaacaggctttcgcctctgcgagtaaatcacgagaggacacatagaaggtgagccacactaattatgaaaatccacagtgtgaaaggacagcgctgccctgaccatatgccaaagagttcaaagccggcctccagaacacggtccagaagagctggagggagcgtcaacatccgggggactctgctaatactcgggcccagctccgcaagctgcgggtccatcacaaaggacagccg

SEQ ID NO: 10587 - DNA, 2300 bp, Homo sapien
aagggacttgcccagggaggcagcgatgggccagtctctgttgcatgtggctgattcgtctgcagtagggtgtgccctttatgtctggaatgtaccaggttgtgggggcagatgccagcatgcgtacggggcatgcagacctgtttacaaagtcatgcccaaagcgtggcctgctcacctgagcttcgggaactgaggtgagacactgcttccatgggggccctgttccctctgtgaaagagaagcttagctttatgggttctagaatcccctgcagctctgaactcccaggcctgcggcagcaagtgcaggcccagtggacgcccccttacgagctctctcccactgccttccaggcacccggtgcagcacatctcattcagcagccacagcctcatcacggccaacgtgccttaccagacggtaatgcgaaacgccgacctggacagcttcactactcacaggaggttagtggtggggccgggcgagtaagagaccatcttagtttgactgatgtatagaaccccaccccccccgccgtgacacattgcaccctatgggctataccctcaggcagggccctgcctttctgcgaattggaaacataaacgtggatgctgacctgtactgagcacccagcatctgatgcaggacagccccgtggggcgagtccacgctgtcggctgtacagagagggagggcaagccgtatgctgaggggcctgctgtggttagaatcctgtcaggggcaaggcccgccctcttgagtccttgccctgtgacactcactgcgcccatcggacttgtgcacccccacgttgaccgctaagccggggactgtgagtatctgacgctgtgtgcccagagaacgcgtttgtgaagctgaacctctatctggtctcaggcgaacgcctcctgcacagacagaagcggctggggtgagggccagcgaggcagccctgacctgtcaccatctttgtgctctttctagacaccgggggctgatccgcgcctatgagtttgcggtggaccagctggccttccagagccctctccctgtctgccgttcatcctgtgacgccatggccactcactactacgacctcgcactggcctttccctataaccatgtttagggatgtgcctcagttgggagcaaggagaaaaatgggaagaaccagttttatccatcttaaaacgccaggcacctcttcacaggtggtaaacatttaggggaagaaagcagcccagggtgccatgcctgacagcacgcatctccctgacccctgcacttcccccagcgcctggggcaagctggcgtgtgccagggctcgagtcccacgtgctgccaactcaaacatagcctccttccccacccagctggccaccctggcctcagctccctcaggacgcctcagggatctcgctgcgcggtcctatacggtccctgcttagccagcttctgtgtgtccgccctcccagctccagccctgcaggccgtcttttccgtctccagccccttacctcttttcctccgagggcctttggatgtgcttgttcctggcctccaaggcaataacctccatgtccttttccctgtatttacttggggtgctcttctgtgacacttgccaccaccaccttccagtagcaagctggtagagctgtactttttcttcacagcttttaccatggtttataattatatacttatacagtttagtcatcaatgactattttgcttactattgtgtctatgatatgtgatacaaagcaaatattttctaaatattcattgactaaacagccatcaagatgaaacaggacaggagagaactgttcagtgtgatacagagctgccatttccaaagtattctggaagcaagccattgccttactcttgattttcaacagttctaaacagcaacagcatccacctaatataccttcagaatatcaaagcgaaaactgatagaactacaaagagaaataaaatccattctcacggcaggcaaatcagtgagaaaaatgtaaagatctggaggatttacttagtatcgctaacaagctggatccagtagatgcgtatggaatttcaaatacacatagacgatgcacaaaaaaccaccctgtacgaaggccacaaagaacagctcagatgcacaaagattcacaccatacaggccaaattatagaatcccccaaccccaagacactgcaccctatgggctataccctcaggcagggccctgcttttctaggaattgactccaatgcagaatagtgagaaatcaacaaaaa

SEQ ID NO: 10588 - DNA, 2300 bp, Homo sapien
acaatgtgaagccatgtgcccttctccttgtcccagggcttttgtccccaccagagcaactgtgccaagcaggaggggctgatgtccagagaatgccacttcctatcccccacatcagacagttccatcatttaatccttgactagtttaatataataaaattccaggaactgacattttaagttggaataaaattgctcccagcagctgtacgtaatgggctggctcagcggctcagaactcccaggggtattggggatcctttcctgatcccagaggcctgcctgtttccagaatcctttaaaccaaaatgcagtccctaggtcagctgtcctgccggctcagatcagctgatgacccacagccaacatctttccaccttgatcaggtcttgcactgccctctggagagtgctttaaaatgcagattgcaggtgctgccttagctctacgagtgcagacaggcagtggaagaggaagctggattttccattttagagacagggtctcgttctgttgcctgggctggagtgcagtggtgcaatcagagctcactgcagcctctaactcctgagctcaagcgatccttctgcctcatcctcccaagtagctgggacttcagacgcacaccattgtgcccagctcatttttaaaaagttttaattgctggtagagctggggtcttgctatgttgcccaggctggtctcaaactcctgggctcaatcctcctgtctcagcctcccaaagtggtgagattacagacatgagccactgcacctggccaaaagctggatttgcaaccaggaaggggctgattctgatgctctaggaggttttaggaccaactcccaccctctacctcgggctctgaaagtcacctcctgcccctggaaagggctgtgacccttggcttgagcctgtagtctgcaggaatgaacagcagttctcagcagcccccttcccagcagcctgtgaaactgatggaggtaggtccacccgagtcccctctgtgggcaccgaaaaactcctgccccctaccctgtcccccttcctccccaacatttatcatcgagactaacgttcagaacagacctgatacctgacggtcattgatggtggtgtcactaagcactgcagagccttcaggagagccttgaccttgatgttctgccctggctgtgtgcctctccaggggacaagattccatagcgcccaccagcctctgtggccatgtgctgtgtccacgccaggccctctggtggacatctcattaacttatccttattttaaggaggaggaatcacattacacaggcaacagcatcggccccagtcaccccaactggatggagagccaacccctcaagccatcttaacccagaacttccctaatgggcatggggaccaccggcattgccttctctccagcagtttgtcccaaatgcagcctcctgggcccacttctgcagttgtttttttgtttgtttgttttttgagacagagtcttgctctgtcgcccaggctggagtgcagtggcaagatctcagctcactgcaacctctgcctcccaggtgcaagtgattctcctgcctcagcctccggagtagctgggattacaggcatgtgccaccgcgcctggctaatttttgtgtttttagtagagacggggtttcaccatgttggccaggctggtctcgaactcatgagctcaagtgatccgcccgccttggcctcccaaagtgctgggattacaggcgtgagccatgcgcccagcccgctcctgcagtttgaggtgcctctcagccaccgggctgtgcagggcccacacgggccgccacgtgggtgtgttcacctcagaaggtgctggggctttcctggaaaaaaccaaagcgcatggtgcattttcaaataggattattattactgttgttctccatagagctatttcatgctcgctgacttccttgactatctcagtggagtttccctcctaagatctggaggatgtaaggtgggatgggttgggagtgggcatagcacctcccaggggtcccacccctcctacccacgcccccaaatttgctcacacctgcttccttccagatccagcaggtgtgcggaagggacgaggtacgtgagcactgctgcacgaacggggactccagagcggtgggctccggggtccccttcccggcggtttccgggccggggcggggcggggcgctcccctagccgcgcagtgcgcgaaaccggcgtgcgctaggaccgcggcgcgccgccctccgccgttatatgaggccc

SEQ ID NO: 10589 - DNA, 2300 bp, Homo sapien
agcagtgctgctgacatcacaaaagaaacacccaggcattattgcctcctgatgggagaatgcactaccttctatgaaattatcttgctaaattaatggaatctgtatctcatgtagcctctacatccaatttacaggagatcagaagacagaagaacatgttaaactacatcatgtgggtacagtcagcaaatttcagacgatgggaaactgcaggtcaaacaacccaggttcttcaacaaataaaatgcaagggaaaaaaaaaagatggaggaggatcctgtagattaagagatttagaaggcatcaaaacagactcgcctgtttagggatgtatatttcatggtaatactaaagagaaaagcaagaaagtgatgaccatagaggtgtggtttgtgattattgttgcggggggccccggagggcttcttggccgtttgcaaagttttctttcttggcaagagtgttagatccaggaatgtgccttgtaatgattcattaagctacttgtttgtttcacacaattttctagattgatatattttacaactcaaaggttaaaaagtagatgaaacatagatcattctgcagattttcattgacctctctcaagattggcaagttgtttgtttcttcatgatgtcagccagataagtttcatcactgtctctctcctgcttcttataatccccatatgtatttgggatatgtggtgaagaattttatccactcaacaagtgttatggaacatctactatgtgccagatgctattctaggcactagggatacagcagtgaacaacacaaaaaaaatccctgccttcatggggcttatactgtagtgggcgagatgggcactaagaaattggttacattagaaaatgaaacatgctatagagaaatataatcggggaagaaggcaggggagtggtgagggggtaccatttaaaataatgtagggggccttactcaaggggacatttgagttgaaacctaggagaaggtgagaacagactgcagtctctggagagaatgttccaggcagaagaacagggcactaaggtgagcacccgccagacagtaaaggaacagctggaatgcttgggtggctggactgagggggagtggcaggaattggggtcagagaggtaatggggcgagagttcaagagaccttttaagtcctccttaggacttgggctttttcttggagcgaggtgggaaaccgctggagacttggaggcgaggattgggtggcgtgaccgtacgtgttactgcagtgctctggctgccgtattgaggatggactgtggaggggccaggtctgaagcgggaagctgaggtaggaggatgttgctgcaacacaggaatgctgatggtggtgtgtgggagtaattgggaagtgtgcacattttggatgtaatttgaagatagtaccgatagcattggctgacaggtcttaagtatggcttatgagagaaagcaaggcatccaggatgactcgcaggttttatgcctcactagaatgatggagatgccttgatcagagatgagggtgactctgggaggggaagaaagatgaaagtgctcagctatctgagtgggatgtggagtagatggatagtagttgatacaaaggtctagagttcaagagagaactctggtctggaaaataggagttttcataatatgtgaaaccgtgaggaactcaccatggcagtgagtgcccaggcccaagtggcccaagcagggggaccagcaaaaggttctagatgcctccccatcttctgaacctcccccagctcaattcctttttcaggctgctcttccatttccttttatgaaagatacaggcaagtaagtctgaagccaggcagataactgttcctcagatttcagtacaactaatttagtattatattacaattcaaagactgctatttccattataattattataagagaatgaaccaattatatttttcttgttaagcaaactacatggtatgttagtgtaatgtgaaaaatagataactgaaagttttcaaatcttaattcttactgactttttgtttccagaaaagctttgacctggaaatactacgcaaaaaaaattctttactacctgcggcaacagaagatcttaaataatcttaaggcctttcttcagcagccagatgactatgagtcgtatcttgaaggtgggtcttttcccatatatgtggacagtagtatttctgtaggtaactgattagttttttaagaccagcagagggaattgtgttccttgtggtaaagaag

SEQ ID NO: 10590 - DNA, 2300 bp, Homo sapien
ctgttctatgcccctcacatgaatttcctcatttaattctcatgacagccccaggagacaggcattattattattaattattattcccattttacagataaaaaactgggcctcagaaaggctaagtaacttccctagtcaaacagctggttagactatcgcaatcaatagataattgagaatctgctctgtgcagggcatgggtcaagtaactaggcttctagaggtgactcagacacagtcctagcactgaactcccttcagatttagtgggaaagatgcatgttgaatagttgtaagttaagtaattacaagactgcaaaatgctgggcaggagccatatctggtgctggtgctggggcgggggaagggagagcatttggaaaggttaagctgagccctggaggaagaggaggagctactggaaggggaggactgcatgaagtgccttgcaggcagcaggaatagtatatgtagggccagaaatgggaggaaagagatgaccagccttgctggggtatgcatggctagtgagagagaaagacttcagataggtaagaagaggtggagtttgttgctttgcaacaatgtttgggatgtcacattcatttctacgggaaatagggagccacagatggctcaacgccatccattgagagtcactttactagttcagctctctcagggcatcttgatttccaagttgccaggagtacttcattggaccctccatgtactgacaacagatccttctaactgtaattgcactttgaggttttgaagcaaagactccatttttctcacccctgtatccccagggcacacaacacagggctttggcactgaactaaactgattttttttttttaatgtgcagatcctgagactaccctcccaatcctgagtgataactcccgctttgaagactcaaatccaggctttagcacttttgtctctgtaactttgaaccagtgactgccacctggaagaactttgccttttctgtagaataggtataactgtggtacctattgtgggaggtcagactatgctccccaaatatgaaggattgttgagctggaaacaattaagaaaccagtacaggagagctctctgcctgccctctattagcctaaaatcagggcacacatttgaggattattattactcccctacaccatcatagagggcttcccatagcacccactcaagaatattgttattattacatcatatggttaagattactgacaagcaaaagtcaagtggatctgaaatagaatccaagacaaggggctgggcgcggtggctcacgcctgtaatcccagcactttgggaggccgaggtgggtggatcatttgaggtcaggagttcgagaccagcctgaccaacatggtgaaaccctgtctctactaaaaatacaaaaattagctggctgtggtggcgggcgcctgtaatcccagctactcgggaggctgacgcaggataattgcttgaaccagggaggtggaagttgcagtgagccgagatcacggccactgcactccaacctgggtggtggcgcgcgcctgtaatcccatccgcacgggaggctgaggcaggagaatcgcttgaacccaggaggcagaggttgcagtgagccgagatagcgccactgccctccagcctgggtgagagcaagactccttcccaaagggggaaaaaaaatccaagacaagggatcctgagcaagccctctcactctccgaacctgtttccccatctgtaatatggggagaaagttcgcagggtaattcggaaaggtccaatgcgcacagaaagcgctcagcacgcgtgagaatagataccatttttatttgttaattttaaacattaattacgtttaaaagaatcagtgctactattgttgtcccggactagaggcggcttgcgctgccggctccaagcacagagcccaattatgtcctcccttttgcggcgctgccacccgcgcagcccccagccgatgcaggggaggtgtggcccgcggatgggcggagcgatctcaggactcgcccccaagaccagtaggcggggccaggcggggcgcccgggcactctcgcacgcgcgcgcgcggcggccccaggtacgcggacaagatggcggcggcagcagtcgacagcgcgatggaggtggtgccggcgctggcggaggaggccgcgccggaggtagcgggcctcagctgcctcgtcaacctgccgggtgaggtgctggagtacatcctgtgctgcggctcgctgacggccgccgacatcggccg

SEQ ID NO: 10591 - DNA, 2300 bp, Homo sapien
tcgcgccactgccctccagcctgggtgacaaagtgagactccatctcaaaaatatatatgtgatgaaataaaatatttaacagcctatattataagattcaacttatatgtaatatccagaataggcaaatccatagagacagagtagattagtggttgccaggggctgagggaggggagaatggggagtaactgcaaatgggcatggggtttccatctgacgtaaagaaaaaagttctggaaccagatagtgatgatcccgtaacactgagaagggtacttaatgccactgagtcatacactttaaagtggttacgacggtaaatgttacatgacgtttttaccataatgaaaaatgtggggccaggcaccgtgactcacgcctgtaatcccagcactttgggaggctgaggtgggaggatcacttgagtctggaagttcaagaccagcctgggcaacatactgagaccctgtccttacaaaaaaaaaaaaaaaaaaaaaatttaagttagctgggcgtggtggcgtatgactgtggtcccagctccttgggaggctgaggcaggagggcagcttgaggtgggagggtagcctgggaggtcaaggcttcagtgagctgtgatcatgccactgcactccaccctgggcaacagaccaagactctgtctctaaacaataaataattagaaataaaaattaaaaatatttaaaaacagaaattaaaaaaaacaaatttaggccgggtgtggtggttcacacctgtaatcccagcactttgggaggccaaggtgggcagatcatttgaggtcaggagttcgagaccaacctggccaacatggtgaaagcccatctctaataaaaatataaaaattagctgggcgcggtggcacattcttgtagtcccagcactttgggaggccgaggtgggtggatcacttgaggccaggagtttgagaccagcctgaccaacatggtaaaaccccatctctactaaaaaaaaaagccaggtgtggtgatgcatgcctgtagtcccagctattcaagaggctgagaggcaggaggaaggcttgaacctgggaggcggaggttgtagtgagctgagatcatgccactgcactccagcctgggcaacgagcaagactctgtctcaaaaataaataaataaataaataaataaataaataaataaaaataaatttaacagcccataagaggcaatactagtcagaatggacacgggccacagaactaaagctccatgggatcttggggaggtctgggggtcccagggaaggagtcaggacatcgtggcaggttgggggggcactcagagagtccgggcagtgtctgactactagggtgggagtatctcagtcttaagagtcgctacagccataccagcatgttccagctaaatatcagcttcagagtgggagtttcctggacaagttaaagacatcctgaacaaatgagctccctggagctgtactggacacgccttgtgcccacctcacacctccttagcccaccttttccttctgctatcgctacagcagccggctttgcagaggtggaagctggcagcccctcacctcacccccatctcttgctatcggcccagggcttccctggcactgtaacatagggtgcctgcaataaccagctgcacacctggaaatgtgcaggtgttaacacccggtgaccattggccaccaggagagagaagtgggtagtgaatgctccccgtctttcccctctccaggggatgattctgggaaacagtctatccagctccctggagggtccttagcagagctgagctccagttatccaaagagggtagcagtgcattcccgcaccctccaattgactttcccgccttctctatctcactcttcccagtccctcactcttgttccctgggatcagctcacaaaagatcctacctgcccacaagcccctgagtcaggctctgcttcctgggcagacatgggctatggcaggcacgttgcacagcccagccccttctcactgctctctgctccttgcagaagtacgtgcaggacatcctgcaggagcagctggcggagtctgtgtaccgagccctgaaggagcaagggggccacatatacgtctgtggggacgtcaccatggctgctgatgtcctcaaagccatccagcgcatcatgacccagcaggggaagctctcggcagaggacgccggcgtattcatcagccggatgagggtgagtgacaggctgacttcccaggtcccttttcctacatccactctcctatcc

SEQ ID NO: 10592 - DNA, 2300 bp, Homo sapien
cctccagccgcgcggggcggcggactcggaggattcagaacccggagcgcggcggccgcgggcgcccgggaggaagaggaggagtacgaggcgggcgggcgggtgcgcagcgcgaagaggcagcctcggcgctgcccggctcggcgtcaggtgagttcctgatccaggcgtcccgcgccccttctccgtccccagggctccccgctcccgcccgagcccctggtgtgcgcggaaggctcgggctttgctgcgcgtcccaacttggttcgggcggcctcattttcctcctagcgggcggcctcaggccgggggctccggtccgggggtctacgcgcccaggctccaactttgcaagaccctagtcgttcctcagccgcgcgcttggctccgagctgtgcgctggcggtaatggcggagcccttggcacagctcgctaccctcccgcgggcagcccgggctgggggatgccagtccctggggaccgttgtacctgcccaagctcaactttacgccttcctcggtgcccgactctgcggccgaatcgcaactgcgagccgcaggtaatggcggagtctttggcactgccagctgtccgcggctgggggcccgaggctgggagggctccgctcccggaacatcgctccggcctggcctccaactttgcgaggagcctccttgcgctctcctcccgcggtcatggcggggccgcccgcacctctcacttcttccgtctgggcgagattggggtgtaagagcgccgtctccaaaacctgggaaagttgtgcttctcccgcaaaggaggctctagggaggccgaggggcgcgttccgccacggttcggggctgggcagtggaaggagcgctcgatgaggttgcttccaggtggccagggttcggagcagggtccccgggggatccaacttccagggccactcaggggccttgcgtccgaggtcccggaaggggctctctcgggactgcgccccagaggacgccagacgctcgcccccacccccagggcactgtgaccagagagctcatggctctccaagctccgcatcaggctgtctggggtagacatctagagaggagaggctctcacggagaaggcagccgaggagggcaggaacctttccagtgactcccctgggttctggtcctagatcgaccctttacttgttgcgtgaccttcggtaagtctcttcatctttcccagcctcagtttctcatctgtaaaatggagaaactacctttttcgtggggctgtcatgaggaccttaaaaaatcataaatgtgaatatgaagtcagggtaagcgttcataacgcaggaagtgttgctgatatatatatatatatatatatatatatatatatatatatatatatatatatatatataaaaccattattgtaatgctctgggaccggatctgggagactcgcacgcaggtctagggtttccccaccagtaggaaccggggggtctaccccacagggtactacaggctgcggaagattgctctcgcctccatctctaccccagtaatcctgggaaagacgcatgggattcttccctctactcccatagcccagctcaaaccctgcgctcaggcctaagaaaagcgcgcacgcagccaccacggagggagggtccccagggacgccgctaggcaagggtgcggtgcaggcgagcgcgcccataggcgcctcatctcacctctggcggcccacgacattgggagacagcagaaaggagaccccagacctctcctcccgagaggaatgagggaaaattgctgcctttctttagtgcttctctaattggggtcggggcaaacgcaagaaattcgtaaacaccagggaacactgacgcagctctctggagcatagattttttcccccgttattttttcagaactgaagataaaataggaaaagggctcttgtggcagctccccaagtgcgcaggggtcgcgtccattctccgccctcaaggcatctcagcggatggtttgagaagcctcggcaggtccctgaaggagggggtgtccgccccaccagcaccgccacggcgggccccggcccctttccactagtctggatttcagaagcgccctgaggggcgcacggctctgccactgacagctccaaggcactgtcacacgtattattcacctggagcctcttaactttcaggttgccagtgcagccatctgaattccattttgcagctgcggaaattgaggtggggcaaaccaaactacctagccatagtcacctagctggtaagtggcactac

SEQ ID NO: 10593 - DNA, 2300 bp, Homo sapien
tctctctctctgccagtctttctgtgtgtttttctatctctgtctctcactgtctctgccagtctctgctgtctctgtctctctctttgtctataaatctctctgcctctctctcttctctgactctctctgtttgtgtgtgtgtgtgtgtgtctgtctgtctgtcttcgtctctcatctacacacacacacagagggcacctcatggtccctggctccacccgtgggctctgaggctctgtcttcccagatctctgtctcaagagctacattctaaggctttgcttttaatcgcaccagggcacctggaagtgaggagagaactgaggggagtggggtttctgtccccctctccccaaacccaagccaactctgccttctgcaggcacagccagccttggcccgaccccactatctccaccatctcgtggccgtgcatcccctcccaaccacccttctccccaatttcaaaaaagcttgtgctcccagagaggaagtgcccctactctgagcttcttttggccttgacccacacataggcagacgtggactctgttttgagcaggtgaaccgccagcccagtggaagagcagcttcccttcccctagcttcctgattttccccagttgccatggtaattgagggagcagtgttctgagaatgacaccactgaaacccagcgctcaactttgaaatggttcgggcaagggacgctggacccaaaacaggaggggaccagactgcaaggactcagctccagcctcaattttctgggacccaccccccatccagcctgtatgctggattattctcatcatcatcaaaatcaccattattgttggcaactgtttcctgagcatttactatatgtctagcaccatgtcaagggcttcaccagcatcatctcattgtgtatatcctcacgacatccccaggcccatccatggctcaggaaacaggctctgaaacttgcccttgtggcagccaggaagtggcagagccctggggctggtggcatttctccaggcctccttccagcatgtggaagacagcatagacctccaggcaccctcgtcagcttattctttattccttcctcccctcctcatcccccacacccttcttcctgcccccaaagtcacacaccccctcccctgctggatgtgcaagacgatctgaaaagcatttattagtgacaaagggggtggtggttttcctctttgcctcttctctgcgcaactcgaagcctgagtgggtttgctccgcttggcaaggctggggaggaggaaaagatcaaatcacccagagccaggtgccaagtgtgtgtgtgtgtgtgtttgtgtgtgtgtatgtgcgcgtgtgcgcgtgcgcgtgtgtgtgtcctctctttccttgattttcccccgttttcccaagactgtgtgagcagcagcaacagcaacggggagatgcaaaatcctttgcaatctgcccaggaaaagacagattttgagtcgggtttatatggttacccatatgttagggcccctaagaaaggaagggaagctgcgttctctgtgtcttccctcctccagcccagaccttggcctctccacacctgtggggctcccaggccacagatgaacatgtgccctccatccttcactctccccagatgccaggcctgagtgtggctccagaaaagaccagaaccaggcaacatttcctgaacaggctgcttttctccgtctgtccacccgagagccaaggccagaacccaggctgcaacctctgcgggctcctgggaggggctcccagcactgcccagcctgggaggctgtgtgttccactgtcccattaaggaatgctatcccaacactgatgtagaggcagaaataaccatccctgcctcccatggggccttctctgcccaaatagacctgccctgccctgcgtggctactacattcagccctatccaggctcccagaaattgtcattgtgtgtgtgtgtgtgtgtgtgtgtgtgtgtgtatgtgtgtgtgtgtgtgtgtgtgtgtgtttcctgatagaaaaaaaaaaatggaaattaggttatataaaagatgtatgctttggagcccagagcggctcttttaatgagggttgcgacgtctccctccccacacccataaaccagtcgggttggacgtcactgctaattcgtttcagtgatgataggataaaggagggacattaagaaataaattccccctcacgaccctcgctgagctcacggctcagtccctacatatttatgccgcgtttccagccgctgggtgag

SEQ ID NO: 10594 - DNA, 2300 bp, Homo sapien
atgggtataactctagtaccttccttgtagggttgttgtgaggaccgcatgagttaatgcacatggggagctggtacctggaccataggaaacgctccgtgcatggtgctgatgcacatggagtgctggtgatagcaacctaaagttcgatggttctgggagcttcaagggcgctcagacttgagttcagcctttaaggatacatggagagaagacggcactgggtcctaggagagtgaaggtacagagaagctgagccagagcaggttcaaggtgaaaggagacggggaaacagagtttgggccatgtgccttcatgaagtaggaaatttactagagacaatacgaattcatgccaagagggtgataccagtctttcccactgatgccatgccccaccccttgcagacccctcagcagaccttgtctgctgtgaccatcatcacacttgggcagtatccctctttgagaaatgaggagacaggcccagagaggagaagtgacttgtccaagaccacacagctggtacaaggggagcaggaccatcatccagggccatttggaattcagtccctgctgcccacatcatgttgtccattgtcctcacccacagaaaacctgcctttgcactacagaggtcccttgggggttacttggctcaatctctgagagctgcattacccccaaacagatcccgtgaccataggggaaccatattcctcccaggccagatcctgtgtcatgggagcttggtttgagaggactgatgcaggtaacacctctcaggtacctcagcagttctgttttgtacctggaggaaaactcctttgcttcttgcaagaaatctattcttcagtccaaatctccctgtggtcaagctcttgggtcatagtgaggaggaagccatgtaggtctcacccagagagccccggaatcctaactcctagtacatgaagatgtctgcgatccaaagcttggcaagggttggtgggggcggggtgggggtagtatcctctttctggcaccagagtgggatggagcctcatgtagctgtgagagcctgggctccggatctggacaaattgggttagaagcccaatactggcccggtgcggtggctcatgccttaattccagcactttgggcgtgtgaggtgggtggatcacttgaggacaggagttcaagaccagcctggccaatatggtgaaaccccatctctgctaaaaatacaaaaaaaaaaaaaaaaaaaattagctgggctttggtggcacatgcctataatcccagctatttgggaggctgaggcagaagaacgagttgaacccatgaggcggaggttgtagtgagccaagatcacgccactgccctgcagcctggtcaacagagcgagactctgtctcaaaaacaaaaaaggagctcagaactttctggactcggtttcttcatctgtgagatggaaccacctgcaaggcttgttgttaatattcacttgtacattcatccaaaatatagttttggaggacacactgtgcgtcagacatttttctaggccttggagacaacattggtaagcaacattgagatagagctcatattctagttggcagacagagaacaaatgaagaaattcagacaccgctagaataagaatctcataaagtggccagtcctgtgtgtggcccctagtaactatcccattaaaagtggtaggtatttttcttgtttgagttatggcaccaaagaatcccttgagacaagggtactgtattagtctgctagggctgctgtcacaaaatatcacagatcgaggggcttaaacaatggaaatgtattttctcacagttctagaggctggaagtccaagatcgaggtgttggcagggttggtttctcctgaggcctctctctgtgtcttgcagatggccgtcctcttgctgtgtccttacatggcggcttctatacatccctggtgtgttgtcctcttcttaaaaagacaccaatcctattggattggggctctcccttatgatgtcatttaagcttagtcacctctttaaaggttccatctctaaatacagccacattctgaagtcctaggggttaggacttcaacataggaacttgagggggacaaaattcagcccataacatgcattgatggtgagaaccaagagaatgtcttaagaccaaaaacgcagtgtggggagaaggggcattttggccaagtattccttgcacaccttttctctggatgcctttgatgatgctgttgtatgctcccttcttcaaggaaggcttcctg

SEQ ID NO: 10595 - DNA, 2300 bp, Homo sapien
atccatttcagctattattattactattattttatcaaacagaggtgtgtctgcccttttggcccaggtttgttaagggtttctccatttttgatgttataaaaatgttacttttatgatttttttctgaacttaagctttagagtaaattgaaatatatacatatataaatcataagattaaaatgcacaagtgaatcctgaagcaaagaggagaatccttttatgttatgaatcacccccttcaaacatgagtcattctgtaccttcagatcctggactgggtgcagtggctcaagtccgtaatctcagcacttttggaaaccgaggtgggaggatcacttgaggccaggaattcgagaccagcctgggcaacatagtgagatcctatctctacaaaaaaatttaaaaattagccaggcatgttggtgcatgcctgtagtcccagctactcaggagactgaggtgggagggtcgcttgaacccaggagtttgaggctgcagtgagatatgatggcctcactgcaccccagcctggtgacagagggagaccctgtctctatttaagaaaaacaacaaccagaaataaacagatccgtggtcatcacctttcttaaaggggctcaccagcaatgtgtccctatttgagaaagcctctaagtgactccactattcttctctctctgccccctgcctgcctgggtgagttgaaaaggcaccatagctcatatttttgaagataattttttgtactgagacagttttcttctttctggctatcagtttaatgtgggagctgtatcttgttgtaatacacaaacatgaccacaagagggtagatgtattccgcaatactgccctagaaacaccatccgtaggctatttcacccttatttactttcggaggctgaggtgggcagatcacctgaggtcaggagtttgagaccagcctggccaacatggtgaaaccctgtctctactaaaaatacaaaaattagccaggcgtggtggtgagtggctgtaatcctagctacttaggaggctgaggcaggagaatcgcttgaacccgggaggtggatgttgcagtgagccgagatcgcgccattgcactccagcctgggaaacaagagcgagactgtctcaaaacaaacaaacaaataaacaaaaaacaaaaaaaggcaaaaaacccttaagtaataacaatatatgttaaaatgttgagtagtaagtgctataaaagaagactcatatatacatacagatactgatgcataaatatagaagcttgacaaattttgaggtgtgtccatatgatggtctagggagacactgttttgggaacatggggtggcggtgaaagttcacctgcccaacacgttaagttgggaatcctaccttttctaggtccctttcccccactccacgctatactccagtgtttctgctttgccttaggatgcaaagccatgccccatggggctcaaaaacaaacctagtttcatttccagcacggggcatggactttcagccccttttccattagggtttctgaagaccagtgtgagccctagaccctgcagccagagaagagaggaagcagagagagagtgggacccagccaccagcacacctgccttgtcctgtgcttgctctgagtttgtgctgggattttagatgagtccctgcagagtgggaggcactgagagccaagcaaacatgaaaaaatggggccctgccttataaacattcgagagacaggcacagtgttgacgccagacagggtagtaattataatagcactaagcacctgcgctaccttgccaagtatggacacttaggagtcccactttacagatgagcaaagtgaggcccagagaggttgagcgactggtcagaggttatctagataatgagtggcaaacccgagattcggagaccccactgtcatgcaaagcgtttacactgcggagtgttctcctctaggcaccactacagggcagcgtggaggcagagatgctgttcctgccccacggttgacaatccttctcccctcctctaggaaatctcccccggccagctgagcctggaggacctcttggagatgacggatgaacaggtgtgcgagactgtggagaaatacggagccaaccgggaggagtgtgcccgcctcaacgcctccctctcctgcctcaggaatgtccacatgtcaggtgagcaggccccggggtcggggatgtggagacttgtccccagcacagctgccgcggtccctcggcatcccgtgcccgccactgcaggcca

SEQ ID NO: 10596 - DNA, 2300 bp, Homo sapien
accgctcccatgatccactcacctctcttcctggacacctggggattacaattcaagatgagatttgagtggagaaacagagccaaaccatatcagccaccctttaggattttaccccagtgtgaagcctgcgtctcaacaattagatcgttggtgaggagggtatagcaccatttatttctttagtaatctttcataattttgcttagttattgtatcagttgttttctaaaattgtatcagctgttttcctttatttttatacccatcacttgtattttatgccttttaaaaaacagaagtgggctgggtgtagtggctcatgccaataatcccagcactttaagaggcccaaggcaggcagatcacttgagccggggagttagagagtgtagtgagccgtgattgtgccactgcactccagcctgggtgacatagtgagaccttctctcaaaaacgaaacagaacaaaaccccaggagtgttcaaagaccccagaatttggcaatacatgacaaatatttaatgtgtttctataactttaattcagaggcatctatatctcacctcagcatgtgtcagcaaattaattgtaaacatgtgctgatttttagccttagtatttaagaaaaacttgttaatcatttatgattcccttcctggagataaaaatgaataaaaccagttttatcttaaaagaaagaaagaaaagtttaaaaatggcatgctaatgatctaagcccccagtgttaaagtttcctgggagcaagcagagtaggggcactgtcacatcacaagccctagctgatccccttcttcggggtccccaggcaggggctagggtgaagccataactgccatcacatacttgccactgtccctctgctgtgttcctgaagcaggtgacagtgatgtaatcctatgcaaagagtattgctacctcctaatcagaacactgctgaccccaggccagcctcaaaaatcctccaggatttttgtcttcctcatcatgttaaaagaaaaaaaaaaagaaaagacttcaatatggatgctttgcatgctcattgctggaaaatacagaccaggccaggcgcagtggctcacgcctgtaatcccagcactttgggaggctgaggcgggtggatcacttgaggtcaggaattcgagaccagcctatccaacatggcaaaatcccatctctactaaaaatacaaaaattagccaggcgtggtggcgcgcgcctgtaatcccagcttctccggaggttgaggcagagaatcgcttgaacccgggaggcagaggttgcagtgagccgagatagcgccactgcactccagcctgggtgacagagcaagacaccaaaaaaaagaaaagaaaatacagaccaacaaaaaagaagaaaataaaagtgatctagaattctcctcgcctcaggaaaaaaacctaaaatgttgatatcgattctcctcagtatctcagatcacaaggaccttgtcctctgtgttcatgaactagaccttccagcgacacagattaacccaactggaagtttctgtttgtttttctctggagtcgttttctggaggttggttccctaaactttttgggcgaggggcacggattccggagataggtaggttgcagttgtgtttgtttggggttgttttcatttccaaatattcacctcccagcttgggggccgagaggtatctcaagccttctttcgcaaaggcatctatattcaagacccagccgttttactcggtgttgttttttttcttagatttttttttttttttttgagccccggcagcttttgttcctttgaatttaagtgtttgaagcttggcgatggcaggaattggctttggccttgagatcttaatatgtaatgatgactggggctgcagggggccctgcctctcccgctgccctgctctggaagcgcctgggtatctgagagttcagagcaggctggaggggcggagcttggagggacgctggcggcccgcgcctccggtaacctagcaaccgacgccctagcaacgcgagggggcgggaccgagggaggaagtcggaaactggtggccgcgtctcgcgagagttgcttttgcgcgcgaactgtaagtgccagggtctcagggtcaggtcgcggctggtcactgtgcaggcgcttgggtgacgcgacgatctcagcggatctggtcaccttcgtctccccgccatggagacctcagcactcaagcagcaggagcagcccgcggcgaccaagatcaggaacctgccctggtaggaggaggc

SEQ ID NO: 10597 - DNA, 2300 bp, Homo sapien
caggctggtctcgaactcctgacctcaggtgatctgcccgccttggcctcccaaagtgctgggattacaggcatgagccatcgcgccccgcgaccttacccttttattcttttccatgacgtgtacataaaaacgaggcctgtaagactccaggaatcgaaggaatttgggagacaaaaaatggagactcagaaaattagagaagagaaaaatgggaggggggagcctggacaataaaacgggggtcctcaggaggcaggaaattagcgattaaatgggagcagaggtggaggaggccgacactggtgccagagataaaagtggagtcccaaaaaaaggggtgcgctgggccgtttttaaaattgggaaacataaaaaatacccagtggaaaatgaagagagagaacggggcatgctaaagttaacatgggcggcgagaaagggacaggtagccagcggaaaagggggagactgagaaaccggcaggttcaaagaaaagaaaaaaaaaaaccggccaagcggggtgaacaggagtgtaacccaggaggccaaacgggacacaggaaggacgtacccagggctcataaaacaggggcctgggtaaaaaaacccgaaacattaaaacggagagaccatggtgaaaaagaacacgggaacctcagttaccgtagaaaacataggttgcgttaggaagcaaagaaatttaaaatggaaccactgcgatccggagctctgggaccagtgaccggcaaatggagagggcacttggagggaagcgaagaaaggcggggagaaaggaatgagaggcgggagagtgacttgaatgaagctgacaccaagaaccgcgggaagagcttgggcccaaagcaggaaagggaagcgctcgagttgggggtaaggggaggcattttggggacaatgagctgagctcagtaagaaatccccaagccactgatactactggggaccggacaactaagaaatggggtctttcaggcatgaaaagcctccatgatgactcctgccctggccctggaatgttaaaaagggggcgtctgacccaagcgagccatttcttgaggctatgcgggtagacagggagagcaggtttctcagggggacggggacaggcgaggctgtcgccgtaggtaggtaaggggacagtcttcttccgaatcgctcctgccccgttttttatctcgttcccacccccactccggttttcaccctgccctcctctccccaccgccccgtgttctcctcacttccctctcccattaccggagccattgagtagccccccttgttttaccctagccttgaccctcgccgcaccccccaattcttacgtcctccccagcacccggttattacaccttccttccaccccctccccattttcccctaagcccagctctccccaggtttcttctcggccagtattccctccaacctatttctcccgcccccatttttacccgtttcccccctcatcggccttcgcatggctccattttcacctgcccctcccctcgatttcgcttcagcccctttggttccccttacccccacagccctcggtctccctctctccgttctccccggatcgccgcttcccctgcttggtttttctctcagcccggctctaccactctccaacacccccttttcccctgagcccggcttcccctactccggtttctatcgctccccttttcccggtttccctcagctctgttcacctccctcccttccccgtttttatccggcgctggttcccctcaggaccccgcacaacccctgggttttatcccgttcgcgccccaccccgtttccgctcagctccccccacccctgccccatttttatctggttcgcgcgtcttccccgcccccgtttcccctgagcaacccctcagcttttatcccgtcagcgtaccgcctccccgattttccatcttttccctcagctgccccccaccgtttttatcccgtccgcaccccccctccgtttcccctgcgccccgcccccgcgcgtctccgcccgcgcccaccgccatgtgacgggaagcagctgatggcctctccgggcggcggcggcggcctggccggggcgggcggcgcgggggcggcatgagggcccgcggcccggggggctgaggcgcccgccgcctgccgcgggggccgctcgcgtcctccatggaggccggaggtgagtggggccgggcgcgcccgttcccgcccggcggggccctggcccgttctccccggggaggggggaggcgaccccggggcgggctg

SEQ ID NO: 10598 - DNA, 2300 bp, Homo sapien
cacatgtttcagagagcacggggttgggggtaaggtcacagaatctcaaggcagaagaatttttcttagtacataacaaaatggagtctcccatgtctacttctttctacacagacacagtaacaatctgatctctcttgcttttccccacactaacacggtgaaaccccgtctccactaaaaatacaaaaattatccgggcgtggtggcaggagcctgtagtcccagctacttgggaggctgaggcaggagaatggcatgagcctgggaggcggagcttgcagcgacagagcgagactccgtctcaaaaaacaaacaaacaaaattcctgtcaagaatctgatgaacagttattttattttattttttatttatttattttttttgagacgaagtctcgctcttctccccaggctggagtgcaatggcgcgatctcggctcactgcaacctccacctcctgggttcaagcgattctcctgcctcagcctcccaagtagctgggattacaggcgcctgccaccacaccgggctaatttttgtatttttagtagagacgaagtttcaccatgttggccaggctactctcgaactccttacctcaggtgatccacctgcctcggcctcccaaagtgctgggattacaggcatgagccaacgtgcccggctgatgaacagttatttaaaaatatttgagcaaagaataaaaaagggctgagcgcggtggctcgcacctgtaatcccaacactttggcaggccaaggcgggtggatcacttgaggtcaggagttcgagaccagcctgggtaacatggagaaacgctgtctttactaaaattacaaaaattagctgggcgtggtgctgcacacctgtagtcccagctactcgggaggctgaggtgggaggatcacttgagcctggtagtttgaggctgcagcgaggtatgattgtgctactgcactctagcctgggcaactggagtgacaccctgtctcaaaaaaataaaaaacagaaaagtaaaaaaggcagaactgttcagcttcattgctcagttcaccaggagaaacattttttttttaaagtggtttcaagaggatttcctcatggaagaagcatttcaataaggggaccgttgaacaacagaactaatgatttttttttaacgttaatatttattttgagatggagtctcgctcagtcgcccaggctggagtgcaatggcgtgatatcggctcactgcaacctccgcctgctgggttcaagcgattctcctgcctcagcctacccagtagctgggattacaggcgcccgccatcatgcccggctaattgttgtatttttagtagagacagggtttcaccatgttggtcaggctggtctcgaactcctgaccttgtgatccgcccacctcggcctcccaaagtgctgggattacaggtgtgagccaccacgccctgccatattattattatttgaaacaggaagtttctcctagggctgttttatggatggctcttcctgaggatatcaaagccgcattttccccaggacagaatgggatgagggcatggcagggaagagaggagcttagcctgggaatctgactgggtaaggggtgggagaactaaaaggggaaaagcaaaaacaaaactcttgagaaacacgtcctggggactccttggctctcgctgtcactgtgtggtcccagccagttcactggagaaccggagtctcgtggctgctttggctgaaagtcaggggatcatctttctctggctcccttttgcagagggtaaggaaaggaagcgatggcggccttggcgcccgccctgcgcccagggacacagaccggaatccctcgagacgctcagcggggactgccaggggggtcctgcgttctgcagcttggcaaccgcttcctccgggttctgcagcccggggcagcggcgggggttgcgtcctgcggcagctgcagggctccgtcccgcccgctgtccccgcgactcggtactgctgtcccgggcggagtggactggggagggcccagcctccgcgccccgcccctggcccggcgggacccggctcggcgcgccctcggcagaaagccctcctcccgggccaaggtagaggaagttgggctcccgcctggctgggaggcgggagggatcccgctcctgttgttttccgccggcaggagtaggctggcgggcgcagggggcggggtgcgccctccctccccggccagggcgctcgggagcggggacccgagcctgcagccgagctccgctgccggccctggac

SEQ ID NO: 10599 - DNA, 2300 bp, Homo sapien
ctcctgcctcagccttggtagtagctgtgactaccggcacatccctccataccgggctaatttttgtattttgttgtagagatggggtttcaccatgttgtcccggctggtctcaaactcctggactcaagtgatcctcctgcctcagcctcccaaagtgctaggattagaggcctcagcaaccgcacctggcctgacgacctatttttgatatgactattttataatggtaggatataatgcaatcttttggtgaataaacaacaaaatcatctatactcatattatttttaaataggaaagatataccctaaatgattactgacgtttataacaaagtagtgggatagaaggggatttctacttctttgggtttttttctttgattttctacaatgaactcgtattatttcctagtaagaatgtaaatcaagagacaactttttattccatgggaggaattatcaatgtcaagagtcaaaacagataagaactgttaaatagtgcttattggctgggcgcggtggcttattgcctgtaatcccagcagtttgggaggctgaggcaggcgaatcatgaggtcaggagttcgagaccagcctggccaacatggtgaaactctgtctctactaaaaatacaaaaattagctgggcgcggtgccgcctgcctgtaatcccagctactcgggaggctgagacaggagaattgcttgaacccgggaggcagaggttgcagtgagctgagatcacgccactgcactccagcctgggcgacagagcaagactccgtctcaaaaaaaaaaaaaaaaaatagtgcttatcatattcagcaaaaagcaagcagcttgtggtcacagtaagagcagttttggtatgaataaatatggtttaaaattgtttttcaaaaaacaaacataaaaaaccaaaacccaaacatttctcaggaattttgtgaggacgaattttgtgtgtggagaaaacggacaaatacatttccccatatatttaaatgctcaaaagttcactcaggtgctctcaccaggcaattactatgacaagtgatcacgtgcgaaaatacagagaatctggctcgttttaaagtgcaggagaaaagcaaggccttactgtttctgaatttgctgtgtgtgtgtgtgtgtgtgtgtgtgtgtgtgtgtgtgtgtatgagaagatgggatctggctctgaagcgcagacaggagtgcagtggcaagatcgtagctcaccgcggcctcaaactcctagattcaagaagtgatcggccgggcgtggtggttcacgcctgtaatcccagcactttgagaggccgaggtcaggagatcaagatcatcgtggctaacacggtgaaatcccgtctctactaaaaatacaaaaaattagccgggcgtggtggcgggcgcctgtagtcacagctactcgggaggctgaagcaggagaatggcgtgaacccgggaggcgcagcttgcagtgagccgagatcacgccactgcactccagcctggtcaacacagagagactccgtctcaaaaaaaaaaaaaaaaaaaagtgatcctcccgccccagcctccggagtagctaggactacaagcatgcaccactgtgtctggcttttttctttttttctttttttttaagttttctgtaaagacggggtcttgctaccttgtccaggatggtctcaaactcctgggctcaagcgatcttcctgctttggcctcccaaagtgctgggaatacaggcatgagccaccgcgacaggccatgttgctgaatttggaaagtggagcaaagaatcatgcaaaaaattaagaaaaccaaaacgcaaccaaggcgaattcaattgcatttttttttcccagcgacactttctgagacacgaacctctctcttcggcgaacctattccagggcgcccttcattttcatttcttgaaacaacagccttgcaggccgagccgctgttcccgagaactcggcagccacagggagcaggttgcatggacccaggagcgcgagaggccctgctctgccagcttcggccaatcagaggccagggagcggtgggcgtgacgtggggcggtgcgcggggctgggcggcggctgaggcgcgtgctctcgcgtggtcgctgggtctgcgtcttcccgagccagtgtgctgagctctccgcgtcgcctctgtcgcccgcgcctggcctaccgcggcactcccggctgcacgctctgcttggcctcgccatgccggtggacctcagcaagtggtccgggcccttgagcctgcaagaag

SEQ ID NO: 10600 - DNA, 2300 bp, Homo sapien
tattggatgaccttttatatagtatgtgttttattcatttaggaccccaaaaaatgtcatgatgtgtgactgttgtggattgcagcaggtgcctaagagaataaaatggctcatgcctgtaatcccagtactttgggaggccgaggcaggtggatcatttgagttcaagaattcaacaccagcctggccaacatggtgaaaccctgtctctactaaaaatacaaaaattaggtggatgtggtggcttgtgcctgtaatcccagctactggggaggctgaggcatgagaatcacttgaacgcaggaggtggaggttgcagtgagccgagatcatgccaccgcactcgagcctgtgtggcaaagggagactgtctcagaaaaaaaaaagaaaacaaaatgccgttagcgttccaattacacttgagttgataccactggaaaatctgatagttggaatagttaatcagttagagtttgattcttggaataaaactggccaggcatggttatttatacatttttacaacttaacctttgggctatcaacaatatgatgtaaaaacctttattagatttatatcagaactaaatccttagttctgaccgggcatggtggctcacgcctgtagtctcagcactttgggaagctgaggagagaggatagcttgaggccaagcatttgagatgaccctaggcaacaaagtgggacccagtctctacgatcattttttaaaaatacttagccaggactggtgctgcacgcctgtggtcccagcagctcaggaggctgaggcaggaggatcgctggatcccgggatttttaggctgcagtgagctatgctcgagccactgcactccagcctgagcgacagagcgagacctcatctcaaaaaaaaatgttattcttaggtctcctttcatcccatgaatgtttttgtgttcagtaaagcatgtttatggttcaccttcatatttttcccataattcagaatgtatttttctttttctttttcttttttttctttttttgagacagagttctgctcttgttgcccaggctggagtgcagtggtgtgatctcagctcactgcaacctctgcctcctgggttcaagcgattctcctgcctcagcctccagagtagctgggattacaggcatgcacgaccacgcccagctaattttgtacttttagtcgagactgggtttcaccatgttggtcaagctggtctcaaactcccgacctcaggtgatctgcctgcctcgaactcccaaagtgctgggattacaggtatgagccactgcacccagcccagaatttattaatggtgaaaatttctggtgtttttttttttgtgtttctttaagatacaagaaaatcagaaaaacaattattttttaatatttgttcaaaaatgtctcattattagcactcatggactgtcttactgcactggagaatatagatcactgaattctgtgtaaagaatagattcatcctacattgtatttgttattttatcaggcaaaggtagctgcagcagatgagaagaagttccagcaacagatcttggcccagcagaagaaagatttgacaactttcttagaaagtcagaagaagcagtataagatttgtaaggaaaaaataaaagaggtaaggataccaatgtttgttctcaccaagttgccattagaatggttggaacttaacattcactcatcttgcattgtgatcaatattctagtccagtgagtctcaaactttacattagaataccctaaaatgctttccgggcacagtgactcacacctgtaatcccagcactttgggaggccaaggcaggcagatcacctgaggtcaggagttggagaccagcctggccaacatggtgaaacctcgtctctactaaaaatacaaaaattagctgggcgtggtggcacgtgcttgtaatcccagctactcaggaggctgaggcaggagaatcacctgaacccaagaggcagaggttgcagtgagctgagatcgcaccactgcactccagtctgggcgacaagagcaaaactctgtctcaaaaaaaaaaaaattacctaaaatgctattaaaacagattgctaacccacccccagattttcagattttattttatttatttatttatttttttatctgactgattttcagattttaaaaatctatccctagattttctggggtagagtttgaaaatttgtgtttctaacaagctcccagatgacgctgctgctactgcttcagggaccacatttcaagaaccattgatata

SEQ ID NO: 10601 - DNA, 2300 bp, Homo sapien
ctcaagttacattctcccatttttaaatagcttcataagctgtctttggagttttgaacctgttttatgcagtggaactgaatattaaaattcatttcccaatgcacttgaaatgaatatccactgttagactaaaattttgttccattttgtggtctcttgtataatatttgaagacctttagtgatagtgatctctgttatgaaaatgatctggaaaactaagaataattttataaaaggaaaaaaatgtagggggaagcaaagaattatactattagcattattatatttaaagtgggttaaaattttgaacctattctttggactataaaaatagcattattttaaaaatatacttgagttacttaattacatatgtgtcaactaaaatcaatgtcatttcaagttttaatttttccggtgtacttcaacttcctcaagtttagtaaacttagaaaatacattgtggcttttaattggagaagcagagccctaaaccgtgtttctaaggagttaatttttatcagagataaaacagactaaataaaattgcacatatttgtacatgaataaattttgttttggtctgccctgtggagaatgtggattctagtgtcattggttatccttataaatcaagttattacaatgtgaaactgaactgttgcccatgtatttggggtctccccctctatcaatgtacttggtaagttagccaattaatattcaccaaaactacgacttgttaaagcctcctataaaatcacaggcctctacctagcatatctcttttgattactggcatttaagagctgcttgcttttctggcactgtaatattaagttgaattttgtacataaatttattagcaaatatgcagtaatgtaaatggtagcaggtcccagtgccttcctctttagaaccttaagcctagtgaatgaatcccaattacacacgttctcgctcttccctgtaaaacaggagttcaaatttcgcgagaaatcatgtagaataattttaactgacctttcaaatattttcttataagttttaaaaacttacaagttttataagccaccaatatggcaccactaactatggctactaagtgcttgaaacatagccattatgactcaggaactcaattttgcacttaattttgttttaattaattttaattgaatttaatttttaattaaaatagtcatatgtggctggtcactatcttgctggacagcgcagctgcagaatatacgtgaatttgatatatatgccctcaatggcaagtttattaaagatcccttcattatttgagctataatacataaatttaaaacaattctccatataggtgtaatggtagataccttcccaatacatcaaagcattttaaatgtataaaaggaaaaagaaaatcagcccaatttaatcttgggtcttggcttttacataaaaatctggatgtaaaatttaatttctccccaaattttggactataataaaattttgtattttctaaacttctttaatttttgtttcctgatgaagaaaaaagccattataaaaaatttcaagtggtcatggataaaatgcaatactgacttctcacaaatggttttcctaaaaccctagggaaataaggaattaatttctccttttccaccctgaacatgtactattttaaaatcccccatggttgtacatgtttttgaggtacaaattactatagcgtccttttttctaaagggttatagccacttaatgactgaccactacttcatctttatagagaggaacatcatcctttgaaagcattttcccctttaaaagtcatttcagttgcatttaagaaacatccattattatccttccagggaatgctattttttcactggacgttagaacaagattaattatctttgcctatcaagaagcatgggcttgattaaatcagtcaaggacattaaattccagctttactcactctggtgaccataccgatgctgagttgaagaagaatttgtgaacgtatcatttggttaaaattgtacgcctgtcgctttaaatctaaaaaaaaatcctttcagaagctgtagagagaaggtgctagaactgtgtacgatcatgactggaaagcaggatccctcagtgactgccgaatcttcccagcacaagatagagaggcagttcagcacaagcctacattggttctaggcagaacgatgatcctaccgaacagatctcaaataaaattaaattgagaaagcagatctttcaagggaatgaggcggaggctcg

SEQ ID NO: 10602 - DNA, 2300 bp, Homo sapien
gcaggtggatcacttgaggtcaggagttcaagaccagcctggccaacatggtgaaacccccgtctctactaaaaatacaaaaattagctggatgtggtggtgcatgcctgtaatcccagctactctggaggctgaggcatgagaatcgcttgaacccaggaggcggaggttgcagtgatccaagatcgtgccactgcactccagcctgggtgacagagtcagactccatctcaaaaaaaaaaaaagaaaaaaaaatcctaaggaagtaaatgatagtttggaagagtagtattcatctgcaaattctactctcggggttttacatttttcttggagcagccttgaatttactatatttttatttcattgaatacaaatgaaagccattcctactaccacaccatacatccacgatggctgtatctcattgtggctaaaacctaagaaaactctgttcactgtaacgaagtctagtggaagcttgatgacatggcttttaggcattaaagtctaataagaccaaaataataataaaattcagtacgggggcattatcccttgagaaaaaatttcacttgttttgcttcgatgctgatattgaccctgaaaattggtcaaatcaagcttctgatgttaatttagggttgttatcagttttctgcatatacaagtaattgggtttgaaatgtgttttaagcctgaattaaaataacttagtcactgatgactcatagtgagaagtttttccttttccctgctggaacatatgcctttacctccaacatggccttttaaaaacaattaaaacataaagaacactacttttgtgtgacagtttctggaaaagttctgtttaggtttaaattggtgaccacttattacaatgcttcttagtaactacactaactacaaatgagtttccaaatttccatacaaatttcttaatctctgcctttatggaagtttcctcattatatatgaaatgctcaaaagtccactaaatattatatgaatgaccacagggactttattttgttcattattgtattcctagtgcctagaatagtgccctgcacatagaagccaattagtaagcatttgttgaatgaaatcacatactttttttttttttttttttttgagacggagtctcgctgtgtcgcccgggctggagtccagtggcgcgatcttggctcactgcaagctccgccttcctggttcacgccattctcctgcctcagcctcccgagtagctggaactacaggtgcccaccaccatgcccggctaatttttttgtatttttagtagagatgaggtttcaccatgttagccaggatggtgtcgatctcctgacctcgtgatccgcctgcctcagcctcccaaagtgctggaattacaggcgtgagccaccgtgcccggccatacttttttttttttttcttttgagacagtctcactctgtcgcccaggctggagtgcagtggtacaatcttggctcactgcagcctccgcctcctgggttcaagtgattctcctgcctcagcctcccgagtacctgagattacggcctcctgccaccacgcccagccatttttgtatttttagtagagactgggtttcaccatgttggccaggccggtgttgaactcctaacctcaggtgatccgcctgcctcggcctcccaaagtgctgggattacaggtgtgagccaccacgcctgaccacatacattcttaataatcgcgcatcttagaaaaataatgaaagtattgaaataaattttctccagcttttttgaattaggtaatcatcaattcacaatcatcctagtttgggtgtctctcggtattagcccaaggtagttctgttcgaatagttcctagcattgcttgtgccaatcttaaatctcctttagtggatctcttacaaaaggaagggtgaattgccaccacccataggcacttgcacctgtgggaaccaatgggcgttgtaacaggaaatacttcagcttgcaatactgatagtaatgtgtggcacccagatcacgctgtttttatctgcagttcctttttagtattgtacaaagtttcttgaagatttttaaatacataagtttaaaagagaattaactttcaatttgcaaattaaaatgagaatggttgccttttcttcattatcaagagatggtgagttgtcctcctgtaagtaaattggttcttttctttctaatattgtgttccttgaaaccttactctagtatgcagggagagtggagggtgcctaagtgtaaaataattaa

SEQ ID NO: 10603 - DNA, 2300 bp, Homo sapien
tttatttcgttgctaaatggtttcctttcaagacgctgagatttttatcctgcttatgttttactgctgtcttcttgactgcaaacagcatctgttaatggtcatgcatttcttttttatatgtaatgaatagacacaactgagcacttgggttatgaaaacttaccccatttttttctgtccagattgccagctgcagaactaaaaaatgctctttagtgaaggtggacctactcaaaaaaattctcttatggctttagtcttacctaacctttagatttatttaatatgattttggacagtcgctatactcctgtaaaaatcaagttccctcaaaaccaagttttaccaccttgaaatctttttatatatcccttctcaaaacggtactcagccacaccgctcaggaactcgacttgacttgaaacgaagccctgccagccccatttccacaacttctttgcttccaggccttctctgcctaccctaacacccaaactgaaactttaaagggggacatcacaattggaatggagtatgattcttttttttctttttctttttttctttttttgagacggagttttgctctttcacccaggctggagtgaagtgatgcgatctcgactcactgcaacctccgcctccgggttcaagtgattctcctgcctcagcctttctagtagctgggattacaggtgggtgccaccatgcccggctaatttttgtatttttcgtacagacgggatttcaccatgttggccaggcaggtctggaacccttgacctcaggtgatgaatggcgtatgattcttaaaacactagaagaaacatgtatactgtttagaacacaaacacattttgtcagctggagttaaaaagttaacaatcgagggttctctgagaactaaggcctgtatacatctgacaaaacttaggatcaaaatgtgttcctgagacaatttcttcataaaatgctaaattctaaagtccataaacttacttttggcgttaagagtaaggaaagcagttttctgtttccggtgttgatttgatcagcatatccagtttcacaaaaataacacaaatgggtcttagtagcatgatgcactttcacccctggcaggcactatcctttagcgtggatcaagaggagtctctgattatcacatgttaaacctgggtcaaagctcgttatcctttggccacacgttcacatagaatcattaaaacctgtggccctggaaaaaggttatattgaatagctttgctgaaaccttgttaagctaataatagggttcccctaccacagtcttcctactgtcataaaaacctacaaactgaaaatttctaaagctttgtccttgcacctatcaaaatgtgccccgcattgaacgcttagttgggcaaagtatgcacctagtactgtatatagattttttttcccccaacggtatcaaactgacggctgctgaactcaattcaaggagaggcaactcccttgcaagagattttaaaaagaaatggtttaaatccaggaaatttttacaaatcctgggcaaattaatgctatattagttcatggcagaattactaagaaagctgtgcaaggtctagcgagagactggggtcctccccaaaggctctaacatggtggtccctgggaatctcccaagaaaagtaaaggcgtggggagaagcgccatgaactttgaccggagagcagcacaaacaagactgaccgcaccccaggcgggcccgtaggttactaaagttgcaaggtcttccgcgtctgaggagaccccgccctgccctgtcccgcccatcgacaactccgccaatcctcgggttccatcgaccgctcggcttcccaggctccatcaatcaaatacctatatacggccccggccctgtgccccgcgatcagggaaggtcagtagagagcctattggagccgagcttggggcgtggtccggggcagggggcgggcggactgagacggtggggcggggcgtgctcggcgcagtccggtgcgattggccacccctggcaggagccgcacctcggacagcagcagcggcggcggccgcgggagggtccttgtggcgccgggcggcggggtcctgcgtggagagtgggacgcaacgccgagaccgcgagcagaggctgcgcacagccggatccggcactcagcgaccggacccaaggatccgccggggaacaagccacaggagagcgactcaggaacaagtgtgggagaggaagcggcggcggcggcgccgggcccgggggtggtgacagc

SEQ ID NO: 10604 - DNA, 2300 bp, Homo sapien
tcagtttgggtgttagggtaggcagagaaggcctggaagcaaagaagttgtggaaatggggctggcagggcttcgtttcaagtcaagtcgagttcctgagcggtgtggctgagtaccgttttgagaagggatatataaaaagatttcaaggtggtaaaacttggttttgagggaacttgatttttacaggagtatagcgactgtccaaaatcatattaaataaatctaaaggttaggtaagactaaagccataagagaatttttttgagtaggtccaccttcactaaagagcattttttagttctgcagctggcaatctggacagaaaaaaatggggtaagttttcataacccaagtgctcagttgtgtctattcattacatataaaaaagaaatgcatgaccattaacagatgctgtttgcagtcaagaagacagcagtaaaacataagcaggataaaaatctcagcgtcttgaaaggaaaccatttagcaacgaaataaacttaaaaattaattgtatcaatgaactcttgatttctaaaatctttgctttttctgcactatgattactgctactgacaggaacgcaagttactcaatatagttgattgcaagtaatttagatgttctccaacagcacaaagaaagaaaatgacttcatcttttggacaagagacagttctggaatcctagtttaaatatagatggcagacctacggtgcgatctgagaatgattcttatttagaaggggcttcagaagatctcagaactcctggaaagacatcttagcattccattctggaaattctttagttttgttgggagaaaaaatcacttacaaatagagccaagattttaattaaaacaaggtagtaaataaatgtcaaaataagtgggatgagaataacgtttcattttcagaagagtccatagggaacaattcagagataaatttaatcacaaaaggtctgagaatgggaatattcggttccaccctggttttcacatctgttcattttcactactggttgcgtttcctacggagactcgggtggaacataaaagtggggctactttggacaaaccattaaaaaccttacccttttttctcgctacacacaactagaccacattgctcttagctaaagggacaccttaaatctattcgttcagcaaaacttataacaccgtgttccttttctactcagagggaatcgcacaaattaattcttgcagatactcagctctcctgttttttaagcttccacgtgggccttagccaaataacttctggtaggcaaattctccccttcttcagttgagagctcagagcaagctgttggattaagcaaaagcaccttttaaaaaattaatattcaaggcagctgtaccgcggagggcctgggtctcggagtctaaaaaatcagactggacgttactatttttttttaggcaaacgacagctcgtttctcatttgtaaaaccgggggaacatcttaccgaataaaccttacacaaacagaaaggattcctaagggctgggaaaatactattttgctgtccccaggatggaatatcagcatccttgtcttttagctcttaataaagctctaactagtcacaggaggagccaggctgcatgatcacgcacactctggacgtctaggttttccgacctaataagggggcaggtcgcgtcgttccctgcttaaattagagaccacctccacctgccaagggcccttcaaaccctccgcccctaggtcgctaacgatcaccgctttagttctagctccaggcgccgcctggcggctgtctccggaagtcgcctgcgagcctcggggtcctgaccgctgctgggcctgcccgtagatttgcctgactctagcgaacctggctccgcccctcccccactatacgttgaggattttaagacggcgatgaaagggctgaggttgtggcgacgggggcgtccagcggcatctccactcccccaaggatggcggaatcaggccgttgtcgggcagctctcgacccggaagtcgctcgcggcgcgaggcccccgttgccgagcgcgggcgcggggggcggagctcggcggagacggggaaggggtcgccgtggctgccggtcctcgagttgggggctgccgcggacactgctaggcagacggcgagtaccgagcgcgggtggccgcggtgtccgtgggccacgctcagctgcggtcagaggcgacatgagtgccgcggggctgctggccccggccccggcccaggctggagcgccgccggcccccgag

SEQ ID NO: 10605 - DNA, 2300 bp, Homo sapien
aggcagtagaattgcttgaacccaggaggtggaagttgctgtgagtcgagatcatgccactgcactccagtctgggtgacagagccagactctgtctcaaaaaaaccagaaccccccagaaaaccaggggtctccatccttcaggctgcggaccactgggctgctttcccccacctgccgcctgcccccctaccctgccccagcccgtgggagaattgtcttccaccgaactggtccctggtgccaaaaaggttggagaccactgctttaaaacatcacatccactctgtttctggagtaattgcattatttcttcttgacccatcctgccactgtggagactgttggcgggtggactgagtgaaagatgggataagtttattttgccaggggagtttggttcctgctgcacgttttttgccctcaggcagaactgccacagctgatatgttcagggccacatttttttttttttttttgagaccaggtttcgctctgtcacccaggctgtagtacagtggcacaatctcagcttactgcaacctctgccgctcaggttcaagtgagtctcctacctgcctcagcctctcgagtagttgggattacaggcgcctgccaccatgcctggctaatttttatatttttagtagagatggggtttcgccatgttggcaggctggcagggtcacattttaactagacttgagtacttgtcatgtcctttcccttcgtgtatatcaacatttcactgatgaaaacatttgctttgtaacatgctttcagaaagcaattactgcttctaaatgaatgctaacatcactgtctagaaaggtggcacagcctagcaaatctaattgcactttttatctcttgcagaactcttcctccagctggaagtaagtaccacggatcttctgggtttgcaggccctgtctgagactggaatcttgcagtcctgatctggtggcttttccttctatcaccaagtagatagtttggaagccttcaccactgttctgtttgacttaaggacatttggtctcagctcagacatcctgtctggtcatttgttgttgcgcagcctctgcttatcacaggggaataaggaatactcatccctaactgcttattgacttctatcccgtgttagagctgtttggaagtctctgagttataacggcctaatagtttgatattggtccttgaagcagttcaatctctgaattggctcagcagttctgttttacagctgcaactctctgggccagtaaaaaaagacagatttctaatttttcctttcattccatggacacctgagtgctggttctgtgtcagactctgtgctgtgatacagagatgagggcctgaatcttgaatgatgtactgctcccagagtggctagcatgtgtgtgggggttactttttgagaaagtcatggtttttcagagccacattattggaacccagtttccttaaatcagtgtggtgcccatagtcactcagccagaaggatcacgtgatcagcctgaaggtacactcaagtgaggtactcacatccttagcccaccataggcccctatgtcagtcaccacaatggcgagatttgaaaagcggaggcatatacaatttttgtcttagtataatatcaatatatgtatactttggggttcaggcacttactaaatgttgttccattcttttgtcttgctgtatcaaaaataatagtaactttttgaatatacacaatttatctagaatctattttcctttgaagctgtaactttatgagcgattatttactacctttgagaaatgtgttttagtataaaatataggatgtggaagcgaaaaaatatctgggtagcaagtgaggtgtactcaaaaataagcaaaagtcacgtgggtctgattttataccctcgctggaaagcttgttctcagacacactgttactgcaagtgtgtgtgagggggaaactctcacacactttgcagttgaggacagggctagactttgagttggagccctggctcccagggctgtgtactcccagcccgtgtttctcttttgctcagactgaacaagtggaacgaaattacattaaagaaaagaaggcagcagtgaaagaatttgaagacaagaaggttgagctgaaagagaacctgattgctgagctagaagaaaagaagaaaatgattgaaaatgaaaagctgacaatggaactgactggaggtaggaaagccctatggggtgggatcttgggggccctgagcgggggggtgtgaagggctgttccagtt

SEQ ID NO: 10606 - DNA, 2300 bp, Homo sapien
tcataggaaaaaaatatttaatactgcccatttctcttaagagcaacatgcagaagcctttttttttttttttttttcaaattttctgtggcacatgtatgacatgctctaagatcctgcacactgcttggtagaattccctgaagctgccctgcctgttctgctgattgtgtgcataatcacaaattaacttcctcccatgatcagacttgacctcatctacccgttctgcacaaaacattatgcacccctactgtgccagactattgctaggtgttggggtggaattcagacatccaaaggggtaggtaatgacctgtacaccgtggcacttggtctacttgaggtttgtatagatgctctggttacttggaggatggaatgagtttctgcctttgaaacctgttacagaagggagagggtattaaactgactttcaacgggtattatgtaggagtttgctgggcagaaaagaggaagctagacagaggagagccatgcaaaggcttgaaggcgtaaagtctggtgcccttgggtaacaggatagctaaaggcttgcacacggtgtaagcgtgaatgaagaagaagggaggaagaccagaaatgaggcctggcttatatcctgtggagagtggtgagccattgaaatatttagtaagaagatggctgggtgtggtgactcagcctgtaatcccagcactttgagaggctgaggagggcggatcacttgaggtcaggagtttgagaccagcctggtcaatatggtgaaaccctgattctactaaaaatacaaaaaattagccgggtgtggtggcgcatgctgtagtcccagctacttgggaggctgaggcatgagactcgtttgaaccggggaggcagaggttgcagtgaatgaagatcgtgccactgcactccagcctgggtgagagagtgaggccctgtcttgaaaaaataagaaatatttagtaacaagagtgatacacaaaacgatctgatttgtgtctcaggaagatcactttgagggaggggaggatggatgggacatgggaaagaccactgaaggccgtggaggtagccagtgaaaggatgaagggatggagtggaggcaggaccaacattagttggtgaacctcatgcctggatgaaggaagacaagtcacagatgcagatttgttctcgcatggaaggagggatagattggatgtccctgagatacaggaaaagaagcaaccttgggagaggaaacgaggagaactgagtttttgtggggcatggagaatgtgtggtgtcaggtatctattgccattcagagggatgtgtggagctggaagtggtgattgcagattggttgggatacagtctgaaaggaactgactggaccccaaagatgatcagtattcagggagcagacaagcgaaccccgaggaggcaggttcacctccttgtgcgccacctcttgggaggagctatttgaaggcgtggggagtcagcagcagtgtgagaccacagagaggagtgaagaagaagggaaagaggcttttattgtgagccctcattgtgtcatcttgatagtcaagtagctacaaaaggttatagagaaaaaaaatccgagtctgtaaatgaaaacttcgtataaaaatgttggcactgaggccagtggcctctaaaagagcctttcataccaatgggcttcagcacacccaccctctttgggagctgcagaaattagtcagctgagatgaccttcaggttccttcctatcccgagagcctgtgactctgggcttcttaatttgagggagaggaggaatatcccctaggttttgagggtgctggagagatgcccacagtggctgtaatgcttgacggtagggctgcatttctgagaggggtgtgcacttagggcagctggtctgaatcttacaagtataaacgctttctaaaatctaatggggtgtctggctacgaccatgtgtagaacaaacacccccagtaaaacagttctgattgggtggctggggggcagatattcttatactatagaaattcttactgacttcaagtgggagttggatagatttacccattccattcttgccacagattctatggaggtgaaacctatcatgaccagaaagttgcggaggcgaccaaatgatcccgtccccatcccagacaagaggaggaaacctgctccagatatccatttacatcaagccttaaccgcctttcttttttaagactgtggaatcctatgtttatccgtttgctagggtacacatggccgttgtcctacagaaa

SEQ ID NO: 10607 - DNA, 2300 bp, Homo sapien
cccacctcatctggctacgatgggattttaaaaaggcaatgttttgcatatgggagctctatcaacattttagggattaggagcaggcacacaactggaagatgttgactgatcttgtgggggtaggatcccacctacctctctcctgcaagtgactcagttcataccctaaatgtcatgactaaggttagttttaaagatgccagtctgctacctataagaagccagctctagattgcatttacaatgataccaacttctgggtgggaaacgggggtctagcccaatcagggaatgggggatttggggcgcaaggtaagagggagaggaagggaaggggttagcctagtctccactttgctccatctccaaccttcccaggcctgacccccacctctgggccctctcccccggcaacccacataagaagccagcaaatgcacctctcgttgttgaccagaaggggtcactgcagagcaagtagcgctctcaggcactcaaataagcggacgcaggcgtgtcgaacacacacacttcaaacgtagataccctttggggcgggtactcatttactccaaggttctttcttctcctgccccatcttatcctctctgttggcctcttcatcttcacctcctagttacctcctgttccccttcagagaatttctggagttcccattgttctcccgacccccccgccctaccccgccctcattgggtccccattgctatctgctttagcaaagagcaggagtttattctcgctgtgactgggactcagcaccaggtgcttggaggcatttaagactgagcgaggcctccttccaggaatttacagcctggaaagtggaagcggggttggggggagggggagggcgttaggtgggagatgggggagtaacaactctgctaagattaaaaggcttccaggaaggcaagggctgaggggtcccgccacgatctcttttttttataatgaaaaccctgggggaaaacaagagtcattctaaccagatcttctgtgtctggggttgatttgggattctaaacctccacttgcttgggattacgattgaactgcgaggcggtaaggagatggggaggagagaccgaaaagtaactatccccctgctaatcctcgagattttcctctccaaccctcccactaagcgctttcttttccaaaacgtactcctttcccgagactagcggcattaggaaaagtggctgcaggcggattccccaggagtggatgggggtggggtggggtgagatgggaactctttcctctggacggggttggcggcggggacgctgggcaggccggctgtgagacacaaaagagatacccttgacagctccgcatgcacagatgtaacgctgcgccccttggcgggcgggggccctgctcggcagatggcgagaagccgaattggtgagggattgtctatcaaatggcactttctgggtggtggagacctcgctaacccccggcgcaaagaggaacgcagggcaccctctgtaccggcctaggccgtgtctcccaaaagtgagggtctgggggaggccggctggggtggatagattaagttttttacgagcccccccaaccccccccccccccccacgcagaagatcagctacaagacttgcgaaggggctggaaagaaaggtggcctggcccaaagggggcacccaggaaagggctgaggaaggccagcgatgatgggagaggagaggggcctgggaagcaggatctcctgcctggcgcagattggggtgccaggatggcttctcagagggatcagcgctgcaactcggtcgccgcggggccctggtgacaggcgcacgccccgccctttctcctcccaagacctgcgggcttttgttatgcagatggcggcaggaggctgagcctgaggaggagggggttggtggggaggaggagagacggagaggggggaggaaagtgcagctcgcgcgaccagcctcctcttccaacgtcacattgtgcgagagacaaaacccgggcgcgccggagctcacacgcgcacgcacacacatccgaccccgtcgcctcttctctcctggtgctgcccagaaagccagccctcccttcccttcttggggcgcagaggctcagccagctcagagcgcagcctggagccgacccagaagggcgaagaaagcccagcggacgagcctcctttctctgctgcctgcccgggctggggcgtcccatcccccgccctgaactccgatctctcccaccccacccctctctgggtttcacccgga

SEQ ID NO: 10608 - DNA, 2300 bp, Homo sapien
cggttaagcacagatccgggattcagaacaacccaggttcccacccaggctctgccactccatatctgtgtgcaagggtcaaacctctgtgcctctgttttttcacctgcaaaatgggggtgatgataatagtgacgtttaactatcgagtcaggatttaactcagtaatgtctgaaatgtactaactctaaaagcagacgcacaggaggcaatgggcgacagtgattgtttttctccgtattattatttttagcaaactgcctcatgcactcactgtttaatatcaaaacaatttctcaacctatgactcactgaattccttaatatcctcagtttaccctcatctcgtgaagaaggcagggctgagacccgaaagcccacacagggaaaacgacatgcctaaaattttctgcctgttgcggacagatcaaagattagaacccaagccgaagaggcctccaagccaaaggaggatttgtaaattcattcttccagctgcatgggaagagcaggaaagtctagatttggggctttgagtttcagaccagacctcctgcctgagtgtaacatctttcaataattatcagtattaacagtcataataataatagaagctactattcatgaacacttctatggtagttttctcatctgtaaaatgggataatactggtactcttacctcacaggattgctggtgagggttaaatgaattcatatttataaagcccatagagcagggcctggcatatagcaaacattatgtaattgataactcaaaattgaaaatacaaggagaaagagaattacctcatgtattcttcatggtacatctgtgagttggctactgttatgtccgtttataaggaggaaaactaacaacctggaggtgcctgggaataatgttactgcctataaagatgctttgattgaccaaacattaatcggatttctgaatcttctcctaagcccatcagtgaggttccttataaaaattcagttttgggccaggcgaggtggctcacgtctgtaatcccagcactttgggaggtggaggcaggtggatcatgaggtcaggagttcaagaccagcctggccaagatggtgaaatccaactctactaaaaaatacaaaaattagccgggcacgatggcgggtgcctataatcccagctactcgggagtctgaggcagaagaatcgcttgaacctggaaggcggaggttgcagtgagcggagatggcgcaactgcgctctagcctgggggacagagtgagactctgtctcaaaaaaaaaaaagaaaagaaagaaagaaaaattcagttttggcatgaactctgctaagtctgtttagtagcaaccacccatcttcgatttctgatcaccctcgatatctgattagtttcctcatcctccgcggtcccccaggtgatgtctgagcaccctggcctgtcttcagcaagaatcctcttaggttagctgagcccgaatccctctgactcctggacttccctcctagtaaatttccattcgctgaccccccacctgcttcttggctacaaattcacacttacccatgacctactgggaatcaagtctaatctttctccctcactgcaaaatcccattgcaggggtccctacatctatggagaaagtttccctgcccagtaaagtcttgcttgtcatactttaacaagcgtcatatgaatatatatatacacattaaaaaaattttttttttcctttaccaatctccccagagggcattgaggctctaggagcttggccatcttgtaagtggggattgcaacccagggccatccttcaaatccactgggctcctgtctctctcttccctttctgcaggtccccaggggaaaggcaggatacgacacgctctagggaaggtatttccagagggtgacctgagccctcagccaggctcggggttattaatagccaggccttagtgccccgctcggggagggcggctccagctcctggagcaagaggagggcggagctgagcggagtggccaggggaggagagagtgtccggagaggccggctgaacttggacgcggcccctcccagctccccccacagcccagctgttccctccgcggattctccggggctggttcatcacctccgaatattcctgtgacaggagacgcttgcaaaacccgcctccagcctccagcagcaaataaatagaaggcttgcagcccagaaggagccagaagaagtttctaggcgcgcgtgccctgggtttattaagctcctggctccgctctaga

SEQ ID NO: 10609 - DNA, 2300 bp, Homo sapien
atctccacagacataccccaaaataatgcttcaccaggtttctagttattccttaatgcagccaagttgacctctgtggtgttaatatgtactggttttcgtccatggttcctggctcataactcccacagcccttgttacaggctgttttaagaatggtgtgtgtcggcctcgtgggtagcctcgtgggtgggcctctgactttctcctgccctcttttcactctaatgttcccccacctttctgactgtggatcttaagaccctcccattagagggtcccaccctatatcctaggggaaggaatggtgatatcatgaagcttccagaaaacccaagagggacagggtttggggagcttccagatagttgaacatgtgaaaagaaaatatcttgggcccccccaaaaccactaagctaaagggaaaagtcaagctgggaactgcttacagcaaacctgcctctcgttctattcaaagtcacccttctgctcactgaaataaatatatatctgatggcctcctttggagaggctcatcagaaacctaaaagaatgcaaccatttgtctcttatctacctatgatctgaaagcccccttcccacttcgagttgttccacctttccagaaggaagcaatgttcatcttacaacatatgttgattgatgtttcatgtctccctaaaatgtataaaccaaactgtgctctgaccaccttggacacatgttgtcaggacctcctgaggctgtgtcacaggcgcgagtcctcaaccttggcaaaataaactttctaaattaactgacacctgtctgaaagtttcggggttcacaaacacatggaggctcccagagggtggtgcccagagggcacgaaagctctgcaccactacccctacctcgccctatacagctcttcatctgaatcctttgcaatatcctttataataaattggtaaatgcaagtaggtgtttccctgagttttgtgagccacgccagcagactaatcaaatccaaagtgggggttgaagcccgtctgccagaagttccaaacttgcaactggtgtgtgtgtgtagaaaggcagtcttggggactgagccctcaacctttgggatatgatactatctccaggtagatggtgtcagaactgaattagaggacacccagctggtgtccgctgcttggtatgtggggaaaccgccccccacatttggtcacagaagccttctgtgttgatgatggttgtagtgtgagagtagaggaaaaacgcagtttgaggagagttttcccctacacatcacctaaaattaaccatcacagtcacattttgaagtactgtgggttacgatgtcaagctatacatttagggggagaaaacaatttaacccctaacagatgctaaaatggccacttccaagctgctccaggaagagtgtggggtgtcctgtaacccctaacccagaggaatactatcatggatagataaaagcaaagtatttcgttgcctttatctgctcagcatccgtctcccttttcctgggtacacaccctgacttttctttgaggactcaccccatgatgcccttagcccatatggttcagatagaattggtcccaccgcagatacaagatagggtatgcttgctgggcacggtggctcacgcctgtaatcccagcactttgggaggcctagggggcagatcacttgaggtcaggagatccagaccaatctggccaacttggtgagactctgtctttactaaaaatacaaaaacattagccgggctgatggtgcaggcacatttaatcgcagctactcgggagactgagatgggaggatcacttgaaccctggaggtggaggttgcagtgagccatgatcctgccactgcactcctgcctgggcaacagagcgggactccatctcaaaaaaaaaaaaaaaaaaaaaaaaaaaaaaaaaattgggcatatgacccaggtctagccaatcagcatatttcatcctccagccacagtgattggttccctctgggcacgtgaccaaagctgagccaatgagacttaattctaggagctgataggttggaagcttaggagggctgggtaccatttttcccatgagaaagaagccaatgacctagaggcaaacaggtgagagatgtagagagagactgagcccactggcatggtgatagcccctgaattgagctgtgcctgaaggtaactttaatggtggacttttcagttacaatacagtccctttttggtttaatgccatttcgatgtggggttaagtgatttgtaa

SEQ ID NO: 10610 - DNA, 2300 bp, Homo sapien
tgttctacaaaatcatatgaagacagcttttgtctgttctgctcagggctgaacatttcccatcctgccttgttttctcatcccctcatcccctcatccccagccctatctcccaaacatgattccctttatctgcttcattctgaaagtgtctgccgattgcttaatgctgcccacaaaagaagccggagaaccaaaacttcctgtgaaagggaaggtcagggtcagtctttaggcaatggtgagaaaataatgactttcaggcaccagcatctagagttacttggctaggtattttgcattctgtagagtgtcatcttgcagtagatgccttctaaagagaagatgagctgggcgccatggctcacacctgtaatcccagcagataacttgagttcaggagtttgagaccagcctggccaacatggtgaaaccccgtctctactaaaaatacaaaaattagcctggcctgcctggtggcatgcccctgtaatcccagctactcagaaggctgatgcaggagaatcgcttgaacccgggaggcggaggttgcagtgagccgagatcacgccactgcactccagcctgggcaacacagcaagactctgcctcaaaaaaaaagaaaaagaaaaagaaagaaagaaagagagaagatgcagccataatgatatcataatccccagcagctcaaggttgttggataaaacaggaatcagatcgatccagtgtgaaacaatgccaaggataaggcattcaaatccaaacatacgaaataaatctgctgcaggctgggaacctaccccgtagggttattggaaggattaaatgaattaatgtatgcgaagtgcttagtacagtacctagcacagagcaagtgatcaataaatatcagttagtactaacatctgctgtgaaatgaacccagcacagtgagaatgcctgattcttcctcgggaagtgatgtcagggaataataatagtaccacttagctaggactccccatgggctcagccttcatatgcatcatccacttcaattcttaacaacctgtggcaaagatagtatccccattttaaagacatagaagccaaactcagcaaagttaggcatctaagtggttaaaagcttgctctttagactcaaacagttctggctttgaatttcagctgcagcacatgcgtgactttaaacttgtcatttaatgtctctgtgcttcagttgcttaggctgtacaatggggtaataaaacaccttctttaaagaggtgctgtatggattgagtcagtatgtgacacttagaacagtgtctagcacatcctaagcactcaataaatgtcatatgcatacatgcccacacacacaaatacgtatatacacacatatatacatgtctacatatgtatattcatatatgtgtatatgtatgtgtgtgcatatatctatatctatatacagctgtcccttttctttgctcccacaataccctatgatactttcccagcacatcataaatcatcctgccttataacaatgtttcttatcttttgctccccatcccaaacatacacactatagatcgtgaagtcctgaaggtctcattttttttaatttcatttttactttattatattttattttagcagagtcaataaatctttgctaaataaatggaataacaatatttcattttatgaaatgaagggctttgaaggatgagcaggagtttgtcaggtggaaaaacgggagaaataggcatctcaggttaagaattgcaggactacaggccacccaccccaaggcacaaaaaattactagtgggttagcagcagtacagagcagagtttgaaaagaaggattcgcttgtagtcaggcagagagaaagggtatggtcctcaggcctaaaaacagaaaccaatttgtttagagaatgcagctccggtggcagccggctgctctgagccggcgtcccagcaacctgggagagttcacgacccccatgaccccgcccccacgaattccagccaatgaggaagccctcctcggcgtcccgttgccaagcaactgggttccccccacccccacccggcccaagggttagcagttgcctactttccccgcagtgcgataaacccctcgttggggccgccttagttctcggccgctctcggaggatggcgatctgggagcccctccatgggacccctctcacactttgtcactggaattttatttattttttagttcatattttattttgcttatagaagagaaagatatcccttccgaagaggaggaagct

SEQ ID NO: 10611 - DNA, 2300 bp, Homo sapien
aaggatcgcttgaacccgggaggtggaggttgcagtgagccgagattgtgccactgcactccagcctgggtgacagagcaagactccgtctcaaaaaaaaaaaaaaaaaaaaaagatacaaacttgtccatagtaaactgtctccagtgggggagggaatggggaagaggggattagaaaaggaagtttcaattcaaagcatgtgcaaacctcatctcccagggcataccaagcagcatcattaatatctgacctgtcactaccatctggagtgccagctcatttcagaccaatgagggaaaaagcctttgcaggcagttttctaagtggcactgggaaaggagtgaattggctgcttcattaataaagcaggatagaatgtgggcaccagtgccagccagacagtctgctgctgcctggagaatttggctgcagcattgtttccagactctcggcaaaaaaagtcaagaccggatatatggggagaggaaggaagggaggaaattggctggttggtcggaaggaaccggatgcgacggcttccgggcctccaggatgggaaaaaaaggttaatgattcatccacaccattcattcatgcatgcattcatttcatgatacttattaagcatctaccacgtgccacattttcttctagatgctgaagatacaggaaccaacaaatattcctgcccttatggagcttatattctaatgagagggacacagactgtaaacatacaaataattaaaatactatatcagatggagagaagtaatttggtcaaaaggtagcagggaaggaagaacagagcttgcgcggggtgggtggatgggggtcctgattttaaacagtaatcacagaaggcctcatgaagtgacatttgagtaaagattttgtaaagataccgtgctggtcactgttctaagcactttacaattatttatgtcatgaatgctcccaacaaccccaagaaacatggctatgattattctggttttacaaagagactgaggttcagagatgcagtgacttcagagatcacacagctagaaagtgggagaattgggatttgaatacagacttgtctgaacttcagcggctgcacgctttcatatcggtgcagacgctgtccacaaaccgggtttgggaaagggcaagttacgggtgcaaatggagccttgcaggtgcccacgaatcgaatatggtgccaccacccgtgggcaagtgtgggcggacttgatgggggacgggtggctagcgattttcacagcgctgaatcagggctctgcgtctgtggccggggagttccgtggcccagctgcaggcgaggtgagccggtgggggagggagcgcaactgcaagggttgtcccgggacagtgccggtacgaacctcaccccgccgccacccccgggccagctgctgcagtcaataaggcgagggcctagcaggcgctcgtcgccctcctggtggggttcgctcgggtgttcctaccagggttgaagagggctagggagctgagctccggaagggcggactagaggccccagcggccactcctagagaggcgggcagctcgggaggtctgagcgcagagggcgggcggagccgcacgttgcgtggaatcccctagttcattcccgggagagccccgggcgcaggacagagcggtggaggggcgcctgggagctctgggggacaccaagagaagagaggttagggccagtgcgcagcaaacggggaggaactacgacgcgctgggtagaaagagtaagagaggcgcacccactttgctggtgaggggggcacacggggagcctaagaaaggcctaaagaggtagtgggtgtgagccagcctcgggcgcgttaaaaagggggcgccggagggaggcaaggagaggaagttgggtgtaggaagaagcgagaggaaactgttgcctggacagagcgtgccgtgccaaagcgcggaaacgggatcaaggagggggcatcaggaatcgcctggggaccccccggagagtggcggaagcggtgcccttgggcgcagcaaagagagaagggagcacaggctgagatagagacagtcctgggcgctggagagcaggagcccccggagcggcagggaaaggaacgtagagcctgcatgctcggggtatgagcttactgcgctcgctagggtggcgcgcactggggctctagaaaagagggttgagaagccccgggcaagtgcctaggaaggtcagaggagtcagcaaagtccacggaagaacttccccgggttggagaggaaacgcaccc

SEQ ID NO: 10612 - DNA, 2300 bp, Homo sapien
gtctcatgtaaccaagtcagggccactattagaaaagcagctcaaagaagatatcctgggtcatccacagtatcttagcttatttaattcagcaagcacattcaacatttctgattatactgaatacattcaaattctcagtcatcagcttcaggaagaccctcctggctcccatcccttttcctggctcccatcccttttcctggcctggcttaagtcccttctgggctcccacaggatcccttacctagctatattattgcttttctgtgggtcggtgccagcctgtactgtattaattcctttggggctggaaccatatcttatttttttaaattaaaaagtagtacatcctcacaatagaaaacttttcaaatacagaactatataaatgaaaagtgaaagtcccttttctgtctgctcctatttgcaatctccctcctctccccacagaagaccactattaacaatgtgttgtatacccttccagaactttccatttgctagcctaatagtgctaataaaagtgttaacagttattgagtgtttactaagagtcaagtgctatgctcagcatttttatgcacgttcccaattaattcacaaaacaagcctatgaagtaggtgttatttttgttcccatttcacaaaagaagagactaaggtgacagttactaaatggtaaagccagaatctgaacatggccaggctgaattcagagctcctgcccttgaacttgttctctcacttgcttccggaccttgcaatatcatagacacttccccatagtgacctaaaaatggtttctccctttttaaaagttgcttggtattctacaaaatgaatgtattccattcattttgccattctcctactgaacaacttttaggattttgtagtttttcatttccttatttcaccaagtgtaagattccattattgtaaaaagcatccagtttcagaaattaaaatatatgggggcatggggggtgacaagtgcatcttagaatatatttttgcatgtaaatattttgtagataatgcttgtaaataattttcatgtgtgtatttctgcacaagtttcctaggagtaaaattgtgtgtcaaaatgaaggtgcatttttaaattttgatgcatactgctgaattccccccaggaaaccttatcttagtcatcttgtgttcctcatttccttagcacaatgtctggtacttttttaggtactaaataaatgttcagtgggtgaaatgcatgacctgacccggcaaatgcaaagtattttgagatattcacacaccaaaaaacccacaaaatatgacaatgactgacaatgagaagatgagaatattttactaccgtatttgtatgcacttcttgttgaagcactgaccagagtaaatgacaaacgctaatgcatcttatgcagaaggatgtttccgaagtgattacaagatatcttgcaaaattacctatcaaaagattgcacactcaataaaaatacacgaataactccagcattttacaacccccaacctactagacataagaaatttccagagatcttatggtctgccattttttcaaatacctgcaagactgcctgcacccccgaccctaatctgtagaaatcatgattctgcaggtctgcagtgggggatgcatttaacaagcgctccaggttaacctaatgcactgtaaagcgtgagaacacgtgcattaaaagggctttaagaagtggagtttctgaatcagatttgcattttagaaagatccctctggctgcagagtgtagaatcaactataagtgagcaaagatagctaaatggcattattcagcccagcgcatgaacggctcagattgcccgcgcgctggggtgccccctgccggccctcggcagcgcctcgtcctgggcctggccctgggcggccggctgctgactgcgactgcgcgctccgaggcctgcagagacggcccggggcacctgttaccgcaccgctcaagaccggaagcggaaatggaatcgagatagcctcgcgcgtttagctggccgccgccacctccacgccctaggccgggccgacttacggagtcgccggaagcggaagtcgctgaggggtggtgaagcggttgggaaagtgtcggtttatcttcgcgccccttgcgttcttgccgcggcttgcctgggcaggtaaagcgcgattgcgagagctcggcaaccctgccgactcagccggaaccggctcccggcccgaggggcgtggtgtcctggtgctccgactccttccgcaggctccttgg

SEQ ID NO: 10613 - DNA, 2300 bp, Homo sapien
tgataacaagaggttcccagtgtggacaccgctgcctcgtcttgcaaagcctttctgcactactcttccttgtccttcacgcctgcctcagtctaagccctgttcaatttacatttcatgacaaactgtatcaccatctcttcttagtaagctacatgctctggcccccacattttagaatctagttttaatcattcaattgcttttagaaatatcagtactcctggatcaaaatttgggatatctaggtaacacacatttctcctccgggaaattattacatgcagaaaagaagtgtgtgtcctcctggatcttgaagaacagccagttctgttgtgattctgttttctgttccatctaacctggattgcctgcccagtccgcctagctctgggatgcatggcacagccgtaattcttgggaatccaggaattcagcttggtccaagctacctcttaagaggcattgtttacgaggtgcttaaagtaaccatgctgctactgaacactccaccctgaagtggagggcatgtgtgctgagacgaggaatgcacgtgtacacatgcaggtgtccctacagtggtccctgccgggctgccaggacagggtctcagtgcttgttaccctacagggtacccaacagggcttgcctttctcaggtcacctcctgtgctgggagtgcccctgcagctgggtagccatcctggtataggcccagaagaggccagtggtaaggacagcacgcctcagctggcagggcccaccatctttccagcactgagttggcaacagtctcaaataggtcacaggtgaagagtttcaaggacatgtagcttctgccttagaagcacttagttgacactgcttcccttagctctaactttacaaaggttggtgggtaagatgactttcagtgccctcctaagctagtgaggtttgtttttttttttttttttttttgagacggagtcttgctctgttgcccaggctggagtgctgtggtgccatcttggctcactgcaagctccgcctcccgagttcacgccattctcctgcctcagcctcccgagtagctgggactacaggcccccgccaccacgcccggcaaattttttgtatttttagtaaagatggggtttcaccatgttagccaagatggtctcgatctcctagcctcgtgatccacccgcctcggcctcccaaagtgccgggattacaggcgtgaaccaccgtgcctggccaggttttgttttttctagaaaagggaggcatcactagccatcttctctgatggagactgctgctgggaatagacaagctgagagtggcccagggggctgggaatatgagaatgtcaggacccctctgtccaaggtagcactaagctctaatgtaaactgtggttacagttgtcactactaaagggttaacatttattttgccccaaactaatcttaagtgcttttcgtgtattcttattcaagcctcacaacaaccatgtgaagtaggtgcaattattacccccattttagggatggggaaactgaggcacagagcagtagggagaacacttaaaatctactgtcttagagattttcaagaatacattgttactaatagtcaccgtgttgtacagtggatctcttgaacgtattcctcctgtctaactgaaatgttgtattctttgaccagcatctccctacccccaccactcctagccgctggcaaccaccactctactctctacttctgtgagttcgactttcttggattccacataagtgacatcacatgggatttgtctttctgtgcctggctcatttcacttaatgtcctccaggtttatccatgctgtcacagatgacaagattccttttgtaaggctcagcagcactgcattgtgtatcagtacctcatttctttatccattcatccattgtggacacctacgttgattccacgtcttggctattatgaatagagctgcagtgaacgtgggagtacagatatctcgacatgctgatttcatttccttggagtatctaccctgtagtgggattgctagaccatgtggtaattttagttataactttttaggaaccttcatgccattttccataatggttgtactaatttacatgcccatcagcagtgcactaaaagtagcttttaagtgttctcaccacaaaaacatggtaagcatgttctgcgtgtgttgatgagcttgatttagccattccacaatgtgtccatatttcaaaacaacatattgtacatggtaaatatacataattttatctg

SEQ ID NO: 10614 - DNA, 2300 bp, Homo sapien
attaagatagtcctttgggaaaacacttttcttgttttaatttttagttttagttttttagaagcggggtcttgccatattgcccgggctggtcttgaactcctgggctcaagcaattctccttccttagccttcctaatagctaggactacaggcatgcatcactgtgcccggctttttcaaatatttttgaagagccttctttaggatccactgcaaaagtccaatgtgtccaacgttggtgtcagagcatgttagcagcaattttgttgagacaattagcacaaaacaaatcattctgtgattcatgcttggttcatttttggaatcagcatgtaattgcattgtaatttaaatactaaaaatatctagcataaaataagtttatattccaagataaagcctcaatcaaacaaaatatgttttcaagtaatattcactgtaatttttttcctccattttaagtagggccttttccaagcacaaattatgctgagataatagggaccctagtacttttagagctgatcaagggtgggaaagaattgactcagaaggccacatttcagttctctctgtgtttgtaggtcttactacatcttcagagagggagtttggcccctgggtctgctgaaatcttcatttgaaatatccaggccaggagtgggtggaggattgggttgggttgtacaaaaaggccgcagtgttttcaactgcttggttactaattatcaacctttgaggcctgggacgttttctgagcccgctttactttgtctgccctgctcagtttcctgactctatcaggcctgatccctacacctctcggtcgtcttattgtcatgactgagaaccatccaccttctgagcatctgcatttgcatcaggtgtcagagactcttggaaagccacatgggggcagaggtgaccaaacacgaggcccaggagtgggacagacatggcagttaacagtgatcagtacagggtttctccaaactgcttccttgcactgagggcctttgtgggtccctgacttctgggtcttagtaggctgacctcctagttgatgacttccttctgtgccttctaggctctgggaaatagtaggtcagtaggatattatatggggcttatgacatcaaactggtcttttttttttttttttttttttgagacggagtcttgctctgtcacttaggctggagtgcagtggtccgatcttggctcactgcaacctccgcctccccagttcaagcaattctcctgcctcagcctcctgagtagctgggactacaggcacacgccaacacgcccggctaatttttgtatttttagtagagacggggtttcaccatgttggccaggctggcctcgatctcctgacctcgtgatctacctgcctcggcctcccaaagtgctgggattacaggtgtgcgccactgcgcctggcctatcaaactggtctttattggaatcccagctctaccactcattagctcaggcaagtcacctaactcctgtctgtccccattttcttgcctgtacagtgagggtcatgcttgttcatagctcaggagctgctgtgatgatttaatgagataatgagagatggcagatgaagaacttagcacaggcctggcacacagtaggtgctcagtaaatgaaagcctgcactgaggaaggtgggttgtcttttgttgccatctttgctctcttccctgtctttgctaccaaaatcaaatgcaggcaaagtccaaagaactccaggtctaatctcttgataatcagtggtgaggctgggtcaaggagggggttgctcaggtaagaaggaaaatgcccctctggggttgtggcctcgcagctccctacgttcctcttgtgtcgccagcagccccaacaagcgaggcccacccacgtacaacgagcacatcaccaagcgcgtggcctccagcccagcgccgcccgaaggccccagccacccgcgagagccaagcacaccccaccgctaccgcgaggggcggaccgagctgcgcagggacaagtctcctggccgccccctggagcgagagaagtcccccggccggatgctcagcacgcggagagagcggtcccccgggaggctgtttgaagacagcagcaggggccggctgcctgcgggagccgtgaggaccccgctgtcccaggtgaacaaggtgaggcagcattccgaggcctgtgtgtctgttgcggaggccaggagtgacttggggaactgaggcccccacggggccactgttgtttaaaaaaggaactccatgact

SEQ ID NO: 10615 - DNA, 2300 bp, Homo sapien
atatgattaacacaaacatccacatggatgtgtctctgccctgtgcaggaaagatgaacattcagtacagattctgctctatgtcactagctttcaagacctgcaggttctctcctaagcatgcaattcctgtgagcagtagcaataatagcaggtcatatttgtggagtgattactgtatgctaagaactgtggtaaacacttttatatggattattttatttaaacctcctaatagtccattgaaatagatattgccatgttgaaaactgaggttcagagaggttaagtgacttacccagtgtcacagaactagtaagtggtggagctgggatttgaactgagattccagaacaattgccattaaccactttgcttccatattagtatcatctgcaaatctctctccataaatttcctcagtctttatctgagtttccttatttcaggaaggaaaacttctgtttttgatccttatgaaatacaatttccattaaaacttttttttttgctattaaaaaaggtaccggataattgaaaccagattggatttgagcctgtgttgatggaagtacacatgggatgtgggctgaagtgttcaatctaatttttctttccatcagctaatttttaaagtattaagcaagtagattctgacactaacagggaagatttaaattctcttgagagactggaggtgttaaataattttctggtagtgcacattttacatcttaaatcttcctcactctcccacctcatctcaatgtacctgaagctctgggaatgttcttttgtacttctcaggaacagccagacctctggcttcatctcctctcccctccacatccctttcctgctccaattacttcccagcgccacttggatgttgttgtcatcggggaactttggaaacagccagatttttttggagtctgtaagcagaaaacagactgcttgctgctcatatctggcacccagctttgtccagaaaacgaggagttaaaaagaagtctgggctgtgaagggctgtgacaactgtcctagggggagctctagcgagccctggcgggcagtgactcatgctgctctgtcactgggatcagcactggcccctggcaggcaggcggcagccaggtggggttccagccagagcacgcacgcacggagccgggagcatgcagcctgcactgcgggggatgtgatgctcggctctaactcgcctggctggcccgccacggacgcctcagcttgcaaccatggtaacgtttctggcgggggacacccccgggagcccaccgcgatgggcagcctcctggtgactgatggacgagtgtccacctcccagaccgagagcgcttagtaggtcggaggaagtggagaggatgtaacacgcccccagccgggagtgaagccctgaggaggtaggagccgcatatgtccatccgtgcattcccaccgtcagcgcgcaggggtgctgtagatcaccggtaggaactttatttggctggtgcttcattatgctgattaaactgcagtggatttgatgggcatgattgcgctggggaagatgcataatgaactaaaaaaaaaaaaaagtggttaataagatctcggagtcgacttgtccgggtatgaatgaagtagactgcagtggtatcctaacaggagttccagaacctcacacatcccttttcctggtccttcctcttatcccggttaatccacgaaatgtagaagttccatcttatttcaacgattagtgctaatcattaataatttagacctgtctggaggagggaatccataggtttaggtctcctagcatcctggcactagccagcagctgctctgtaggagccttctggaaacagcaggaaggagcggcttccccacgagttccccaagtgctttcgttggcccaagtgctttcgttggcccaagtgacctgtttgagtttgctcttcagtttaccccaggcgggaaggcagcctgtctgcgggttggtggccatgttggcagagaaggggttaatctcttgttgctgtaggagccgaggttgcgagctagattgaaagcaggcgctgcagtgccatcgccagcgccgaaggagtaagacgatcttctccgcaacagtgttgaatccggctgaaattttttttcctccccgcctcctttcttgtttttctttaaccagctcctccccccttcgttcccaccctcaagtctgacgatgacacctccaattttgatgaaccagagaagaattcgtgggtttcatcctctccgtgccagctgag

SEQ ID NO: 10616 - DNA, 2300 bp, Homo sapien
cctacaagttgttctccacttgcatctgccagtgctccaagggctcagtgatcctggaccagtagtcatgttaatttcttgaattgtaacaggatactgtaaatgtggacactctacctgaggttactgcttctttctatctgctttatttccttcccactgaagggccctggacaagggtaaacatctcatcactttctgggtggcagaatatttccagttcccccacttctttttggcttaaggctgtggctttttcctctgcctgaatgtggccctaagaagcccttcttttcaaactttcctgttgtacttgaccgactagctgtctagaggtttatatccctagcttttaatctttgctgtgaatatcttacctgttaccagctagtatatttcacattgacttctctttccttttttttttttttttttttttttgagatggtgtttcgctcttgttccccaggctggagtgcagtggcacgatcttggctcactgcaacctccacctcccaggttcaagcgattctcttgcctcagcctcccaagtagctgggactacaggcatgcaccatcacatctggctaatttttttgtatttttaatagagatggggttttaccatgttggccaggctggccttgaactcctgacctcaggtgatccacctgcctcgccctcccaaggtgctgggattacaggcatgagccactgtgcctggcctacttcttcttccttttaacttgaagattatctgcccctttttctaatcttaaccgcattaagctggctttgagcatggcaagagttttatagatgaatcttattttatagtacaggatttcaaaatcataattatttcactgagggtggcttttactctccattaattatacttctcactcagaaatggaattctattttggtctcctaaagataaattagtatatagtggaaaggaattataaagttctgctaggaattaaatgatatgattaacacaaacatccacatggatgtgtctctgccctgtgcaggaaagatgaacattcagtacagattctgctctatgtcactagctttcaagacctgcaggttctctcctaagcatgcaattcctgtgagcagtagcaataatagcaggtcatatttgtggagtgattactgtatgctaagaactgtggtaaacacttttatatggattattttatttaaacctcctaatagtccattgaaatagatattgccatgttgaaaactgaggttcagagaggttaagtgacttacccagtgtcacagaactagtaagtggtggagctgggatttgaactgagattccagaacaattgccattaaccactttgcttccatattagtatcatctgcaaatctctctccataaatttcctcagtctttatctgagtttccttatttcaggaaggaaaacttctgtttttgatccttatgaaatacaatttccattaaaacttttttttttgctattaaaaaaggtaccggataattgaaaccagattggatttgagcctgtgttgatggaagtacacatgggatgtgggctgaagtgttcaatctaatttttctttccatcagctaatttttaaagtattaagcaagtagattctgacactaacagggaagatttaaattctcttgagagactggaggtgttaaataattttctggtagtgcacattttacatcttaaatcttcctcactctcccacctcatctcaatgtacctgaagctctgggaatgttcttttgtacttctcaggaacagccagacctctggcttcatctcctctcccctccacatccctttcctgctccaattacttcccagcgccacttggatgttgttgtcatcggggaactttggaaacagccagatttttttggagtctgtaagcagaaaacagactgcttgctgctcatatctggcacccagctttgtccagaaaacgaggagttaaaaagaagtctgggctgtgaagggctgtgacaactgtcctagggggagctctagcgagccctggcgggcagtgactcatgctgctctgtcactgggatcagcactggcccctggcaggcaggcggcagccaggtggggttccagccagagcacgcacgcacggagccgggagcatgcagcctgcactgcgggggatgtgatgctcggctctaactcgcctggctggcccgccacggacgcctcagcttgcaaccatggtaacgtttctggcgggggacacccccgggagcccaccgcgatggg

SEQ ID NO: 10617 - DNA, 2300 bp, Homo sapien
tgtggtcccagctactggaagggctgaggtgggatgatcacttgagcctggagaggtggaagctgcagtaagccgtgattgtgccactgaactccagcttgggtgacggagtgagattctgtctaagaaaaaagaaaaaaaaagaggtgcttgataaatagtagctatccattattggccccgggaacaagaagtaagttatgtttggggaaggaaaaaagaacaaatgtgtattaagcaagcctgtagctctaattatgtgctggtgtgcgtgtgtgtgtgtgtgtgtgtgagagagagaacacatctccagttctgtctactgtagaattaggagagtacaaaaaggactttacatatataaatagaacatacacacacacacatgcgtgcacacatatacacacaatttaatcattatgaaaccacatccatattgttgctacctaggttaagaaatagatcacagcagcaccccaacaccctgaaaggcctccatcccaaccccaggtaactactattctggctgttgctttctttatggttttgtcattactttaaacaatgacaaaaactgcaatgatttgcatcaacctaatacatccctccttaaacaatgttgctttgttttgtcctgttttggaacttataagaatggaatcataatggaatcatatgttattttcttgcttccttcattaggccttgttttgagactcattatgtcattgtggttagttgcagtttattctttttcattgcttgtgaaaacactgcaatatacaattttgtcttttctactgctgatggacatttatatcacttccagttttttgcgaacactattttgtattcttatacacatctcttggtgtacataagtaggagtttctcgccggcgtggtggctcagggcctgtaatctcagcactttgggaggccgaggtgggcagatcactcgaggtcaggagttcaagaccagcctggacaacacggtgaaaccccatctctactaaaaatacaaacaattgggcatggtggcatgcacctgtaatcccagttacttgggaggatgagacaagagaatagcttgaacctgggaggtggaggttgcagtgaggcgagatcgtgccattgcactccagcctgggagacagagcaagactccatctcaaaataaataaataaataggagtttttcttaggtagagaaactacacctagcaatagtcatagaatgcacaaatcttcaatgttagcaaataatgccaaacttttttttcaaatttcaaagagattgtatccatttacacgcctacgggtactgtataagtgtgtgtacttccacatcttcgcaaacactgtcacatccttttgttgttgttgttctcgaatttgagtgttattctttctcactgtgactttatttttcatattttctgattatgaacgaggttgacaactttcacacatttgttggtcatctggatttcctttttggtgaagtgcctgtttaagtatctcgtctataatttattttaaagtgtcctttcagacagtctcaatgactgtcaccaactccttgcagggcagtcagcccggagatagagtaatcaaggtaggttgaagtcaagctcaaaacattcgctgcctcagctgtagcagaggaccactgggcttccccaggtaacaagtacttctaccttagccacatgagagagaaagaagaccaggcagagcagcctggctgccttcctccttgcaggtggccgagagcaggggacagcgccctggcgacctcctcagggatcctagattaacagtcgcgtcctcaaacgcagcatcctgcgtaaccgccaatttcaaacttccaagacctgccctgctgattttgcccttccctttttcccgttggtcgcgagtcaaaggaagatgcaatttgattggctctccccttcactttcctccatgcctttagggacatgggcggggcctggctgagacgcccatgtctatcataggagcggagacgctgattggtccaaacacggctgagacccgcccgcgccgttcctcgggttcaaacgcggcggcgggaggcgcggggcggaacagatcgcagacctgggggttcgcagagcgtgagtctgatcccccagacccaattctaccgcacccggctctgcaaggccaggggagggccgcctccacccatacaagtcccgggtttccctcccgccccggggagggcggcgattccacccccagggctgcgggaggcctggagggtcttccggggct

SEQ ID NO: 10618 - DNA, 2300 bp, Homo sapien
attctggccttcagtctaagggtaacgatgttaaaacttgaatattgtttaggctctgaatttaataagcgataaaaaccatgagaaactatttgacccatttcagcctcttgatgttctgaaatttccatctcactgggatgaaaagaagaaaggcatgatccaagtaaaaaatgggttgtctgtccaagaggaaaaggaagcatagggacgaattctagctttagatgggattgtttctggaaataggagacacgtagcaccaccaacgaggtcaacaccaaggaatgactgcaagtcacccagtaggctctccaaaccttcctttaatcattgaggaaatgttccttccatatccacccaatccatcttggtcacaaaggaccatttatcttcctcaagactgcttctatgtgaagaaaataaagaataatgattcacgtgatccctggcgtcggcctggctagatctcaatcctgactctaccagttgtaatgacctgggcagacgatgccatctctcaggctttaatttccttctctgttaaaatgacaagcggcagtactgattttataaagttcttgtgaggattatctaaaataatgactatcaagcacttaatacaggacatggcacacactgagtgccgaataaacggtagttattattagggaggttctttgcttcgtattcccatctgtgagcagttttttccgttatttctccgcagaaaccctttctctccgggctgctgatctgcgaagcatctggtccttcatatccctgagtcatcagcatgaagatgcctggtttccgaagtcctccctcctcctactgctctctagggctccctctcctgactgcttagttctcctgggggcccagacctaaatttcgtgagggtatgtctttctcggggccgggtcaccagtcttggaggaatgtcctcagtcccctttgccccagacaccaccagagatgcggcaacagaactctgaggcgcgccccggcttccaagtagctgggggcggggccgcgcctggaggtgagcagcaggcggtgggcggggccgcgctccgtccgaggtgagagcgaggccgggtgcgaggccacaccccgaggtacgagagctgagggcgtggccacaccccagctctgagcgaggctgagggcggaaccgcaccccgaagtgggtgcaaggctgggggcgtggccgcgcggtgaggcagccaggaccgtgagggatgcgccagccgcctccgcaggcggcgcgcgcagccgcccgcagggcgtgaggcagagcaggggttaaggccgccggcgccacctgggcgtcgctgaggagacccgcgagccggcgaatcccgcgcgggcggggcgaacaggtgcccgcgcgcgtcaggcgccggcaaggggcggggcgaggggacgcggccggaagcccggggcggggcgctgccggcccggtgagccgggaggagccggggaaggcaggaaggagctcgccgggttgcgcggcgcgcgatgtggagccgccgcctcggcccctgcagcagcagcagccgccgtcgccgccgctgctgctggggctgccgcggagccgggggtcatggagtgcggctgcagagagcggccgccggcaacagcagcagcagcaggaagcgtcgcggcgacagcggagcgcagcccgccccgtgaggcgctgcccggccggcggcggcagcagcagcagcagcggcagcggcaacagggcggctgagaacccggcggcggcgttcctcctcgcttcctcccctcccgcttcgccgaccctcagtctctgttcctgagtcctcccttccccagccttcccgttcccaccacctactccgccactacccccaccccctcctcccgcgcgcgcctgagcagctgagcccgggggcgggggagggggcgcgtgccgccggcgcgggggaggggcgggccggcgcgcgccgcgcccagggctcgcggggacccgggggcgcgtgccgcggcgcgaggcgaggcgcgggacgcggggcggcgcggcagggcccctcccccctgcagcctggcgcgcgcgggccgggccgcaccgctgcgggctccgcgcgcgcgggccatgtccgctttctgcctgggcttggtcggccgcgcttcagcacccgccgagccggacagcgcctgctgcatggagctgcccgccgcggccggggacgcagtccggagtcccgccgccgccgccgccctcatcttccccgggggctccggggagctagaactggcgttagaggagg

SEQ ID NO: 10619 - DNA, 2300 bp, Homo sapien
cttcgtttgaagtgggtaataagaatgacgaccctgagcggaaggtggtggagacggaagatgcctacaaattcgccgggcagatgggcatccagttgttcgagaccagcgccaaggagaatgtcaacgtggaagaggtgaggccctgggccactgtggctctgccacacacccgtggccgccttctccatgctgctggcctgcttgaggcatctaaatgaccaacagaaaatgtcatagtaactgccatttattgagtgcctactatgtgccaggccctttaacgatcttagttcatagttcaacagtcctctgaggtaggtacaattatacccacatttcaaatagggaaactgaggctccaagtgttgaagtaactcaaggaccaccacctggctagtaagagactgagtaaacctctgtcccacaccaaagccaagcacagtttccactccagtcctctgcctcattggccgccttgtgctgtgtggagcccagaggcctgtggaagtcgaggatcccactgcttcagggcacaggggccacacagcagcgggcacaggctcctttgtaagtcaggctggtgtcctgatgctggcccatccacctgggcctgtgggcaaggctggtatgaccttgggcggtgacttcacctctctgggccccacatgccatgaagtggcgtggagcaggcagaccccgggtcacctatgtccgtgaacagcaggggcactttcatctgtcatgtcataagattccagctgggccgggcgcgccggctcacgcctgtaatctcagtgctttgggaggccgaggcgggcggatcacgaggtcaggagatcgagaccatcctggctaacatggtggaaccctgtctctactaaaaatacaaaaaaattagccgggcgtggtggtgggcgcctgtagtcccagctactcgggaggctgaggcaggagaatggtgtgaaccagggaggcagagtttgcagtgagctgagatcacgccactgcactccagcctgggcgacagagcgagactccatctcacaaaaaaaaaaaaaaaaaaaagattccagctgaaggaaaggggttggtctctctaaaagaaggactggaaaacccctgtgagattgacttccccaagtccacacagctcatgggcctctgatggtgttccttttttcagacttatttatttgttgagtcagggtctaactctgtcatccaggctggagtgcagtggtgtgttcacagcccactgtagtctcgatctcctgggctcaagtaatcctcccaccttagcttctcaagtagctgggactacaggtgtgcaccaccactcccggctaatttttgtgttttttgtagaggtggggttttagcaatgttgttcctttttgacctttaaataaaataattcaccacctccttctagaataggctttgaagacatacataccaaaaatgcacaggtagaaagagctgggccccggaaggcggggaggcagccgtgcaggccagcaggggcctcctggccaggtctgaggcgggcccttcctctttcctctccacagatgttcaactgcatcacggagctggtcctccgagcaaagaaagacaacctggcaaaacagcagcagcaacaacagaacgatgtggtgaagctcacgaagaacagtaaacgaaagaaacgctgctgctaatggcacccagtccactgcagagactgcactgcggtccctcccccagcccgaggcccacggaggttcctcgggggacagtctcagtttcgtgccgttatttaaagaattctctccatgtttttgtatcgggaggtgccatcggcacttcctcccccgccctcctcgagtgccaagaaggtgttggaccagcccgcccttccctactggtgccccctcctccccggccaaggcgcctggacctggcgaggacgctgcccgccgagcggactgattcgcagagtctgtacatagtgtatattgctctacccggccgcacaccacgtcctgctctggcttttgccttcttgatgccagcctgctgcaacagaccctccccgcgcccctccccagcccatcttactgcaagcagcgtcctgaggagacagcggcacgttctagctgcgtctgcggccagcccgtgccagtggagtgggctccgcgttgctcattctctccgacaggttgtcagcctctgtccccgctgcacagggtcttgccccttctccggggcctgtgccagctcccttccctccccgttgtcctgtccccacagccatt

SEQ ID NO: 10620 - DNA, 2300 bp, Homo sapien
agctgcatcttcctgctgagtttaggcttttcactgttggatatcaacgcagaggtccagatgtcttgcagagggataaaggctcctgaccacggcgggctgtcactccaaaaagagagaaatggccccagtgccagtccctcagaacccaggccagggctgcaaggaaatcatgtaaaggaagaagcctcaagaccctgaagaataccaaaggccatctccaagagaacactccagagcttgcctggtttcccttcattcaaaccataaccagtcagtactccacctttctacctccttccccaacctcagttactcttccatctccctggttagcccccagctttcccccttacctctcccctcctccagcaaccacggaaacctcagccatccttcacctgatccaaaccaccaaccacatctccatccagctttaaaagggaggccaaaaccacccacttccctgacctagctctgacatcgctacccaacactcctacatcccaagtcataccgctcacttgatttgatcccctttccttaacagtccatgggctctaccaccagcctggcctctgcctccaatcataagacatccctccccacactcagctcaggtctggtctacaaactgagcatgctcccaagactctttcatgaacatcatataaccccagcacctcagtttcgctcccataaaccttctggggcctgccttcctgacctcttggtcactccataaacctgctcacctgccacactccaaacagctctaaaaccctccaccttttcccagaaaccagtctaccttttcgaaggacacttaatattcattaattccttctgcaaatatgtcttaagcatgtactgggtgccaggcactgttctaggcactggagctagagcagtgatcagagctaggagccctcaagcagtgtgtgtgtgtggccaaagcacttttataattttggctgtcccatccccaggacccctctgtatatagtagtgtaacagcaaacagtgacaactcactatgtgccaggagctgtgagcaacactgcagaatctcacttaatactcacatcaaccccataaggcagatccaactatcattccatcttacagatgaggaaactgaaccacgcagggatataataattcagcaggaatatgccagaccctgtgcaaagccctttatccgacttacctcatttaaacctcacggcaatcccatgaggcaggttctgagaacgtcctcattttagatgggaagaaactgacgcttataaaggatactgatgataatgacaatagtgaacatttacttcgagcttactttaccgggtagggcgctacgcacttttcctactttatcccatcgaatcctcacaccacccagcaaggcacatccccacttctcagatgagggaactgaggctcaggacggcgaagcaacttgcccaaggtcagcgcgaggcaggtggtagtcctgagactcgaacccacgtctctccaactccagagatcgcgcgacttgaccaaggtcacacgtgaggcaggaacaggcgcgatgactggacccggcgcgcttggcccctccgccccgcgccccaacctcccctcggcgcggtccggagcccctcggcgcacccctggggcccagaccgccgggctgccccgcccgcccgccccgcacgggccggcacctccccgcccgcctgccgccccgaggcccccgcgggccgcgcccggcagggcccgcgccgcctccggccgctgcggccctcaccgctgtcgccgatgatgagcagcttgaagaggtggtcgtagtcccgggccatggcgggcgggggcggtgcgcgcgggcgggcggggtcggtactggcctcgcgatccgcagctcccttcgggctgctccggcagcggcggatccacttcccgaacaaacagccggaactgacagaaacacctccctccgctccccctcctcctcctcagcagccgccgccgctaccaccgcctccctccttcccgccccgccccaccactgcgcaggcgcagcgtctggcaccgccttgcgcagccgcagcctgagccggccgcgcccgggtcgcgcacgcgccctgacggagtcccagcaagcgcgggcccgtcttcctcgcgtctcctcggggagcgtcgtcgccgccaccctgggcgctgagagcttgcggagccgagccgctgtcgagtcccagcggaaagaagcccaaggtgccggagaagcccggtcgtggacgttgttgctccctcatctt

SEQ ID NO: 10621 - DNA, 2300 bp, Homo sapien
ggctcaaagtatgaatcagtgcaaaatgaccttgagtaacattggttacagtctgtcacatgcctacatgtgccaggtaatttacaaacataactctaaaacaaccattctgtgaggaaacgggggctttgagatagtgtgatgtgacttacctaagatcacaaagcttttaagggatggaggccaggattccaaagctagcattggaacgaaagtcttcccgacaccagcccaggttgtgaagatgagctaggaggacctactgcctcgctggctggttagggctgggcgtgcctccctggtggaaggaaggtacataccttccttctccccctctatttcctaaaactgctgagtcagaggatggccctaaccttcccgaccaagggggactttctatcgggagcacatgagcagctcttctccctagccagtaccttcagattccaagctcatgttatttcgatatcaccacactgattctcagctcccggaaaaacaactcaaggcttgagtcagacactccatgtgttgttcaatgatcccgcctgcaacaatgtttattataaccaaaaaatataaacagcatgaatgtctattaatagcggagtggttaaataatagtacatccgatggttatcggatggagtaccataccacgcagatgttaaatgataaaagtgtactgttaaatagaaaaagcaaggtatgtacatatatgtttgtacaggcaaaggaaattcactggggggcacttattcattcaacaaatatgtgttaagcattttaaggttacctgtgaaactaacaggggttacctgtgaggagtgcttcagaaggaaaaatagtaacttgtacttttcagtaaacttctgcacataattttaaggacgaacattgttttttttttttgagacggagtttcgctcttgttgcccagaatggagtgcaatggcgagatctcagctcactgcaacctccgcctcccgggttcaagcgattctcccgcctcagcctcccggcattgctttttataaagtcaaaagaaaaggaagtttgataaaacaagtagaactatccgataaatactcgcctggaaagggacaggattataagaaacaggtaataaggagcttaaaaccctctgcagttctgcagtgaggatggtcgtgggggcatacaactttccgtttcaggtcagtttaggtagggcaggtgggaactcactctaaaacgagaaaccggggctgatgacaaaatgcacacgtttagcttctggcggcccaggtcttcctagccgcagattctgagacgtgtatctgcaggtggtgtgaaattgaagccgggggagcggttgctttcggtctccgaggtgcgccttgcacactgggtcattcagctcccaggctcggctcggagctggaccactccctcccctccaccaaagaggcaatgtgggctccaagaggtcacagcgctgggatgggatttcgaccccgcgctgccctcaaaggccacctcctcgcagctctgctcccgccggcagctcccgttctgtccaactcggaagccgcccgccgccctcggcgtccactccacaggcccggggccggggccagctccgcgggggaggggtcggtgcggaaggggcggggtaccgggccttccccgcgcgactctgccttctacggccccggcccctgcctctggaaacccggagctcgtgcgagccccgccccacggtcgcggcgtgcctgtcatttcctctccgcagggcgtgcgggtctcgaagatgagggagcaacaacgtccacgaccgggcttctccggcaccttgggcttctttccgctgggactcgacagcggctcggctccgcaagctctcagcgcccagggtggcggcgacgacgctccccgaggagacgcgaggaagacgggcccgcgcttgctgggactccgtcagggcgcgtgcgcgacccgggcgcggccggctcaggctgcggctgcgcaaggcggtgccagacgctgcgcctgcgcagtggtggggcggggcgggaaggagggaggcggtggtagcggcggcggctgctgaggaggaggagggggagcggagggaggtgtttctgtcagttccggctgtttgttcgggaagtggatccgccgctgccggagcagcccgaagggagctgcggatcgcgaggccagtaccgaccccgcccgcccgcgcgcaccgcccccgcccgccatggcccgggactacgaccacctcttcaagctgctcatcatcggcgacagcggtg

SEQ ID NO: 10622 - DNA, 2300 bp, Homo sapien
catctttatgataaaatcttctccccatcattctaactaaaagctatagctttcctcctctgaagtctagactgcatatctgacagcttttctatctactgtattgtcttatactttcaatttcctcatgagtatgtcttaactcttgatgaggctgtgaactggtgagaaaaggctctgttcctttttttttttttttttttttaagacggagtcttgctctgtcgcctaggctggagtgcagtggtgcaatctcggcaacctctgccacccgggttcaagcgattctcctgccttagcctcccgagtagctgggattaccggcgcctgccatcgtgcccggctaattttttttatttttagtagagatggggtttcaccatcttggccaggctggtcttgaactcctgacctcgtgatcctcccgcctcagcctcccaaagtgctgggattatgggtgtgagccacagcgcccggcctaaggctctcttcttataacctctgcaatccgtggcacataaacactcattaaatagttaccaaagaaatgaaggaatttatgccgattgctttccagatgacacatgcaggcaaagtcaggaatctggttttaatggccaatttggatttatttcccaaaaatatcctacagccttattatcaggaagctgccttgaaaatgtgtgctagagtctacagtaggaaatggctcaaagtatgaatcagtgcaaaatgaccttgagtaacattggttacagtctgtcacatgcctacatgtgccaggtaatttacaaacataactctaaaacaaccattctgtgaggaaacgggggctttgagatagtgtgatgtgacttacctaagatcacaaagcttttaagggatggaggccaggattccaaagctagcattggaacgaaagtcttcccgacaccagcccaggttgtgaagatgagctaggaggacctactgcctcgctggctggttagggctgggcgtgcctccctggtggaaggaaggtacataccttccttctccccctctatttcctaaaactgctgagtcagaggatggccctaaccttcccgaccaagggggactttctatcgggagcacatgagcagctcttctccctagccagtaccttcagattccaagctcatgttatttcgatatcaccacactgattctcagctcccggaaaaacaactcaaggcttgagtcagacactccatgtgttgttcaatgatcccgcctgcaacaatgtttattataaccaaaaaatataaacagcatgaatgtctattaatagcggagtggttaaataatagtacatccgatggttatcggatggagtaccataccacgcagatgttaaatgataaaagtgtactgttaaatagaaaaagcaaggtatgtacatatatgtttgtacaggcaaaggaaattcactggggggcacttattcattcaacaaatatgtgttaagcattttaaggttacctgtgaaactaacaggggttacctgtgaggagtgcttcagaaggaaaaatagtaacttgtacttttcagtaaacttctgcacataattttaaggacgaacattgttttttttttttgagacggagtttcgctcttgttgcccagaatggagtgcaatggcgagatctcagctcactgcaacctccgcctcccgggttcaagcgattctcccgcctcagcctcccggcattgctttttataaagtcaaaagaaaaggaagtttgataaaacaagtagaactatccgataaatactcgcctggaaagggacaggattataagaaacaggtaataaggagcttaaaaccctctgcagttctgcagtgaggatggtcgtgggggcatacaactttccgtttcaggtcagtttaggtagggcaggtgggaactcactctaaaacgagaaaccggggctgatgacaaaatgcacacgtttagcttctggcggcccaggtcttcctagccgcagattctgagacgtgtatctgcaggtggtgtgaaattgaagccgggggagcggttgctttcggtctccgaggtgcgccttgcacactgggtcattcagctcccaggctcggctcggagctggaccactccctcccctccaccaaagaggcaatgtgggctccaagaggtcacagcgctgggatgggatttcgaccccgcgctgccctcaaaggccacctcctcgcagctctgctcccgccggcagctcccgttctgtccaactcggaagccgcccgccgccctcggcgtcca

SEQ ID NO: 10623 - DNA, 2300 bp, Homo sapien
agtctggaagcatctgtcaaatatttggctgcgagcactgtggggccagtagggagttgagtctatggagaagagttttctgttcccttttcagacagccctctgttgtggtctaatttactttgtagggccaatctaggaggagagggcctttgggctcacatggttttacacgtcattgacacacacacacacccacacacactcctcctgcccacacctgcaacacacacacttgctgctgcacttcccatggctccaaaggcctagttctggtccccaggcgccagctgtcggactccagccccagccttctctgtggggacagacaggaaagtctgctgtcttggtcacagtctttcagggcttctacagagtcatgtgtacagtgcaagcaaaagttagtattgaaacatatttgcattttaccacagtgcagcttaaaatagatgaagttggagagagtcggtgtcagagccagctttagcttggcacctgggcttctgcttcgagctcagaggcccaaactgctggcagtccattctcttaccctctgaacctccactcagattgaaggtggcagttcagggtgccagcctggcattagctttttgggttattgagtccctggttggtggtttgttttggggacatgttgagttggcacctgtaataaggaacataacttaaaatcctctcttggtattccatagttagctggccagggaggagcacggagccgctcgcgtacctggctctgatttgaacaggaagtgcttgcctttccttatcttccttggcttgattagtggctttagtttgacttcctaggatgaacccaagtaatttcggtggcagtggggcactcatgcagtagggagatagcaggagtcattctggccacaagatgacacaaactctgtgggagaaaggagctcagagtggccgtctctagccggcttccctggtggctgggggcaggtgcctcccctcctgcccctcccgcccctccctgcctcacagggctgttgatagtaattgagataataaatatgaaacattcagccttcctaagaagaaagatgctatgtaaatacagttattactgctattacaaggatgattaccatatgcatacacactggggttttctataattaagtgaagtgctggctgtgtaatgtttaactccataccagtggcagcccaatctggcaggggagcacgagtgcctacaggaaggactggatcttgagtctctgagttggcttttccaccttctttgttgctgtccatcctgggctctagagctgcctgccttggttcccacacagctggtgttgttccctgcaccccctcactcccttctcttccctgtcaggacaacactcgcatctcctcagccgggtgcctaggggaactgtgtgcctttttgactgaagaggagcttagtgccgttctacagcagtgcttgctgggtaagtacactggagagttccccttcagggacctgggcctctcagccctagcgaagagtcgacgggcatctccctccctccctcagaggatcttttagcaactggactgtcctttccttgggaatccagcagttaaagcaaaatccaggccaggggtggtggcactcacctgtagtcccagctactcaggaggctgaggtgggaggatcagttgagcccaagagttgaaggttgcagtgagccttgatcacgcccctgcactctagcctgggcgacagagcgaggccctgtctctaaaacaaacaaacaatactgaatttgcagtggtcccgtagccctgagtgtctctgctcaaagaacacagctgtaagcccggagtggttcatgagcaggctttccttactttccttaatgtgccactttggggagcttctgccaagatagcagggaggtccatgtgaatgtggcctggagttttccttgtgctctgggtcagcacactggtctccagcggggtgggcccatgggcctcatgggtgctggggacatgctgtaaaataccggttgatcccagtcgtgtccttccacccagcggacgtgtccggcattgactggatggttcggcacgggcggagcctggcactttccgtggctgtgaatgtggctcctggcagactttgtgccggcagatatagcagtgatgttcaggaaatgatcctgagcagtgccacggcggacagggtaaggcattcgggccatatcccataggcataggccacatcccataggcagcaccttgtggacacagcgcgggtggacccc

SEQ ID NO: 10624 - DNA, 2300 bp, Homo sapien
tccttccagtgttgcgggaaggagtcctgactggcagccctgagcagaaggaggaggcagccaaagccttaggcttggtaatccgcctgacctcggctgacgccctgaggccctccgtggtcagcatcactggccctctgatccgcatcctgggggacaggttcagctggaatgtgaaggcggctctgctcgagacactcagcctcttgttggctaaggtgagtggctgatgagtttgttcagatcttagagaacaggtctgtctgcaggagcctgatacaaggtgtcatgtagcagcagggcaacagatttattgtggagagccgcatagcagagggaggtaagaccttggacttcagacatgctacaccatgggtcaattccaagtcgtccttactagctctgtgaccaggatgaccttgggaaagccatataacctaagcctgtttcctcacctacaatgtgagactaataataccagctgcctcatgaagggctgctagatatggggattagatgaggttatgtccagcatgatgcctgctacatactaagcactcagtacatgtgaaatgctattattttgaaaaactactttttcaaaggaaaaaattcaggaccacgtaaatacaaggaaaacattgtttaaagatattgcagtttttgtttttttttgttttttgttttgttttgttttgtttttgagacagagtctaactctgtcacccagagctggagtgcagtggcgcgatctcggctcactgcaacctccgcctcctgggttcaagcaattcttctgcctcagcctcccaagtagctgggattacaggtgtctgccactacacctggctaatttttttgtatttttagtagagacagggtttcaccaggctggtctcgaactcctgacctcgcacagctcagatttaccagctccccctatcccctttgtgtgcctgccacagcctgcacacccacccaactccagtatttccagaccttcattggcactgaacctccaaacagtcactctggttttcctaattaacaataagtaagccgggcgtggtggctcaagcctgtaatcccagcactttgggaggccgaggtgggcagattacctgaggtcgggagttcgagaccagcctgaccaacatggagaaaccctgtctctactgaaaatacaaaattagccgggcattgtggcgggtgcctgtaatcccagctactcaggaggctgaggcaggagaattgcttaaacccgggaggcggaggttgcagtgagctgagatcgcgccttgcactccagcctgggcaacaagagcgaaactccgtctcaaaaaaaaaacaaaacaaaaaacagtaagtaaatctttactcttggacccacctgtattgtatcaaaagtgtgcctgtgtttctgtatagtcaggggttgaactggatttttagttaggtgggtacacatttgtgcagggaggattctccaaggtcatttgtttcacaggcttgttctgagggctgaatgtggagtgcgtatcctgctgtcagttgctcagtagatgggctctgcaattatacactgagtccctttccctgtcttggcattagaactgtgcttcagtactgccgatagtctgccctgcttgttaatgtattcagaggaggatttgagtcacttatcgatatggacaggtctccactaagccaaaccccaacgcagccaaggctgcgagacagctccctcagatagcggccgccgcctcctcggcctcctgctcctccagtgtatcaaagcatgctggatatgaccaggaggccaagcgaaacctgtctgtgtttggcctctctgacgggctatctgtccccagccctgtatgagagctggactcgctgtggtggtttgggattgtcatttgttctcatgcctgtggtacactgtggctttgggtctaccacaactgtctttcatggatgtgggttcctcccacaggttgggattgccctgaagcccttcctgccccagctgcagaccactttcaccaaagccctgcaggactccaaccggggggtgcgcctgaaggccgcagatgctctggggaagctcatttccatccacattaaggtggaccccctcttcacagagctgctcaatggcatccgcgccatggaggacccaggtgtcaggtacggcgctggcaagggagcactgtggcctccaggaggccaggggttgctgtgggccgagcctgcgctggcaggaggggtggtggtggaggcacccagggcttaaggcggtg

SEQ ID NO: 10625 - DNA, 2300 bp, Homo sapien
tagtagaaaacttggaaaatatgtgggcgagtgtaaagaaatgtaaaccacctgactcttcccattccaagatgaccgtcatgagtattttgggtgcacttctttccatcttctgtgcagtgctcagttgtgccgagcccactccttgcagctgtgtgactgtgttgttggcctccttctcaggttcagctctgttcagctccttggggatctcctgtttcacatctcaggagtcactgggaagatgaccacagaaactgcctctgaggatgataactttggaactgcccagtccaacaaggtgcctgcagtggctttcctgcccctgctgatggtagggtgtgccctgatgcccatgccatagaggcttcactactctctgtccccttctactggctgcaggcgatcatcactgccctgggggtagagcggcggaaccgggtgttggcagggctgtacatgggccgctcagacacccagctggtggtgcggcaggcgtccctgcatgtctggaagattgttgtctccaataccccccgcaccttgcgtgagatcctacccactctctttgggctcctgctgggtttcctggccagcacgtgtgcagataagagaacggtgagtttcctgggccttgttttggaccagcagccccagtgcctcctttcagagcctagaaggctgggtctgcagagcctgggaaagtacccatccaccctgcctaacagagggacattgtgttctttacttagtcattctgcaaatattttttgattaattttattttatttatttttttgaggtggagtcttgctctgtcgcccaggctgaagtgcagtggcgtgatctcagctcactgcaagctccgcctcctaggttcatgccattctcctgcctcagcctcccgagtagctgggactacaggcatccaccaccacacctggccatttttttatatttttagtagagacggggtttcagcacgttagccaggacggtctcgatctcctgacctcgtgatgcgcccgtctcggcctcccaaagtgctgggattacaggcttgagccaccacgcctggcctctgcaaatatttattagcatctcctgtgcactaagcaggggcctagcacctggggacacaatggagaagaaaggcagcttcattccttatcctcatgagaggtagtctagtcgaggagatggatattaatcaaataaccacacaaagagatgtaaaatgcgactgtggccagtgctgcatggcactgcaaatgcttataatagctgcatttgacctgctggggagggatgggcctgtgttagtgaacacttctcagaagaaatgatgctggaagatgaaagataagtaagcactaaccaggtgaggaggtggcgaaagaccattccagacagagggaataaataatgtttcagatacaaagacaggatatgcagaggtcccgtggtgggcaggaacatagcaccagtaggggctgagcaaggccagtgtggctggagtgaggaggcagggaggagcagtgcggcatgagatcaggctggcgcgctggcaggggcagacagatcagtgggcctggaggaggtgcccagatgggctggtgatcatttctgcccatctcctttggtctacttccaaccccccatccttggcaagcaaattgtgtatttggctctaaagaagggtttgcatgaggtctcagaaagtagatgtttttttttccttaaagctttgttccagattcggctcctgctcagccatagcacagtgttaaggcttcagtcatccagggaaattggcccttgactgtgcagcagatgatgaattttttgtacatgtgtaaggtgctgctggctcttaatgttaggttgtgtaggtgtgtgtgaaacagataattttttggtagtgttttgcaagcactacagagagtatttgggggctctttaggggtaagagcatttggggaagttaagtcagtgattcagataaagcctgggaggtttcagggccctcattctggagtcctcctctgggtgccctgggctttgcagggactttacttcctggattggtctctgttgacagattgcagcgagaacattgggagatcttgtgcggaagttaggggagaaaatcctccccgagatcatccccatccttgaggaaggcctgaggtctcagaagagcgatgagaggcagggtgtgtgcattggcctaagtgagatcatgaagtccaccagccgggatgccgtgagtatcttccaaggatcccgccagctgtgca

SEQ ID NO: 10626 - DNA, 2300 bp, Homo sapien
agtcggacgaggatatgggatttggtctctttgactaatcaccaaaaagcaaccaacttagccagttttatttgcaaaacaaggaaataaaggcttacttctttaaaaagtctctggactcttaattttgtaattttttttcctttttgacacagggtctggctgttgcccaggctggagtgtggtggtgtaatcataactcactgcacccttgaactcctgggatcaagggatcctcgtatctcagcctcccaagtagctgggactacaggcacacaccatgacactcagctactaatttttaaattttttttttgtagagatattgcacaagctggtctcaaattcctggcctcaaggaatcctgcctcagcctcccaaagtgctaggattacaggcttgagccaccatgtgcctggcccttaattttgaggtttatagtgccatatgctagaaacgaaagccatggtaaaaccagagctttgtatttaggtgttgatgtttgggtatctaaatgaagctaccaatcaaacatcctatacagttttctagacacagttgtaactattacactagaattactgtttctatggctgctgcatacttggagtaggtttagtgtcagctgagataggcacctggtggatgctggggccagtcccctagagtaaagtttttcaaactgggtggtgctccaactcggtggtaaccaatttatattttcgagatagtctcaaatatatttgagactggggtgcagtggcttggacttggctcactgcaacctccgcctcctgggttcaagtgattctcctgcctcagcctcccaagtagctgcaattaccggaggctgccaccacaccgggctaatttttttgttgttgagacagtctcgtcctgtcacccagactggagtgcaatggtatggtctcagctcactgcaacctctgcctctcgggttcaagcggttctcccacctcagcctccccagtagctgggactacaggcatgtgccaccactcggctaatttttgtacttttagtagagacggggtttcactatgttggccaggctggtctggaactcctgaccttgtgatctgcccgccctgtcctcccgaagcgctggaattatacaagggtgagccaccgcacccggccttttttttttttttttttttttttggtatttttagtagagacaaggttttgtcatgttgaccaggctggtctggaaatcctaacatcaggttgatctacccacctcagcctcccaaagtgctgggattacaggcgtgagccaccatgcctggccccagtatttaaagagaaagcagcatctgctgagaataggtgtttttgttgtgattcctgtatttcacttagagatctgtctgctggaacatgatatattcattctaactaggtctgtgtcaaaggtttgaaagccactgctaacagggctgacaactaagctgtggagaccctgttccctaaattgcagccacgtctgcacgtagcctcttgccctgtggccttcaaaactcccagcctggggcgtccagcatttccccagggcaggggcctcgttcagttctgaaccttccctgacctccgtatccagccacgtttgctaaccctgtacaagtcatccgccaactgaactacaaactgaggacaaaagactagttcaccgactcttttacctagtttttagttcctgctatctaggaagcaacacttgtttttctaaagaacttagtcatcactcaggaaaggcccacgtagggctggccctgcgggctggaagtgggtcaggggctgcaaggcgggcccatagcgttacaccgcgggctcaccacgttacaagcgctagtctcccacgaggcgcccggggctgaagagcgggccctggggaggaggccttgtggctcgggcgcgggccaactttaagcccgtgatccggctgcccgggctgcagcggccgccgtcctgcccgggggcaccaagcccggggccctgcccccgctggctcccggcctcgccctgccgcgtgggccacgctgtgacccggaagcgttccggaagcggttccggagtcagccccggcaggatggcggcggacacgcaggtgaggcgggcggctgcggggccaacgcggccagggactgggtgcggacggtggccgtcgggcggggcccctctcgctcctcggcttaggggcgttggaggtggtggctgtggaggtcgtagtctcggggccgtctcaggctggactctcagggctgcgggcttggccc

SEQ ID NO: 10627 - DNA, 2300 bp, Homo sapien
gcactggggagaaaggacaaaactgccaggggaactgacttctccagagctgggttgttttccaggtgccctcggatggccttgcgcatcatggtgttcttgcccatcagcaccacagccttcccgcgaagggacatgcggatctgctgcatctgcttggagcccacattgtctgctcccacaatgaaacatttcggataatcatccaatagttgctacaaaaaacaagccagaggagccaagtttaacaggaagagagagggaaaaaatgccagaagaaactgaaccccacaatttgtttccatcccactccctttcttctaagcttttgaagtcagagggagattgggagctacgttgtaacactgccaaactggatgattggctagctgggtatgaacgctgaaaattaggtttctacattcaatcaaggagttttttctttttttacttagtttttaatttttcccaattaccaggcatgcttctgattcactaaaatggttaacaggataaaaaaggaatgttccaagtaagttggtcaagaggagggctagattcacagcattaaaagcaccacgttaagcaaatatagcaacattattatttgtaaaaacaatctaggcgtgtttatccggattgttacacaattcctttgggttttgtgtctgaaaaccttctaagtgtgggaaaatgtaatacaagctatgctctacaatgctgcctaattgcttaagcgcagtacagtcagcatttctgggcaagggagacccacctcaaaggccatccaaaagtcattggacacttaagtttcttggctgacaggtcctaaatatgcaacagcttgcttccttacaatgagtcattcctgacctcagaccttctcaaaaatggagtaaaactgtaatgtgcggccgggcgcggtggctcacacctgtaatcctagcacttagggaggccgaggaaggtggatcatgaagtcaagagatcgagaccatcctggccaacatggtgaatccctgtctctattgaaaatacaaaaattagctgggtgtggtgtcgcgcccctgtaatcccagctactcgggaggctgaagcaggagaatcgcttgaacctgggaagcggaggttgcagtaagccaagatcaagccactgcactccagcctggacaacagagcgagactccgtttaaaaaaaaaaaagtataaagcgcgctcttttagaagccagacagacctggatacgaatgctgtcatcttaggacccacttaacttgcctgagcccgtttatctgcaacagaagggacctatctcaggaaattgttaactaaacagtattttcccaaaaatggcctaattcagtagccggtgtgagtagaccctcagcacatagcagctgactgtccctatttgcgctggggcaacatgaagagcagaggcgacccaccctgcacttacgatgatcttaaggaagtagttggacttccaggtcgccctgtcttccctgggcatcacggcggtgcgtcagggattgccacgcagggtttaaagacgatgtcactgaggagagacagggagctcaggcctggtcacgccgacacccatcccgcggtcccgggcctaagaggagcaggacacgcgcaatcgcccgccggccctgcctagggcagcggccgtcatctcggggcgtgcaagccgccaccgaggccccaggcggaacagaataggactccatgttcccaaaggcccccaaagacccctccatgcttcccgccggcgacccctggcgcccatctaactagcacacgaaccttccacgaggacgcctggcgagagaagggcctcgcgcccgcgcgtgccttttataatgcgaacaaagtagccaatcagaaaccgcggatagcgctcctgtctattggctgcgccatcgcccgtcagacaaagctgaacgaatacaggcaaccattggataatatcgctgccactccagccaacggaaagccgcctttaagtagggtcgcgaaggaaggcgctgcctcgcgttggaggagcttgctctgagctgctgccacctgctgggctggagctggagctggagctgcgaattcggagtcccggttccctgtgccacctggcgagctcagcaaactaaaaggtatgacgtggagctgagacataattgcacatgcttagaaacagaatggtttctctttttttttttttttttgagacggagtgtcgctctgtcgcccaggctggagcgcagtggcgccatctcggctgactgcaagctccgcct

SEQ ID NO: 10628 - DNA, 2300 bp, Homo sapien
acaagagtgaaattctgtctcaaaaaaaaaaaaaaaaaaagaaaagaaaagaaaaaagaaaagaaaaagaaatacagtaacgtgaaatcgagctacttctaacttttttttttttttttgagacggaatcttgctctgtcacctaggctggagtacagtggcgcaatctcagctcactgcaacctctgcctcctgggctcaagcaattctcctgcctcagcctcccaagtagctggaattacaggagcccgccaccactcctggctaacttttggtattttttagtagagacggggtttcactgtgttagccaggatggtctggatctcctgacctcgtgatctgcccacctcagcctcccaaagtgctgggattacaggcatgagcccccgcacccggcctacttctgacagttttatggtgtgtgatataggatataacatgatgtatgaagctctttgtaataatttttaattttgaaatagctgattctttggggatcatttaatacataattccataggtttcagtgaaaaaaaaaaaaaaaaagagatctcagggttgggcaaggtgtctcattcttgtaatcccagcaatttaggaggccagggtgggaggattgcttgagcccagaagtttgacatcagcctaggcaacatggcaagaccccatctatacaaaaagtacaaaaaattagcttggcgtggtggtgtgtgcctgtagtcctagctacttgggaggctgaggtgggaggatcacttcagcctgggaggtcaagtctgcaatgaactgagattgctccactacactctagcctgggcaacggagtgagactgcttctcaaaaaaaaaaaaaaaaaaaaaaaaaaaaaaaaaagatttgatggaggtgaattattctatggatgtttgttggctagttttctaggaagagggaatggctaatgcaaaagcccccaagtaaagcctgctctggaaaagcagcagagcatcatctgggtagaaagcaagtaagtgaggaggaaaacatctgagatgatcagagtgggcgtgagggacagataggtaagggccttgtaggtactttaggttttagatttttactctgtaggaaacggaaagttttaagcagataaggagatgagctgacttaggtttttttttttttttttttttttttgagatggagtccctctctgtcacccaggctagagtgcaatggtgtgatcttagctcactgcagagctcacagctcccgggttcaagcgattcttctgcctcggcctcctgagtagctgggattacgggcatgcgccaccccacctggctaatttttgtatttttagtagagacggggttttgccatgttggccaggctagtctcgaactcctgacctcaggtgatccacccgcctcgtcctcccgaagtgctgggagtataggcgtgagccaccgcgcccggccaggttttaaaggatccctctgttttggtaggcggaaaaactagagaagacgagagaccattctgaggccgggcgcggcgggtcacgcctgtaatcccagcactttgggaggccgaggcgggcagatcacgaggtcaggagatcgagaccatcctggagaacatgatgaaaccccgtctctactaaaaatacaaaaaaaaaattagccgagcacggtggcgggcgcctgtagtcccagctactccggaggctgaggcaggagaatggcgtgaacccgggaggcggagcttgcagtcagccgagatggcgccactgcgctccagcctgggcgacagagcgacactccgtctcaaaaaaaaaaaaaaaaagagaaaccattctgtttctaagcatgtgcaattatgtctcagctccacgtcataccttttagtttgctgagctcgccaggtggcacagggaaccgggactccgaattcgcagctccagctccagctccagcccagcaggtggcagcagctcagagcaagctcctccaacgcgaggcagcgccttccttcgcgaccctacttaaaggcggctttccgttggctggagtggcagcgatattatccaatggttgcctgtattcgttcagctttgtctgacgggcgatggcgcagccaatagacaggagcgctatccgcggtttctgattggctactttgttcgcattataaaaggcacgcgcgggcgcgaggcccttctctcgccaggcgtcctcgtggaaggttcgtgtgctagttagatgggcgccaggggtcgccggcgggaagcatggaggggtctttgggggcctttg

SEQ ID NO: 10629 - DNA, 2300 bp, Homo sapien
tcttccccccgatgcaggcaggccttaaaggagcccctccctttctgtcccctgtcctaatgcctgagccatcccccactctgcacacacacacgtgcacacacacatacacagataccctccatccctccatctacaagccccagcacagtaaccacagtcctgccgtaaaccttgaccccggtcttcccccactcagaaggtccgctgccctcttgcttttctgtgggtccacccatgtctgctccttcctcgactggtcctcagtactgccccgggctcccatcgaggaaagaagccactccagaagggagaccagaaacctgtctcctcccttccagcccccaggcccagcgcccggtgaggcctcatcactgagcccggccacctccccttgccatttcctctgcctttggtcgactcccctccctgtccttcttcctttctccctaggcctctctctcagggctctttttctccagattttttcccccaattttggtcctgccggtgggggagaaaccctcagatctcatcctagattcccttttagtccagtgacaaggtcttgtattctttcttaatttttaaaaaagatttcttaccctcatctcttcccctatctaagatccagggcctggagcaaagagcggatggggagcggtgctgggcggccggctggcctcgggacggcgggcggagcagccccggagggcaggacgagggaggggtcagtgccaaggctgggctgggtgtcctgcgtgtcgtgctctccctgggcttggccatgcctgctgggtgccctcagcctttccgaccctggtgggcccctccgaccaccaggagtcctgctgacgtcactcccactttagggctcctggcccctggaggaggttgtacttcttgtctccatcagctcatctgtccaggagggagaaaagtacccccatccctgtgctgccagacaccgtaccccgagcctcaggagtcctgaccagccccctccgtgtccacagttcatggcccaggggaagacagggagcagctcaccccctggggggcccccgaagcccgggagccagctggacagcatgctggggagcctgcagtctgacctgaacaagctgggggtcgccacagtcgccaaaggagtctgcggggcctgcaagaagcccatcgccgggcaggtgatgagggggagtgggcaggggtgtggccagtggactcctgcaggggtgggggtgctccggggctggccttggccctggaccgcattccatctcctcctcaggttgtgaccgccatggggaagacgtggcaccccgagcacttcgtctgcacccactgccaggaggagatcggatcccggaacttcttcgagcgggatggacagccctactgtgaaaaggactaccacaacctcttctccccgcgctgctactactgcaacggccccatcctggatgtgagttcctcatccggcaccgcgcccgcttccgctcattccagcttcaccgcagccctctgaggatgcagggggtgccgtgggaggctcagagaggtcacatgcccgaggctcacagggctagggaacagtggggccggattcacagccacacctgaaccacagcctgtcccgatgtgcatcgggcagccccacctcccttcacctcccatctcgattcctttctgtggagactcccaggactcaggagccctgaggagataaatggagttggatgccagcggcctcactctccctctctgtgaacttaggaaatgcctggcctctctgagcctatgtttcttcacttataaaatgggagtcatagaacttgtgccctctacttggggtgaggagtagaggagagggtatgtgtctggcttgtcccatcctgagtaactctgaattcttagaggcattcacagcacaattaggagagacccccatcttgggagtgttttgctctgtctatggctatgagctgcgggtggaaggacggccttgctgggcgtctcagttgtgagatctgcccagagctcagccttgatcccacattttgctttcacagaaagtggtgacagcccttgaccggacgtggcaccctgaacacttcttctgtgcacagtgtggagccttctttggtcccgaaggtacgggctggaccggcggactgacccaccgcctcttaggagggccggggaggtgggggtgggagacgctgctgaggttggagtcagagtggctccacttctggaagccggaatgaactgtgcctccaaaacccccgctccccagg

SEQ ID NO: 10630 - DNA, 2300 bp, Homo sapien
cttgctgtgatgccaggagatggggagggagggccgggtcagcctgcctgaggattgcagtagccagtgaaggcagacaagctggagaagtgctcagctgggacattccttcctccctgggtgctcccagcctctcaggtcgaggggatcaggaggctgggacgctgggacaaagaaccttgtgttgatggctgctctgggtgggggagggcattctctgctgggccatgtgggacttgggagcctgtgcctgggaggtcatttgccctggagccccatctcccacgctagctgtcctcaacacatcctctttctttctgcctctgatcctgaatccacaagcctcccttgctactcttctcccatccttccctctcgccctccagggcctctgagttcccacgagcgtgtctgtgggaaaccatggggccaggcttgcacgaggtacctgcccttcccctcccctgctgggcctccccagtcctgccaggcctgagatgtttaatttagaggattcagtgtttccttggggattgatattgacagaactcaccagcagctgctgacttcatacttccacgtgggtcagctggagacctttggggcatgacctagggaatatgagaggggagtgaacggtccctgcacccttggccctgatggtgtctcctagcctcccttcagctgaggtttcatggtgggagacaggagtgtggctggggtggagggttgagcctggccctgtgacccttgcgtgctatagttccagctccaggccagtggttctgagcagccatggtcagaagcaagtaagttggattcagggcctggcctgagggagctgtgccccggtgcttttaaggctgccgttttctcagacagcctgtgtcctgatgccaggagaagcagcagtggttttagtcagatccctggagcaaggatgtggaagacgtagaggacttggggtgtaggaaagctgggattgtccggagggacatggccgagttgggccagtgtccgaggcgggttcagcagcccctggggctggctctccctccatttgtgcctggggctgtcttccgtagccacctggctccccatttgtccaccttaccgtggtcttttctttctcataccctccctgggtggctccacaggcacggcttggtggctgctttctcttgcttgggtttggtgagggctaagcacgcaaagcccagggaagcttttttggggtctgggtctccttcaagggtcagtcctgtgcgtcagctttgcagccaccttggtcagccctaaggccgagcccaccgcctgcaaggtgcagccgtcctcactcccctcatctctctctctcctctcccctctgcatttctctcttctccagaccagctcctccactgtggctctgagtgccccggggctgtccagctctgctccgtcctcatactgctcccttcctccttctcctcctcccatgccatctgtatttctgccacccaccactataccctcccctcgaggccagggccacactccggagttcccttgtactgagcagagtggacgaggccttctacctcctgtagcccccagctggcttgatttggctggtcttggggtgatgcctgacaccttcaactcaaggtctccctctgtggagggttctctgtgggcagtgggcacagagagtcagggtcgagattggaggcacctgccgaccatcacaagtgagctctctggggctccccgctgccacactgtaccctgtgctgggagcacagctctccaagagcctggggagccccaggggccaccagccagcccttcgtgcccagaggaggccttggctgccacatgggagcagccatgggcttcggaggtattcgggcctgagagaatgcccccctctggagctgctcgaagcttccaagaagtaacagagccagctgtagtggcagtggaccggcaggccatcttcccagatacctggactctcacggaggaacatggcctacagcaggagaggccaaggccagagccagggaggctgggaagcagctcccctgcctcagttaccacggagcagctaggtgcaaagatgaccgagaggggaagtgtggccaggccaacccagggacctgaaaccccaaggagcccagagggcaccacggaagctgccacccaggacgggaaggaacagccagagcttccatgtgccatggccatgggcacacccagcaccacggagaggatttccacctctggccaggcaggcaccagctcgcatggctgctggg

SEQ ID NO: 10631 - DNA, 2300 bp, Homo sapien
aagggcttcttcctctcagcctggccgtagtgcactgtttctgcccagccacctgccccagggcggcctcccgacccaaagctgcagctgttccatgctgttgctccgaccaggtgcagccatggggtgcagataggggcgcacacggtgctgcatttgcacagggccctggaagcgagggcgtgcacccctctggttctccagagccctgcatgtcacccttgggttgtgccttcaagtgataccaggctacctgtgttcctcccactagcttgctgtgttcctccagctcagccttgttctctaaggatagaaacttccccactgcgcccatggccaggggctccccagtcttccccggctagaaaattgcaagattgcacgaggttacccagtggcaagaagctgacgggccaatggtgccctctggtggggagcagcagacagtctgcaccccttcctcaccagggcggagccaggacatagctccgtggcctttgcccatggctcgctggggactttgcacctagcctgccctcagcctcgagacagcctggcctacctcctcatgttgcatacttccgctggcccagagagacagaaaacctgcagaattcagggtgggtttcctccagaaagtggttgggaagccccagagagagagcttcctccttcagggtgacttgggtctggagggccccaggcctggacctggaaacttagtagagtaatgccaaggaaatttgaggcctttcttagcttgaatgaggtctcccgactacttccgagcagcgtgtctggaatctgtcctcccagcatgtgggaagggagggtgtattcctggtcttgaatggtttcagtgggtaccattttctctgaagagtggatagcctgacaccttctttggggtatgaggagcaggaatatttagagcagagggaaaggctggagccggacactgggggaccccgctgggatggggctctgccttcaagtggactccttcctgtgtgcagtgtctgccagctctgtttgctcaagccaggggggacgtttgctgagcttgcaaggggactctgacccttaaccattttgcagcctatggggaagtctcaggtatttgcacccattggaaatcaaagtaaagctaggagtctactgttggcttgcctcctgtatttctggttttctttcttgaggagtttgtggggggtttggaggcaccaacccctacccctcttgcctagtccttgcctgtccaaatcactaggtgagaatgaagggtggagagagaggaggaagccataccagagaccctgtggctggtggatggacttgctggggtttttctctgtccctcaaatagacaaaactttggagaaaactgaataatgatgtgccttctccctgacatctgcactctatgatttgttcgtttgtttttaagacagggtcttgctctgtcaccccggctagagtgcagtggtgcaattgtagctcactgtagtcttgacctcctgggctcaagcaatcctcctgcctcagcctcctgagtaattgggactacaggcgcatatcaccacacccagctaatttttaaattttttgtagagatggggtttcactgtgttgcccaagccgatctccaactcctgttctcaagtgatcctcccacctcagcctcctgaatagctgggactataggcatgcgccaccacacccagctaatttttaaattttttgtagagacaggctctcactgttttgcccaggctgggacatgctacaatttgaatgttactttattacttttcttttcttttcaaggttgcccttttcatggtttgctcatattctacccagaaaagacttaggagacttagaagaagttagtactttgcatcctacctacactgctctccttggaggaagaccttattctggattttacagagcaaatcagatctgatgtttgtagcttccaatgtgctatggagcttcctcctgcagagtgacttgggtctggagagcctgatatttgcaactgatgtctgcagcttccagtgtacctgctagcccttataaacctcacaccagtactttgaggtcagagttattcaagagcttactgagacaacaggccctgagaagctaagcgatttgccctgtggcatggatggtagagaggggagctggcacttgaactcaggtctggctcgacctcagaatgagtgatcttgtgtctctgtgccccaggactgcatcctctcaccaatacttcaccagcctagggatctgtg

SEQ ID NO: 10632 - DNA, 2300 bp, Homo sapien
tgttctctctgcggtcacttaataactacttgatggtggttggtgattaaatgggtatgaactgcgacacccacagtgatgctgagcctgcagcaaaccacttcctcctctggagaacctgagttctctctgggtttggggtggggaggtggcatagaacccagcctctgacatcagccacacttggttctgtatcaatgctgttgcctactacttgtgtgaccctggcagatcactttacactctgagccttggtctcctaatccatgaaataggtgcatttcctgacatactttcccgaaatactttcaaagtgctcagtaactggtgatggttatcgttcattcttgggataatcttgacaactcctggggtggagggtttggcttttggtatcattctcttggcatttatttgtttgtttgtttatttatttttgagaccaagtctcgctctgttgcccaggctggagtacagtggcacaatcttggctcactgcagtctctgcctcccgggttcaagcaattctcctgcctcagcctcccaaatagctgggattacaggcgcccacgaccacgcccagctaatttttgtatttttagtggagacagcgtttcaccatgttggccaggctggtcttgaattcctgacctcaaatgatctgcccacctcacctcccaaagtgctgggattacaggagtgagccaccgcagcggcctgtttgtttatttatttattgagatggagtcttgctttgtcatccaggctggagtgcaggggcgtgatctcagctcactgcagcctccacctcccatgttcaagtgattctcctgcctcagcctcctgagtagctgggattacaggcatgcgccactatgctggctgttttttgtagttttggtagaggtggggtttcaccatgttcgccaggctggtctcaaactcctgacctcaagtgatccacctgccttggcctcccaaagtgctgggattacaggcgtgagccaccatgccgggccttatttattttttaattaattgattttttttgagacagagtctcgttccgttgcccaggctggagtgcagtggcgtgatctcagctcattgcaacctccacctcctgggttcaagtgattctcctgcctcagcctcccgagtagctgggatcacaggcacctgccatcacacccagctaattttttgtatttttagtagagatggggtttcgccatgttggccaggctggtcttgaactcctggcctcaagtgatctgctcacctcggcctcccaaagtgttgggattacagacgtgagccattgcacctggcccactcttcgaatttaagcttccacttcatctttaggttggctgcatttcccgtggccttggtgggcacttagtgcaattggccctgtttggttgcttagctaggcctgggggaagaatctgacttcagttactttctggaagaatgtgatttaggactcttcatggcgccatgggttggagaatgtttggaactctgctgtggaggtgaaatggccacacccttgggctggtggtgttaagttgggttttggttatatgacttttaatttcccctgagcctctttggtggctttcatgaggaagtggtgggggaggaggtggcttggtggcttggtttatactaatcgctcatctaacactaatattagtgagagctgccacagggagctgtgctgagatccactcccagatcagccctgggcttctcctagcactctaggcatccagaaagcctcatggggtggtctggcccctgaggctcctagtagcagtagaaaaaaggagagttggttttctggactgtgaacttggtggttgtacactgagtggacacagctgtgtcatgaagctggcccagtgactgtacccctttaggggtagttgatctgtgggacccaccctgggctctgttggaggtttgaagtggctcagagagtcctggccgagctttgccccctctgtttccaggaacattcctcttccttaggtggaaatgggagtgtccaatggcctgcacttggtttcctctggatttgccatttcccctgtgtactcctggctcggctggccggctaaggcagtttctcatcactgatgtgctctgggacagctgagtgggatgggctcctctggggtgggtgtggaggagtggtcgtgatgcctggaacactgcagtcactcctcagagacacgacttggcagccctcctgagcctgcctggtcacatgctgcctgtcttggaaggtc

SEQ ID NO: 10633 - DNA, 2300 bp, Homo sapien
ctttgaaaaagaaaggttttagacctttggagaagtggacaagcgtatgccctggggttggtctaagttgttagcagtttcacttagccgtttcataaccaggccttggcataagcctccccaggttcaaatctcagtttccttacttattagctgtatgacctggagtaattcaacctctgactctcaactcttccagctgtaaaaggggctaacaatgctcatctcctaggcttgtggtcagtattaaatgtcttgtctacagacctttgcacatgctgttccacacagctgggagtggggcgaggctactcatccttcatgctaaccactttgctcttttgcgtgcacctttagattcaagaaggtagacatcatgttagtcttattcatcatcccagcctacgcaacaaagcaagactgtgtcttaaaaacacaaaaacaggctgggcgtggtggctcacacctgtaatcccagcactttgggaggctgaggggggcggatcacctgaagtcaggagttcaagaccagcctggccaacatggtgaaaccctgtctctactaaaaatacaaaaattagccaggcatggtagtacacgcctgtaatcccaccaggaggcaggagatcacctgagatcaggagttcaagaccagcctggccaacatggtgaaaccccatctctactaaaaatacaaaaattagccaggcatggtggtatgcgcctgtaatcccagcaggaggcaggagaatcacttgaacctgggaggcggaggttgcagtgagctgagattgcaccactgcactccaacctgggcgacagattgggactccatctcaaacaaaaacaaaaacacaaaaactaaaacaaaatagaggtatgtgcaagatgctggaaaaccacgcaatagagtgtttgaggaacagtctttggtcttgaatttattataggagaatgtggcagccacagaagctgcttggatctgcctttataaaatgactgaacatggtgggagcattggaacccggatacttctgcccaaggagacttctcattttttttgtcctggaattccctgatgggttgacctgtttgtcagatctgagtctccttgcccaaccctgcttatttccccttctctgtcacgggcattacccctagctttatctcagcatctcatctgctttctggaggacctgatctgacccagaaggcctggattcttgagggacaaggggaactcgaagctgtacttgcagagcagttttatataaaatccacaaactgccatcacccatcccaacgggtagggaagtacctctaggaggattaatttagagaatagctatatagtgtctgtctattcagacactcaataaatggtagttgttattattacccaatttccgagtgtgtgggagcactgggtgtgactttcctgtagttttccctttaatgtctaatctggggacccctctgccccatgcagttttggaaaagtgtctagggagggtggctgtgtggaagtaatattaagagagatggaaccacacaggtattgggtttgggccagaaagggtgaactgcgagctgcactgccattgatccagaggacgaccccaggaaaggtcagccacgggctccgggccttgcctggtactgatttatggtcctcctgggtggtgacctacaggtgacagacggacaggtgggcaaaactgactgtccagtggacaggcatgtgatgacccagtggctgacgaatgcacagacacatggctgactgtggacggatttgtcatccgcagggtcaggcaagtgactttgagagggacagaaagatggatgggagtggctggaggcctgggagccgcccacctgcccgcttagccgcgagggggcgccaccgccccgcccagcgacgcccactgcccgggctcttggcgggggcgggaccagcgtgcgcagggggcggggccagcaagctcgcgggggtgtccgggggcggggcgcgcgtgcacagggggcggccgggggcggggcgcgcggcgggcgcgggcgcgggcgcgcgcggcggcggcgcgttccgttccgggccgaggctcgcggcggaaaagttgcggggcatagacgagcggccccgggacgggcagctagcgcgaccctgagccggcgcccgtggtccggccatggacgacctcggtgagtgagcgggaggccgagggaggaggaggcgagaggcgcgcagcttggggccaggagggcgccagcgagcggcaggggccgcgggatcccaccct

SEQ ID NO: 10634 - DNA, 2300 bp, Homo sapien
gagctgtgatgtcacaactgcactccagcctgggtgacagaacgagaccctgtctcaaaaaaaagaaaaaaaaaaagcagaaatgggcaaactactaaatggtcattttgccaatattacctccaaagatacaatgatagaaccaaaaacctaaaaactctttctcaagcttccacattacttctctgcacttcagttcatctttatttattattattattttttgaagagatgggatctcactttgtcacccaggctgaagtgcagtcgcacaattatggctcactgcagcctcgatctcctgggctcaaagtgatcctcccacctgagcctcttgagtagctgggactacaggcacacaccaccacaccccgctaattttgtttattttttgtagtgagtgggtctcactatgttgcccaagctggtcttgaacttttgggctcaagtgatcctcctgccttggcctcccaaagtgttggtattacaggtgggaaccactgcactcagcccaattcatcttaaaatgggggaagggagtccttaggtggtcttcaaggtccctgctggccgcccacctttatgtccaaagacacttatacatttattgatttaggtgatgctgcagagcggcagttctggttgtctacacattaggaacaattaggaaatttgtagatcagaatccctgggagtgagacgcaggccttgtttgattaacttaataaaaaaaatatgataaataaaattggagaagccaagcaggttaagtacattagtccaggtataatatatttggcttcatattaactgtaaaaacatcacttttggctgggcacagtggcttacgcctgtaatcccagtactttgggaggctagggtgggcagatcacgaggtcaggagatcaagaccatcctggctaacatggtgaaaccttgtctctactaaaaataaaaaaattaaccgggcgtagtggcatgcgcccataatccctgctactcaggaggctgaggcaggagaattgcttgaacccgggaggcggaggttgcagtgagccgaaatggcaccattgcactccagcctgggcaacagagcgagactccgtctcaaaaacaaacaaacaaacaacaacaacaacaacaacaaactatcactttttcagatatgtataaacacatttcttcacaagttcaaggtattttaccaatagcaaataacttgatactgtcgttgtgaatgaaaaggatcacaaactctgatgtttagaatgagtcaaatctaggccgggaacagtggctcaggcctgtaatcccagcattttggggggccgaggttggcggatcacctgaggtcgggagttcgagaccagcctggccaacatggtgaaactctgtctctactaaaaatacaaaaactttaaaaaaaagtcaaatctagatccatgattaatgacgtgctcatttcacattgcatgtttgtatcaaaacatctcatgtgggtaaagcatagacaggcacagagaaaagaaaaaaagacaaaaaataagagaaaagatggccgggcgcagtggctcacgcctataatcccagcactttgggaggtcaaggcgtgcggatcacctgaggttaggagttcaagacgagcctggccaacatggcgaaacccccgtctctactaaaaatacaaaaataatcccagctactcgggaggctgaggcaggagaatcggttgaacccgggagagggaggttgcagtgagccgagatcgtgccactgcactccagactggagttttttcaaaaaaaaaaaacaacaactccgtcttaaaaaaaaaaaagaaaaaagaaaaaaaatcttatgtacactataaatatatacacctactaagtgcccacagaaattgaaaacaaagaaaaaaatccatgattaaaagcttttatattaacgggggaacctctgaccagaaagagccgacagggggcgttcctggatgatctggggctgtcaattgcgagacgcggaggattgtgggacttgtggtttttctcgcatcatttaagctttctggactacatgtcccaaaatgcaaatgcaatcagacggtcccactgtggggtgtgaagtgtccgtagagctgtgagaggtaagtgtgttctgtgtgtgctgcggatttctagaagttgtggatttcttgtgagggattctatttctcctctttgccctcggtgggacctggaagagagtagttgttccactgatgcacgttttcagcgggggtttcccctgaccctttggtctcg

SEQ ID NO: 10635 - DNA, 2300 bp, Homo sapien
ggccctccttatcccacagggttgttgtagaggtgacataggaacagaagagcaccaagttaaccaattataaatctatatagagagaagcagatcagaggccaggcacagtggctcatgcctataatcccagcattttgggaggctgaggagtggatcacctgaggtcaagagtttgagaccagcctgaccaacatggtgaaaccttgtctctactaaaaatacaaaaattatccaggcatgctggcaggcgcctgtaattcccagctacacgagaggctgaggcaggagaatcgcttgaacctgggaggcggaggttgcagtaagccgagatcgtgccattgcactccagcctgggcgacaagagcgaaactctgtctcaaaaaaaaaagagagagagagagagaagcagattagcagttaccaggggctgagggagtgtgactgctaatgggtacagggtttccttctggagtgataaaaatgttctggaaccccatagaggtgatggttgcacaacactgtgaaggtactaaatgcccccgaattgtttacttaaacgtggttaatgttatgtgaatttcagctaaacaatgttatgtagatatttggccgggcgcggtggctcacgcctgtaatcccagcattttgggaggccgaggcaggtggatcacgaggtcaggagatcgagaccatcctggctaatgcggtgaaaccccatctctactaaaaatacaaaaaaaaaaattaaccgggcgtggtggtgggtgcctgtagtcccagctacttgggaggctgaggcaggagaatggcatgaacctgggaggcagagcttgcagtgagccaagatcgcgccattgcactccagcctaggcaacagagcaagactccgtctcaaaaaatatatataaataaatagatatgtgatgtgacaggtttttttttgagatggagttttgctcttgttccctaggctggagtgcaatggcgtgatctcagctcaccgcaacctccgcctccagggttcaagccattctcctgcctcggcctccggagtagctgggattacaggcataagccaccatgcctggctaattttgtgtttttagtagagacagggttattccatgttggtcaggctggtctcgaactctccacctcaggtgatctgccagcctcagcctcccaaagtgctgggattacaggcatgagccaccgtgcctggcctctgatatgacagttctaatgccctttagtattctataattcagactcaggcctttggaatccaaagcccaggtttttctcacaaacccacactgcagagcggagtggtggaaaaaaataaaacctctgccttggaatcagacagatctaaactggagccctattttgtcatttgccaactgtgtgaccttgggcaagttaccgcaactctctgaacctgtctctttatctgcaaggtgcacgactgatgggactattcaaccagacccagtgcacagattcaggcacttgataagacattgaggctgcaggcagcgatcttttttctttctttctttttttttttttttttttgaaatagggtctcactctgctgcagaggctcaatcactgttcattgcagccttgacctccctggctcaagagatcctcccatctcagcctcctgagttgctgggatcacaggtgcaatccaccaccacacctggttaacatttttttttttagagatgaggtctctctatgttgcccaggctgcacttccttcttgtctcccttatcccagcgtccgactgaactgacggctttgctttccccaaccagcccgtgaagctgggctgagtacaaagtggtgggtatgagggtcaagattgtaagatctgaaaactccagaaaccatccctttggttaacagttgctaaggacaaatgcataacatattttccagtgatcccatgctggcaaatcgtcagggtcattcctgcaacagacagattcaaggccagccccaaactcagccaagagcaaagcaaacactccagccttatctgggcagggttgtgtggagactgactataagactatacctgagactggtcatctcagttcttttctcaccttgactgcaagatgaaactccttgtgctagctgtgctgctcacaggtaggcaagtctccccggctccacccgcctttctctcccaagtgagctaagatctcactcctctggaatgggggccacaggccacagcaaacagggatggccagccccgcagtctcaattcgaggttccc

SEQ ID NO: 10636 - DNA, 2300 bp, Homo sapien
aggagagtagggaagaggctggttacccatggcttgatggcttgagaaaagtttttttttaatcctttggatgtctggtcatttgggggagggttggggcctggagtaggattgggttgggtatcagaggcagcccctgatttataccaaaggtgactcagaccttaactaagaaagagggcaaggaggaggcaccagatgcaggcaaatggaaggtggcaccaaggcctttggtgaccgtatatccaaggggtacctagaggaagtaacaagagtagactggggtccaagagaggatggatgatgtagatcctccccctttcccagtctccttcccttcccccagtcagtgggaggcaaagcagcccaggcactgaactctacttgctttaattacagcctctagcaaaaggaaacctcaattagaggaaaagatctgtagccggagaggggagtccagtctggttgctgtcctcctggccttttacagaaagggatgaggcttttgcttccccatcttgtcattttcctccctcccatatttccttctctagcatcttctctgtgcctccccagtttggtcaaggtcttgctgtgtgatcttgggcaggcaacttcacctctctgagcctactttcttatctacaccatggggatcttaccatgcagggaatgttgggaggacaatggagcttaataaatgcaggctggtgcattgagatgatggtgattgaaaagggttttcagtggggttgcagaaggaaagttgtcccctgtgcagggagcaggttgaaggtcaagcctggagtgggcaagagggcagtgggttgccagagcccctgttccttggtggtagtgggttccgctggtatctgctgggtcctccatggcgggctgtgtttcaggtggacgacgccatgctgatgtttgacaaaaccaccaaccggcaccgaggtgagtgtggccccctcccccttcccaggctgggccccgtggtcagccagggggctgcaggtcacagctgccctttcatctcgccttctgacatcctatcccccaggatctgcgtcctctcccaggcctggccttacagaaggcttttgtcccaccatttcctgtgctagaaacttgccgaattgcagacacacgagacgaacagaggagtacccacccccccagtccctgcaacccactgagtctcctacccccaccctagtggtgtctgcctctgcccgggcttaccttgtccctggtaaccagagcttaggccaggccgcccagggtcaggctgactccacagccccaggcagtcacctcctgcccagcccccagcccccagccccgttgcctctgaacctgtgagcatctgggccacaccgtgtgcgtgtgcgccacctggctgtttttctcccgagggccttaccttctgagaaatccctttccagtccctggggcacacccaggaggagacagggttgtttctccagttgtttcaggacttttagtccattttgggagtggggtatgtgttctgtgtgtgtgtgtatttgtatctgtgcaaaagggggtatctgtgcctaaatatctgtttatatctggtatgtcagggtaactgcatgtgtctgcgtgatacgcaggtatctagatgtatgcatgcgtgaatgtgtgtctatgtacatttgtatgtttggacatgtacacctttgtgtaagtttaaatgagtgtgcatgtgtgttccttcttccctctttggaaaacacctgaggactagaaaaagcatgttgagtgtattctcatcacagctctaccactttctaacttgctgtgtgaccttgggcaagttacttcacttacctgaaccttattttcctcatctgtattctgggacttgaaaccctgtctcagtggatagttgagaggattccaggctgtgagcagagcctttcattaactctcactcgccagagagagaggagcggggatattggtacgacctggggttgagttttgaccctgcgctctggttctgaccttgcctttatcctttgtccaacctctagggttcgggtttgtcacgtttgagagtgaggacatcgtggagaaagtgtgtgaaattcattttcatgaaatcaacaacaaaatggtgagttgggtccgggcgcagtggctcacgcctgtaagccaagcactttggggaggttgaggtgggcagattacatgaggtcaggagtttgagaccagattggccaacacagtgaaaccctgtctctactaaaaatacaaaaattagccaggcatgg

SEQ ID NO: 10637 - DNA, 2300 bp, Homo sapien
tgaccctttttaagttcagacctaagaagagtcacctccctaataccgcagaggctacctgctcaccctcatctgtgtctctgctacaacacaaactggaatgcttttgtgtcggaatggtaagaaatgccttgtgtgggtggccctccagtccccagtccaggggatgctgagaaactgtggggcagagtaggggacacaaacaggaaaaagcaagtttgtttctagtgttatgctcacagggtggcaggatatacctgctgagcattcccagaaggtccccaaggaaaccattactgtaagtctctcactttcttctctgcctgatggttggggtggggagagggaaggagggctatcaagagggggatgggcacccttccagaggtcagagttatgatgcccaggaataaaaggtgttgaattcaggatggaatgtgaaggtgaacagcaaagggcttgtcaacatgggttgtcactggattacaccggatggattaaggtagggatgggggaaggagtagaaggtgagttgggagggaggggcttgtgtggcactgagacccccagcagggatggggagaaggggtgttggccacctaagcttcctggtttgatccttttttggctggtttcagctggggaagtgaagggtcctaaggcttggatatggagaggtgggaatatggagaggtggggatatggagaggcggggataaggagaggtggggataaggagagtggccccgcagctcccctggtgaaccagaatactttctcagggttgttcccaggctggagggagggaattttaggggtacgtaaggtgactccaaggagccttgggtgcaagtactgggggatcccagagacccagaagatgggggtagaaaggaaggtgtttgccttcacggggagtagcctcaaaataagagggactgagggaagtcattccaaatgcagtgggtaggtagtttaggctcttccaatgggatggggtggagcttagacctctgcaaaagaagggggtcattcggaggggacggtgcacagctgaggcgttgggctcctaaactggaaacaggaggctctaagaggcactgccttttcctccagcctcggtgtggtgggggtggtgagtgtctggaaccgggtttcccgaatcaggacaggagtctgaatggatctcacaaaaaccggccagggagggagagaaccaggggagactcctcacaccgggaggtgggggtggcggcaaactgagaacccgggcttggggcgcgggattttctcaacagaccatagggtccactaatgtggacggcagggatttggggaaactaagggggactctcactttggacaccaagggctgaggacggattggggaagaggatacggtttctactggggtgctgatggaggttccccactcgggacgcgaggcactgagtgggtcccccaaactggatatgggatcctgggaacggagcgagggctctaaattagagccctggggtgggggtggggggctgtaaattaggttgggaggaaactgggggctctgagggcggcttctcgctccgactggggaaatggagcatgtggggactggggagcactagggctatctcccgcccgacccgaggagattggggttctcttcaattctggacagcagggacctgagagggaagaccgggggggttcccgatccggaaccgagctaccttgaaggcaccgggaagcgcttcattccgggagggcgttcccgcggccgggcccccgcgccggggtgggtggggggtgcggccgcgccctggtcccggcccgcaccgggattcgggggtctcgctcggccccggagacccaggagccccgcgggaagggggtcccggcgccgccgcctccgcgggcgcccgggctcgcgggcgagcgcggggctttatgcgcgcagggcggcggggggaggagccggcaggtcggcccccggcgggccctcccctcggccgtccccgcccgcccgcccgagcggggtcgggggagggggcagcatggcctgtccgtccggcccccttcgccgcgctcctcatctgccccgcgccgagcgccgccgccgccgccgccgccgccgctccgctgcccgcgccgcccgcggctcccgatggagactgacgcgccccagcccggcctcgcctccccggactcgccgcacgacccctggtacggcccggcccggcctgcttggcccgcgcccgccccggccccgccaacatggccgatccgggtccggccgggcc

SEQ ID NO: 10638 - DNA, 2300 bp, Homo sapien
atcaggtagtaaagctctagtaatatgatcctaaggttttgtcttcatgaaactgcatgaccttaaggcatcggtttcagctaacctgcccaaggccacacaggctgtaagggaacaagatgtgagcccagccttctcacactagagtccctgtttgttctcctacccggacttttttgttgctgttgttgttttgagaccagagtctcgctgtgtcgcccaggctggagtgcagtggcatgatctcagttcactgcaaactccacctcctaggttcaagagattctcttgcttcagcctcccatgtagctgggactacaggcttgcgccacgacgccgaataatttttgtatttttagtggagacggcgtttcaccatgttggccaggctggtctcgaactcctgacctcaagtgacccacctgtctccgcctcccaaagtgctgggattacaggcgtgagccacagtgccggccttttttttgttttgttttgagatgggagttcaactcttgttgcccagattggagtgcaatggtgcaatctcagctcactgcaacctctgcctcctgggttcaagcgattctcctgcctcagcctcccaagtagctgggattacaggcatgtaccaccatgcccggctcattttgtatttttagtagagatggggtttcactatgttggtcaggctggtctcgaactcctgaactcaggtgatccactcacctcggactcccaaagtgctaggattacaggcatgagccactacatgcagcccccaggagctcttgatctgaggcataaagatgcttagagggtttccaaatatattttatggtcacctattctcccaacaatgtgtgctatactgtgtgtttacacataggtgtgtctttagaggaaagggttcaaagctttcattagattctttttttttctaataaagaaaaaagctttgttgcccaggctggtctcaaactctcaagctcaagcaatctgtccgcctcggcctctcaaagtgttgggattacagccatgagccaccacgctggtcctcattacattctcaaaggggcctattgaaaaaaaaaaaaaaaaaaaaaaaaaaggccgggcacagtggctcacgcctgtaatcccagcactttgggaggccgaggaaggcggatcacaaggtcaggagatggagaccatcctggccaatatggtgaaaccctgtctctaccaaagtacaaaaaaaaaaattagccaggcatggtggtgcgtgcctgtaatcccagctattcaggaggctgaggcagtagaactgcttgaacctgggatgcagaggttgcagtgagccaagattgcaccgctgcactccagcctaagcaacaagagtcaaactccgtctcaaaaaaaaaaaaaaaaaaaaaaaaaaaaaagatgagactgttgagtcaggattaggatccaggtctgctggcaccaatttcagtgctctttatactttctgttgctattcattcattcatccattcattcagcaaatttatatcaagtatctggtatgtgccaggtatgattccaaattacaccattcccagattattctgagaatgctgcagtgccaaactcttggtatcacagactttatattctagtgggggagacagacaaaataataatataacgacgaaggtgcaatgttatgtgctatgagaaaacgcagtcggaggatggcgaggaaggggaacggaattttagatagggcggtctgggatcagaacctccagatgcccgtccatggactccaacgaagggagcgattccaggtaccagggcaccctgcacaaacctctcttgagcttccgcctcgcccaggtggggacggtagggagaccggagggcacacgcatgcgcacgaaggaaacggtaaagcctgaagggaggtgcagagcgcatgctctctcttgcccgagatgccgaggattttgacaaggactccgtcgtcccggatgatagtgctcaggttaatgccagtgggagggcggcgcccaatagtaacttcctttggaggttgtagtaccgcccccagagccaattttccacttccgcttccggcgctgcggcagtccagatcaaaaatggcggtagttggtgtgtcctcggtttctcggctgctgggtcggtcccgcccacagctggggcggcctatgtcgagtggcgcccatggcgaagagggctcaggtactggggccggggtcgacgggtcgagcctcagccccactcgggcgagacagggagggactgtgaccttg

SEQ ID NO: 10639 - DNA, 2300 bp, Homo sapien
gccaccatcaatcttaaccattagttactatataaaaataaaagtgtgctcaaaagcactcactgaaactgttgtgcccagatcccttttcagagcattagttccctgagaggaaaaaaagaggtcctaaccaattgctttcataaatagtgaccccagtacagtgtatatgtcttttgcagcagaaatcaagaggtcaggcagctctgctcatcctgactagtttatcatcgtttgcatacaaggtatatttatgtaaagctgattccacgccaagtattgcaaccataatctcaaaaaaattgttcaattttagcacacagttcctgcaagataccacagcaggtgagaaatcatctcaaagagttcatcttttacaactgagaggaaaacatcgaaggaggaaataaaactcctctctcctaagttcctcatcaaatctgatggctatgttcacagagttagttgacaaaaatccagagtcctcaatttctggacttgcgaaatccttcaaggtgactgtcaaggtcaagaagaattttcaggcttttctttgccatggcccatgaactccagtccttcaataggaatctctttctcctttattgctttctggtaggaggagaaaacacattataaagacctacatgaagcttaagttgcaagctttgtaaataaaatatgacagtacaaaagtaaaatcaagctgattataaagacttataaccatgattcaaaccacatactttttaaaaaacaagtaccggtcaggtgtggtggctcacgcctataatcgcagcattttgggagaccaaggcaggtggatcacttgaggccagaagttagagaccaacctggccaacatggcgagaccctgtttatactaaaaatacaaaaattagctgggcatggtggcgcatgcctgtaagcccagctactcgggtggctgaggcatgagaatagcttgaacctgggaggcggaggttgcagtgagctgagattgtgccattgcactccaggctgggagacagagtgagactctgcctcaaaaataaataaaaaccagaagtaccataatgaataaatcaagtgtaagacctgagggagactggaaaaggagttgtgagggaaccgttaaaattaagtgaaatttgaaaaataatcatcactttgtgttagtgaaagacttaggttcaaatctgggttccaggacttactggctatgtgactaactgtaaatgggatgaagacagcaactacctcggggaattgctgtgaggatgtgttgggttaacttattggaagtgctttgcccggtgctgttcttaacaattcaaagcagttccacatccattgggccagaataaacatttcctggctgcagttgcggggactggtcaagagagagaaacaggctaacgaagggtttataacaacaaaaaaatgtgaccctccagtctgaattctgaagtataatcccgcccagaccccagcagtaatagtggaaaagtgcaccacctgcgaaagaaccaaggaaacctgatgctagtgaactcggattaatcacttcctatttctgggtgttagttttttatgtataaaatatgagtaactatgcccaccttgcgagtttagggtgaacaccaaatgaaccaaaggatgtgactgtgcttcttgaaaagcactgccccaatatttgtcattcggagagacacccaagtggcctcggtggtgatggtaggggagcgagctcctgccactggcctcactgcgacttttctccacccttccagtccagtcccaatccccgtaaaatacgatgagtgtggtgggacacagcgccgagaatgcagggcctgggaacagaggcgggagggctcacctgaacacactgctggtagcgcttgaagaggtcggtgcacgggtccccggagctgtcccccttgagaaatttctcggcgaaccagcgattgaagcactggtcgtactcgcgcttcatgtccgtgcatgcctcccccacactgttcatggcgacagtggtggcggcggcgacgacggcgcactctgatgtcatcactctcaggcgcgtcgctcggcgttacgcgcgggcgcactgcgggggccaaggaaggaagaaatgtggtcgcggttggtgtggctgggccttcgggcccctctgggcgggcgccagggcttcacctccaaggcggatcctcaggtaaaggccagggccatctaggcgggtggcggagcaagccgggaggcacttcggagcgccggtgacccacactccccgcctc

SEQ ID NO: 10640 - DNA, 2300 bp, Homo sapien
tactaaaaatgcaaaaactagctgagtgtggtggcgggtgcctgtaatcccagctactccggaggctgaggcacaaaaatcacttgaacctggagggtggaggttgcagtgagccaagatcatgccactgcactccagcctgggtgatggggcaggactccacctcaaaaaaaaaaaaaaactttcttgaggaagtgggaggctgaggcaggaggattgcttgagaccaggagtttgagaccatatggggcaacatggcaagaccccgtttctacaaaaattttaagtattagccaggtgtggtggtgcacacctatagtcccagctatttgggaggctgaggcaggaggatctcttgagtctagaagtttgcgaccagcctgggcaacatagtgagaccccgtcccaaaggaaaaagaaaattgcaaagtagagaagacatttgaaagaatcaaacacggccaggtgctgtggctcatgcctgtaatcccagtactttaggaggctgagatgggtggatcacctttgctcaggagtccagacaagcctggggaacatggcaaaatcccgtctctatcaaaaatacaaaaaattagccaggccaagtggcacgcgcctgtggtcctgtacttgggaggctgagatgggaggctctcttgagtctgggaggtggacattacaatgagctgagatcatgccactgcactctaacctgggtgatagagtgagactccatctcaaaaacaaataaaataaaaattcaaggcaggaataaaacagtaactacataatgagctcacattttaataaaagagatataacaaatgaacaaaagtccattaaaatgttagggaaaaaacccaataggatgagttactaactagaaggggagaagggatttggagtggttaggagagccctttctgagaagataagctgagacctgtgccaagagggaggcagccatgcaaatactgagaggaaggaaaaaaacgaagggccagtgcagagatctagagaggaaaagaacttgtcttgctggagaagcagtcaaggtagccaaggagagtactgagaagagtacgttggagtgagtaggtagggactctatggagtagggccttaaaggcgatgattaggccaggcgcggtggctcacacctgtaatcccagcactttgggaggccgaggcgggtggatcacggtcaggagttcaagaccaacctggccaagatggtgaaaccacgtctctactaaaaatacaaaaaaaataagccgggcctggtggcagtcgcctgtaatcccagctactcgggaggctgaggcagagaattgcttgaacacgggaggcggaggttgcagtgagccgagatcgagccactgcactccagcctaggcaacacagcgagactccgtctcaaaaaaaaaaaaacaaaacaaacaaacaaaaaaaaaaacaaaggcagtgattagcagttcgggttttgtttccacttacactagcgagagcatcagtaatgaacaaggggaagagtgaagccactgactcgcgaggtgactgtgggcaagttcctgaatcttgctaacactctttaaccccctggaaaactgttcgctaatcgtcacattaaacggctgcgaacgggccacggtcaaggcttcggggctgcagccgcgagtttacctgtcctccaggaccgattccatgggctccaccccgtctgtgtccacggcgcgtagccggtcggcgaaggcgatagctttctccagtcgcgccactgcctcgcggctgccgaagtccacaagcgctagacgctccaggtgctcgatcaccgcagccgtgatccggccactgccctggaggagggatgaggcggggagtgtgggtcaccggcgctccgaagtgcctcccggcttgctccgccacccgcctagatggccctggcctttacctgaggatccgccttggaggtgaagccctggcgcccgcccagaggggcccgaaggcccagccacaccaaccgcgaccacatttcttccttccttggcccccgcagtgcgcccgcgcgtaacgccgagcgacgcgcctgagagtgatgacatcagagtgcgccgtcgtcgccgccgccaccactgtcgccatgaacagtgtgggggaggcatgcacggacatgaagcgcgagtacgaccagtgcttcaatcgctggttcgccgagaaatttctcaagggggacagctccggggacccgtgcaccgacctcttcaagcgctaccagcagtgtgttcaggtgagccctcccg

SEQ ID NO: 10641 - DNA, 2300 bp, Homo sapien
gcggatcacgaggtcaggagattgagatcatcctggctaacacggtgaaaccctgtctctactaaaaatataaaaaaatcagccgggcgtggtggcaggcacctgtagtcccagctactcaggaggctgaggcgggagaatggcatgaacctgggaggcggagcttgcagtgagccgagatcacgccactgcactgcagcctgggtgacagtgtaagactccgtctcaaaacaaacaaacaaaaaatcctacaagcagaattacaagatcgaagggtatatgtatattatgaaagcctgatgtatactatcaacttgtattccaaaaaagatatacactcagtagtatatgtgggtgtctagtctttggtttgttttgattttaaaatgctcagatggtataatgagaaatcaactaccttctgattaaatgtgtggttttagtccctttttttgtttgtttttgttttgtcttgtttttgagacagagtctccctctgtcacccaggctggaggagtgcagtggcacaatctcggctcactgcaacctctgcctcccagattcaagcgattctcgtgcctcatcctcccaagcagctgggactacaggcgtgccaccaagcttggctaatttttttttttttttgtatttttagtaggggggcgggtcttgccatgttggccaggctggtcttgaactcctggcctcaagtgatccacccacctcagcctcctaaagtgctgggattacaggcatgagccaccacgcccagccaggtttcatttttaatatgaaaaatctttatttatttttgagacagtctcactctgtcacccaggctgaagtgcagtggcatgatctcggctcactgcaaccttcgcctcccgggctcaagcaattctcctgcctcagcctcccgcgtaactgggattataggaacacgccaccacgcccagctaatttttgtatttttagtagaaacggggtttccccatgttgcccaggctagtctcgaactactgacctcaagtgatcctcccgccttggcctctcaaagtgttgggattacaggcgtgagccaccgcacccagcctgaacaatctttaggttaggagtattccagccgggcgccgggctcaagccggtaatccaacactttgggaggccaaggctggaggatcggttgagcccaggagttcgagaccagcctctctacaaaaaaaatagaaaataaactagctggacgcagcgcagacccctcacggcgccccgaggtgggaggatcacctgagtccagcgagatcgagactgcagtgagccgtgttcgcgccattgcactccagcctgagcaacagaataagaccctgtatcaaaaacaaacaaaaagtcttctggtgcaaggcctcactgtaaggtccctgggttcaatgctccgcgttctgggatgtgaatgtggaaaagtaagtgccaaggtgggtgtctacctgagctccataaggactcagtacttaggatgggagcatggctctgggttccattcctgacccctctgtggcctcagactctgcccgggagaggatgaaaagcacaagtcggatgcactctatagtgatcgctgtgatactcattaagagtcttactccctcgactccgacaaactcaaggccaagctatggagtccatctcatgctgacaccgtcagttctgagcaactgtaaaatggggacagggtggcccgggggcctactgacctgaggtgggggccgcgacagcccggccgctgcggggtcagcctgcggtctccgcctgactccagctctcctgcgccccgcaggccctgggcgctacccacgtcagtgagtgctcacaagtctgtgaggtaggcggcgccacagagagaaactgaggcgcgggagcccaagccacttgtccagcgcctcagccgagcgcgaaccgcgctcggggatggcatccacacggcccggccccaggctctccctgtcagcgcccgaaggcccttcgcacctccagggggcgccggcctgcgcgcacgcgcaatggtcgcagccgcgttctctttaagaggactccttttgcctccgccgaccccttcgcttccgctccgcgttcccacaatgcagtgcggctgagcgcctcggagcccgcggggacgctgcggggggacccgtgctgaggcggcggcggcgacgtgggctgcggcgggcccgcggcgtcgggcggtgcggatgtcgggctgggcggacgagcgcggcggcgagggcgacgggcgcatctacgtg

SEQ ID NO: 10642 - DNA, 2300 bp, Homo sapien
tgtttgcactccaggtgcagtgtctcatgcctataatcctagcgctttgggaggctaaggcaggaggatgccttacccaggagatggagaccagcctgggcaatatagcaagaccccatctctaccaaaaataaaaataaaaaattagctagtatagtggggtgtgccggtagttccagctactcaggaggctacagcggggaggattgcttgagcccaagagttcaaggctgcagtgagctatgattgcaccactgcactccagcctgggcaacagagcgagaccctgactcaaaaacaaaaacagaaacatctgtttgcaaagccctggttctctcaggggacagagaggggaatgcaaagaagttgtttttctctctcggtaagagcagaacccttggtacccccaaacttatcatcttaggatcacaaagccagagcttaaggctgtacataataatctgtttcttccaggagccacttcccccaagaaactccaaaggtattatttcattagcagggtgccaggtggttttggccagggcctctgcaactcttttctctgtgaccattttccatttcggctcatataaatcaacctttactacaaagctataaagtaaaataatgtaatgagtgcagccaactgcagctgttctcaaactcaatgtcacagccattacacatgtgaaatatttacaggggttttaatcaattttctttcctgacacccgttttttattaaaaattacaaaaataataaatgcacatggtagtagatacagaagaacacaaggaatgaattataaatgttaactgtacagagataaccattgtcaatattttgtcttaaatacatccagtctacagataagaacatattcatatcatataatacctatcacactgtatgtatctttttttttttttttttttttttagacagggacttactctgtcaaataggctagggtgtagtggtgcgatcgtacctcactacagcctcaaactcccaggctcaagggatccgactgcccctccctcccaagtagctgggatcacaggtgcacaccaccacacctggctaatttttttgatttttaataaaaatgaggtatcactatgttgcccaggctggtctcaaactcctgggctcaagcaatcctcccaccttggcctccaaaagtgctggtattataggcatgagccactgaacctggccaatgtatcatttttgttacctgcttttcgtaatcccagcactttgggaggccgaggcaggtggatcacgaggtcgggagttcaagaccagcctggccaagatgttaaaaccctgtctctactaaaaatacaaaaattggctgggtgtggtggtgggcgcctgtaatctcagctacttgggagggtgaggcagagaattgcttgaacctaggaggtggaggttgcagtgagccgagatcgtgccactgcactccagcctgggcgacagagcaagactccatctcaaaaaaaaaaaaaaaaaaaaaaagccttctacaacataactatttacttatgtatttttaaagatggggtcccactctcacccaggctggagtacagtggtgcaatcctagctcactgcagcctcaaactcctgggctcaagcaggcatcctgccttcacctcccaaagtgctgggattacaagcatgagctactgcacccagcccaattttaatagcttctttatagcccatgcggccaggggcggtggctcacgcctgtaatcccagcactttgggaggcccaggtggttggatcacttgcggtcagaagttcgagaccagcctggccaatatggtgaaaccccatctctactaaaaatataaaaaattagccaggtgtagtgttgcgtgcctgtaggctacttaggaggctgaggcaggagaatcgcttgaacccaggaagcaaagcggaggttgcagtgatccgagattgcgctattgcactccagcctgggtgtcacagtgagactccgtctcaaaaaaaaaaaaaaaagtccatgcataacttcttgaaacaatcacttatcagtggacacttaagttgcttccagtttttcagtattgtaacagtgctttgttctgatgaatatctttcaaagataaaaataatctttttaattctactttcagaagtaataggtactcattgtataaaagtgaaacactgtagaaatttagaatctgaaaaagaaagttcctttgtaagatctgtaatcttacaactcaaagataatgttaaaatttgattttttcc

SEQ ID NO: 10643 - DNA, 2300 bp, Homo sapien
ggaaaaaaatcatgaggatgatttaggaaatttccctggggtttctacttagtggagtcaccgtggctttactttagtgtcatttgcatttccagggtcctcacttgttgtcaacctatttcttcctcaagagaggtactatagtaatattataactcctcaaaccctgaatctcatcattagaaacatggaactggaaaaagctgttgatttaattgatatgcatatgttgaacctgaaaaggttctaattattgccatttttttccttttttttttttttgagacggagttgcccaggctggagtgcaatggcgcgatctcggctcactacagactctgtgtcccgggttcaagtgattctcctgcctcagcctcctgagtaggtgggattacaggcacgtgccaccatgcccagctaattttgtatttttagtagagatggggtttctccatgttgatcaggctggtctcaaactccttacctcaggtcatccacccgcctcggcctcccaaagtgctgggattataggcatgagccaccgcacccggcctattcccatctttttctttctggagttgtgtgcctctgctcaaattgttttatttttattttttgagatggggtttggccatattgcccaggctggtctccaactactgagctcaagcgatccccttgactcggcttctcaaagtgctgggattacaggtgtgagccatcatgcccagccacaaattgttttaaggagtaatgagagtagatggtcagaggaaaatgtagaaatgtaaataggaagcttccagatacatgattaacctgataacttatttatggaggttcgaaaaatacattataggcatttcagagctggttgttcaaaaccttgctgtggcctttgggatagttgtataaactgacaattattgataagattcattgatcatttactatgtgcctcacattgtgctgagagaacttcaaatgtttaatactgctaacaagcgtatgaactggtttccttttacatttagtcctcctttacttaaagaagacattcaaatagctagtaaatgacagtgctgggatttaaatccagatctgacttgtccctcaactcccccaagatcttgcttttttaaccacttcgtgtctcctccctaagccagaggggacgtcatctctctaacggccgctttttcgtccattagaatacctcctcctcagagataaatcccaaccaagaatctctcccacacaggaaagactgcctcacctgagcaagaagcttcaccctggacaaaaaccccggggctcaacactcccaaatccacccggatccccatccccaaccccttaaaggatgtccgcattgcttggcagagaccccactcttggggataatcccttaattcgtaaggaaacaccctccctccttgaagccctccctcaatcctgaggatgccctcccctaaatatttcagagcagaaccgactacaaatggggcccagtgcaaaatgaaaacgtaagggtccctcctgtgagactgcactgctggtttacccacgaagccggccctgcttcagagataccctttcagtaaagggagaggccacctctgtcgtaatcctgctaacctggggtgcgagatcatgcgacctgtcgtggtgggggggcgggggggtgggggcaggaatggccaccaacttctagagactgttgttcgagaacacaccctgggacaacctccgtgaatttggaatcacttcccttggccccggcagaagctcccttcctacctctccagacagctgggtggtcctcgtaacccggccggggctccaccttctgggtgtgtgggcctcgtagcgtgcggcccattgcccgggcaaccgacgccgtgagcggtgcattgtggtctgcaacaaaatgcaggagaaagatcctgagggaaccatggagtcaatggaccaatggaagaatgccgtgggctgcgtcaagccaatagggtcgcgcggcgaggggcggggccggcgggagcagggcggggcctgagcactaggcggcggcggctggcgtggggctgcttagatgcgccacggtttcggtagcgacggtatctctagccgggcctgagctgtgctagcacctcccccaggagaccgttgcagtcggccagcccccttctccacggtgagaaactcggggggccagggggtgtcctcgctgccttatttcgccccactccggacttagccctccgcgtagcccgcgcttcctgagaagtggggtggggggc

SEQ ID NO: 10644 - DNA, 2300 bp, Homo sapien
ggattttaattaccagaggtcagtgtttgcctcttggataagccagagcctgtaggggcagaaaggaggaacgtcagcatctgcaaattcttagaatgaaagaatgttccccagctccaagccgcctacatagtacattaatacaaacatacttgcagtctgagcgaagatgggaatggaggctgaggaggtcaaaggacgaaaggtcagccctaaagacagggtgttttgttattatggtaattacaccttcataccttctataatattcattgacagacggtgacatcaacaggtgtagtttatcatgttctgtgtagagaactaaactaccctactgtatttgccatgcccccaattccaagaaaacggcaaaaaattagcccatcccattcctcatcacaaagatcttaactgcacccctgcaacacaagacttttccaataggacaaaacttcaaacagcattgtataccaaatgattgcggatcaaaattaaatttacaggaacacaatactgaagcactccactgttgctgtaaaaactgctggaaacagaatctgtcaactggccaaattttatccttaattattatccaaacagccgtcctcttcacatctatccggatgatgctaatctactaccctgtccactaggttagcaagttgtaggaacaactcttcaccatttctcccaccctaagaggtactggggagtagaatgcctgtggggggcattgggtggcaacggttatctttctctgcaaaattcttacaagtgtttgtggagcgtcacacaagatttagctactctaactgcacgcagtgcgaaaaccttttaaagctatgaaggggagtaacgctcttgcaagctagaggcacgcactgctgcgtttgtcaaaaaaggcatttatttctgttccatctgaagtctttcatcttcccattctcgactggaaccctcccacggcttaggctgccagctttcttcccttccagcaaacactgctcgagaagttggcagtcctgccggctttctagactgccatttaccaagcccctaccccagcccccagccccgccaccacccaccaccttccctcaactccccactggaaggctggcaagatctcctcccggcccggctggaaacacccacgcagctcccccctccggaacacccagatggatcctcggcgcaggaaccacacagaagggggaaccgctgctccctgatcttagataccgttgctaggtggcgctttccccccgcggagctgggtaattaaaaaaaaaaaaaaaaaaacttcggacgccgggggtctggtcttctccacaggagcgcaaaatgcatctgcgtcctttctggaagcttctacgccccaagccgccagcagtattcccgggacctgtcaggcgcccttaggaaagcaggatcggggggaaggaaccccctgctcccggctgcgtatcggcccccgcgcccatcctcaccttcttgatatgagccgcaatgtccttctctatgttgtatttctccagcgcctgagtagcgcactccaccgagtcctgttgcatctcttccgacatgtccgcatttttgatcacggcctttcggtcgcacatggttacctagtgggcaaggcctggggtaaggggttgagttgggccgcgccccccaggcactaactgcccccaccccggccggcgccaccacgggacgacgccccccaccccacttctcaggaagcgcgggctacgcggagggctaagtccggagtggggcgaaataaggcagcgaggacaccccctggccccccgagtttctcaccgtggagaagggggctggccgactgcaacggtctcctgggggaggtgctagcacagctcaggcccggctagagataccgtcgctaccgaaaccgtggcgcatctaagcagccccacgccagccgccgccgcctagtgctcaggccccgccctgctcccgccggccccgcccctcgccgcgcgaccctattggcttgacgcagcccacggcattcttccattggtccattgactccatggttccctcaggatctttctcctgcattttgttgcagaccacaatgcaccgctcacggcgtcggttgcccgggcaatgggccgcacgctacgaggcccacacacccagaaggtggagccccggccgggttacgaggaccacccagctgtctggagaggtaggaagggagcttctgccggggccaagggaagtgattccaaattcacggaggttgtcccagggtgtgttctcga

SEQ ID NO: 10645 - DNA, 2300 bp, Homo sapien
ctaaagctttggaggccaaattccctgtgggcttcaaatagaaatatagccaggtcactaaagagggaaaagggatagaaaaaatatgagttaggccaggttcggtggctcacacctgtaatcccagcactttgggaggccgaggtgggcagatcacgaggtcaggagatcgagaccatcctggctaacatggtgaaaccgtctctactaaaagtacaaaaaaaattagccttgcgtggtggtgggtgcctgtagtcccagctactcgggaggctgaggaaggagaatggtgtgaacctgggaggcggagctttcagtgagccgagatcgcgccactgtactccagcctgggcgacagtgagactccgtctcaaaaaaaaaaaaaaaagaaaaaatatgaattaaaccgggtgtggtggctcgtacctgtaatcccaacaccttgggaggattgcttgagcccaggaattcaagaccagcctgggcaacacagggagactccagctctacaaaaaattcaaaagttagctaggcatggtggcatgtacttatggtcccagttactttggaggctgaggtggcaggatcacttgggcccaggaggttgaagttgcagtgggctatgatcacaccactgcactccagcctgggcaataggagtctcaaaaaaaatgaaagttagaaaaaaggaacattttcggtctgtttatataaatacaaacataaaattaccccagttgcagtctcctgtttattccacagtacctcatccttttttgcagacagcagggaaaaaactggcacaatagtcaaaattgccaggtttggtggctcacgcctgtaatcccagcactttgggaggcagaagtgggcagattacctgaggtcaggagttcgagactagcctgaccaatatggtgaaaccccatctctactaagaatacaaaattagccgggcatggtggcacatgcctgtaatcccagctacttgggaagctgaggcaggagacttgcttgaacccaggaggcagaggttgcagtgagctgagatcacgccattgcactccagcttgggcaacaagagcgaaactctgtcttaaaaaagtcaaaatcttgcacctctaccctgaaacccttccaatcctaaagtagcacaactttgctaggattcttaaaaccacacattctgaagaaaaataaacttccaaatatgttactgacctaattctactcttacaatgggagttatcacccatcaattccaatctatcgccctcttctgtgtagcagtcacctagctgcttagaaatcccaatggcatcttagagatccatgggaaaacataggctaactacaagtcaggacccttcttgcagtttcccaagatgggtgtgggttgttccagcctgtcttatttcctttccacctacaagtctgccatatttgcttttctacgactgcagtcctcttaaaattgatagcaggaaacctctgatagctacttgtccccagctttaattgggtcttttcaggaaaaggtatcaattcacacttgttcctgaccacagcaaagcacagcacagcaggctgataaagtctttgcaggaatttacattattagaagagcatgaaaactgctgctcagaaacatttactttcccctaaggccaccttctttctaggcaggggagggggctagacaagggtcctggaatccatttcattatcccaactttgttttgagcttatttccattttatagccatagaaagcttcaagtactactacatacacatccatcaccacaacctgaggccaaaggcccagaacattctatagcaatgtcttaacaaatatccttaaacattgatttttttcagattaggactaaagatttaatttaaatgtttctttatcatgcactgcatttctcaacatgcacaacagttgcaggatgggtgagagaatgtgactaaagagtactgaaataccccacagaaacttaacttctgtaaggatggactcatccccaccaacctgggcatctgatcaagtgaccgtcttcaacgctgttatttgaacaaattgtaattcacacacatacacatctgcatcagatttattttttaaaggaatggattttgagagaaaacaacgtgggcagaagtatggaatagaaaataaatacaaatgtaggctattctgctaattgttttataaccacgacaaactagtacagagaatgccctgtacaaaacacaacaaaggttcaaacatcgagatgttcccttagcaaggct

SEQ ID NO: 10646 - DNA, 2300 bp, Homo sapien
agcctgggagggtgagaagtgagctatgattgtgccactgcactccaccctgggtgacaaagtgagatcctatttcaaaataaagaatgaatcaataaataagtaaataagaccagcctagccaaaatggtgaaaccccatctctactaaaaatacaaaaattagcgccgggagtggtggctcagcactttgggaggctgaggcaggtggattacctgaagtcaggagttcaagaccagcctggccaatatagcgaaaccccatctctactaaaaatacaaaaattagcctggcatggtggcgcatgcctgtaatcccagctactagggaagctgaggcaggaggatcacttgaacccagaagacagaggttgcagtgagccgaagtcatgccactgcactccagtctgggcaacagagcaagacgctacctcaaaaaaaaaataccttccaacagtccttgtcctacttcactttttacaggttttcctccacatatcatatgaaataagagaacagtgaaatactgttggtctggatacttaatctgatgtgcagaaggaacagccctaaatcctgagatccattcttttatataactagatatggaagatataagattctttgatgagactttatttatttatttatttatttatttatttatttttgagatggagtctggctctgtcacccaggcttgagtgcagtggtgcaatctcagctcactgcaaccagtgactcctgggttgaagggattctcctgcttcaacctcctgaatagctgggactacaggtgtgcaccaccatgcctggctgatttttgtattttagtagagacggggtttcaccatgttagccatgctggtctcgaactcctgacctcatgcaatccgcccacctcgggctcccaaagtgttgggattacaggcgtgagccaccgcacccagccacttaatttcttttaacaaagacatgagaattatgaatacatggatgaatcatttcgcccttgtatccttccttttttttttctcatcactataccaacgaggaccttctatcattcttaaaataaaagagaaagaaacagaaatcccagcgcagtacttcccaaacgaaagcggttaggtgtccatctgtcaggctatattaaaccaggaagagaattttcatttcaaaacagtttcttctattggcgctttctcctcgtgaaatatttacaggaaacatacatttaaaatggaatgaaagcagaaacatacagtaatccaagcaaaactcaacaacgtccgttctttattttgcacaagacggtctgcattacccttgccattaaaaaaagactgaaaatctggggctgaagtaaaacacccatgacatgccacctggagctaggaatgtagctttgtgtcagcaggagaccaagtgtgagtggtggttctggcttgctaagtggataccagagctttcgttcccatttatgagcttcctaggttcataaaacggacagaacaaagaagtctgtcctatgtttatttttcagagtagtgtaacatatgtttctcaagaatggtctgcatctttagcatcagaatcgccagagaaatttgtttaaatagagattaaagggatataggtcagatcaaaatctctggtagttggggacccaggaatcttcattttaaaacgtaaaccaagtgattcttacgctcaacaaagtgtgcaggaattggcccgtgatcttggctttttaaccacaccatgcctcaatttcccccttctgcacaagacaacaagagttcctggatatcttgcgagttagtacttttctgcctagccggattcagagacatggccgctaagaggtgacccggggctcccctgagatcccctgattcctggtgaattgtaaattcaatttgagaagagagagaggaagggatttccgatacttagagaccaccctttggatcctagagataatgccggcacaactgtgtatcagatttcagggcgcgttcggctaataatgttgccggccagccgccgtcgttcgtggagtgacgcaacaaggcgtactctctggccgttgtcactcgactaccaagatggcggcccccgggagctgtgctctatggagctattgcggccgtgggtggtcgcgggcgatgcggggctgccagctcctcgggcttcgtagctcttggcccggggacctactaagtgctcggctcttgtcccaagagaagcgggcagcggaaacgcactttgggtttgagactgtgtcggaagaggaga

SEQ ID NO: 10647 - DNA, 2300 bp, Homo sapien
gattacaggtgcgcaccaccacgcctggctaatttttttgtatttttagtagagacggggtttcactatgttggtcaggctggtctcgatctcctgacctgttgatccacccggcttggcctcccaaagtgctggggttacaggtgtgagccaccgtgcccggccccatatgcatgattttctaaatctcagtctgtatctgtaaaatgaggaactgcttgtctcataggtaagaacatcacttgttagctatgtgataataggcaaattatctggacttttggagtccatttactcatctttaaattttatttatttagggacagagtcttgttgtgttacccaggctggattcatactcttgggctcaagtgatcatccctcctcagcctcctgagtagctgggactacaggcacacttagtctaaaatttagttattgagaagattaaatgtgataatgttaacagctgttaaatacaatttataggagcccattgttttgcactgagcttcagcacagtagaccaaaccaaaacagagttactcaaggtgaatttctacccaaccacgcctaaacgaaattgtttatctgaccttctgagaaatcatcaaatccccaaactggtcagttttaccccacataaggaagtccattctgcttaaacctttacaagaaaagtaattttgaaatgactaatctgctttttgttctctgtttctactttttaaaaaaaagtttagacagggtctccctctctgtcactcatactggagtgcactggcacgatcgtatctcactgcaacctccaactgctgggctcaggtgatcctcccacctcagtttcctgagtagctagaactacaggtgtgcagccacagccactatgcttggctaatttttttttctttctctcttttaaattaaagttagttttattcaaactattttattcagagcccagctaatttttgtatttttaatagggtcgggattttgctatgttggccaggctggtcttgaactcctggcctcaagtgatctgccccctcctcagactcccaaagggctggaattacaggtgtgagccaccacgcccggctgcccaactaattttttaaaaaatatttttattctttagagacaggggtctcgctatattccccaggctggtctggaactcctggcctccaaggatccttccacctctgcctcccaaagtgttgggattacacgcatgaaacactgcttatggcctgtttccgcctctgtctcctgggtaatggggaccacaggtgcgcaccgccacgccaggctaaagaaataaagtgatgtactgtatgaagaagtgccgtaaagtgatattaaatgtaaggtattgtcattattaacgttattattattattcctaatatgagatagactaaaggccataaatcaattggtattaacgctagaataagaaccataaattggccgggcgcggtggctcacgtctgtaatcccagcactttgggaggccgaggtgggcagatcacgaggtcaggagatcaagaccatcctggctaacacggtgaaaccgtgtctctactaaaaatacagaaaattagccgggcgtggtggcgggcgcctgtggtcccagctactcgggaggctgaggcaggagaatggcgtgaacccgggaggcggagcttgcagtcagcccagatcgcgccactgcactctagcctgggcgacagagcgactccgcctcaaaaaaaaaaaaaaagaaccataaatcaaacgagtctataaaggagttccacaggtattccaatgtttggctacattattatcagtgtatattattattgttactgtatttttagtgtactaagtgaaaaacctggacttggagcaactgcaagtcccattattttgaatgccctcacagtggggttggggcggaggtgggggaggaaataaaaaaaacaaaaccaaaacaaacaaacaaacaaaaaccaaaaaacaaaccacgagacccggatgtaggcaaaaactacatttcccagaatacctcaccccctctccactatatatacagtccatccgggttctttgagatgctgtttggcgactcgtcgccattcccggagcaggtcggcctcggcccaggggcgagtatccgttgctgtgtcggagacactagtccccgacaccgagacagccagccctctcccctgcctcgcggcgggagagcgtgtccggccggccggccggcggggctcgcgcaacctccctcgcctccccttcccccgcag

SEQ ID NO: 10648 - DNA, 2300 bp, Homo sapien
actggtcccttggcagggccacggcgttccctcttcctattcttttcttccctaccttcccccacatccctcctttaaggtggccaagaagagtgggagatgggaaaattcagaactcattccagatcttgcaaaaataggttgtgaaagctgcccccattacggacctcacaggaccagccaaggccaagacacttctacaaataatcagggatgggcataaagactaagctacaaagccatgcatcaaagtattgggtataacaagaaaatctagaaataatgtaaacgtctaccaaagggatactgaccaacttcacaatggtacgtccaaacaatgcaatactgcacagctaaaaaacagtattgtcgctgaagagctgacatgaaaatatagccaaatggccaggcgtggtagctcacgcctgtaatcccagcactttgggaggccgaggtgggtggatcacctgaggtcaggagttcaagaccagcctggccaacatggggaaaccctgtccctactaaaaatacaaaaattagccagttgtggtggcacacacctgtagtcccagctacttgggaggctgaggcaggagaatcgcctgaatccaggaggcagaggttgcagtgagctgagatcgtgctccagcttgggcaacagagtgagactccgtctcaaaaaactaaataaataaatacaaaaattagctggtcgtggtggcaggtgcctgtaatcccagctactcgggaggctgaggcaggagaatcgcttgaactcaggaggcagaggttgcagccagcctcctggctgcatttatataaagtttaagaacaggcaaaattaatctagcagggtagaagtggtaatagtggctgatagcagtaagcaatttgactggaagagggctcagggaaccttctgggatactggaaatgctctttattttaatcttggaggtggttatagaagtctatccatatgtaaaaattcattgagatgaatacacttaagaatatgtactttatgtaataccccataagacattttttttaaaatacttaaaaataaaagaaaaaacataatttaacagagggcatagttctcaagctgttttctctgtctcaggacccctttacacacgttactgagggtgcccaagagcttttagttttgtgggttatatttactatggacattaaagttgagaaacgtttaaaaaacaatacacaattcctagagcagtgacgtcatcacgtcaagcagcctctggaaaacttgactgttcactcagagagaatgaaaaagacaagtaacatcttagcattattatgaaagtaattttgacttcggggactcccaaatcgagtgaatttaggaaatctcagtggtccccagacggcactttgagaaccactggcgcagggagaaaatgacagaagaaaacacactacacgacaacagttattctctctcagtgctgggattataatttatttgcttctttgtgcttttctgtcaaaaaaaaaaggtaaacggaaatggaaaatacaatgaccacgtattgtttctgcgagcaaaaaacgagacggcacactcgcctccctaagattgctgaaaggcccaaacagcaatagcatatttagctgtatggaagaattaaactgagctcaaacctgaaaataaaagtccgatttcccgtttgtcaatgcctgggctgtgaggtgcagggtcttgccctcaaaagctccaccgttcaccttggggagagaatatactcgcatacataactgtggtgcaaggttcccagggccccaagggtagcggctacatcctacacactattgtaaacttcagtgtgcaacagaaccatccattacagctgcaaggcgctccatcccggggttcagccctcaaactagtcagtgaccctccgcaggacgcatgcgcgcttacaaacgcagttgggcggggcttgagagagctgacagacttcggcctctcaactttctagctccgccctaatatcctgtctccttctctgaatggctgaaaggctgcggaagcaagcttcccattggcagcggacagaattcacatccggtttgcacgccggaccggagagcgcggaggcagccatggtgcggttcaagcacaggtaagcattcccttccagaccctcccagtgccttgctgggtcctcgcggccccgctagtgtccaccttcctctcgcctgccgcaggtacctgctctgcgaactggtgtctgacgacccccgctgccgcctaagcctcgatgacc

SEQ ID NO: 10649 - DNA, 2300 bp, Homo sapien
gtggcacagcagggatttagaatacccagcagtcctctgcctctcattggctcctgagggtttctgataaggttctttatctcctgtgatttatattgaatgtgcctttgtttttaatcctgccaaacactgattattctgagggctggagcaggtaagacattgactgacctcgaactcaaagggtggactcattacaccctgcatatcccagaggaccctgcaatgagccttcagggctgcaacgccccaggctgcttcaggatttgggctttaggaacctgagtggctttgatatggcaattcagtcccttaagggtagctgatctggggaacaatttgccacactttcctagtttactttagcctctgggcagttgctttcccagcccatccattttccttaattccttgcctatggataagtaaaagaggcacacagggcccagcgcggtggctcacgcctgtaatcccagcattttgggaggccaaggcgggcagatcatgaggtcaggagatcgagaccatcctggctaacatggtgagaccccatctctactaaaaatacaaaaaattagctgggtgtggtggcgggtgcctgtaatcccagctactcgggaggctgaggcaggagaatcgcttgaacctggggggcagaggttgcagtgagccgagatcgtgccactgcactccagcctggtgacagagcaacactctgtaaagaagcagacagtgcagagaaggatgaactcttggcatgagtgaagtgtaatatcggcaatctgtttgtgtacccttctttttttttttttttttttttttttttgagacagggtctcactctgttgcccaggctggagtgtagtgacccaatctcggctcactgcaactttcacttcccgggttcaagttattctcatgcctacaagtggctgggattacaggcgcccaccaccacgcctggctaatttttgtatttttagtagagacagggtttcaccatgttggccaggctggtctcgaactcctgacctcaagtgatccgccggtcttggcctcccaaagtgctgggattacaggtgcgagccactgtgcccggcctcgtgtatccttttaatgaggccgagcggtgacaagactgtggatggcattggggccagggaccagaacagggagagcctgggaggaacccctccagccccccgcaaagctcaagcaccggatactaaagaagaatggtagatggggcctcacgatgtgcagggggaagggaactggcttaactggatggtcccctgtccgagcactgggctaggccttttgtgtgcatagtatcgtctgctgttaccaagaaattagttatgcttatcatctgcattttacagaagaggagaacaaggctcagagaggttgatgacacctgcccaagttacccagatggtaggtggcagagctgggatttgagattcagataaggcctgggacgctccctggctgcccaccgagagcaggaatttctgtagcatctagaaaggcaggaaggtgaaagaggggacaagagctggagggggagcaaatgggtcctacctgagacttaccatcatcaggtgctgccagacctggcttctcttctattctgagaactgatatcctgtggctgacttaccagggtcgtcctagtccccccgcacggtattgggagtggaggcagccccacacggaggcgctgggagactttcctcccagcagtgtcctgtcactgcattccggcccctgcgtttgtaggcagtgatgtcacagagtgccttcatgctcctcgggtctccggttctccccggacctctgtagtcctcattgccaaagttgtaccccctggggagtgcaccctgcctgcatttctggaggttcgggcggttccggggctctgcaggagcctccaggcgtgataaagagcgctgccggcactcccggggtctcggcctctttggggcccattgccaagccccttccctcctcgtgctcccgctccgcgttgcagcgtccccttcgccgccaggggccgcccggaagcggggctcccccagggcggggcggggcaaggggcggggcgcggcggtacctgggccgccagggagccgggggtgggctctccggggacagccggcagcgcccccagatctgcaccgccagccgccgggagctccgggctccgggcgtagaggctgcgctgtcacatgggcggcggcgacggggccgcatttaagcggccgggggacggcgcccgcctccagcgcgtcctc

SEQ ID NO: 10650 - DNA, 2300 bp, Homo sapien
tccagtagctattcggtgtcttacactttctcatgtatgctatataagcaagctaggaaaagccccatttttccagtggcggaaactgaagttcaggaatgggaggcagccacccagtcagaagctggcagcgctgggcatggtgtctcatgtctgtaatcccagcacttcgggaggccaaggcaggtggatcacctgaggtcaggagttcaagagtagcctgttcaacatggtgaaaccccatctctactaaaaatacaaaaattagccaggcatgaagttgtgcgtctgtaatcctagctactcgggaggctgagccaggagaatcgcttcaacccaggaggcagaggttgcagtgagctgagattgcggcactgcactccagcctgggcaacagagcaagacactgtctaaaaaaaaaaaaaaaagaagctggcagagctagactcaaccccagacctccccgtccttcccattcattggagtccactgacccctgcctgggcctgcttccttcatgctgtttccaggagacacgcatcatcaccctcttttctgttctttagtcatcaatacccgccccccaggctcctcctcctccatctccccctccagaggtttggcccaaacaaggctgctgagtaactcccctgattaaaccattgcgtggttgtcagcagcagcaccggggaggtccaggagttatccagggacctccttcccagctccctaggagtgagcaccctctgggcagcgcccccacccatcttcctaacaggagttctgagcagcccccccacacgggagaaaagttcctgggaaaggaggctctccgggctgaaaactgagctagcgtgcaagaatgggcttgggaggagttctgcttccagtctatctctggtgccccctgctggaaaaagctgggtgcaggaaacagggacacttgcacgcggggaatctggctggggctgtaggtctcaaaccggacatctgaggcgtgagatgaattcatatcaaagccgaccctggagggacgaggaagagccagtcatctaaaaagctccagctgtgggacctcgaagagcgcttcgtaaagggcttcttctctgcccggcaccccaaggaagctggggagaggtctttgctgtggatgaggcagggggcgaggaggaggaggttcagagaccttttgctcatgccctctctgcctgcgctgcctccgtcatgctcccctcggggccatctcctggtttccttcgggtcagagaaattgcacacagagcagaaggatctgatctgactgttggctcatctgcactgccggcccccgagcctcgtcccatttcagtgacaaggcaagtgtgaaaaatggagcatgatggaggcgtcaccagacctcccaggctctcgactggagccgcagctctcaatgcagctggaattgccaggggcagtgagtgcttgtccagctcactgctctttggaaggggcattcatctccctgagcgcttgtgtgtgcatgcatgtgtgtgtgtgtttgtgcgcgcgtgtgtgtgtgcatgcacgtttgtgtgtgtgtgtgtgcgcgcgcgcacacacacaaggctgggagctgtgcggcaggcaccctggcttcgggaacccaaactagccagcttccctttctgggcctgctggcctaattcccagccgcagctgccattctgggcccccctccctgaggccatctccctgcagatttggcagcggggaaaggaggggccgagagaaggggagagaaccagagacaggactgagcgctaatctgatgtagatgatccggcagccttctccagcttggttcccctctgccatcagctctccaggtgactttccctgtgccctgcactctccccttctgctttcatctccttaagaaagtgcccagaaagttaaacccacacacaaacacacacacaatccacccaaaaaaaaaaaaaatcggagagcaggagcaggcagacgagtaagagagcacgcgcgcaagagagggctcacatccgtcctggaggaagaacggcacagacggagggaggctggggttggcagagactgggacggaagtccctcagtcccccaggagcctccttcatggacccggggatcccaagaggggctgcctcaacttaggatgggcaactgtgtcaagtatccactgagaaatctctcaaggaaggtatgtttttggagtttccaagatctggggctggggattgggggtatctcaccatctgtctcagaggttgggcacagaaagggtg

SEQ ID NO: 10651 - DNA, 2300 bp, Homo sapien
gcatctcttaaattacatcactgccaccaccatcatcatcgccatcattgccatcactatggcaactctatttattcacctcctcttgccatgccctagccaccatgcagagcactttatgtgtataactcattacttgtcgcaggaatcctgtgactagtcatgagcatctcccacagtatggagaaggaagctggagcacagagaggtgaaatgacctgcccaaggtcacacagcaagcaagtggcagagccagaatttgtccctaagactgtttgagcccaaagccagcaggctaaactgccttttaaagttttgttttgttttgttttgttttttgtttttttgtggttttgagatggagtctcgctctgttacccaagctggagtgcagtggcgcatctcggctcactgaagcctctgcctcctgggttcagtgattttcctgcctcagcttcccaagtagctgggattatgggtgcccgccaccacacgcggctaatttttgtatttttagtacagacggggtttcgccatgttggcaggctggtcttgaactcccaacttcaggtcatccacccgcctcggcctcccaaagtgctgggatgacaggcatgagccaccacgcccggcccgcctcttggagttctgtgccacctgctacctccctgccttcctgggttatgctatctctgagccaagtgcagaagattcagccagaaacaaaaatgctgactctctgcagacatctcctgagactggttcctggggttcggccagtcactgttatctcaggcatgctttgatccactctcccagatgggaaggtctctcttgttctgcctcgctctagtcttgcctcgctctagtctaggtcccagaagtctgagtgagtgaagccgaggctctgaatcacaactctttgggatatcaaaccaggaggggctcttggcctgtctgacatccctcaagttttgggatcacctaaaacagacatttattgcactcatcaaacttgaccctgggactgagttccttcacctccagcctgagtagctgcttcctctttgaggaaccggaatactgcaccaccctctctaggcctggaaggggcttaggaagttggaagggagtctcggtctgtagtcccacagggctttggggagaggaagcaggagaggacacggtgggcagggggttgttctgagtctcaacctggaaggacaggctgcccctgggtcttgggatgttctcctaagcagggccttctttgccctggaggaatctgactgcaagtagaatgcagtaggatggaaggatagggtgcgcagacctgcacttctcagacaaagagccctcagggtttcagctcctgtcgctccttgggaaggtcctactctagctaaatccccccacattgaaggaaggtatgtaagctccaggccgaaggcagagtgcaggccgaaggcagagtgcaggccgaaggcagagtgcaggccgaaggcagagtgcaggagctggattctgtagaggcactgggcatcccgggaggctggggagaactgaatgttgtgtctggaagctgctgttgtcctaaggggaaggtctgtgggcagtgcggactttttatagccgcatgggaaccttcagggcggaggatcggctggtcagggcctgggagcacagctatattaggtaagcagagaagggccctgccttagcctctagaggtccggcactctgggccaggcagggagccagggaaggcgggagggaggaaaaggagaactggtggatggcagagagtgtctagtcttgaaatcacaaactgggtggaatcctacctacagatgtgccttgtgtggcccacccggtgctttaaatcagatctggttacactgggctggagttaagtagtgctacctcttcagaggggtcaccatctcaggctaggtgcggtggctcacgcctgtaatcccagcactttgggaggctgaggcaggaggatcacctgagatcaggagttcgagaccaccctggccaacatggtgaaaccccatctctgctgaaaatacggaaaaaaaaattagccagtgtggtggtgggtgcctgtaaaccaagctactcaggaggctgaggcaggagaatcacttgaatccgggagtcagaggttgcagtgagccaagatcacgccactgcactccagcctgggcgacagagtgcactagccacacacgaaaaaggagggggcatgtttccactttgccccagtccccacctctcacaccctgcctgcttca

SEQ ID NO: 10652 - DNA, 2300 bp, Homo sapien
cagagtaagactccaactcaaaaaagaaagaaagaaagaaaactggagtgcagaggtcacatgctcgaggtaacagcttgttggtggtagaggtaggattcacacttggatagcctgactcaagagcctcttgtgctcctaatgacaactctgtatacgtggcactgtccggtagaactttctacagtgatggaaatattctaaattccgtgctgtccgatacagtagccactagccacatgtggctattgaccacttgaaatgtggctagtgcaactaaggaactgaattatggattttatgttattcttactcaaatttacatagccacatgtggctagcggctagtgaattggccagctttctacaagtagctaaatagttcaaagagaggagaggactaatgaggatgttatagaggtaaacatttgtaggttgcatttattgaatgccacatgctaaacactttaatatcttgtctcactgaatgcacactaaggccctgtgaggtgggtactggtattaacccattttacagatgaggagactgtggctcaaacagcagagtgacctgcctgaggaagtagatctgagcttcatactcaggtctgtctgcctctagagtccaagtgcgtctccccagccacatgtactggggagaaaggcgtgttcctgcaccccattccacctgaccctgagttgctgcacgtgatcttcctggcacattagtgggcatccctggctctactccagggcagagaacacacatagctactgctgtgcatggggtgtgtgatccaaggaccagccatcagtgctcagcagaccagctctggtggcgggcacactccgtgaaggggcacctggctttgctgcccccggggctttgggtgtacaggaggaacggaaggggctgccatggggtcagcaatgcctgttcctcccgagtcctgcagaactgggccttggagaagtgggaggctgcttaaggcctgatgcgtgggaaaggatttattgggtctcagtagctggtcctagggcgtgtgctctgcatgtatgtgtacacacgtgtgcttactcactcgctttcacagactgctggtatgacccattgcacaaaacatcctttttggtcacccaaaaacatctacgaacatatgggtttgtgttggaatggctgtgacctacccttaagccaggcaccatcaccagctttttttttttttttttttttttgagacagagtctcactctcttgtccaggtggaagtgcagtggtgcaatcttggatcactgcaatctctgcctcccaggctcaagtgattctcctgcctcagcctcccgagtagctgggactacaggcgtgaaccaccatgcttggctaactaaaacaaggttttttggtagagacgaggtctcactatatcgcccaggctggtctcgaactcctggcttcaagtgatcccctcgccttggcctcgtaaagtgctaggattacaggcgtggaccaccgtgcctggcccatagcgagctttttaggtgaacgtccatgcagtcatctcagagacacgcctccctatgggtgactcctacccccagcctggcggagctgggagcttgcagcctgctccctccaagctcacacacactctcaacgctgtcctgccacacagagctacctctgagctcttggtcctatgcacctggttgtcccatgagatgtgactcagcagcccttccctttctagatgatctgcagattttctggtgttgtcgtcttttgtcctggggccagtttggagtggctgtctctactcatcctggccccgttggctggaacggcctgcatgcacagtggaggtgccacacgctcactgtggcatgcctgcgtgtctgtgttcgtgggaggtatggccatacctgtgtgagcctcttcaggacgggcacacctgcctggtgtcctccctgcccaaaggcaaagagctgcaacatgcgggaggctggacgctgaaggccacttttggagtctactaaccaggtccagctgggcacctgtatccatttcatgccagtctatctccctcctgggcaggcccagggcaactggcagctcaccaacctgagcttcctccaggcctgctccttggagatgtctctgccatctgttctgacgcctagattcagggttgccttgattgcccaggagacctgggcactgcttgaggctggagacatgtgctttttggaccctggctccagccagaagcactggtggcccccggggtcctatgtggtgtcct

SEQ ID NO: 10653 - DNA, 2300 bp, Homo sapien
atgagcgcctggtggcagtgcaatacctgagtggtacgtgggctctgcaggccaactgcctggagggaggaagccccatcaccactacttgtgtttctgttccccatttgcaccacacccctcctttgagggtaactgaagcctctgagttgtcaagatccttaaaagatgacagtttgagagagagaatagtagaattagaaaccccaagaggccaggtgtggtggctcacacctgtaatcccagcactttgggaggccgcggaccccgaggtcaggagatcgagatcatcctggccaacatggtgaaactcggtctctaataaaaataaaaaaaactagttgggtgtggtggcgcgcgcctgtagtcccagctactcaggaggctgaggcagcagaatcgcctaaacccgggaggtggaggttgccatgagccgagattgcaccactgcactccagcctggcgacagagcaagactctgtctccaaaaaagacagaaaaaaaaaaaaaaagaaacaccttggacaggaaacatgtctatgggaggaagtaaggccagatgcttgcaaaataggggggaaagtgagaccgggagggaacacttccaaaagttacccccatggggtctgaatttggggcctgggaaggaatttgggtgcatttagatccaccactgatagtctctattttggcaccctgttttgttcccgtatagcacttaccactgttctaactaaacaattaatttcattatgggttgtgcaaagtctatgattctcatgcgggaccccaggtgtgttttttgttcatgtagcacaaagctcattgcctaagtagtaggtaggattggtagataaaatacaagaagtccagttgtttaaattttaataaacaatgcatttttttttttagtataagtgggtcccatttgcttatctgaaattcaaatataactgggcttctcctattttatctgccaaatctgacaaccctggtagcagggacttgatacatttttttccttttagggagaatttctaaatcgaccagtatttatggaaaatgcataagcgtttttttgttttttttgtttttgccttgactctgccctacacttgcggtgcgaccctttggcaaaattcagtccctttctatgcctcagtttccccatcggaaaaatgggagtttgaacagcgaccgaagcgcagggatcgccagtgtgggagagcgccaggtgaactgtgaaggagcagggagggagttcgggccgtgcccgtgcgggacaaccccggtatccactctgggcaccgccggcggcgactcccgccagcgcctagggtgcctcggtcccgcccctacgcagcggaggccggccagaggccgtcgccatggagacgcgagcagcctggcacccactcgctctcaaagccacgcgtttccgctgcgttggagccttctcattggacggccgtctggacgctaccacccgccccgagcccgctaaggggagggggcggggccttattctcatgggattcgttccctggagacctgtgtccgcggcctctctgggaaagcatgggtcctctccctcacgcggggaaaaggactgcgtctcttaggtctggagagtgtccattgcttctcctactagaatttatgctcatgctgctccctgagaaaagaagagggggcgggaaagtcggccacgccccctccagagcctatttggtctcaggagctagagcaccggaagtgctggcgacatgtcagtgcgccctaccctaaaccttccccccccaggccacctttcccattcagctgtgggattccggggccgcctgggcgctgcacccgccacttccgcatcgaaccgccgcttcaaccgaactcactccctctgcgcgcgctccatctggtgcccgactgctgggccggcgcctgggagaagccacgccctttcccgcgcctgacagccaatgagcgggcgcctcccggcggggtggtgggtaattaatgagggccgggcgctgattggctgcagcgtcgtggccgggggcagggcggcggggtaggttgttcctgaggtgggaggcggtacccgtggctgagaagaaggaggcctgagagcgacatgtccccggcggctcaggcggagcggcccgtggcgctgtttttctgagtccggggtggcctggcagccggccgaggacgagggtcggcgggggctgcccccgtggtggtggccgccatgctgggagcctgggcggttgagggaaccgctgtggcgctcctgcgac

SEQ ID NO: 10654 - DNA, 2300 bp, Homo sapien
agaaagagaaaagccatggtccaggtaactagtcttggtgctatgagaacaaaccttccgtaaataagtatatgggaaatgaccacatgctaaaccaccctcttggccattcacaatcaagtagcatattaaaagttctggaaattcttcagtaaccactctgttgagtggtttaaaaagagttgtttgtaaaaggaaagactttaattctttgtacacatttattaaaatctccctgaacagttagttaaatgccaccatatactaatctctcaaagacagtacagcatttgggtaggaatttggccacacactatgccacccaattgggcagctggggtggggtcaggtttggactttgtccaggaaccaagagatgcctgtcttggtggctttggtgagagggactcagcaagcaaggcctggcaagaacgtcaagaggctctgggggacggttgcaattttactctagcctggctgagaggtgatgtcagacctagcagacacactgcatcaatcaggcccaggcctccaacacagaacagtgcagatctagaatccctagagaaggagcccctcagggtggaagacggtagaccacatccccctgttgacccacttctggctaattggtgaggtcatggctaacttccaaagctcagtgcagatattgcctctgaaaacttccgaagccctcaagcttttacagccaggtcagaataaaccactcctgtgtgttctcctagcacctttgctgcatctcttagtgcagtcagtgaatctagtttgtcttccagttcatactaacctaccttgtgaaaaggaagggtcacataatgaattgtgtactttacagtcttctctaacaaaagtgggagctcttccatagtgggatactgttcaggctctcattcaatcattactgagcacctaccacgtgtcaggcattagctgaactgctgggaattcaggggtgaggcagacccaatccctgccctcactcttacatctcctgtagcctagcccaatgtctagcccagggcctggcacagtagggcttacggatggcaatctcattggaaagtttgtcttgaaactgcctttgcaaaacaaacactgctttaacttaccttctatgctaaatatattaataaacattttctcaagatgcattgtccactaatagcttagtgttgaagaacaggccttgggtcagatggacctggattaaaatccctgttccctcctcttactgcttgagggactttggacatgttacctgacttctctgaacttgagcttcctgatctgtaaaatggagacagtaatacctcacagggttgttgtgaggtgaggagcctgccctatagcaagtgtcctgccatatagcaagtgcgcagtaaacactggccattcttcttcttggtgtgattactgggaattagttgccattgtgctgttgggactggtgacagaactcttggattgagaatgccgagatggtgcacggaagattctgtgtgctctttcagaccaggaggaggatgaggaggaggaaagtttatatgacgtaaattcatttgaccgtaagatatgtatttaaacatcgtggaggatcttgggggtctgatggggagtggggttgctgaagctccagccacccctaggccctccacctggcaggaccaaagttggggcagtagccgaagcaccgccccccgggccccgcaggagtgtgcagtcacccagttaggcctatcttggcctgcccatcactcctggcctgcggtctcctaaccctgtggcagcagcagcattccctgaatggatcgaaggctgccatggtgtcgtccgctgaattgctataggagtcagcccagggctgctcatgtgcacctcaggttgctgatggcagctctagttatttggggatggaagtttggggagagtgggccttggtccaccctgtgcgaaagggaattccacagccccccgggcgcccgcccccgcccccgccccgccccctccccgccccttccccgccgggccccgggccccgcccccgctctccatagttaccgcgctgtggaggcggcggccatcttggcggcggagcgatgagcgggtctaacccgaaggctgcggccgcggcgtcggcggctgggcccggggggctggtggctggcaaggaggagaagaagaaggcgggcggcggcgtcctgaaccgcctgaaggcgcggcggcaggcgccccaccacgcggccgacgacggcgtcggggcagcggtcacggagcaggag

SEQ ID NO: 10655 - DNA, 2300 bp, Homo sapien
atgtggcccttctgtaagtagttgaactagagtatagctggcttctagggtgattgaggaattgtactggactttaggcttaatatttttgctttatattttcccagggtgagtggctttgtaaattgaaagtttacatgcatgttttaaaggtagggtttttttttttgagatggagtttcgctcttttttcccaggctgggatgtgatggcatgatggtggctcactgcacccttcgcctcccgggttcaagtgattgtcctgcctcagcctcccaagtagctgggattacaagtgcatgccaccacgcccggctaattctgtatttttggtagagacagggtttccccatgttggccaggctggtcttgaactcctgacctcaggtgatcaacccgccttggcctcccaaagttctgggattacaggtgtgagccactgtggctggccataaaggtaggcttattaagaaatactttaactacagtaaaatttacctcaattaagagtattgatgcattttgacaaatgaatacttttattacccatcacaatcatgatataggacatttccatcgtacccactcagaaagttcctgagttccttgtgtttgcagccaggtgacttcccccacttcgcctcttgcaaccactatctgattctgtctctattggaaaacttggatacttttaaaatgaaatttgaacgttcatatttacagtcacaaattctcaagagtctggtttagatgctctgtggcacctgaagcaattattggcctttgctcacaaacacaactcacttatttctcccttttctcctgcttcttcatcgtttcttccacccagggctggttcccaggtgggatgacggaaaggtgaggaagcccttagagcatttgccaatgggagccattcatttgactttaaagtactgagaatttagaggcgttcttttaaatgcattatttaaaaagaaaggtaacacattaaggactttgctgcatcttttgattggctttcttctaggaagtagtgaccgaggtttccactttcctccaagaggaagagacagaagttttggcaaataggtcaatgctgggaacagatgcctgcctggctgagtgctgggaaagaaaggcagttggagggatgtgtgggtgcctgggagggcgtgggtggtgcccaggaggctatgggaatcagaatcacacttgcacaagagaagacccttatgggacaagtaaaatcagcatagtttcttgggcggggcaaaggtgtcctgatgaggatgctaggggtcaaatatgtgtctgggttctgccccaatcgggaatgagacacagtactgaagtggaacgggggtagcatctccacccaccttcacagcctctggggaaaagaaagctttccttgcagcccaactccaggggcctaaatattgagcaccaacacaagacaggtccttgagcttctcggagcgagtcggggaagcagataatttcagatgcaaagtgccttgaataaacagaacgaaagatagagagccagagggggagaaacggcttggtgtggtcagggcaggcatccatgagacctaaacgaagagggggcattccagacaaaaggaacagtgatcacagaggccccgagtcaggaaccagctaagggtcttagagaagagctgcctcgtaaagctaagcaacaataaccagggaacggtgggcatgggccctgatagacaaggcaggtcttggctttttaagccatagaattggattttaggagggatgggcccgccgacaaagccaacaaagttttaacccgaagatcgctatcttatttatgctttaaaaagacctctctggcctttctgcgaagctctatccttagctttctcttgttagcattttgattaacgaatgtgggcacgaacagccagctgaccgaccgcgcgcgcagtcgagcgtcggttcctcgccttgggagggaccactggaggccccgccccctggccgcgagcgcacctcggccccgctcccgaggccctacgggcgtggcctctgtcccgggtcccgccccccagcactccggaacagcgcgctcgcagcgggaggtcgcgaagcctgggactgtgtctgtcgcccatggccgccgcgctgctcgcccgggcctcgggccctgcccgcagaggtgagtgcgctggggatccgtacggcggggcttcagcccgcgtctggcccagcgggcggaggtcctggcggccggctctgtcagagccgctggcaggcggagcccc

SEQ ID NO: 10656 - DNA, 2300 bp, Homo sapien
gattactgtgtctagcaatgaggggatccttggcaagcccccaggagcagtgtcagtggagtagcagggatgaaagccctgctggaagtgatcgagcactcaaatgataacatctaatttatgggaaatatatgggatagaggaaaagccaaccactgcaatagagaagcacagaaaaatccagatgactccagtttcagcaagtcattaaaaaaaggactttaggctgggcatggtggctcacacctgtaatcccagcactttgggagaacagggtgagaggattgcttgagatcagcctgggccacatagcaagacctcatctctacaaaaaatacaaaaattatccaggtgtggtggcacatgccggtggtcccagctactcaggaggctgagtattgcttgagcccaggaggcagaggctgaagtgagccaagatcgcatgactgcactccagcctgggcaacagggcaagaccctgtctcaaaaaaaataaaagtggtggggtggactatgtcagattggaaaccagcacagacaaaccatctgcaaaagatgttttggggtctatagagaaatttgattaaatgaggtgaaaattcacccaaatggaaactgggggttgttggctttggtggagggggggaacagattgtgtgatctcattagattaaaaaaaaaaagtatgtaaaaaattattggctgggtgcagtggctcatgcctgtaatcccaacactttgggaggccaaggcaggtggatcacctgaggtcaagaattcgagaccagcctggccaacatggtgaaaccccatctctactaaaaacacaaaaattagctgggcgtagtggtgggtgcctgtaatcccagctactcgggaggttgaggcaggagaatcatttgaactcaggagacagaggttgcagtgagtcgagattgtgccactgcactccagcctgggtgatacagcgagactccatctccaaaaagaaaaacaaaattctaggaagatattgaacagtggtaatctctgaaaagtgggaatgtaatttttttattttgctttactgtattctctagttttctataacgcagttaatgaattgctgggatgatgcctccagtgaatgaaagggggtgctatctagggtgtgagttcactttaaagcagggagcaaggacaacacatccacaacattggagggaaggcaggaaaagagagcttggaggtcttggactggtttcctgggtctccaacagccgagcactatgtctaggaggaggaaagcaatcaccccaaattccacaagtccaaacaggctgaagaagcgggtgttttgcaccagttgcatgtaagtttctgaagctggagcttagggctgcctgatttttgagggaattgcaaactctgtgaagggccatagcttgtggaaagaggatgagcctggagtccacactgactgctgtctgctgtaccctgtctcctccccagcactggccatgggcctctgtgtcgccatgatcgcctttgtccgcctgccgagcctcaaggtctcctgcctgcttctctcagggcttctcatctatgatgtcttttgggtaagcgtttatgtccttggagctcctccccttctttgtgttgaagtgaagcattcatgcctgaaaactattaactagaagtatccaaagtcgggcttgcccagctgctgatcactctctctccagtccttaactgtatcatgggtgtgcagtccgatccttttgtttgctgaaaagtcgtacagtaggtagtgtgtgtgtgtgactcctaggatagaagaggtaacaggctgacaagattcgctgcagtgggggccaccccgtcagggagtaatctctgggtgtggagagtgcagaaattggcaagtacacaggaagagcaaagattttctcaaatcatacagtcaacgaaagcattgcagtcacagcattctgagactctgctcttaagagcaaggagggctgatgctgaaagcaggttgcttccaactccctctgttaaaggcatctctccaactcggcaggtatttttctcagcctacatcttcaatagcaacgtcatggtgaaggtggccactcagccggctgacaatccccttgacgttctatcccggaagctccacctggggcccaatgttgggcgtgatgttcctcgcctgtctctgcctggaaaactggtcttcccaaggtaagacctcatgctatgacaggaccacactgtcttcctgtgcctatctgttcccggccttgatcagtctctaa

SEQ ID NO: 10657 - DNA, 2300 bp, Homo sapien
gtctatcccctgcctagttcagggactaacagaatcttgacagatgtctgattcagtcccctcgttttatagcaattgctactaacctatgattagaacatgtttagggccagaaatctaacaattgatattttgttttaaaatgctacactcaaccgggcacggtggctcacacctgtaatcccaactctttgggaggcgaaggtgggcagatcagttgaggtcaggagttggagaccagcctggccaacatggtgaaaccccatctctactaaaaataaaaaaattaaccaaggtgtgctggcatgcacctgtagtcccagctacttgggaggctgaggcaggagaatcacttgaacctggaaggcaggggttgcagtgagctgagattgcaccactgcactccaacctgggcaacagagtgagactctgcctctaaataaataaataaataaaatgctacactcttggtgcgctgactccacatagggcatagatatctagagagcctgtatcgcgaatgtgagcactgcttagaaaccttacaggttatgtcatcctcgtagagaacatttgagctcggtttggtgtcactgtctttgtccctgactcactggttgtagaagacaatgtaatacagagatatcagtgataaattgaaaataactctagctaaatggctaagattaatcatttacttcccccaacacttttggttaatgtacatttaaccaaaagttaagtgtgttggtaaacctataagagagagtctcaggagtgtctaaagccgcaagggaaagagagcacctcccttcactttagccttgaaaagccctgaggaggaggtaagattttttaagggttacttgaatgacagaatgaaaggcaggcaaactagattgagagcatgttctgggaatacgacattgcttgtggcagtgttcgctgggtcagagtggtatttattccacatgcctctaagagccttctctgagacagtcaaaaggatgccttctgcctcttcatacacggaacttagactagagtggggaggacctagatggtctaattggaaagagggtgttcagcttaacgcagatggagagaagggataggctgaggaataggaacccgttcagacagatgccaaggcagagccagcatggtgctcagctccactctgtggaggttgtgcctcctgagtttatgcaactttataattagacttgattcgtcatagagaagggaacctggtgaccttcaggcaggaaattatgtgaacagatgtttgacagtggcagtgaacagtacatgggaaagagtaagagggagggagggaaaggagacacagcaaagtaggaagtgggtggaggtgtgagcaaggtctgcagtaacagtaaaggataacacctcagaatggctgcagatttcatgtgtatgatgagaggctgtgatgtgttgaagatgaacccagactttcttatttggaaggttaggatagaatgacactgtctggagtcatggaaaacccagtcactgagcagtctgttccatgtttagtttagacgcaggtggaggaggattagcatgagatgaatgacaaagcagcaggtggatgctcagaccttgtgacctttcaaggctcctgcgcagttaggatgaagtgattctatggcaaattgagtacaaaagttcaggaagggccagacgcggcggcccatgcctgtaatcccagcacttcgggaggctgaggcaggtggatcacctgaagttagtagttcaagaccagcctgaccaatatggtgaaaccccatctctattaaaaatgcaaaaattagttgggcatggtggcgggcgctggtagtcacttgagagtcacttgaacctgggaggcacaggttgccgtgagccaagcttgtgccactgcactcagcgtgggcgacagagcaagactccatctccaaaaagaaaaggtcaggaagggacaggtcgtctacatgtgtcacagaggcgaataaacttaccccgaggagcctggcctcttgcttctctgttcagtctgtttccctgccccgcttttggttactggtgagctgcatcattcagtcctctgaccctcactccccgcagactcctgtctcccgtctgtccatcctaggccttctgttactttcttcgtgcccttgatgccttgcattccatgtattcacctgtaagtccatgaacagatcaccctagccagtatctatacacaaacctgtgtctcacctgtgctctggcccgatgggcttcccacctgc

SEQ ID NO: 10658 - DNA, 2300 bp, Homo sapien
attctatctaatacgccagaaaggtcctttgtattcagtttcgcatgtaattgcagactgaacttttaaaatttagctttattataaacaaatgcatctcttatatacctcaccactacagtctttattctagctagccatttaattttctcttcatactttgaatcagtataatctgtctatagactccctgatgctttgttcctatgataaagttatttatctgagaaacattattttctgtagtgaaaggcactgaaaatctgtagcttcctctagctgttctttgaactactgtagagcacttacatttaaaaactatttaggtaaaatttagttagagatttcatagagttttgtctaatggatacacttcccgaagtgatccttgggccaagctgaatggatttgactagggtcaggacagactgcttccaagataatttctgtttgtcatgacacatagttcacttttcctaaattgaattgtcctattcctaagtgaattacttcactcatctgcctagtccctgagaagcattttgttttatagatttagtcaatcaaaaaccctaaataactcttttggggacaggcaaatttaaatacctaagagaaattttgttgatcattgtaaccctttgtgtcttgctatgtttatcctggttacatattttatttgtagccttaatataatgaagagacctttccttttttttttttttttttgccttggactcctgggctcaagtgatcctcccacttcagcctcccaagtagctggaactacaggctcaagataacatgcctaattttttttttttttttaattttctgtagagatagggtctccttagtttgcccaggctggtcttgaactcctggcctcaagtgatcctcctgcctcagcctttcaaagtgctgggattacaggcatgagccaccacacccagcctttttcttctattatttcattattatagatcatatgaagatttctttgattccttttgtgcgcttttatgacatctcaatagagttaatttggaagtgagacaagataaaactggtaattttttttttcattcagtggttattagagtttgccatgttttccttctctaccaaaaatactctattaatggttctcaaccctagatgcaaaatacagttttgtgaggagcttttagctgggcctaactcctgtgatttcatttaatttgtctgggattggacctgggctttgtaatttttttaaagctctaatgggaagccaagaattgagaacccttgcgctaaatcctactctagcccaagagattattttcccgtattcatctcctattctggtaccttaaaatgttcccataaaataaatttttttttttgtaaatattaatagatagaaacgggggtctcgctgtgttgcccaggctggtcttgaactcctggtcccaagccatccttccacttcagcctcccaaagtcctgggattacaggcgtgagctaccacatctggccaaataaaatttttctgatttgctgttttcagctatgacttgttgtcctccttctcccccatcagccaagtcagttctcaactattagcaacaacgagaaagagtgaaaatgagtaccttaaacccacaggtgatgagaagtccttttagtcaatgggtttaaaccacctcttttaccaaacctatattcaagaccacaaatttacccaaatggactaatctgggtttttactacctcttaatgttctcggtggtggtttggatcctgtcatccagatggttaacaccaggaggtagtagttcacttcaacaaatattcctgagtgtctgctgtaatgaaaggcaccatgaagagaacaaggagctcataatctcgttgggaaagaaagactcatagggcctggataatccatgtcctacgtataatccgtagaactgtctgcatttttgcaagttaatgtatatgaagtgcataggcacagtgcctggtgcataataagttattaatctgtctgtttttctctttcaggcatccaaacaattgactctacccaggctctgttccttccaattggagcatctgtctctcttttagtaatgttcttcttctttgactcagttcaagtagtttttacaatatgtacagcaggtaaatatgagtttctctgtctagtcttaacatactaaaaggaaaatttttcacctttatcattgttcaaaaattaagatttatataccatgtcatgtaagtttttccttataaatcttggcttcgcctt

SEQ ID NO: 10659 - DNA, 2300 bp, Homo sapien
ctccagttgtctttcttgacctctcagcagcattcatggttggcaacgtctccctcctaatgcagtgagtgtgaattgagtatttaatgtgttatgttctttatatgaattcctcatttaatcctttaacaactgtttgaggttgtcattccccattttacagatgaaaagctgaagcttagagaggctaagtaactggcttagctactagtaagtggtagagcaagggattaaattcaggccacatttaattctgctgcctttctgaaataacctactattctgggttttccttctctgtctctctttcatcttggttttctttgcagttccttcttctacctgatctttcaatttggagatttcccaggccttgatcctaggtcctcttttcactgctgtgaggcattcacacacacctatgacttcagttaccatgtggaaggtgatgagctctcagtatatatacatcttcagctcagaacggtttcaatatccacttgtctcctcagtacattcaaaccttagcttaaaatctgttcctctggccaggcgcagtggctcacgcctgtaatcccaacactttgggaggccaaggtgggtggattgcttgaggtcaggagttggagaccagcctgaccaacatggtaaaaccccatctctactaaaaatacaaaaattagccaggtgtggtgcatgcctgtaatcccagctactcgagagactgaggcaagagaatcgcttgaacccaggaggcggaggttgcagtgaaacaagatcatgccactgcactccagactgggtaacagagcaagactctgtctcaaaaaaaaaaaaatctgttcctcctatgttacttttttttttttttccactaaatggtacaaagccagctaagcagaaacctagggatcactgcaattcttccctctgctggttcccataaacaatcaccaggtcctgtttattgtgtcctgtgtctctctaaatcatcttcctccctaaggaaagctcccctgttcttagactgcatctacctaatatacattatcatagtaccctatacttctctttctctcttttgtaacattcttcatgattatattcattcagttatgttcatttttttatttctttagggtgaaattgttcatttctttagaaaagacatttaggcagagaccaaggcactcttatttattactgtatatcccagtggctagcagagtgcctggcatgtaagcagtattaaatactttgctgaatggaaattaaacaacaacaacaacaaaaagcctgctaagatttgttttaggaaaatccctgacaaataagaatgggcaatgtggagggtgaactcatggagacagcctttaaaacaatatttccaatagccgagccatagaagggagctaacaaattggcagtgggattaggagaaatagggtagttcgggatgtggaagtaagagaaagaaagggctgtcaagaatgcagcagatttttagctttggcagctgaggggatggtgacaccattccttgagaggatcagctaagatggagagagtatttgtggtggacttgttgactttgaagaacctcctgtaggccatctagatggagaaaatcaataggcagttagaaaaatggaaacggggaattcaggagatgcaggctttacctcatcaccgagcaaaaccagtaaaatactattagagattgaaatgtaactggataaaagtctgattattgagacttttgccattggcacagatctggtagatattttgatactttttaaattgggggtggatgttgtaaacatatacagagatgggatttttacattgatgtcattttacatgccgtaaatatttactaataatagctgtaaacctaccaatttattcttcatgttaaactagcaaatctcattttaattgtgttattttgttaatgctaatttataccttttttccttcttaaagataaaaacaaagctcagtggggtttatagaactccattagactgtaagctccattaggactcactgcatgtgatttaaatttttttcctcttatttctctagggcctattccctggtggattccagtcaagtgtctacatttctgatttccattcttcttatagtctatggtagtttcaggtaagatattctcaaatggggttgatacaagttggaggtggaagaaggaagcattgctctgaaagtgctggtaccaaaacttactctgtgaagaaaaacaggacttcggcaggatttgactcagaatagag

SEQ ID NO: 10660 - DNA, 2300 bp, Homo sapien
cacgacctcttgacctcatgatccacctgccttggcctcccaaagtgctgggattacaggcgtgagccatcgcgcccggcctggacctcaatctcatcagtgagccttttcccagggctctctgatagagctttggaggaaacacttggaacctaactggtcctggcacctggcagtgggggaataaggaaggagagctttgcttctgaagggaaagtgtacttggctttctctttaaagggtttcccttggggaacaggcaagcggcagatgtatgggcaatggccaactgatccatttggagatagattcagggtgtggtgttccctgtaagcctgggcaggccctgggaaactggagcagagctaaattctggcctaaagttgggcaagctgcagagaagcttgagtacgttggtttcaggtgtgtgagttttgccttctgcagagaaacaggggggtgaagggtgggggtggaggggtgtccaggagggttagtgtatctgttgcccaggcatgtttctaaattctgaagctgcactggttaatcatttttattcatgaacacagtaactggcaaggaggcttagctgggccctcaaagtctggcctcagtgcaccttctcagtatattttctcaacactccagcacaaatcacccatcccactctcggattcaagctcaccaggaattgggccttacttcatgccattctttctttctagaatgccttttcttttttttttttctttttctttttctttttctttttttttttttgagacagagtctcgctgttgcccaggctggagtgcagtggcgcaatctcggctcactgcaagctctgcctccggggttcacgccattctcctgcctcaacctcctgagtagctgggattacaggcgtccaccaccacgcccggctaattttttgtatttttagtagagacagggtttcaccgtgttaaccaggatggtcccgatctcctgacctcatgatccacccacctcggcctcccaaagtgctgggactacaggcgtgagccaccgcgcccggccaaaagaatgacttttctttgataagcctctcaccctttcagacggcctcatccactcctggggaagcattccgcagtacctggggcctcaattaatctctctcttctctctccatctaagctccagattcactttgttggtctctggtctagctctaccgtgtttatttctgtgccggtttccagacctccaaatggacggtttcctgagccttctgcccttgctgttccctctgccaggaactcttttcctgtggatctttgcaaggccagctctctgtcatcattcaatatcagctcaaatgtcacctcctaagcgaggccttccttgaccaccctatctaaagtaacccacacctctgctcactctctgtcccctcaccttgtgttacaaaatgtgtttttgtaaaacttagcagcatctgaaattatcttatttgtgggcttggactatgtctcttcctttagaatgtaagctctaggaaggcagagtgagttgacacatggttggcacccaacaaatatctgttgattgattctgtgaaggcaagcgtggggtattcgacttggtgccgggcctgggcgcaataaaggttggctgcctggaatatttgctacctgaatgaatgaaccaaggaacatacgaacgaaggaatgcagccctctgcctgttgactgacaggttgactgacagttggggggcccgtggccagcagactgttgactgacggttgacagctgagtggcagccaacagacgcgcatcggggttcccgattggctggtgcagcagcccctcggagaggggcggaagagggtacccgaggcgacatctccgcgtggggaggggggcggcaccaggcagcgggaggcggcccaactgctctggctgtgcgagcagcagccgcctagaacccaggagccgacgtctctgcgcatgggcccggctcgaggggcggggcgcgcatcacgtgagcgtgttttgggcacgtgacccgcgcggggccaaggctcgcccccgcccccgcccctcctcccctcggcgggtgtgatcgagtggcctcgcctcatcgcctagcgcccccctcagtcgccgccgcctccgcccgccggccatgtcccccggccgccgccgccgccgcccgagcgcggcgctcccgcggccccgcgcgcagtgagcgcgggcccgtcttgccgttcgcccgccccagggcccccttgttctccgcgccgccgccgccgc

SEQ ID NO: 10661 - DNA, 2300 bp, Homo sapien
ttcctgtctctatggatttgcctgttctggacatttcagataaatggactcacacactatgtagtctttagtgaccactttttcacttagcatcatgttttcaaggctcatgcatgttgtggcatgtactggaactccattcctttatatgaccaaataatataccattgcattggctggatgcggtggctcatgcctgtaatcccagcactttggggggccaaggcgagggcatcacctaaggtcaggagttcgagactagtctggccaacatggtaaaaccccatctctaccaaaaatacaaaaattagctgggcgtggtggtacatacctgtagttccagatactcgggaggctcaggcaggagaattgcttgaacccgggaggcggaggttgcagtgagccaagattgcaccactgcactccagcctgggcaacagagcgagacccccatctcaaaaaaaaaaaaaaagaaagaaaaaaatatatatgtctataccattgcatggtcaagccatattttgtttatatattcatcaggtgatgaatatttatgttttttccactttttggctcttgtgaataatgctgctatgagcattcacgcacaagtttttgtatagacatctgtttttaattctttggggttttgcattcattttaattttaaaaacatattgcataaaaatgttatttaccttgatgactgggttttttggcattcccttaaaatttgcacctgggctgccaggcatggtggcgcacgcctgtaatcctaacactttgggaggctgaggtgggcggatggcttgagtccaggagtttgagaccaacctgggcagcatggcaagaccctgtctccacaaaaaatacacacacaaggccgggcacagtggctcacacctgtaatcccagcactttgggaggccgaggcggacgaatcacttgaggtcaagagttcaagaccagcctggccaacatggtgaaaccccaactcaataaagaatacaaaaaaattagccgggtgtagtggtatgtgcctgtaatcccagctactccggaggctgaggcaggggaatcgcttgaacctgggaggcggaggttgcagtgagccaagattgctccactgcactccaagcctgggtgacagagtgagactctgtctcaaaaacacacacacacacaacccaaacacacacaacacacacacacaaaatcagctgggtgtcgtggtgcgtgcctgtagtgccagctacttgggtacttgggtggctgaggcgggaggatcacctgaacccaggaagtcaaggctgcagtaagccatgatcgcgccacagcactccagcctgggtgacaaagtgagaacatagctcaaaaaataaaaaaataaatttgcacctgaggcaagtgtcacactcatcccaactcagtctcaccttgcatgttttctgccttgctggctgtatgaccctggacaagttacttaaccgctcagagcctcgatttcctcctctataaaatggggataatctctgtaactgctcacagttggtagcagaatgcaatgaagtgaattcgccctcacagagccagcactgttcttggcacatggtaatcttaacatattttttcctacagggaggcctggtgtcaggccgggagtggggtggaagggtcccaaaatggatggaagggccccaaaatggccgtgagcatcctctgcccttgagaagagctagcccagctgtctagagctccctgctgctgccgctctcgtaagcagcaagcatttttggctctcctgtctcagcatgatgcccctacaaggttctttcgggggtgggacccaacgctgctctcctgatggcctccctggctcccagcaccttccatcccagctgctcagggcccctcacctgcgcctcccccaccctcccctctgcccactcccatcgcaggccatagctccctgtccctctccgctgccatgaggcctgcactttgcagggctgaagtccaaagttcagtcccttcgctaagcacacggataaatatgaaccttggagaatttccccagctccaatgtaaacagaacaggcaggggccctgattcacgggccgctggggccagggttgggggttgggggtgcccacagggcttggctagtggggttttgggggggcagtgggtgcaaggagtttggtttgtgtctgccggccggcaggcaaacgcaacccacgcggtgggggaggcggctagcgtggtggacccgggccgcgtggccctgtggcagccgagc

SEQ ID NO: 10662 - DNA, 2300 bp, Homo sapien
atgcatcagaaagggagggctctgaggcgccccaacccgtggaggctgctcggggtgcacaggagggggtcgtggagagctaggagcaaagcctgttcatggcagatgtaggagggactgtcgctgcttcgtgggatacagtcttcttacttggaactgaagggggcggcctatgacttgggcacccccagcctgggcctatggagagccctgggaccgctacaccactctggcagccacacttctcaggacacaggcctgtgtagctgtgacctgctgagctctgagaggccctggatcagcgtggccttgttctgtcaccaatgtacccaccgggccactccttcctgccccaactccttccagctagtgacccacatgccatttgtactgaccccatcacctactcacacaggcatttcctgggtggctactctgtgccagagcctggggctctaacgcctgagcccagggaggccgaagctaacagggaaggcaggcagggctctcctggcttcccatccccagcgattccctctcccaggccccatgacctccagctttcctgtatttgttcccaagagcatcatgcctctgaggccagcctggcctcctgcctctactgggaaggctacttcggggctgggaagtcgtccttactcctgtgggagcctcgcaacccgtgccaagtccaggtcctggtggggcagctcctctgtctcgagcgccctgcagaccctgcccttgtttggggcaggagtagctgagctcacaaggcagcaaggcccgagcagctgagcagggccggggaactggccaagctgaggtgcccaggagaagaaagaggtgaccccagggcacaggagctacctgtgtggacaggactaacactcagaagcctgggggcctggctggctgagggcagttcgcagccaccctgaggagtctgaggtcctgagcactgccaggagggacaaaggagcctgtgaacccaggacaagcatggtcccacatccctgggcctgctgctgagaacctggccttcagtgtaccgcgtctaccctgggattcaggaaaaggcctggggtgacccggcaccccctgcagcttgtagccagccggggcgagtggcacgtttatttaacttttagtaaagtcaaggagaaatgcggtggaaacttcttgcttgtccacaaatcattcagatggggtttgggcaggtagcgggaggctggggcaggccagaggcctgcgaagaggagacaggctccagcacccacgctctcacaccccacatctctgcttttcttgctctgctgagactctaatgacaaagccagatttcatcttaacctcaagcttctactttttaaaaaaattttgttttggagacagggtctcactgtcacccaggctggactgcagtggcattatacagctcactgcagccttgaactcctggactaaagggatcctcccacctcagcctcacaagcagcctcacaggcgctcactaccatgcccaactaatttttgtattcttttttttatagagacgaggtttcaccatgttgcctaggctggtctggaactcggctcaagtgatccacctgcctcggcctcccaaagtgctgggattacaggtgtgagccaccatccctggccatgagcttctacttcttttctttttctttttctttttttttttttgagatagggtcttgctccattgcttaggctagagtgcagtggcgcaatctcggctcactgcaacctgcacctcctgggttcaagcgattctcccacctcagcctcctgagtagctgggattacgggcgtgtgtcaacatgctcagctaatttttgtatttttagtagagatggggtctcgccatgttggccaggctggtctcaaactcctggcctcaattgatccacctccttggcctctcaaaatgcttggattacaggcatgagccactgcacccggccacaagcttctacttcttgcagaatgcctttgtcccatgaaacctagtccacgagtgctatgacacttcctgaagtcttgggtggggtgaacgcacaaatcctgggggtgtagagaggaggaggatgtttacttaaaatgtcttaaggttcagcattgacagagaggcaatatccaaatcactctaagttttgttttgggtcctctgacaattgagtttccataatctggtcggctcagagacaccatcatgtgtggtatattcacaaatgcagacaaagaaaattctagaaagccaggggtgaaaaagc

SEQ ID NO: 10663 - DNA, 2300 bp, Homo sapien
catgcctggcctctggggtctcttttatgaaggcattgatccagttcatgagggctcaggacccattatgtaattgaaagattctccgtggggcctgaaagcttaagagaatgaatgacccctccctcccctccctccttgggcccggtcccaaggcgcaaggccactcgcgccagcagcatgtgtcagcaagatagcagaagcgggaagagagcgggccagaagacacctaccccctgaagaccgagagagacgtcatccgggtacaatgtagcggttacaacagactgagaaacttcctgtttacaggagactacaaaacccctgccccgtcctcatttggtgctgacgccattttaagcctcagcccacctgcacacacactgcctcatgttgtctgttggccacgctcttggggttcgaaccaacacaagaccctttcactaattacttcccagaggtcccacctcctaataccatcaccttgggagtaaggactttttggaaattatcagtatcaaaatggagtcacttatgtcaaaccctaacaaatgcctgtcacaaaaattatctcaagaagttcctaaaatccgcagtattatagataaaccacttgcataagaatatttgcctaacagtgggtgtctccacaataagctaaagccaactcctgcaacaggctcctgtgatcaacggtacttgttttaaagaagcttatgtggactttgtcttttctcgttgccacaacctcttttaatgtgcctatagtccactatagcatgcatatctcaaattgcaattccttgcaattctggaataaacgctttattttggagagtcagtctctctgttatttattttatggtgtcaattttaacatatgaattttggaggaacacattcagaccatatcagtcaccttcctcttctttgaaatagaaaaagctcaaggccagagagtttattttagtaaagttttgacatacctgtcttcaaagataaaacatgaaacagcattccacacacaaaagtaaagtgattttgttcatccttcactgtgaggtattttaaccacagagattctaattttttggtcttggatgggtcctgggagtcagtattgcctggctaatttttgtatttttagtagagatggggtttcaccatgttggtcaggctagtctcgaactcctgacctcatgatctgcccgcctcggcctcacaaagtgttgggattacagatgtgagccaccgtgcccggacaggattctgcatttctcttttttttttttcgagacagagtctcagtctgttgcccaggctggagtgcagtggcacgatcttggctcacctcaacctccacctcccaggttcaagtgattttcctgcctcagcctcctgagtagctgggactacaggtgcgtgccaccatgcccagctaatttttgtatttttagtagagatggggtttcactatgttggccaggctggtctcgaactcctgaccttgtgatctgcctgcctcagccccccaaagtgttgggattacaggcgtgagccaccgtgcccagcctggattctgcatttctaacgagctcccaggtgttaccaatgctgctggctcatggactacactcttaagtagtaaggccctaggctattaaaggaaatacagattcctggattccacctatcagagattctgattctgttagtattttctgtgagacccaaaagtctgcagtttaaccagctctctaaggtgtttcttaggcccagctggactgggaaattactagaataaatgacatggaatcaaaacctgggaactaatcctgggtctgtcattaactccttaggagattcccatcccctctggagatctgtcatcaagaaatgattggagaagttaatctcttaggcccttctagctcttgcctttgagaaccgcccacctccccattcccacctggtatccccaacccagtacagttcatggccaatggcggtccaagtcttggaactacaatccccacaatgcctcgcgcctctcctctcacgtgacgtcatgaaggaggcttgataacggcggtgttctccacaatcctttgcggtggttcaagatggcggcgcccagtggcacagtgagcgattcggaaagtagtaacagcagtagcgatgcggaggagctggagcggtgccgcgaggcggcaatgccggcttggggcttggagcaacgcccgcacgtggcagggaagccaagagccggtagggtactatgtttggggagactggctgag

SEQ ID NO: 10664 - DNA, 2300 bp, Homo sapien
cccacctgtccaggtacatttctaacctctcccctgctcaccctttcatcccaaggcacacagcacacttgagtccctggcatatcctagcattatttatacttctcagcctctatgctgtaccctcatcctcctggctggagtgccagtcttttttattttttatttggagacagagtctcatgctgtcacccaggctggagtgcagtggcaccatgatagttcactgcagcctgaaactcctagactcaagtggtcctcccacctcagcctcccaagtagctggggctacaggtggacaccaccacacctagctattttttaaaaaactttttgtttttaaaacaaaaactggagttttaaactccaggccaccactgcctctcacctgcaccactgtgcagtgtcctgaccatctccctacatctgttcttgcccttgcaatcatcctcaccacagaagcagagaagttacaagtgtggcaaagggcagaccggaattcaaagccaatgtggagtggggagttggatacatgagtctggatttcagggaagaggtatggatttaagatacaaatgtgggagtcactgggtatggtggctcacgcctgtaatcccagcactttgggaggccgaggagggcagatcaggagttcaagaccagcctgggcaacatggtgaaacactgtccctactaaaaatacaaaaagttagccaggcgcggtggcgggctcctgtaatcccagctccttgggaggctgaggcacaagaatcgcctgaacctgggaggcagaggttgcagtgagccgagattgtgtcactgaactccagcctgggcgagacagtgagactccatctcaaaaataaacaaataaataaaaataaaattaaaatgtggaagttgccagagtaaaaacatttaaacgctggctgaaatcaccaagggagtaagtctagaacaagaagagaaaaggacccaggactaagccctggagcacttaatattattcagagtttgggaagttgcaggtgtccagctatgttgcccaggctggtcttgaactcctggcctcaagtgatcctctcaccttggcctcccaaagtgctgggactacaagcatgagccaccatgcccagcccggatccccagtctttaagattcctctcaagcaggtgtctgctaacaccaaatgaaactcatctgccggcttcatgttttcatgcttttttcctacttaactcatcgcactggacttttgcagtctcttttttctgtgtctcctccaccgttctgggagtccccttggaacaggaacctcatcttattttgtcttcttggctcaatgcatgaacttcttggttcagtgcgtgaatcataatacctgttaaacccactctatgggccgggcgcggtggctcacgctgtaatcctagcactgtgggaggccgaggtgggcggatcatttgaggtcaggagtttgagaccagcctgaccaaaatggtgagacccccgtctctactaaaaatacaaaaaaaaaattagccgggcgtggtggcacatgtctgtagtcccagctactagggaggctgaggcaggagaatcgcttgaacccgtgaggcagaggttgtagtgagctgagattgcaccactgcactccagcctgggcaacagagcaagacccggccaaaaaaaaaaaaaaacaaaaaaacaaaaaaacccactctatgaatagtgagggtcaaagaggttagagtctggcacaggtagactagaattcccagtctgttctcttgggctccagattctcactccaccacctgaacactagtgagtcccttccgttcccaagcctcaatttccttagacagatgtaagcagttgaattgactaacaactatccaaccccaacctactgggcaagttgcctcctttggggtcaaacactatccaacttcagtttcccaacgtcataaaggagaactctaaaagttgagaatcgaaactgatgacagattgactagacggccagcctgttaaggtggccccagatattccagcctcagcccagagtcctcctgtgcccctactgcagcaagggtgtctccaagaagggggacctggagtcagcccgtcacacctggtttcctctctgctagggtccctcctcccacagagcactggagggcagctgaggaggagctaccttaaaaaaggaggtgtgtgccagggagctgggtaggagcctggctatatatctgcccagcagcggtactctcgggacagagatggcactgatgcag

SEQ ID NO: 10665 - DNA, 2300 bp, Homo sapien
ggcaacagggggagactccatctcaaaaaaacaaaaaaaaaaaaaaaaaaaaaaaaagaaagaaagaaaagagaaagaaagaaagacaagaaaatagatgtctttgagtggtagcaagagcaacactgaagtgatttgcctattctggacatttcctataaatggagtcgtaaaagatgtatccttttgtgtctggcctctttcacttaagcgtagtgttttcaaggttcatccatgttggagcatgggtcagtgtttcattcctttttatggctgaataatattcccttgtatgggctttcgtgcttttgtgtatccatccatcagctgatggacatttgacttgtctgcctgttcactgccatatctactattcctggtgctcttgggaatgagtgaatgaatagcataaacagagctgtccagggtcacagagctggtaagatgtgaagccaggatcggaagccaggccattagtcccctagagcctatgttctaagcatcaggctttacctgtgaatctcctctttttacagatgaagatgaccgtatcactcagattcccggcaggaaagcaatggcatactcaagtggggtaactaatgatggaaccatttacaaaggtgtggacagagttaagaaaaagcaataggagatagtgagcttcctggggctggtaagagtggggagcccttaccactcccaggactaaaggagggagtggtgcccagaagccctgcctatatgcaactgagaagggcagggccagggagtcacgtccatcctcactgctctccagtctcctgaactggaagccagaaggtgaggggaaccctgatgcagtttgtatgtgtgagaaagtacaattagtttagactgaaaaactgaaaatctacccggccacttagcaggctggaataacagaaagggatcaagccagctgtaaagataacagggaacaataattctctgtagctgtaaagtgataatacaaccctgcatctttgagtgactgctgaaacattgtcctttaaaatcagagaccttcagaaactttgctgtttgaaattacatgactaagactgaaatattccaattttgcctggaagatttaagtcatcttgacacagagaagcagcctcaatttacaactcaggagcagagcttcagataaagattttctggacacatttgacatgtatcttagctatgttgcttcctaggaaacagggccctgggtcctctttgcaatccagactgaagttgactgctttgtacaaacctgttttgctttgagtccatcaaaacatgacttcatttagattttatctcaactccactttcctcggaatcctataataaattgctgttttcctttgtttggtgatgtgcgtagctcttctggtgggtggtgtccctcactgaataggtcaacaaacctaactttgttggactgccactgtgtccctggtgatctttggctgattggtctaggtcatagatcgacctgccggggtgcagaggagggtggagagtaactcagagggtcaagcatgaaagatctggcagaaaaataaagcccctccacccccaccacccctacccctgcaaatctgatttcccccaccaactgcagaccagagtattataaggggcggtggaagaagagggggagatcttcatttacccagagctcctatacatcaggggctgaataaagggttgtagaaatgaatgaatcaatctctgagtggggcttcaggcaatggaaagatctcagtccttttctgaggcataatggaagctcccagtcttgtgacatttgcaaggctgcccctttctcccaagagacatgagaccaaaaaagtgaaaggaaaggggggaaaagggagaattctaaaaatgcccatcctctgaacaccatctttgtgtaggcatctgggggaggccagctggggtgaggtcatctgccagccaggcccgtaggacttggcgcttcttgtttatcacagccacatgtggggccactgccagggcccgccccaactctgcagtcattggaggagcttgaagttaaagactcctgctaaaaaccagtacgtttcattttgcagttactgggagggggcttgctgtggccctgtcaggaagagtagagctctggtccagctccgcgcagggagggaggctgtcaccatgccggcctgctgcagctgcagtgatgttttccagtatgagacgaacaaagtcactcggatccagagcatgaattatggcaccattaagtggttcttccacgt

SEQ ID NO: 10666 - DNA, 2300 bp, Homo sapien
gtcttttaatgtgtaaagatctacatgaatgcaaaacatttcattatgaggtcagactaggataatgtccaactaaaaacaaacccttttcatcctggctggagaatgtggagaactaaaggtggccacaaattctttgacactcaagtcccccaagacctaagggttttatctcctccccttgaatatgggtggctctgattgctttatccaaaagtggaagtgacattgtgtcagtttcagatcctgatcttaagaggctgacagcttctacttgctgtcccttggaactcttgctatcggggaagccagacgccatttaaaagtctgcctatcctggccaggtgtggtggctcacacctgtaatcccagcactttgggagaccaaggcgggcggatcacttaaagtcaggagtccaagaccagactcgccaacatggtgaaaccgtatctctaataaaaatacaaaaattagctgggcatggtgcgggcacctgtagtcctagctatcaagaggctgagacaggagaaacacttgaacctgggaggtggaggttgcattgagctgagatcgtgccactgcactccaggctgggtgacagagcgagactccatctcaaaaaaaaaaaaaagaaaaaaaaaatgtctgcctatcctgagactgccctgctgtgaggaagcccaagcagtcacgtggacagtgcctgaccagccccagctttcaagccatccaagcccagtcaccaaacatgagagagaagaagccttcaggtgattctggactccactaacatatgactgataccgcatgatacatcccaagtgagaactgccccataaatccagaaaaccacattgctatcttaagtccctaagtttggggcttatttgttccacagcaacaggtaactggaacagagggcaagcctgatgaatgggcacacagactcagcccataccttccctggttctaatgttctcagggagcccggaccaaccctgggagcctcaggaacttaggtttccactggacagttctagaagggctatagaccaaatcaggtaactcaccagaccagccttggaatctatcaaatctaactgctgagctacccaatgcattccgatcctcatcacaattctttgactgaaggccgggcgtggtggctcacgcctgtaatcccagcactttgggaggctgaggcgggtggatcacctgaggtcaggagttcgagaccagcctggccaacatggtgagaccctgtctctactaagaatacaaaaattaggtgggtgtggcggtgggcgcctgtaatcccagctacttgggaggctgaggcaggagaatctcttgaacctggaaggtggaggttgcaataagccgagatagtgccactgcactccagcctagataacagagcaagactctgtctcaaaaaacaacaacaacaacaacaaaacaattctatgactgaaagtgactaaaaagctggctttatgccattaacactctgtactttgcagccaatcagaactgacgcagtctgggtgctagctgcttcaaaagcaacccacaccacacttttaccatttccatacatcaactgctgagaatatgaaaatgcacagtgacaggttttaggatcctgcttcaggatttccttttcctggtttggtcactagagttggctatttatctgtttctaaacaatagctattttatcgaatagtttagagaccactattaaatattgtgactgatgaaggatctgtgaatttttttatatatgttctaagagttaccattttgataccttttaaaaaccagcagctttctactatattcatgtaagacagcatgaataaaaccattttttgatacagggttttatttggctttaaactcaggaaccaagttaattatgccagattgaactttgatttttactaccttttcaaagatattttaaaaagtggattactacatatgatttctttggagcttacatttctttacttcacgaattctatgtcactgttacaagtttccattctgatggcttctgggcctttgtacctttgtttttggtgccttattcctagtatgtttctatcaccttaatgaggccgcagatggagtcagaatgtgaaattacaaataatcactggatccatctactgttttccatcaccttccccactgatgctctgggcgagagagtgatgtgtcacttcaactgtgtgtaatatgtcagacacgtcctacaataacaggcgtcatatttgtattatttttagtt

SEQ ID NO: 10667 - DNA, 2300 bp, Homo sapien
tgcctcagcctcccgagtagctgggattacaggcacctgccataaggcccagctaagttttttatattttcagtagagatgaggtttcaccatgttggccaggctggtctccagctcctgacctcacatgatcatccgcctgcctcggcctcccaaagtgctgcagttataggtgtgagccaccgtgcccagccatgttttgattcttaaggaaatgatttttaagtccccttccaatgaggatttagcaatggagttttcttcttctacagataatttgaggcttcccaattgcaccaaactccatttgggcagatacctcacctgtccactccatagccctagcatcaagaaaagtgccaagcacacaacaggcactcagtaaatttctgtcaaatgaatgaataaaataccaccaccttttcctgagaccattttggaccaaggctggcatgggcatctctgttcctccctctaacttaagaattccatctcttagaggcagatgctgcctgttttctgcaaattttattattcacctttctatatttggaaaaacaagttggtgtggcttacttaggaatctcatatccaggaaatgagctaaaaatgttgtatcaaagattatgcataggatccacaaactaagaagcaagcagatgagagcggttagagacatcgtggtatattttccggaagaaatggtccatggattaaaaattgtcattatgatgagtctgcagtaacacagaaaccacgtagtgcgaatcagaaaatgaaaagcacagccattgactatgattacaaaccaaaactttataccaattacctgttggaatttatgctgcatgaaggcaggatattttgcttgtcctgttcactggacagtacttggcataaaggatgtgcttatgaatattttctgggaaactaaatataacattcacctgtgaaaacacatctgggccaggcgcagtggctcacgcctgtaatcccaacactttgggagcccgaggcgggtggatcatgggaggtcaggagctggagatcagcctggccaacatggtgaaaacctgtctctaataaaaatacaaaaattagctgggcgtggtggcgggcacttgtaatcccagctactcaagaggctgaggcaggagaattgcttgaacctgggaggcggaggttacagtgagccgagatcgcgccactgcactccagactggacaagagtgaaactccgtctcaaaaaaaaaaagaaaaagaaaaagaaaaaacgtatctgaagggaatgaacaaatacacatgcggaaaattgtattcatggggtagaacggtggctgtttccccccctttcactattttctctcctaaagttgtgatagcattttctcagtggaaaggatgaccacagaattatctcccctgggctgcaactaaggaagtatttggagtgagaatgcgaccaggcttcaaatccaggaggggtattttacagggcgtgtggctctcacccagggctcacaggacacctgatatttaggctgttccccaagaggctaaggacagcgcggccccagctcccccaaccacagctgcccaagtttaggagcccgcactcgtgagcgatggctactccgcacagccccggggtcctctacggaaatccctggcacctatcagtacccctaagggaggtcgctcgttacccctcacttgaactctgtcccaaatgggaggtcactctctcttcgcggaccccatcttccccgaaagggtctcttgttctctctggccctcctgagaaggtcattactccccaactcgccttttttgttgttttttggtttctggtttattgaggcagggtctcgcttcatctcccagactggagtgcagtggcgcgatcacagctcacacggcagcctctacctcctgggctcaagcgatcctctcacctcagcctccctgggactacaggcgagcgccactacgcccgctttttttttttttttttttttttttttgtatttttgatagagacgaggtctcgctatgttgtccaggctggtctctaactcaagattcctctcacctcggcctccgcaagtgctgggatgacaggtgtgagccaccgcccccggcccctcgcccgccttttgaaggagcctttcgtcctcaagggcgaggccactccccccccgcgagttccatgccccctagagggtcatcgttcccgacggggaggtggcgccctcccccgggccccgggccccgaccgcccgtgctgcctccttccgggc

SEQ ID NO: 10668 - DNA, 2300 bp, Homo sapien
cagaccctgtctcaaaacagacaaacaaacataggtagtgccttctgaccgcatccttacatggcagaggggctagacagctctttggggtcttttttttttttgagacggagtcacagagtctcactctgtcaccaggctggagtacagtggtgctatcttggttcactgcaaacttcacctcctgggttcaggcaattctcctgcctcaggctcccaagtagctggggctacaggcgtgcaccaccacacctggctaatttttgtatttttagtagagacggggtttggccaggatggtctcgatctcctgacctcatgatccacccacctcggcctcccaaagtgcttggattacaggcctgagccactgcgcccagcctgaggtctcttttataacagcactaatctcattcatgagagctgtatcctcgtgacctactcttctcccaaatgtcccatctcctaataccatcacgttggggattaggttttgacatatgaattttggaggagcacaaacatcctgaccgtagcacctccctttccccagcaggcagtggaacgctctcctgatggtcagctcctctgtggacacacactaccactttcccctctctccagctatatgacgcgtgtctcccacctccccacaccctcccttttcctttggactcagctttcctcctttcacatcctccctctgacacctgtacttctgcctttgcttttccaaggccgatcacatccctgttctattctgttagtcacactcagagccttacttacatgggatgtgtgccatcgtgagggttttcactgtgggtctgtacatccttgtgactgcctattgtttactgcaggatcaagcggtggcctgagtgcctctcctttctagatagccttttgtttttctctcccgatgcttgcttcttttcttctccctggcttcattttacatcagtgctatttagtttttgttttttttgttttttgttttgatagggtctcgctctgtcacccaggctgagtgcagtggcatgatcacttctcactgcaggcttgatcttcctgggcgcaggtgatcctcccaccccagcctcttgagtaactgggaccacaggcacgtgccaccatacctgactaattttttgtgattattattattattattattattattattattatttttgagactgagtcttgctgtgtcacccaggctcgagtgcagtggcgctatcttggctcactgcaagctccgcctcccaggttcacgccattctcctgcctcagcctccccagtagctgggactacaggcgcccaccaccacgcccggctaattttttgtatttttagtcgagacagtgtttcactgtgttagtcaggatggtctcaatctcctgaccttgtgatccacccgtctcggcctcccaaagtgctgggattacaggcatgaggcactgtgcccggccctaattttttgtgatttttatagagtcagggtttcgccgtgttgcccaggctggtcttgaactcctgggctcaagaaatccacccgcctcagccttccaaagtgctgggatcacaggcatgagccatagcgcccagccagccatctgtgctatgagttaaggagataagagttaatgtttatgtccattttatggactgcaaaaactgagcccagagaggggaagtgattgactcaccctgggtgttgagattgctgagctagactgcagttgcctcagcactcctgcctttcactgtggaccagggcatggactggggatgtgacgggaaggagggaattcacaggacggccgagggctccgccctcactcacttccagcagcagaggagacagaggagtagagggttagttaaagcccctggtggcagcagccactccagccctgcagagtggctttttggcatcccaccttttggcatcccacctgcagctgccctctgcggaggaaagtctctttgccctgaccctgggtctgtttttgtttccttcaggtcgccctccaccccgaggcacccggccagctcctggaggctgcatccagcccaggggccccattgagcaggtgtaccaggaaattgccatcctcaagaagctggaccaccccaatgtggtgaagctggtggaggtaaaagggtggaggcgcccaggagggagggaggccctggctttgttaatacccaaacaccccgccactggtttccagggagagccaggtcacaccagaccgctcactgcagggctgagttgtatttactgctccct

SEQ ID NO: 10669 - DNA, 2300 bp, Homo sapien
gcagtgcagtggtgcgatctcggctcagtcattgcaaccttcacctcccggattcaagtgattctcctgcctcagcctcccgagtagctgggattacaggtgcccaccaccatgcccaggtaatttttgtatttttagtagagatggggtttcaccaggttggccaggctggtcttgaactcctgacctcaggtgatccacctgccttggcctcccaaagtgctgggaggattacaggtatgaaccactgtgtccgacttctctctctttttttttttttttgagatggagtctcactctgtcatccaggctgaagtgcagtggcgtgatctcggctcattgcaacctccgcctcccgggttcaagtgattctcctgcctcagcctcctgagtagctgggactacaggtgtacatcaccacacttggctaatttttgtatttttagtagagatggggtttcaccatgttggtcaggctggccttgaactcctgacctcatgatccacccgccctgtcctcccaaagtgctgagattacaggcgtgagctgccgtgcctggccttttttaaaaaattgagatataagttcatgtaacataagttggccattttgaagtgtatagttcagtggcatttagtacgttcacaatgctgtgcaaccattacctctatctagtttcaaaacgttttgatcaccccaaaaggaaaacctgtgcccattaagcagccattccccacacccactaatgtcaccacccccatagtcctaggcaaccattagtctactttctgtctctgtggagttgcatattttaaaaatttcatataaatagaatcatatatatgtgaccttttgtgactggcttccttcagttagcataatattttagaggttcatccatattgtggcatatacttgattccccccgaccttttttttttttttttttttgagacagtcttggtctattgctgagttgctgaggctggagtgcagtggcatgatctcggctcactgcaacctccgcctcctggattccagcgattctcctgcctcagcctcctgagtagctgggattacaggcacacgccaccatgcccggctaatttttgtatttttagtagagatgaggtttcaccatgttggccaggctgatctggaattcctggcttcaagtaatctgcctgccttggcctcccaaaatgctaggattacaggtgtgagccaccgtgtccagccctgacctgcattgttaatgcccagcatttaaaaataaaaagtcaggcaaacttattaacctccttagggcttctcttgggaaaaacaaagggaagaccagcaatagtaggcccagattcctgccgagcaacaattggcttgagctggaagcagctgtcaattctgtaggggatatgtgtgctctatttgggggttttcttatacttgttcctataggaattgagttaggaattattgtcatggtatgtgagaagtggttccagctacttgggaggctgagatgggaggatcacttgagcctaggagttcaagggtacagtgagctatgatcgcaccactgtactccagcctgggcaacagagagagggagagaccttgtctcaaaaaaaaaaaaaagaaaaaaaaagaaaaaataataaaagaaaaaatataagaagatgcagactctgcttttctgtatagactcagagatcagatcacaccatgttttgcaagatttttttaggatgtcaactggaggcaggaattagacagcagcctgggccaggaggagaggggatcctttcctgtccctgcccgtaggagctgggccagctgaccctttctctttctgcaggtggctccgctgccggatgggagtgccccagtgtgctggatgaagctggcgcatgcaccatgtcatcatgtgtctctagccagcccagcagcaaccgggccgccccccaggatgagctggggggcaggggcagcagcagcagcgaaagccagaagccctgtgaggccctgcggggcctctcatccttgagcatccacctgggcatggagtccttcattgtggtcaccgagtgtgagccgggctgtgctgtggacctcggcttggcgcgggaccggcccctggaggccgatggccaagaggtcccccttgacacctccgggtcccaggcccggccccacctctccggtcgcaagctgtctctgcaagagcggtcccagggtgggctggcagccggtggcagcctggacatgaacggacgctgcatctgcccgtccctgccctact

SEQ ID NO: 10670 - DNA, 2300 bp, Homo sapien
gtagtggtgcgatctctctgcctcccggttcaagtggttctcgtgcttcagcctcctgagtagctgggattacgggcaccgccaccacaccgggctaatttttgtatttttgatagagatggggtttcaccatgctggccaggctagtctcgaacttctggcctcaagtgatctctccgcccgggcctcccaaagtgctgggatcataggcgtgagccaccatgcccggcctcaggtttttgccatttccagcaaatgcatgcacgttgagtaacatcagaagaggtggatggccgagcatgttggctcatgcctataatcccagcactttgggaggcagaggcaggaggatcacttgagcccaggagtttgagaccagcctgggcaacatagggagaactctgtctctacaaaaaatagaaaaaattagccaggtgtggtggtgtgtgcctgtagtcccagctactcaggaggctgaggctggaggatcacctgagcctggggaggtcgagggtgcagcgagccgtgatcgtgctactgcactccagcctgggcaacacagagagaccctgtctcaaaacaaacaaacaaacaaacaaacaaacaaacaaaaaaaacaaagaaaaaaaaatgggagtgggccgggcgcggtgactcacacctgtaatcccagcactttcggaggccaaggcgggtggatcacgaggtcaggaattcaagattagcctggacaacatggtgaaaccccatctctacgaaaaatacaaaaattagccaagtatggtggccggcgcctgtaatcccagctactcgggagactgaggcagagaactgcttgaacctgggaggcagaggttgcagtgatccgagatcgcgtcactgcactccagcgtgggcgacagagcgagactccgtttcagaaaagaaaaaaaaaaaaaaaaaaaagggagtcggggtggagctctcattggctcgttgcatgtgagtgtccctacggcctagaaatacaagagaagcacatcggaacgggctggaaatccacccagttaactagagggctttgaaccttttattaacttggaggttgactctcctgtcaactcgattcccttttggctgtttggcagggtcagtgagacatcccctgggtcgctcgaccccgtaggacggttcagggagccctccaggtcttcgtttctcctcttccccgcacagtgctgttatccagctgggggatccaacgcacacttaaggctccagcaaagtaagtgccaaaaaggggagaatgggaagaatatgctgtatttcacaaaaagcatctaagtagccatctggaaaagccagaatgaacttcaatggtgcatccaggtgggctggggatgggagaggaacgccttcccccagcctttagggccggccctgagcaagtggtcagtcggcaggcagctgcggaagggggctcccccgagtcggtggtggcccaaagtccaggccgcatccaccgcccggcgcctagcgcaggggcagcagccgggtcgccacaggaggggccccgggtgttcttgccggcttgggggaactttcccagggtcagcccggaggcgccctgcagccccggcatttggctaaacaaagcaagcgctgccggcgcggcccgcccgagggcgccgcgggaagaacctgggcaggtgcgcgccgcgggcgagcgggtacaaagttgcggcgccacctcctgcgctccgcgcccctccaggctctcctcccagccgcctccgatcctcccggccgggcctctcttcccccgttcttcgcctcctccctttctgctccttgcccttcgcctcttcgctactttcgtctttgcaggctcccgcctccccacccctccccggcgcagggccgagccggcgggggcgcgcagggggcggtgcgcggcgggcgcgggcggttccgctttcgggtttcccgccgccgtggccaatccccgcgctgcccggggcggcgacgcgcccaagccgagccgggcggctcctcccgcccccgccccccgcgcgcccgccgcccgggcggaggagaggagcgcgcggccgcgcagagcaagctgagccgagccgagccgagctgggggcgcagagcgcgggaggcggcggcggcgcggagcccaggtgagctggcggtagccgggcccggggcaagggacgcagccgccgcggccccgggcgcccgctccgtttccctctcgaggcgggggaccgccgccggcatggcacacaaagcccggaggctggcctggggctccc

SEQ ID NO: 10671 - DNA, 2300 bp, Homo sapien
ttggatttgtaggggcacttcccaacctttcttacttaattggcttttaagtttacacagctgtgtgtatatctaagtttctgcctgtgtgagctacagtgttctaataaaacacaggcaatttagtaacatgatgtaaacatacagaattgtttaacaagtaccaggaaaagacatccagtaacaggaaaggacacccaaatctattttggttaccttagtaaagcagggttgccaaactatttattgcccataagctaaatctgtcatgccacctgttttttatggcctgctaagaatggtttttacgtttttcttttttctttttgtcaagatgggtcttgccatgttgtccaggctggtctcaaacttctaggctcaagtgatcctgccccctcggcctcccagagtgctaagattgtaatcacgcgtgtaggtgtaagccaccacacctggcctttcacatttttcaatggttaaataaaaaccaaaacagtaatattttgtgacttatgaaaatcatatgaaattcagttttcagtgtctgtaaataaagttttattggaacactgccgcatgcattcatttactatttcctgtggctgctaggatggcagggttgagtagctgcattacagagcctatggcttgcaaagcctaaaatatttactatctggccctttacaaagtttgctgaccctgccttaaagtgccccagataatctccaccaggcctgatacatattttttttggggggggggggggaaatatgagaatatagaaaaatacgggactatgcatcccccattcagaattgactattgctaacagtttgccatttgcctcacagccatttataagtactaaaaggaataaaactttacaacattccttatgctccctgtcccgttctgtgcttttttccttctttgtggcacactgtcatgaatttaatgtatattcttctctttgactttaaaaatcttgtatgtaagcatgtgtccatgaacagtatctactgcatgggattttaaggtacacacaaattgtacatcatgttgtattctgcaacttgctgttttactcaacattatgtttttgggatttccttatgtcagtacagatccagtgcaccccttttatctattagatggtattccatcaaacaactataatgagtttcatttatccattcctttgatgaacatataggaagttgttcccaggtggttttttttttgtgtttttgttttgttttgttttgtttttgagatggagtcttgctctgtcacccaggctggagtgcagtggcatgatctcggctcactgcaacctctgcctcccgggtttcaagcgattctcctgcctcagcctcctgagtagttgggattacaggcgcgcgccaccatgcctggctaatttttgcattttttttttaagtagagacggggtttcaccatgctggtcaggctggacttgaactcctgacttcgtgatctgcccaccttggcctcccaaagtgctgggattacaggcgtgagccactgtgcccagacttttttttttttttttgaaacagtcttggtctgtcgtccaggctggagggtagtggtgcgatctctctgcctcccggttcaagtggttctcgtgcttcagcctcctgagtagctgggattacgggcaccgccaccacaccgggctaatttttgtatttttgatagagatggggtttcaccatgctggccaggctagtctcgaacttctggcctcaagtgatctctccgcccgggcctcccaaagtgctgggatcataggcgtgagccaccatgcccggcctcaggtttttgccatttccagcaaatgcatgcacgttgagtaacatcagaagaggtggatggccgagcatgttggctcatgcctataatcccagcactttgggaggcagaggcaggaggatcacttgagcccaggagtttgagaccagcctgggcaacatagggagaactctgtctctacaaaaaatagaaaaaattagccaggtgtggtggtgtgtgcctgtagtcccagctactcaggaggctgaggctggaggatcacctgagcctggggaggtcgagggtgcagcgagccgtgatcgtgctactgcactccagcctgggcaacacagagagaccctgtctcaaaacaaacaaacaaacaaacaaacaaacaaacaaaaaaaacaaagaaaaaaaaatgggagtgggccgggcgcggtgactcacacctgtaatcccagcactttcggaggccaaggcgg

SEQ ID NO: 10672 - DNA, 2300 bp, Homo sapien
aaattgaaaggctcttactttaaatacattaatcaaaaatgacatcagatgaaaaaatatacttgaaagaataaaaaggaactgataagttacctcctaagaggaagtagtacttttttttttttcttgagatagagtttagctcttgtcacccaggctgcagtgcaatggcgtgatctcggctcactgcaaactctgcctcctaggttcaagcgattctcctgcctcagcctcccgagtagttgggactacaggcgcccgccaccacgcccagctaatttttttatttttagtagcgacggggtttcaccatgttagacaggctggtctcaagctcctaatctcaggtgatccactcatctcagcctcccaaagtgctgggattacaggctgaagaattactttttactacatagcctttaatattattcaatgtttaccatctctatatataacctttcaaatgaatttaagattttcagtcaacataccaattagtctctatctctccaccaagtctcttgtttccagagcagctgtctttggccagcaaatgtaccgtaatggatacaactgttttacactgcttcaaagagccctgaagagaaattactccccatcagaaaaactttctgatgggaaatttaacagagaaagaaccaataataggagctgcacaatttagttggttccctgttgctttataaagactatttggggcaggcacggtggctcacgcctgtgattccagcactttgggaggctgaggcaggtgaatcacctgaggtcaggagtttgagaccaacctggtcaacatggtgaaaccccatctctactaaaaatccaaaaattagccaggcgtggtggtgcatgcctgtagtcccagctacttgggaggctgagacaggagactcccttgaacccaggtggatgttgcagtgagcgaagatcacgccactgcactccagcctgggcaacagagcaaggctccatctaaaaaaacaaaaacaaaaaaacacaactatttggatatagctgctgctttggacttgaaacaatggcatttttctgtgaacactcaaggataagaaattcatgaacagaaaaagcaataactggctcctgcttacttgcagggttaagaaatgtaaactataatacactatatatttggtgatagcatctcacacctctgagctttggaccctttcttatttatttttattattatgtttctgagacagagtcttgctctgtcgccaggctggagtgcagtagtgcgatcttggctcactgcaacctccacctcccgggttcaagtgattctcctgccccagcctcccgagtagctgggattacaggcatgcaccactatgcccagctaatttttgtatttttttttttagtagagatggggtttcaccatgttggccaggctggtctccatctcctgacctcatgatccacccgcctcagcctcccaaactgctgggattacaggcgtgagccaccgcagccggcccccttaatttataatcaccttactcatgatgaattcctggacgtaatttatcatcatccctcatttatagagttaaatatagaaaaaaaaagtgcccatgcagaatatataagaaagccaacatctagaaagggactgaaaaatgctcctggtcattggtccaaaaattatgaaaaaatcttttccttcttaatctccagtcagggaccaacaagtcctcgtgagcagccacaggaaccacaagcgctggttcagtccaacaaggcagggaggcctcagaagaaagtccaagcctcatacagacctgcactgaccaccctggagagatctaccaattccaggaagagctcttgtctgagaataggtgctaaatgaatttacataatgatggagtgtgtacaatttctaatcaagatattggcaattttgcccagagagaacataatctgagatgcttgcactaacttgttagcaaaatacccatttattaagaaaaagttggtgtcctttgctaccaaaagggaagaaaaggggaataaaacaaatacgtagttactagcaacaaaataagacaaactaatcagaatgctgtttattgacaagatagggtgtcacaaatacatcatttatagggagagaggggacatgaacaagtccaaaatcttatactctgcacagcagcccagcagggatgtcctctctagagatggtttatcaagggtaccccatgagagggcagctcctgatgcagctgccggaagagcatcgcacaccggtt

SEQ ID NO: 10673 - DNA, 2300 bp, Homo sapien
gtttagtttattgagcaacattaatttagcacatagtcacttagaaaaattttagcaaaggcttatttttaaaccagggattggtgaactttcccgcccttgggccaaatctggctttctgcctacttaggggcttcaggctgagtggattttacatttttaagtgattgcagaaaaaaaaaatcaacaacagagaagaaatacgtgacagaaaccaagtgtggcctgaaaaatcgaaattatttactctctggccctttacacaacaagtttgctgatccttgttttaaacaataaacaaagccaggaaccagtaaacctgacaggcagatttgtcctttctcgttttgagtgatagggaaggccgtgaattatagtcctcaatgacatacacagaggggcattgaaaaggcttatctggctgggcgtggtggctcacacctgtaatcccagcactttgggaggccggggtgggtggatcacctgaggtcaggagttcgtgactagcctggccaacatggtgaaaccctctctctactaaaaatacaaaattagctgggtgtggtgggacatgcctgtgatcccagctacttaggaggctgaggcaggagagtcgcttgaacctgggaggtggagattgcagtgagccgagattgtgccattgcactccagcctgggcaacaagaatgaaattccatctcaaaaaaaaaaaaaaaggaagcacaagcttggagaaccttattctctctcagaaacacccattgaaaactagaccataggcagtgggattgcttaagcattctgtcttatgaagtttgtgacagacttcagtaaaatggaaagtaattacaggtagtaatttaatgtatacactttaaaatcggcctggcgtggtggctcacacctataatcccagcactttgggaggccaaggcgggtggatcgtgaggtcaggagtttgagaccagcctgaccgttatggtaaaagctcgtctctactaaaaatacaaacattagccgggcgtggtggtgggcgcctgtagtcccagctactctggaggctgaggcagaagaattgcttgaacctgggaggcggagtttgcagtgagccgagattgctgcactgcactccagcctgggcgacagagcaagactccgtctcaaaaacaaccctaaaaccaaaaaacaaatctgtagcttgtccattgattcacacctgggaaagaaactcatacgtacagaattgattataatgacaaaagtggctccttgaagtaagcgcaggcttaactacaatttttgccatgaatttaagctggcattttttagttgagctttcatccttgaagatgacaccaaaagctaatgacaagataattttgttgctcatgataggcatccttttttgatctcctattacatatgtgcgcagcactgtttgacatctattatttcattgtaatccttacgataattctttatgataggtttgatgcccattttacagatgaggaagctgaggcttagctaagaagctaagtgactggccctaagtcacacagtaagtagcagaggcagtgtttaagtccaggtccatctaatgctaaagccctgctggctctttcccgtgtaccctctgcctctctcccagacccagtttttcaggaacacatctcgtatggctcagggttaaggccaggttataggtactttccttttaaatagtgctgtcactgtgcatgtgctgaaatgtgaaatccaccacatttctgaagagcaaaacaaattctgtcatgtaatctctatcttgggtcgtgggtatatctgtccccttagtacctcgcctccctgggaatacagtcccttgttcaacagagagcttttgctgggaagacggcaaacaagctgatggatgccctaaaggactccgacctcctgcactggaaacacagcctgtcagagctcatcgatatcagcatcgcacagaaaacggccatctggaggctgtatggccgcaggtaggtctcccaaggccctgggggtgtgaattctttagagagaagcaggagctagcaagctggttctgtgaaaggccatacatacaagatttacctgccttggatagatgttgttcctgcaggggactatgttttagactataaaacattttgtattttgcacagactgaaaacttttttcccatgcatgttccttcttactcctcccaaccactttgtgaggtaatgggtgggtgatctccatgctgggagagtaaaccagggttcacacatctgatctac

SEQ ID NO: 10674 - DNA, 2300 bp, Homo sapien
cccagaggatgagctaggcatgggcgtcggtttgctcagctttgggtagtatatggctggggagcgatgggtgggaggcttggtgtttctggaagaggaaacagtgttgtagatggtcaagaggagagcatgtggcagggtccaccttcagtgttacctagagtgagggaaggccagccaaggctggcgagatgaggggccagagcctgaagggacccctgtagaaaagaaaataatcaggtgatgctagttagtatatcttttcatatgtttattgaccctttctttctactgagttaccatttttaaatttcaggcttctttgctaaagaatgatgagactaaggccctcactccagcttccttgcagaaggaattaaacaatttgttgaaatttaatcctgattttgctgaagcggtaagtctttcccagaatttgttgctgtgttggaaaggaatgacaaggcaactttttttgtttgtttgtttttggaaacagagtcttactctgttgccaggctggagtgcagtggcacgaccttggctcactgcaacctccgactccctggttcaagtgattctcctgcctcagcctcccaggtagctgggattacaggcacgtgccaccacgcccagctaatttttgtatttttagtagagatggggtttcaccatgttggccaggatggtcttgatctcctgacctcatgatctgcccgcgtcggcctcccaaagtgttgggattacaggcgtgagccactgcgcctggccaaggctactttttatattgagtagctgtgcaaatgagaatcagcccattggcccaggttcttgaaggaaatcgtgttcttggtaggcaaacaactcggtataggttgcaaagctcctccctccctcctcgggccataggcgatttcttcttactcttgatgttctctttcagtcatcatcctcctgatgttgtaaagtttggactggagataatatactagactgatgcaaaaaacagtgtttgtttgtttgttttggagactgagtttcgctcttgttgcccaggctggcgtgcagtggtgcgatcttggctcactgcaacctctgcctcccgggttctcagtgattctcctgcctcagcctctcgagtagctgggagtacaggcacacgccacaatgctcagctaattttttgtatttttagtagagacggggtttcaccatgttggccaggctggtctcgaactcctgacctcaggtgatccaccctcctcggcctcccaaagtgctgggattacaggcatgagccatcacgcccagcctaaatgacagttttgaggctgaaaaactcttttcctttctcttcttttgtcagtgtttatttttaaagttctaataattccattccttaatggattttttactcggaaaattttcttaaatagtatttggattttccatctgactttgggtgcagaaatatatctattttgcttcctagtaactgagatctgcctgttagggaagtttcagtgattaaaaaaaaaatgaaaataattaacttagtaaactagtaagtctcagtgtgttttaacttgtacattaataaaacttaattttataatttgtatatgaattcaggttttaggatctttaattctgaacactcagttttcctcaatatttgaactaggtaaggcccagtattctcatctatcactcatgtaaccagtggcatagtggagtatatttgagataaaactgacacaaatactaatggaactcccatttttaatttgtggactccctctagggggaatgtgtcttgaagctgttttattctgcctctagggagaagattaagctaaactatgaccatcttattagaagggtatgggatacactagtgtttgtagacagtggaactctctgcagttgtcttacaccagagatatttacagcgtttaaaatacattgattatttcttgttttagcattatctcagctacttaaacaacctccgtgtccaagatgttttcagttcaacacacagtctcctccattattttgatcgtctgattcttaccggagccgaaagcaaaagtaatggggaagagggctatggccggagcttgagatacgccgctctgaatcttgccgccctgcactgccgcttcggtcactagtaagtttatagacctttgtccttgcgcaaattgaaggaaccgatgacaataaaaagtctgctgtttggcctggtgcggtggctcacgcctatagtcccagcactttgggaggccaaggcgggt

SEQ ID NO: 10675 - DNA, 2300 bp, Homo sapien
ttctcaaaaagaaataaaattaaaaaattaaaaggcaaataacaaaggtgttcttgggctccaatactttgggaaaaagtatttacaataaatatgacagtgaaagtttagattttggttttggtttagaaatcacattttcaggccgggcacagtggctcatgcctataatcccagcactttgggaggcagaggcaggtggatcacctgaggtcaggagtttgagaccaccctggccaacatggagaagcactgtctctactgaaaatacaaaaaattagccagatgtgatggtggatgcttgtaatcccagctacttgggattcaagaagaatcacttgaacctgagaggtggaggttgcagtgagccaagattgtgccactgcactccagccttggcgacagagcaagactctgtctcaaaaaaaaaaaaaaaaaagaaaaaaaagtcatatttgatgatgagacaaagtttacaatataaaatgaaaagaacaggaaataaagttacatatcatattctgattttgttaaaaatataatgtgtatatacacattatataaatttggaatacaccctgtattataaacatatattgtgattttgttaaaaatgtaatgtatacacaatatatgtttacaatacagggtatattgtaaatttatataatatgtatacacatatttttaacaaaatcagaatatgatatgtaacatatatacacacatacagaacaaagactaggataatatacactaaagtattaatagcgttatttctgggtagtgagattgcagaagatttttgttttcttctgtaggttttctatatttttggaataatttttccccatactacacctacataataatttgttttttgttttgttttgttttgtttttttgagactgagtcttgccctgtcacccaggctggagtgcagtggcgtgatttcggctcactgtaatctctgcctcccgagttcaagtgattctcctgcctcagcctcccgagtagctaggattacaggtgtgcgccaccacacccggctaatgttttgtatctttagtagagacagggtttcactatgttggccaggctggtctccaactcctgacctcatgatctgccctcctcggcctcccaaagtgctgggattacaggtgtgagccaccacgcctggccaataattttctataatgacataaattaacaatggaattagaaattatttttactttaaaaaaattttttttaaagaaattattatttttaaatagagatgaggtctcagtatattgcccaggttgttcttgaactcctgggctcaagcgatactcatgcctcagcctctgcctcccaaagtgctgggattacaggcatcaaccaccacaccctgcccttagaaattattttacttatagaaaaactcatctaggtaaaattggagttaagtgtctataacccagttaaatgtaaacatttaatttgtagctaactttctacatattttatataattgttgctgatatcgtccatatgaaacaaataagtagagctggggcaagccacctggctcccataaggccccatacaggcactggaaatacaagaagcaaacacattacctgcctggaaggagcttacagtctggggtggggtcagattggcaattttactatagtttgatagtgccacagggggggtaagtgcagagggcttatgggagcatggaggggcttataggatctcaccttcatctagaaggtgacagaagcaggtggcccagaggatgagctaggcatgggcgtcggtttgctcagctttgggtagtatatggctggggagcgatgggtgggaggcttggtgtttctggaagaggaaacagtgttgtagatggtcaagaggagagcatgtggcagggtccaccttcagtgttacctagagtgagggaaggccagccaaggctggcgagatgaggggccagagcctgaagggacccctgtagaaaagaaaataatcaggtgatgctagttagtatatcttttcatatgtttattgaccctttctttctactgagttaccatttttaaatttcaggcttctttgctaaagaatgatgagactaaggccctcactccagcttccttgcagaaggaattaaacaatttgttgaaatttaatcctgattttgctgaagcggtaagtctttcccagaatttgttgctgtgttggaaaggaatgacaaggcaactttttttgtttgtttgtttttggaaacagagtcttactctgttgc

SEQ ID NO: 10676 - DNA, 2300 bp, Homo sapien
tcacttgaggtcaggagttcgagaccagcctggccaacacagtgaaaccccatctctactaaaaatacaaaaaaaaattagccgggcattgtgatgtgcgcctgtagtcccagctactcgggaggctgaggcaggaaatcatttgaacccaggaggtggaggttgcagtgagctgagatcacatcactgcactccagcctgggcatccgtctccaaaaaaaaaaaaaaaatagaaacagtgattctggtctcttaactctcaccttcctgctcatgttgttttttgctgtttggaattctttctggtttttaacctggctaactactatatagttattttatttaattttttatttttaaatttattttttttttaatttttttagagtggtgggatctcactccctcagtcacctgggctggagtgccgtggtgcgatcctagcttaccatagcctccacctcccaggctcaagctgtcctcctacctcagtcttctaagtagctaggactacaggcacctgccaccatgcctggctaatttttaaattttggtagagatgtagtctccctatgttgctcaggctagtcttgaactcctgggctcaagggatccacctgcctcagcttcccaaagtgctggcattacaggcatgagccaccacacctggccccctactgtatagttttaatcaaaatgtatgtagagttcatctagtagcatcccagccagacctcaactcctttactaactgtttgatttcttaaattagttaatttttggcttggtgcctagactttgggaggccaacgtgggaggatcacttgagcctaggagttcaagagcagcctgggcatgggatttcaccatgttgtccaggctggtctcgaactcctgacctcaagtaatctgcctgcttcagcctcccaaggcgctggtattacaggcgtgagccactgcgccaggccccaaatggtctttttaatggctgcattatatttcacagtaagaaaagcaacataattcaactctgtattataaattaagtctttattggacttacaggctcctttcagtttttcttcatttcaaacaatgtatgccaaaataacttccctagaagtgcaattgctgggttatccacatctaaagttggcatatatgcagtcatcttattctctgaaaaagagtctaaatttagttttaaatctcaactagactgtaatcttcttggtagctgaggttgcatactctttattccttgtggtactcttttttttttattggagacggagtcttgctctgtcgcccaggctggagtgcaatggcgtgatcttggctcactgcaacctccacctgccaggttcaagccattctcccgcctcagcctcccaagtagctgggactacaggtgtgtgccaccatgcctggctaatttttgtgtttttagtagagacggggttttgccatgttggccaggctggtcttgaactcctggcttcaggtgatctgcccaccttggcctcccaaaatgttgggattataggcatgagccactgtgcccggcctctcgtcatactctttatagacttcagcacatagtatgtctgcctaccttacaaggtttgggagaagatcaaatgagattgtgtttgtgaaaaatagtatttgtatagtgttttccagtttacaaagcactttgtattatcttatttaatctttgccaaaaacaagggagatattattatctccattttactgatgaaggaaactagaactcagaggtcacaattttgcaatgattacaaagctaagaaggaaggaacagtggatcctcagactataaatcctatgctttttttctattttagaccattccactgactagacaaaaatggtatgcaaatgtgaagtattactttagtgttttaggtagatagaaaaatccttatttgcatgtttggagtgattattaaagcagaggggttgataaatgaatttatgtttgcaattctttatcagtctccagctctttaaaatccatacctccctatctctcctttacacagggcccagatattacactgtcaaaactttacaagttaattgaagagtcttgtccacagctggcaaattcagtgcagatcaggtaaacttcattttcttctttatatatgaaaaggtgtgaaggtagatgaaaatcacaaaagggtatgtggtagttaattcttttaaaaagatacctttattaccctaggttgttttcccaagagcctttacttaattctgttttgttgaaa

SEQ ID NO: 10677 - DNA, 2300 bp, Homo sapien
catattcattcattattcattaaacaaatagcgattgagaaaacaaaaaccaggcatgaggctgcatgcagtggcccatgcctttaatcgtagcaatttgggaggctgaggcaggaggatcacttgagtccaggagttcgagaccagcctggacaacatcgcaagacctcgtgtctacaaaaaataaaaaaattagccatgcatccaggcacagtggctcaggcctgtaatcccagcacttttggaggcggagatgggcgggtcacctgaggtcaggagttcaaccagttcaagaccagccgggccaacatggtgaaaccccatctctacaaacaatacaaaaattagccgggcgtggtggtgcgtgcctgtagttccagctactcgggaggctgaggcaggagaattgcttgaacccgggaggtagagattgtagtgagccgaaatcgagcgactgtactccagactgggcgacagagcaagactccgtatcgggaaaaaaaaaaaaaaaaaattagccatgcatggtggcacaagcctgtagtctcaactactcgtgaggctgaggtgggaggattgcttgagcctggcattcctgagggcgagggggtctcctgccctgctcatgtctaattacctactttaactggaggctgaggttgcagtgagccgtgagcgtgccactgcagtccagcctcggtagcagaatgagagagagagaaagtataatttaaacaaacataaaaatgggcacaaggcaggccgggcgcggtggctcacgcctgtaatcccagcactttgggaggccgaggcgggaggatcacgaggtcaggagattgagaccatcctggctaacacggtgacaccccgtctctactaaaaatacaaaaaattagccgggcgtggtggccgatgcctgtagtcccagctactcggtaggctgaagcaggagaatggcgtgaaccagggaggtagagcttgcagtgagcagagatcgcgccactgcactccagcctgggcgacagaggagactccgtctcaaaacaaaacaaaacaaaacaaaaggcacaaggcacagtgtgtgcatgtggatagccaaagttgaatggtatgtggtttttctttcaagggacataaagactaatagggataccagatcattaataataattcagggtatagagaactaagtgtcttgggagaggtacagatgaacggaaggggaattgtgaaaaatcaggttcaaaatgttggctggggattgcttttggagggctttgaaatgcagagtatagattttgtagtttattaggtaggaaactgactcagcacatggaggtgatgttgctaatgttctatttcacgtaaggatacacgaccactggcaacctgatctggctgtctgcaaatggcatttgtgaaacgctgaagaaaaatctcatgttcctatctttaaaaagacagagttaaactcctaaacatttgagtttaaaagtaacataataaatacatactttaagggtgcaaatttaatttcggtacttttaaacacaatcatttaaacattctatttgaactattttcaaattacatgaacaagccaggcgcgctgcctgtagtcccagcttctcgggaaggcgggaggatcgctcgagcccaggatttgggagggtgcagtgctctttgagggcgtctacgaataaccactgccctccagtcttggtaacatagcgagatatcgtctcaaacaacaacaacgacaaccaccaccaccaccaccaacaacaacaaccaacaacaaaaaaaccactttgggagctcctcagtcccttcagccccgaccccaagcatcgacttcccctcccatccggtccctgtccacgtagcctgggaacctgctcccactcggcaaaagtttctgtagggagtcagtcttttggtgcacccctccccgcactcttgtacattctgactggctgtcgctctcccatgtgctctgacagactgctctgattggttaacaaatgccgcgagcacgcggatgtctgtttcctgggatattgtgagggcgggcggagatgtagacccggtagtgttgtgccttgtggtgacaactggcggcagcgcgccgcgggcccgagacttagtctcgggccgccatggccagcgtccacgagagcctctacttcaatcccatgatgaccaatggggttgtgcacgccaatgtgttcggcatcaaggactgggtgacgccgtacaagatcgcggtgctggtgctgctgaacgagatgagccgcaca

SEQ ID NO: 10678 - DNA, 2300 bp, Homo sapien
tgaaccatggcgcctggcctagcaacattcttaaaatcagatatatacatatagaaaagtctaggccgggtgtgatggctgacacctgtaatcccagcatcttgggagactgaggtgggaggattttgtgagcccaggacttacagaccagcctgagcaacacagtgagactctatctctacaaaaaaattaaaaattagccacatgtggtggtgcattcctgtggtcccagctattcgggaggctgaggtgggaggatcgcttgagcacaggaggtggaggctacagtaagctgtgatcatgccaccgcactccagcctgggccacagagtgagaccctggctccaaaaaacaaaacagaacaaaacaaaaaacccaataacgattgatgaggattgtagtgagttggaaacggcatgccctaaataaaggtggcttatttatttatttatgagacagagtctcactctgtcgtccaggctagagtgcagtggtaatcataggtcactgcagccttgaactcctgggctcaaggtatcctccggcctcagcctcccaagtagctgggattacaggtgcatcccagcacacctggctaatttttgtatttttagtagagacagggtttcaccatgttggccaggcatgtgtcaaactcctggcctcaaagtgatccacccacctctgcctcccaaggtgctgggattataggcatgagccgccacctccagcctatttatttatttatttttgagatggagtttttgctctgttgcccaggctggagtgcagtggcatgacctcggctcactacaacctctgcctcctgggttcaaccgatcctcctgcctcagccccccgagtagctgggattacaggcaccccccaccatgcctggctaatttttatatttttaatagagacagggtttcaccatgttgcccaggctggtctcgagctcctgacctcaagtgatctgcctgccttggcctcccaaaatgttgggattacaggcatgagccattgcacctggccaaaggcagcttatgctgtgcatatccagtcagttgttaccatctaggaataaatcatgttaccaaattttcaaatttttcaagtgaagctggaaatgtagttctttgttggcagaaatatcctaatttttaagtgttggcaaacaccatgcaaagcaaataaaatatatctaatgagccgcatttagtttagattgcaacttcagtttgcaacttctggcttagaaattcatcccttttggtccccagcacctagaacagtgccttaaatatagcaggagcttagcacagtgttactgaataaatgaatcaatggcttgaaagtcttaccaatttacagtaaaattgttatttaggattttgtaaaattactttcctctttccattcattaagtgttcctactcaggattttaaggttgaatactagtttattccacacagaccctttgtcaaaccttatttatggtatacacatatgcaaaaatatcctaaagagctgggagattgtaagtatgctttttcattaatagagtgaggcataaaaataaaccgaggcaaagaaagaggttaagtgagtattaaattcctggcaaaagccagcttctcctttcacaaataaaagatagttatataataattatgtatggtaactaaaacatacagagttctcaagataggaaagcttgtattacaagatatcaatgtcttcttttttgatagcatcatttagcttatacatatctgccttcttttttgtttttgtgaactaataatgcatattcattcattattcattaaacaaatagcgattgagaaaacaaaaaccaggcatgaggctgcatgcagtggcccatgcctttaatcgtagcaatttgggaggctgaggcaggaggatcacttgagtccaggagttcgagaccagcctggacaacatcgcaagacctcgtgtctacaaaaaataaaaaaattagccatgcatccaggcacagtggctcaggcctgtaatcccagcacttttggaggcggagatgggcgggtcacctgaggtcaggagttcaaccagttcaagaccagccgggccaacatggtgaaaccccatctctacaaacaatacaaaaattagccgggcgtggtggtgcgtgcctgtagttccagctactcgggaggctgaggcaggagaattgcttgaacccgggaggtagagattgtagtgagccgaaatcgagcgactgtactccagactgggcgacagagcaagactccgt

SEQ ID NO: 10679 - DNA, 2300 bp, Homo sapien
gtttttactttttgactattatgaataatgctgctaagaaccattagcatgtacgtttttctgtggacctaggttttcatttctctcgggtatacacctaggagtggaatttctgggtcttatggtaactctgtatgttttaacatttttgggccgggcgcggtggctcacgcctgtaatcccagcactttgggaggccgaggtgggcggatcacgaggtcaggagatcgagaccatcctggctaacacggtgaaacccgtctctactaaaaatacaaaaaactagccgggcgcggtggcgggcgcctgtagtcccagctacttgggaggctgaggcaggagaatggcgtgaacccaggagacggagcttgcagtgagcagaaatcgcgccattgcactccagcctgggcgacagagcgagactccgtctcaaaaaaaaaaaaatttttttttttaagaattgtcaggcattttcatagcagctgcatcattttacattcccaccattcatgtatgaagattccaaattctccacatcctcaccatctattttctttctttttaatgttacccatccttgcaggcgcacagcggtatccatggatttgatgtgcatttccttgatagttaatgatgttgagcatctttcatgtgcttattaactctggaggtagacctgccaggccttttctaatgagggacaaccatggctttgtaccccaagaacatttttattgagttgctttgtgtctagatcattaggagaattaattaatactttctcttccaatgaagctcagctgcgtcctacatcgtgaatgaaaggctttctgtacatttttccaaaaaaaacctaggactattatggataagaagtgacattatctgagcagcacttgaagcaagagaaatacatactctgatgcattatttcagtctaaggaagtggcctgccacgcactctctctctctccgtgtgttttaatctaatatagcacaacttgtcgaagcaaatctataatgtatataaataacagaacagtcttaggtcctcatgaagagcgaactgacttttttatgtttaaaatcttaaatactggttaagttagaggtgagattaaaaagtgtaggaaaatcggctgggcccggtggctaatctcagcactttggaaggccgaggtgggcggctcacctgaggccaggagttctagaccagcctggccaacacagtgaaaaccagtctctactaaaaatagaaaaaattagccgggtgtggggcgggcgcacgaagtcccagctactagggaggctgaggcaggagaatcctttgaacccgggagacggaggttgcagtgagccgagatcacactattgcactccagcctgggcaagagcaagaccttgtcaaaaataaaaaaaaggtgtaggaaaataaactgtcatccagtacagctgaagaaatcgataccttaatttacaacctcagtttctctgtccaaaggcaattccaagactcgagcaaattcttttattatgctacgattttggttattttgaatacagcttttcaaagagcccttgggatttgagagcccttggttttctaagtgttttcaataagtcttgtttttaaaggccgcgtcctagcgagtgcagctgccgctccttaccggacccacgagtgaggagccccgaggtcatcaccgagcatgaacgcgggaacgtctgggaaggaaatctgaggccctgctctgacggtcataacaaaggccttcgagccaaccggcgtgttcaaattcaccacggcccttcccgcgctcccctccccggaaacttgaccacctagcccagaaagccgcagcagcttcctcagggacgctatctcccatttcaaacacccaaccgagaaagcagcgccgcagcgcgccttccgccacgcccaggtccgcaggtcttcgctcggggcggaaaagaatcctccccgcgcactcccagccaggaggaacgccagaggccccgcccaatccctgtcgcttcattggctctggtgaccggcctcccgaaagtcggcttcctattggtcgtcgtggccgccgctctgcgcttttaccggggcacgcggcgagcgtgaccacgccccttacgtccggacgctcggtcgcctcccggggcgcggtaatcaccgcccagagggaaggaggtcggcagtgtgaggagctgctatggtgctgagtttcctggtagagccggccgagctgaggcggtcgcggccatgaaggtgaggggccggtggagccgga

SEQ ID NO: 10680 - DNA, 2300 bp, Homo sapien
ttttttacacgttcgtttttttcaaactatacagccccctctgctactatgtcttcgtttcagggagagcttatggatggagaccaaacatccagatctggagtgccggcacaggtacgagggggtaactaattacacccagggcccggcacgcttattcttggccgtatatggtggggcctttagtgcttgatgacttctgataaacttcaagtcatgtgctggagtgaagcttccacacccagctgaactctgcacttaaaggctgtcctgatgtatagtgtctgctgaggtgctaggtggctccaaagtctgctgtctgaagggtcccaaaatagctcatcagtctcttggccttagttaatttctctgtcttacacagttagacactaactgttgaagaaatggctgtgaaaaagtagcacatacacatttgtagtgttatgtgttagtgcacgtgtttcagtgaccacagaaaacaatcagtagtgtaagttagcctaatgcccatttgtcttgctacagtgaaattgttctaatttagttaatgaaagagccatctgaattagtgaaaaaatgtagttatttactaattgtaattaataatattgtcccagtgaggtccttggacatcctgattgaataacatgtaaaggcttgtaattaatatttacttgtacgtgagtgattctaaactgctgaaagaaatgttttgaacaaattttttcacgcttaattttcttctctgaagaagggggttattaaaagtagaggaaagctggatgcggtggtgtgagcctgcagtctgatacttggcaggctgaggcaagaggattgctttagttcaggagtacgaggctgcaggtgtaccatgattgcaactgtgaatagccactgtacccccagcctgggcaacatagcaagacttttttttttgtttggaggcagagtctcactctgttgcccaggctagagtgaagtggcgagatcttagttcactgcaacctctgccccgctgggttcaagcaattctcctgcctcagccttccgagtagctaggattacaccccagttaatttttgtatttttagtaaagatggggtttcaccatgttggtcaggctggtctcgaatacctgacctcaggttatctacctgccttggcctaagtgctaagattacaggcatgagccaaccgcgcctggccaagagtgtcttttaattagtaaatgaataaatgcagagggaaatttggtctaattgccttctagatatagtcctgtgtcctctaataatgttttggtcagtgatagaccacatacacggcagtggttctgtaagattataataccatatttttattgtaccttttttgtgtttagatatgtttagatacacaaatacttattactgtgttatagctgcctacagtattcagtacactaacgtgatgtacggcttcgtagccggccatgccctatagcctaggtgtgtagcaggctgtgccatctaggtttgtggaagtacactgtgatgttcgcacaatgacaaaatcgcctaaggacacattactcagaacgtctcctagtcgtcaagcaacacatactgtagtcgtaaattagataagtccaagccaggagttttattattctcccaaatgagaattggcatatttatgctgcaaacataaggcacagctgacttacataccccttttgggtatacaccaccatttgggtgatgtggattgttggatgctacagtatggtgcctggcaatcagggtggaatatttgaaattgggaaccgacctagcttattggagagctattgtcaaatatagtcaaaagaaaatatgtgaaggaaggtacataacccaaactgaagagatttgtgttttctaaagtgttctgattgagaaattttaaaaactagaattagcctcagccatcagtgaagtctagaaagccttcgttggaattagattgtctaagtacgctgtggtaggactgagatctttcaaatcagatgcccctgatgcttgggctgacccatcagagctttagcttttttctgtctgcatcttacaggctccagttaaactagccatttgcaggtactttgataatgacacagtgctgtcccatatccttaatggctttggcattccattatgggaccttcctgagagagttaatactctggttagattttataactttacacacacacaggaatttgtgttttgagctaactttatggaaggtaggttcttcatgcaattttgtagggcccaactttt

SEQ ID NO: 10681 - DNA, 2300 bp, Homo sapien
aaaataatctgtggagaaagtggccatttcacctcccagctcagtcacgagtgcttttcctttggtacgcgtcacctgtgtgccgaggcactttacgcatacttcttattgtcacaaagcacatgaaaaggatgtgtactctagggtaaggttttcataaagtaatttttactgtttcatcagagatattcttagatgaaactggtgatcttttttttgacggagtctcgctctgtcgcccaggctggagtgcagtggcatggtctcggctcactgcaacctctgtcttccgggttcacgccattctcctgcctcagtctcccgagtagctgggactacaggcgcccgccaccacgcccggctaatttctttttgtatttttagtagagacggggtttcaccgtggtagccgggatggtctcgatctcctgaccttgtgatccgcccgccttggcctcccaaagtgctgggattacaggcgtgagccaccgcgcccggcctggtgatctttttaataagcgtatggcatgagtcaccccatggctgctggtgagctgggggccttgccttgcctggtgctgaggggccaggagtttcacccgccagtacaaatatcaatactgtgcaaaaggcaaataacgtctgttattctgaagacagttctgacctcctaacctttctgtaaaggtcttgggagcccgcagtccatggtctgtgccttgaatacccactggtgagatgcagcttcatctcatccgcatggatctgggctgcgctcacgcccctgctcctttggggcttttctgaatgtgaggccttccctgacctccatatttaaaatcagccccccttctgcccctcactccagccctctaatttttccccatgtctctgtctctaacatgctctgtccattttgtctgcctccctccactaaaatgtaagctctggatggcagagattttgagctgtcttgttccttgctgtatccccagcaattaagagtagtatctggcatgtggaggtagtagcctgatacgtatttcaatgaatgagtgagcgaatgtgcctgggccactttccgggggtctcctggcaggcccaaggggagcagctcattgcccttgaactggcccccctgggggtccgtgctccccacccctgatgacttgtcttgttctccctggctcctcagccagtgctgccccacaccgccgtgtgccttgtgtgtggcgaggcggggaaggaagacacggtggaagaggaggaaggcaagtttaacctcatgctcatggagtgctccatctgcaatgaaatcatccaccctggatgccttaaggtgagtggcccagtggggacaggtggtgctgacgctctggggcaggtagggttgctggagatgctggtgagatggtgggatgcaggtcgtgcagtgaattcctggaggacccctgagtctgggtgatcctgtgtgtcaagggataagcccggggcaaggagggcctggagtacctcagagacccagtgtcatcaaaggaataaacacacccccacctcccaggatgtcagaaccagagagggtttccagagcctcagcagatggcaaacacaggctgcttgtttgtagctgggccagaggaagcgcctccaggtggctccaggcttctgggagaacaaggccccacaccacactccttcccccagcacccagtagagtcctctgcagagtcctttctgcatgccaggcgctgagctcatggctttacctgggtcatacccccccagtgagatgggcacactaacttttatggccgagggcaccagcccacagagacggagtgtcttgcccagggtcccagagaagcaaaggggctcagcctctgaaccctggcctggatccacagctgcccgtctctgccagcctctgcagctgtgttttcttttgcctggaaacgggatagatgtgacgttggggagggggtgctgctgcttctggaagacgtggcgtcacagagccttgtgcccgtgggccatcttctccgcccgtccctcttctgagtcctggtgttccccgcagattaaggagtcagagggtgtggtcaacgacgagcttccaaactgctgggagtgtccgaagtgtaaccacgccggcaagaccgggaaagtgagtgccgggctccaagtcccagggtcagtcgggagaggggcgggcctgggcctggccgggaccagcctgtcccaggagtttcaggcaggtgggttgccgtcggcctggggaggaggaagggcaagtccaaagg

SEQ ID NO: 10682 - DNA, 2300 bp, Homo sapien
tggatcatgaggtcaggagtccgagaccagcctgaccaacatggtgaaaccccgcatctctactacaaatataaaaaattagctgggcgtggtggcgggcacctgtgctactcgggaggctgaggcaggagaatcgcttgaacccaggaggcagaggttgcagtgagtcgagaccgtgccactgcactccagcctgggtgacagagcaagactccatctcaaaaaataaaaaaaaaaaagagaagacctggaattttcatatctgcttctgtgttttgtctattgtgatatgttgttttggagggagtatgaggaaaattttgcctcacacagatatatactacttggaaaagggaggagtattttaatagcctttttgataactgtggatactctgatactcaactagaactcaacagttttttttaaagtttagttgcaatgtggagtctgaaactgtatcaatgagctgttcacactgttacattgaaaatcattagcctgtcttgacctttgagtagctcatttgctcaggcatgatgttgtaacaccatgtattggtcatctggaaaatattggctccctgagttaggcggattttccaaatattggcacataatattattttagaaatcacgtttgttaatatgattactgatctcattggaaaagtctctcagtattgggaagctgtgcgggttatggtggttcataaaagttttccaaaagtctaattttcattcagaaacttgaattttgtcatttgcaacaaatgctgtcagttatttttctggaaatgacaagctcacttctttgatcttcacaaaaatacaccagtgtccagggggtttctatcagtcattccttcaagtaaaaataatctgtggagaaagtggccatttcacctcccagctcagtcacgagtgcttttcctttggtacgcgtcacctgtgtgccgaggcactttacgcatacttcttattgtcacaaagcacatgaaaaggatgtgtactctagggtaaggttttcataaagtaatttttactgtttcatcagagatattcttagatgaaactggtgatcttttttttgacggagtctcgctctgtcgcccaggctggagtgcagtggcatggtctcggctcactgcaacctctgtcttccgggttcacgccattctcctgcctcagtctcccgagtagctgggactacaggcgcccgccaccacgcccggctaatttctttttgtatttttagtagagacggggtttcaccgtggtagccgggatggtctcgatctcctgaccttgtgatccgcccgccttggcctcccaaagtgctgggattacaggcgtgagccaccgcgcccggcctggtgatctttttaataagcgtatggcatgagtcaccccatggctgctggtgagctgggggccttgccttgcctggtgctgaggggccaggagtttcacccgccagtacaaatatcaatactgtgcaaaaggcaaataacgtctgttattctgaagacagttctgacctcctaacctttctgtaaaggtcttgggagcccgcagtccatggtctgtgccttgaatacccactggtgagatgcagcttcatctcatccgcatggatctgggctgcgctcacgcccctgctcctttggggcttttctgaatgtgaggccttccctgacctccatatttaaaatcagccccccttctgcccctcactccagccctctaatttttccccatgtctctgtctctaacatgctctgtccattttgtctgcctccctccactaaaatgtaagctctggatggcagagattttgagctgtcttgttccttgctgtatccccagcaattaagagtagtatctggcatgtggaggtagtagcctgatacgtatttcaatgaatgagtgagcgaatgtgcctgggccactttccgggggtctcctggcaggcccaaggggagcagctcattgcccttgaactggcccccctgggggtccgtgctccccacccctgatgacttgtcttgttctccctggctcctcagccagtgctgccccacaccgccgtgtgccttgtgtgtggcgaggcggggaaggaagacacggtggaagaggaggaaggcaagtttaacctcatgctcatggagtgctccatctgcaatgaaatcatccaccctggatgccttaaggtgagtggcccagtggggacaggtggtgctgacgctctggggcaggtagggttgctggagatgctggtgagatggtgggatgcaggtc

SEQ ID NO: 10683 - DNA, 2300 bp, Homo sapien
cgcccagccatcaaggtagcttttaaaaagctgagacctttgggaatggagtgatgtggggtggggtgggggggttagggtgtattcttttgcttgttgtttctgttgcaactttgagaagattctgaaaaataagaggggagtgatggccgggcatggtggctcatgcctgtaatcccagcactttgggaggctgaggtgggtggatcacttgaggctaggagctccagaccagcctggccaacatggtgagacccccctctttactaaaaatacaaaaattagctgggcgtggtagcgcccacctgtaatcccagctactctggaggctgaggcacacgaatcgattgaacccaggaggtggaggttgcagtgagccgagatccactgcactccagcctgggcgacagagtgagagtctgtctcaaaaaaaggagagtaaggaaggaaactcagaacagatacgtttcggcaaagagcaagtcgactgggattttttctatagtgggtgtgtaaatttcagactttaaaatccactcagtaaaactgacatccctgcttattcacttttgccgactctgctagaagcctcctgagttttgtttacaaggtctccggcacacagcctgccttctttgaaaggccaggccaggaccagcctgcccatcccttctgttctcactggatttcgtggccagtggcctggacgtgactaacagatggccattgcagagctgatcacctgatttcatggcttattcttgggaaagcctctgatctttttacagaaggttatccatcccttggtaaatccttccccttgtatagatggagaaactgaacaggtacaggtgtgcatatttagtgttaccttggacaggtggatgatatgtatgccaagtcctccttagcttgtgtttagctttggttttgatgcttataacagctttggtcgttctagctcatggtcatgagctctttcagagaggctgctggcttaagtgcccgatagactttttttttgaatgaatgaagatctatctggatttctagcaacacttttcttcaggagtgggctgcagctggagtgagcactaggaacctttgcagcttaagaattcagaaacccacacctccccagccagcctaaggggcagccagtctcctaggagagctgggttctggcctgcgacgtcctccacctttcggaggtcaactcagaaggcggtacctgtccaagggagggggcgcccacctcagggtagagtcagggcgttctgacagcccccgtcaggcgactcgagtggaactcccgcctgcactacttgaccctgcaaaggcgaacccgagtgccggaggtgcagcgccaggaggccggcccagcccaaccgcccgcgtcgggggagactgggctctcagagcttatccaggccagcggtcctgcaggctctgggtcgggggttcccgggttcgtgcgcttcaggtcctggtcctgcagcgagtgcaaacccggcagcccgtgtgcctgctgcaagggacctggggacccgctcctggcgtcgggtgcagagtcgtcccccacggcccgggcgcccccgggcttccgcgagacgccccacgggaccacacaaaggaccccaccccaggccgggcgcgcatttcctgttgcagcggtggcggcgtgcagccacccatgtgcatcccgcggcgcgcgggccaggccgggccgggcggggcgcggggcacgcccccacgcagccccagtccccgcgctccggccgcgagggaccgccctcggcggcccgcccccgtgtcaccgcaggccgggctccctttgtgtgcggccccagcgccgcggccgcgccattggcccgcccgcccggggggccagccccttcctggctcgcctcatgcatatgcatggcgccccggccctcccccgccggcccctccccgccccctccagcgcgggcgtgcgaggcgcgcggcgcggctccctcctcgcggcagcgggagcccgagcccgagcccgagcccgagccagggcgagccgagcctgctccgggcgggcggcggcggcggcgccgctccagccatgtcagcgcgcgcgagcctgggcccaccatgagccatggccatgtccgtgagcgccgaggacgacgactatgaatcggagccggaccaggtcggcggcccggggtggggctgagggagggacccgccgcacgacctcccgaccgcctgtctgacgcgccgagggcggccgcgacgccgccgccgccgcgatgaggagaaagttt

SEQ ID NO: 10684 - DNA, 2300 bp, Homo sapien
acggctttctgagggtgtttcctttgccttatattttttaagcagccctattaggatatagttcccatatcacacaattcaccatttagggtgtagaatccagtggtttttagtctattcacagatacatgcagccactgctgcagtcaatttcacattttcatcaccgcaaaaagaaacccggggccgggcacagtggctcatgcctgtaatcctagcaccaccgggcgcgatggctcacgcctgtaatcccagcactttgggaggctgaggcgtgtggatcacttgaggtcaggagttcgagatcagcctggccaacatggtgacacctcgtctctactaaaaatatgaaattagttcagtgtggtggcacatgcctgtaatcccaggtactcgggaggctgaggcaggagactcgcttgaacctgggaggcggaggttgcggtgtgccgagatcgcgccattgcactccagtctggccaacaaagtgagactctgtctcaaaaaaaaaaaaaaaaaaaaaaattcctagcattttgggaggccgaggcgggtggatccctgacgttaggagttcgagaccaacctgaccaacaaggtaaaaccctgtctctactaaaaaacacaaaaattagctgggtgtggtggttcacctgtaatctcagctactcgggaggctgaggcaggagaatcccttgaacccaggagatggaggttgcagtgagctgagatcactccaatgcactccagcctgggtgacagagcgagactctgtctcaaaaaaaaaaagagaaaagacaaaagaaaagaaagaaactcatacccttcagctgttgtctcatctccctaccctgccctttccccagccctaggcaactactcatctactttctgtccctatagatgtcccctgcctgggacatttcactgagttgaatcatataatagatgctctcttagacttatttttattttattttagtattattattattattattattattattttttgagacagggccttgctctgttgcccaggttggagtgcagtggtgcattcatggcttactgcagcctccacctcccaggctcaagtgatcctcccatctcagcctcccaagtagctgggactacaggtgcacatcatcacacccagctaatttgtgtattttttgtagagatggggtttcactgtgtttctcagtctggtctcaaactcctgggctcaagcaatccactcgcctaggcccctcaaagtgtagggattataggcgtgagccactgcacccagcctcgacttatttttagacattaaaaagtaaagtgccagataccagcctgggcaatataacgagacctcatctctacaaaaaaagcttaaaaaaaaaactagctgagtgtggtgggcgcaccagcaggaggatcacttgaacccgggaggcggaggttgcagcgagctgagattgtgccactacagtccagcctcggcaactgagcaagactgtctttatataaataaataaagtgccagtgttcagagaggcggggcaacccatgtgggtgcacacagccgggaagcagcagggtggggatctgaacctgcgtcccccacggcctttccagaggctggaggcactgaccattaggattgttagagaagctggatctctggagtaaaggggacttttggtgagtggaggttccaaagaccttggcagggagttaggtgtcatctcggtctttcttgtgaccctgcccccacagatgccccgaggaagcccagcatagacggcttctcttcggattcctggctggagatggaggaggaggcctgtgatcagcagcctcaggaggaggaggagaaggacgaggagggcgagggcagggacagggcacccaaaccgcccaccgatggctccacttcacccaccagcacgccctctgaggaccaggaggccctcgggaagaagcccaaagcacctgccctgcgattcctcaaaaggactttgtctaatgagtcggaggaaagtgtgaagtccaccacattggccgtagactaccccaagacccccaccggctctcccgccacggaggtctctgccaaatggacccatctcactgagtttgaactgaagggcctgaaagctctggtggagaaactggaatccctcccggagaacaagaagtgtgtccccgagggcatcgaggacccccaggcactcctggagggtgtgaaggtgggcaggagtggcgtctggggctgggcggccgaggagggccgggcaggtcccgttcag

SEQ ID NO: 10685 - DNA, 2300 bp, Homo sapien
tctccctggctctcctactaggagggtggtgggggtcaccctccagatgttaaggtgacgccctgggttgcctctgaggcctccagagccctggccttcccagcctgcagccagtgtggctcctggttgaggaacctagtattgcctgcgggattggggttttgaacatgccctacctagccttcccaggcccttcactccttttccctttcagatatttcaatttcctttaagttacaaagtttctattttgttccccccacgccccttggaaaacccttccatccctcagtgagctgataacctggagtgcctccttccctcctccaggttctggttgagtggctgtggctgtggggttagctctgagaagagactcccagctttgcagttttgcgatttctcttttgtgcccattgcctcctggagcgctgggctccggtggtgaggggtgtttgttgggggagggaagaataaatttctcccagcctgcctggtcctagagcagggtgctagtcccagctgatttaaattttctctacataagtggaattttaattcctctcctttcttcccccatttttactgagttgagtcatttggtggatcctatgtgcaaacaatatgcaaactcttcctagtcatttgggaggaattctcagcccaggatttcagagctttttctcaggctgatttgaggaagttgaagctgaccctgggggatggggtgcctagggtgggtgggtctagagggccggtattccagccagggagagctaaagtgtatccttagatctgctctcccggcttctttcaaaggggagggcccagggctttgctctttaattcagatctggccccaaaacttgagggaggagcttagaaacaggagcccttagcctggattcaaaatagaagcttcttaaacttctcttcctttaaatccttaggaatccccattcactgtgagcccctggggatctgagctgctgaggtcagggctttccccggctttgggttttgttctctgtctctcttcggaggggagttgtcttggcctcctcctcccccaaggctgccctgtgaactgtttccctgggctagcagcttcagtggcctgaggcctcttcttctcccttctgacggtcggagaggccttcttaccttgcggattactttagttacctgaggatttgggggacgtgagaatttatctcaagacccatcaccttcatattcaggggtgtatggttgggtcagattcactggtttcagaattggggaaggaaagaaattagaggcctccttcatcctccaggactttgggtaaggatttggggactgtactagaaaaaccccagacagagagcgagcctgtgaattttccttgggtcttgctatgccccctttacacagccttcccctggggagcctccctcccggttatccagctgaagcaaggactgtgatggctacagcagaatttcactcttaagacaacaaagctgtgcccagttccctagttattttggcaccaaatacacagtttccagggaaaccggcttttcccccctccccttcactatgcaggatattacaataagattttcactgatgctcagctacaatgagggccctcctcccagcctcctctctgggccttcagatcctcccaggtggcattcttcaattttgcagtccctttactttccgagcgcggcttgggatgcgtgtctctgtctatccctctttctcagcaatggctgggactctttttgtgcggtgctcttttgagtcttcctccccaaccctcgctggccttgggctgttcattgacaagtttggaccggtggggcatgccgagaatgactgactgagtaggcagaggagctgatcgttggcatggcttctcttgggctttgcctaatccatttcccgatcattttccaaggagcttttgctgtacagctggtgcctgcatctcctggaccccctgccccttcgtccatcagttttcttcccctaaccaacagatcccggttcatttgctccttcgtgacttaaccaacttgttttaattcaaatatccaaacagatttcaactatgagtacgtacagagagaagctctcagggttcccctgatatttcgagaaaaggatggactgggaattaagtaagttgctgaaactaatcactccttcccccgtcttcctccctaacatactttatagcttgggatggatttcttccaccctcttcccacctctcatcactgagaaggatcttttttcacgatctg

SEQ ID NO: 10686 - DNA, 2300 bp, Homo sapien
ggtggctgccattggacctttttctgatgccagcttttggggccactatgaggccacttggagagaaagaagggcctcagggagaaaaaagaattaattagatgaagcattctattatatattttttgctttatttcacttaattcactttgcgtcactctccagcccatgcagcctcctttgaacatgtttatttcattatggggcagtagtgaggctggtaagttactaaaaaaaaaaaaaaaaaaaaaaaaagcacgtgatggccaagccaggctccagtgtgagccctggcagcggcacatacgcgctatgtgatcctgggtgagtggctttgcttttcttagtcctaatttcctcctttgcaaaatgggaacgaacaagacgatttcccttaaagggttcttgtgagaaagacaggaacaaataaaatggtccatggttctggacggactgaaggcagaaccggcagcactcacacgaagggctactgattgcacgcagcagccaacgtgggcgatttcagtttggaaacaaattttgatgtttcccagcctcatccctgcttaaaagatttttacagctagtgaacatgaatgaaaacaaacttcaaagagtagcctttgaggatgggtgggaaagactacagtcagataggacaggaaacttctaaggtgagtgagggggaagctgtctcttaggacggccaatacgatgctgatagtgacatcgtatctcctggtggggaagccacgtcctccccacaggtctgtctgatagcctggggaccatatgggagcacagcaatcattcagattcataatttctctgagcttcagtttccctatctgcaaaatgacctgctccaagtatcccacagggttatggcagaaataaaatgtcaggctcaaagcctgctatctacaatgtccctttatcgtctccctcttgccatgtcattttatcagcatctttacccgcaagatcaggcctagcagggcgccacagctggggctggaggaatgtttagggctagcttttctcaagccaagtcgacctgactgttgctcatgatgggaggacaagacaacccaggaccagtgctggggtagtcaaaaacactagtaagtggacagggacctaatgacacccatgtatgtacggagggtgccgatacctccgctaagaagccctgtaggggcttcatcaagggcactagagttccccccacctatcccagagcaccatgcacctttccaccgacttgtcttctataaactaccaacaagggcttacccttcgctcctgtgcgggctgcgttaggaggcgccagatccaattctctgcgtctttcgctcctgagcatctatctgctccccttgccgagcgcaagaacctttaaaaaatgtccaacttctgtttcagggctggtcgcctagtaaaggagtccacagaggcgggcagaatgaatgaatgaaaggcaacgtcttccggtcagctgcggactgcaaaggctctggtctggctgtatttcctgtacgtgtgtgtgtccacatctttgagtgccgggagtttaaaagttaggcagtccttataggtatggaagccgagctaatttccttctgagccccccaaatgcctcctccacatggcgggtccgcaaatggggggatctgcagaggatcaccccccacgaaaaagacatgcagcagaaaagcaaaaaaagaaaacagttatatatacaaaatgctttgaatttgagtcggccacacaggtaatgttgggggaggggtggatgaaagaagaggaagaggggtagccctgggcaatgagggcaggaacggaggtggggggtcgtttttgggggtgccaggccccgggggctttcacgccagcatgctcggcttgcatttccgcgcctcccgctgaggccagccgtgcaaatctgcacctccctccccgccccctcctccttccctccctccctgccccgccatctccgggatgcgcccgccgcctgcaactcggccctccaaaagtcagctctgcacacaactcccgggcggcggcggcgcctgcgtgcagaggcgcactcgtgacccaacaacaaaacagcgatgccacggcgctaacggcgcccggtgcctcccgggctccctccccgccccatacctcctcgggccgccgcccccacccccccaagcccgggccgagagcccccccaaatagcccggccgcgggctccgagcgcgatcggcaacaatgtttacgttccggggattatgacgtcgacgcctccc

SEQ ID NO: 10687 - DNA, 2300 bp, Homo sapien
taagatcgagcaggagggtccaggaaataattattattatgtttccaatacaaccggcccggtgttttcctgcaagaaaaagtacatctctggggtaagcaccttcaccttctctcttcccttacctactctccacttctctgggacaattagtcaacactgggagctccagggtcttggcccttccccctttggtccaaaataacctcctcccccactttgagcaaatgcttggaattctttcaactggaggacaaagcctttcatctgccaattactgataaagagaaaatgcaaatatcgagggggaaggtgattcatcaagggcccaacatttattgagtggccacttaggacccggcagcagggcaggcattctgggggaggccaaggggaacaaacccccggctggcccattcttttctcgtgtttgcggtttcctcgaggtttgtaaaggggggggattaaatgaggtgactacccagccccttcccactctgacaggccaggaactcctcgtggaggtgatagatggacttaactgtttttatactaaggtggctgccattggacctttttctgatgccagcttttggggccactatgaggccacttggagagaaagaagggcctcagggagaaaaaagaattaattagatgaagcattctattatatattttttgctttatttcacttaattcactttgcgtcactctccagcccatgcagcctcctttgaacatgtttatttcattatggggcagtagtgaggctggtaagttactaaaaaaaaaaaaaaaaaaaaaaaaagcacgtgatggccaagccaggctccagtgtgagccctggcagcggcacatacgcgctatgtgatcctgggtgagtggctttgcttttcttagtcctaatttcctcctttgcaaaatgggaacgaacaagacgatttcccttaaagggttcttgtgagaaagacaggaacaaataaaatggtccatggttctggacggactgaaggcagaaccggcagcactcacacgaagggctactgattgcacgcagcagccaacgtgggcgatttcagtttggaaacaaattttgatgtttcccagcctcatccctgcttaaaagatttttacagctagtgaacatgaatgaaaacaaacttcaaagagtagcctttgaggatgggtgggaaagactacagtcagataggacaggaaacttctaaggtgagtgagggggaagctgtctcttaggacggccaatacgatgctgatagtgacatcgtatctcctggtggggaagccacgtcctccccacaggtctgtctgatagcctggggaccatatgggagcacagcaatcattcagattcataatttctctgagcttcagtttccctatctgcaaaatgacctgctccaagtatcccacagggttatggcagaaataaaatgtcaggctcaaagcctgctatctacaatgtccctttatcgtctccctcttgccatgtcattttatcagcatctttacccgcaagatcaggcctagcagggcgccacagctggggctggaggaatgtttagggctagcttttctcaagccaagtcgacctgactgttgctcatgatgggaggacaagacaacccaggaccagtgctggggtagtcaaaaacactagtaagtggacagggacctaatgacacccatgtatgtacggagggtgccgatacctccgctaagaagccctgtaggggcttcatcaagggcactagagttccccccacctatcccagagcaccatgcacctttccaccgacttgtcttctataaactaccaacaagggcttacccttcgctcctgtgcgggctgcgttaggaggcgccagatccaattctctgcgtctttcgctcctgagcatctatctgctccccttgccgagcgcaagaacctttaaaaaatgtccaacttctgtttcagggctggtcgcctagtaaaggagtccacagaggcgggcagaatgaatgaatgaaaggcaacgtcttccggtcagctgcggactgcaaaggctctggtctggctgtatttcctgtacgtgtgtgtgtccacatctttgagtgccgggagtttaaaagttaggcagtccttataggtatggaagccgagctaatttccttctgagccccccaaatgcctcctccacatggcgggtccgcaaatggggggatctgcagaggatcaccccccacgaaaaagacatgcagcagaaaagcaaaaaaagaaaacagttatatataca

SEQ ID NO: 10688 - DNA, 2300 bp, Homo sapien
taggtgggaattgaacaatgagaacacatggacacaggaaggggaacatcacactccggggactgttgtggggtggggaaaggggggagggatagcattaggagatatacctaatgctaaatgacgagttaatgggtgcagcacaccaacatggcacatgtatacatatgtaactaacctgcacattgtgcacatgtaccctaaaacttaaagtataataataataaaattaaattttaaaaaaaaagccaagaaagggctctgcgggaaccagagacttcttgggggcagaggttttcatcccacaacggttgggtgggggcgcgccctctagtggtgacaagagttacgtttcaccccgccaaccggcaatgtcacatgctcgtcactcattcctgtctctcccatagttattcattcaacaaaaaattactgaggaccgattgtatgccgaggaatattctagatgctgagggtagagctgtgaagctgatagtaaaggtccctgccccggagtttacctcctaggagacattccctagcacagtcctgcatacacccccacctcacctctgctccccaaaattggccttccaacgctccaacagccaaatatccctgcttaaaggtcttggcatgagcagttccctcgccgtcctggaaagctagatcctgtctgtttgcatggcgggctctggtctcagcttaaatgtgacctaagtcagaaaggtgtgatctcacttatttcctgcccctctccacactccactaaaatataatattcgggccgggcatggaggctcatgcctgtaatcgcagcactttgtgaggccgaggcgggcggatctcctgacgtcaggagttccaggctagcctggccaacatggcaaaaccccgtctctactaaaaatacaaaaattagccaggtgtggtggcgggcgcctgtaatcccagctacgcagcaggctgaggcaggagaatcgcttgaaccgggaggtggaggttgcagtgagccaagatcgcgccattgcactcctccagcctgggcgacaagagcaaaaccctgtctcaaaaaaaaaaaaaaaaaaaaaatatatatatatatatatatatatatatatatacacacacacacacatatatatacatatatatgtgtatatatgtgtgtgtgtatatatatatataaaatattcaatgaaggttatcattttcctggaatccctcagcgtagcacgtaatagttgctcagaagacacttgctgaataggtttgaagattcactggtttaaaaaatatcaggtggccgggcacggtggctcacgcttgtaatcccagcactctgggaggccgaggcgggcggatcacaaggtcaggagtttgagaccagcctggccaatatggtgaaaccccatctctactaaaaatacaaaaattagcagggcatggtggcgggagcctgtaatcctagctactcgggaggctgaggcaggagaattgcttgaacccagtaataaaaaaataataaatcaggaaccggtcacctcaatacgtatcagatgctggtgaacacaggtggacaaagtggttaacagacaggttttgtccatctcgttcaccaccctacccagcctcagcacctagaccagtgttggcacccagtgggcgccaaataaacactgcttgaactccagacgtcagccgctctttttcctacagaccttgagccaccttgttccaaaggggatatgggcctcaggaggcgcccagaggtgacctcaggcggcccgacccaggagtccaagctccaggagcagggccacgggagcagctgcggagaggggcggcgccaggagccggagcgggcagccgggcgcttccaggaaaagtggcgggcggcggcgcgccagggaccgtgggcggtgccgtcggagcgggcgggtcacgtgacgcccacaacaacgcccacttcttggtgggcggggcacaggtgggcggggagcatgcaaaacagcccagggcggcggccaatcgcggcgcgcgccgggggtccaggccccggggatccgaggcgccgcccgcgcgcagtctctggtcactgccgcccgggggcttttgccagcggcgccgcgggcctgcgtgctggggcagcgggcacttcttcgacctcgtcctcctcgtcctgtgcggccggccgggtgaggccgggcccgcgtagggggcagtcggcggctgcctccggcggaggtgcctcgcggcgcccgggccggcccgcgcctcggcggcgtgctccatgcatc

SEQ ID NO: 10689 - DNA, 2300 bp, Homo sapien
gcgtcgtcaaccacgcccggctaatttttgtagtttgagtagagacgcggtttcactatgttggccaggctggtctcgaactcccgacctcgtgatctgcccacctcggcctcccaaagtgctgggattacaggcgtgtgccaccgctcccggccttgctaattcctatttttaacagagaccttggagctcagtcaactctaagccatagcatctagctaagacttaaattggttctttcagtgttttcatttttacatttattattgccttagggtacctgctactggttttctatttataataatgatacgtaaagtctccattcttctaatttttttttttttttgagatggagtcttgctctgttgcccaggctggagtgcagtggcgcgatctcggctcattgcaagctccgcctcccgggtcatgccattctcctgcctcagcctcccgagtagctgggactacaggcgcccgccaccacgcccggctaatcttttgtatttttagtagagacggggtttcaccatgttagtcaggatggtctcaatctcctgacctcgtgatccacccgcctcggcctcccaaagtgctgggattacaggcgtgagccaccgcgcccagtctttttttttttttgagacagagtctcactctgtctcgcccaggctggagtgcagtggtgcaatctcggctcactgcagccttctcctccctggttcaagcgattctcctgcctcagcctcccgagtagctgggattacaggcgcccgccaccacacccagctaatttttgtatttttagtacagacagggtttcgccatgttggccaggctggtgttgaactcctgacctcgggtgatccatccgcctcggcctcccaaagtgctggggattacaggcgtgagccactgagcccggcctattttattattattttttaagactgagtcttgctctgtctcccaacctgtagtgcaatggtgcaatctcggctcactgcaacctccgcctcctggattcaagctgttctcatgcctcagcctcctgagtagctgggattacaggcgcgtaccaccaggcctggctaatttttgtatttttagtagagacaagggttcaccatgttgactaggctggtctcgaactcctgacctcaggtgatccacccgcctcggcctcccaaagtgctgggattacaggcatgagccactgcgcctggccctccttttttcaatatatgtattgatttttttaaagtgagttaacttatttttattttcttcttgagaaaagttctcactctgtcatccaagctggcgtgcagcggcatgatctcggcttactgcaacctctgccaagtgagttaatttacatataaagattaatagtacatgtgatatttggaaatgggagaagaaaaaatcccaacggcatagaatttaggacctgagattgtttccccactcccagcttttgctctgcctattttctttgcctggaattatttttccctactcctaggtgtgattgtcaaaatatgtaacccatattttgggttcatattttggattcatatttggctcagtggctcatgcctgtaatcccagcacttggagaggctgaggtggatggatcatttgagatcaggaaattgagaccaacctgcccagcatggtgaaacccccgtctctactaaaaatacaaaaattagccaggcgtggtggtgggcgcctgtaataccagctacttaggaggctgaggcacgagaatcacttgaacccaggaggcagaggttgtagtaagccgagatggtgccactgcactccagcctgggcaacaaagcaagattccatctctaaataaataaataaatacataaataaataaaaatatttagaagacataaaaaaaaaaatatatatatatatatatatgtatatatgaccgccaccccctccctgggggcagcttctccctgatgccatcacaaaccctcctgctctactggtttccctagattcccaagtaattgtgccatcagaccccctgggagggggccccaggagaggcaagggaggggccaaccaaaggtcagtccagcactaaaggatccccactaagggctgttcacctgccccagggactcagaacacacatgactctccccacttgagctcaggatcccggcattacacggggcgcgctgagccccagatgtccctaacccctttccagcaccctccagccttgcagaagcagccaccatgccagtctctaagtgcccaaaaaagtc

SEQ ID NO: 10690 - DNA, 2300 bp, Homo sapien
cacaaccatgcctggagactctggtttccctttccctttctctctctctctttctttccttctttttcattctctctctcgctttctttttctctctcttcattctttctttccttctttcttctttccttctctttctttttttttttttttttttttgagacagagtcttcgctctgtcgcccaggctggagtgcagtggcgcgatctcgactcactgcaagctccgcctcccgggttcatgccattctcctgcctcagcctcccgagtagctgggactacaggcgcccgccaccacgcccggctaattttttgtatttttagtagagacagggtttcaccgtgttagccaggatggtctcgatctcctgacctcgtgatccgcccacctcggcctcccaaagtgctgggattacaggcgtaagccactgcacctggcctctgtctctttcttcctctctttcctctatctctctgttacttctttttttttttttttttgacagggtctcactcttttgcccagagtgatcttggctcactgcagcctccctctccagggttcaagcaattctcctgcctcagcctcccgaatagctgggattacaggtgtgggacaccatgccccgctaacttttgtatttttagtagagatggggtttcaccatgttggccaggctggtcttgaactcctgatctcaagtgatccacccaccttggcctcccaaagtgctgggattacaggcatgagccaccacacccggctgagactctgactcctttctagaaggaatccttaacctgaggaccaccaacccccgcagcaggagtcccccaaagcacatcattcattcattcattcatttatccaacaaatatttattgaacaactttgtgtgtctggcacacctctaggtcctacagagatggcagtgagaaagcacaaaaacttttctgttttcaaatagggcaaaatgccagtaattgttaaacataggcagaggcggtaacaggtgttcattgtagttatttttttttctgtgtttgaaatttttattgaaaatagaagttggaagaaaaaaaaagtttatcttccaagagacagacaataaataaggggtgtatgtgtggtggtgctaagtgctaaagaggacataaaacagaaatgagggggttggcaagtgtatatggaaattccaactttaaatagggtgattccaggaactcctcactgagaaggtgatttttgaataaagccctgaaggagagaagggaatgatccaggctgctttccggaggaacagatgtcctggcagcaggcacaaaagaggcaaaggccccgaggccagaacatgcccagtattttccaggaacagcaatgaagcaagtgtgtggctggagcagagacgggttgccaggagtgggggggcaaggtgtgagtggaaaggggaggggcgagcagatcaccagggccttgaaggccactggaagggctgtggcttttaccctgagtgaccagggtagcccctggagggtgtgagccgagagtgactgaagccgacttgtggagggtaataagtaggcacccttcaggggccggggggtctctagggctcccattagacgctcagagcagtccaaaccccaacaaggctaaggtccagtgtgacggccaggcacggtggctcacgcctctaatcccagcactttgggaagcgacgtgggcggatcacttgaggttaggagttcaagaccagcctagccaaaccccgtgtctactaaaaatacaaaaaattagctgggcgtggtggcaagcccctataaccacagttacttgggaggctgaagcagggagaatggcttgaatccgggaggcggaggttgcagtgagccgaaaccgcgccactgcactccagcctgggcgacagagtgagactccatctcaaaaaacaaaacaaaacaaaacaaaacaaacaaaacaacagtgtgacgtaagtttgcctatcaaattttgccgctaccgggtctcggcaggaaggggcgggcactgcttggttggtaggctggggcggcgcgttgccatagcgaccccggccgggcccgcggcgcgcgcagctgacggacattgaggctggatgctgcgatcccgcaggtgagcgcaggtgagccgggcgcaggtggggcaggcccaggactcctgactgaccccaagccgtctggttcccggctcctccctcttccactgtgggttttttgttttgtttttttttcccttgagacagggtctcccgcccaggct

SEQ ID NO: 10691 - DNA, 2300 bp, Homo sapien
aatgcccggctaatttttgtatttttagtagaaatggggtctcactatgttggccaggctggtctccaactcctggcctctagtgatctgcccacctcggcctcccaaagtgctgggattacaggcgtgagccaccatgcctggccagaaagggtgtctttttaagagaggacacacacagacatgcacacaggaaagaagacggtgcaacagggtagagattggggtgatgcagctgcgagctaaggaacgccagtgaaggagccccccgccaccacatacacccacaagctatgaggagggaaggattctgcccagagcttcagagggagcactgctttgctgacaccttcctctcagatttctagatgccagaactgtgagacaatacatttctttcttttctttttttctttccttccttccctcccttccttcctctctctctcttttttttgagactcagtttcactcttgttgcctaggttggagtgcaatggcacgatctcagctcaccacaacctccacctccctggttcaagtgattctcctgcatcagcctcctgagtaactggattacaggcatgtgccaccacacctggctaatttttttgtgtgtttttagtagagatggggtttctccatgttggtcaggctggtcttgaactcccaacctcaggtgatcctcctgcctcagcctcccaaagtgctgggattacaagcgtgagcgaccgcgcccggcctccttctttctttatgagactgggtctcgctctgttacccaggctggggtgcagtggtgcaatcatagcttactgcagccttgacctcccaggcccaaggaattcttggacctcagcctccggagtagctgggaccacaggcgcgtgccaccacacccagctaatctgtaaattttttgtagaaacaaggtctccttatgttgcccccgttggtgagaatacatttctattgtttaaactacccaggttgtggttatggcagctttagcaacgaacacagggggccgggcacggtggctcatgcctgtaatcctagcactttgggaggccaagtcgggcggattacttaaggtcaggagttcgagagcagcctggccaacactgcaaaaccccgcctctactaaaaatacaaaaattagctggatgtggtataacctggctactccagaggctgaggtatgagacgcacttgattccgggaggcggaagttgcagtgagctgagatcacaccactgcactccagcctaggcgacagaaaaaaaaaaaaacacccataaaaatagaagaaaaaagaaagataaaaaagtaaagtaacacaggtgtcatttgaaactgaggcctgaatgatgaaaaaaaggcacatcgtatgaagatttagagggaagaaagttccatgcaaggtcaggaagagaaaaagcaatggctggagggtacgagtccagggcggtgagatagaagggactggaaagctaggcaggggcagttcttgcaggacttggcagaggaggggacagaactggatttaatcagcttggaggcggttgtcccttgagcgacagaaacagctgttaagaacgtcacccagagcgttagagggcaggaatctaggatgtattagctgcagcacataataatgacaacgtgaaatgaccgtgccctctctgcgctgcgccgcccggcccccgacctttttggatggtcgatgtcagcgccagccttccggggcgctggcctgggctcaagtcaggcaatgaccaggggccggtgagctttcatttcacctcccccaaatctcctttccccaaactctagacacccccaaaacacacaatctaagtcaaataatctctgcaaatgcaacctgcagacaagtcccccaactcttcctggaagagacagattctggaggcgcagaggcactgccaagggggccgcaacagaccccgaaagaccttgcgagcctgccatgtcccggtccggaacgccgcacgcggggcggggcggggcacatgcgcacgcgcggccccgcctcccaggcgtggggcggggcgggcgccggggcggggccgtgacgtcagttgcgcgcgtggctctggctgcgcaggaacagctggtgcctccgagggcggtcggcgagcgcgcgggcgtggggcgctggggggccggtcgggcagcgctgcgggagcagccgccggcaccgccgccttgcaccatcgcatcatgtccgggcagctggagcgttgcgagcgcgaatggcacgagctggagggagaatt

SEQ ID NO: 10692 - DNA, 2300 bp, Homo sapien
atagtcatttccatcaaattactctcctaagtaggtcctcctgtctcaagactcgatagaactaatgcatgtgaaaattcattataaaatgcaaaaccctgtgcagattaaagaaattagtaacaacatagcgcccagtgtctgtgtgttgtcacctggctcttggtggcttgaagagagagagcagtcaggccaggtgacagggttgctattgtcatagtgaatgcccacccagctatgacaggtgagggctgaccccccgcatgtgtgactgtccctggctcatcttagggtgactggtgtggctgggggtgggcgtctggtggagctgtgggggcagcggaccccctcagcgggtcctttttcttccctcctctccacagaagggttccagtcctggatgtggcggggcctcacctttctcctgcccttcctcttctgtggccatgtgagtccccctggagtttgtgggtatctcctgtctgggctgacccccaggaacagaaggtcttcaggccttgccctccttctccatccgtccccatgctggggcccacagcatcctggggccggggcagcctctgggcccagggatgccaaggcaggagccagaactgacctagctctgccctggcctcgggtgcctgcatttcattttgggggtgtctgtcagtgttgtgggtagttgatacccaaagttgggtgaggggcctggccatcaccctggctttctacgtggccggccaggggagtctggtgggtgagcagcgcctgccttcctctccagttctggcagctctacaatgccgtcacgctgtttgagctctccagccacgaggaatgcagagaatggcaggtatggggggtgggggcatgctcgggggaggttcccgggagggctggggtggcagggatggggtgtatgtgtggcatgctggggtgcggattcctggggagggctgggatggcagatgtgggggtggggtgtgtgcgtgtgtgtggtgtgctgtggggaggttcctggggcgggctgggctggcaggtgtggggtgttgtggggggcctgcttggcgggaggcttctggaagggctaggggtggagcctctcccaatctgtggatcccaaggaggttcgccccatcgagcccttcccaggccctgcccaagcctgaggcctcacccttcccccaggtctcctgaatctctgccttcgatggcaaaaccctgcagtttgggagtttgggggcagctgtgctggagattctggggtgctgggggcaggggttcagcagggcagatgccccagcctcgccctcctctctggactcccccaggtgttcgtactggcgttcaccttcctcatcctcttcctcggcaacttcctgaccacgctcaaagtcgtgcatgccaagctccagaagaacagaggcaagacaaagcagccgtgagcctcgggctcctgtgccctcggcccggacttcagactgcagggggctcccgggctccttcccagcagccctctcaggcccgtggcatcgctgggagagggcccaggccctggtcccccagtggaccccagtggtctagaggaatgtgagccccgcctgtccgcacagtgtccgcccacctatttatgacatatttaatgctgggtcccccatcgtccctggaacccgaggcctcactcctgtgcttgaaggtggctgaggccgggccagtcttcctggggatggggcctgaagcctcagggagcccctctgttcccactcctgtcatttgaacccctctgggtggggtttggatgtgcctcgcggggttggatttatgctgacctgctacttaccaggcccaggctggggtggtgtgaaccctcagtgtcctgtggcgcccccaccccggggccactctgcttctgctgtgagccccctcctcgcccaccccgccacgtggtgagggttattttaagttctcagagacccaccgcgtctgcctcgtgctcttcttgcccctggagcgctgggggcatcctgagtcaggctgtgagaagattcgccaccagagggcgccccgggccctgggtcgtccaaggggacaaggacgttcccgtctgtgcttcggggttccctgacccccccatcctgcagcccaccttcctgcagtgtcgtggcaggtacttggagagtgggaccaagacccttggcccctgtggaggggaaccacctcccccctccttcccagagcttctggatgttgtgggagggaggtgggggtgcctggcaggctcacccccaggggccgca

SEQ ID NO: 10693 - DNA, 2300 bp, Homo sapien
actcggaaggctgaggcaggagaattgcttgaacccaggaggcggaaattgcagtgagtcaagatcacgctactgcactccagcctgggcaacagagcgagaccctgtttcaaaaaataaaaattaaaaaaaattaaaaagatcctcctaccatccctgcccagccctagctcaagcctgtgctttggaatctacggtgccatgccccaagctgacccccagaccctgctgcagcggggagatctatcttccctggcaagtctcttccaagcagcagagaagcagggctcaggggaggtggctagcctcacagtctgacagaccccaaggaggggcacccagggagaagagatctggctgctccctgtagggtatccccccgtgaccagggaaggcttgctcataggaggaaatcccctggtcagtgagtgccaccagggagagcccaggtcccagtgcttgtcatggagcaaggcctggaaggtgatggaatgaatgggtagtggatccgaatgccggagatgattcatctcggcctgcaggtggacggctctcaggagaacaggacagaaagccatggccaggcggccacgtagagagaggcaaaggccaagagggtgagggaatggccaagccagaaatgagtctagtaaacgtagttgtagaaagttctagaacccaatgggccacacacagtggcggaaggggcatcttcccgactggtggccaccagagctgtgagacaggggtggctctcagaggctgaatttctccacacccaggaccaaacgctggtcctgggcaggggccggacgctgcccacaggggccctcgtggaaggcccgtgtggctgtctccctcctgaggaagtagttacagacaccacagcggagggagggcagatcgggtgacggggctcgcagggctcagaagggaaggggcgggggccatggcactcactgctctgtcggcctcaccggggccctgacatcctctgaggcaggaagctgcggtgaagtctgaagtttcctgggccgggggaggcggggtgaggtgggctgtgaagacacagacgggagagtgagctcatcagggccaaggtgtggggtccagggttagaggggcacaggatgggataggggttgcccggggagcggtggtccccttttcagcctgagatgggaacagaaagaaaattgttaggcaatggagtaggatttgctaagacaaggaaccagggacagatgtgtgttgtgagccccagaagcaccggaggcctgggctgagacaaggctggggtcacccagaaggtggtctcaactcccagctggggctgcccagcccctgtctccctgggaaagcacaggtgggcggcccccagcagagtgagtaaaagtgggttcctcttctggcagcttcacttctcatgctgccagtacccctccctgaccaacgccgcagctggagctggggtccacccgccctgtgtgtcctcctgcagatttgaggtcttttttcctcaactctgctctgggccttagagacccctgtccctggaagcaggacttccttggcaaagcctcatcccaccaagaaaatagccctgtgtgcggcatgagcctcccttccgcccagccctgccgcaccgcctgagtgcacgtcaggacgatgggcggctctagggggagcccaggcctagagacttcctcaccagaagcacgtgcatcctttgcatgtaattcctgggtttttttttgaggtggggaatggttagagacagggtctcgctctgtcacccaggctggagtgccatagcatgatcataactcattgcagccacagcctcttgggctcaagtgatcctcccatgtcagcctcccaaagtgctgggattacaggtgtgagccaccacgcctggtctacctgggctgttttaacctctaagcccatctgcagaggctggatgggccccctctgtgactacgggcaggtgacatggaccctttcagccctggtatcattttaggtagaatgtggagggtaatggtatcacctggtggctgggaggcccctgaagcttctgggtccaaagattctggggttctgaccacccaccatgccaggctattaacttctcctggaagtttcaacagtaaccacaatagcagtcctcctgcctcccggcactgccccccactccacccctgcccctgcactgctcccgctctaagcattgcctcccttctcctgggctttcaccttccagattagggggagggttatcactgttatcaccccct

SEQ ID NO: 10694 - DNA, 2300 bp, Homo sapien
gccctcctatgggctccagtgatgcactcaccagcttctggtcctcttcttccacctcttagagtgccttggctccctcctgtcgtcctggggaacctcggccccagccctgcctccccagccagtcacagctcctccctggtcaccctgagggagctcagggcccggctggtagctgggttgctctgcttctgtcccccactcctgtggagcctggcaggcaactccatgatctgaccccggttaccttgacagccctgcctggcctcccctctcatggcccagccaccccagaacctgaagaggttttctagctgccgtgcatttgccaggctgggttacccaccctactttccctgcctgccctccagtgctgccaggcctagtgtgccagccagcgctcagccttcagtaaagggttcccctgcttccaacctccattgcactgcttcccctaagactgtgacctcctggaaggctggagcacaactgcctctcaataaacgtgttgcaaaaaaggaatggatgagttgctgtgcatttgtctagggggtgcttgacccaggagattaccctttgcccagtgcctgaagagggcgtccactgagaacctggggtgcctccccggcctccccttcccagctctgctgtggtcttgggattctgtgggcggtcgctgctgccctctggtggtcagaccgtgccttgcttgcactgtgagaaccttgaccatggaactgccaggttggcggttttcctccacgaagtgaggtttacatgacccttgccgagaccttgaaaactgggagtcttcggggtggggtcgccagcaaaaagatcctgagtcctgccagcccctatctgaggaaactacgaaggccacttgcccccaaccatgctgctgttgggggttttgttagaaatgggctcttcctaccccagctggtaggatcccactctcggccatgctctcgtgcctgtctgccgtggaccggctccaggggggggtccctctgccaccctgtcgactcatctgggtggtgcagagggcagtcagcccgcccagggtgaggagtaagaggaggggtgggggttacgggtaattcagccagcagccctgatagcactgcctacagtaagtgctcaacaaataagctgttttgatcaggggatgggagagttggggggattcctgggatgaaggacatgtggctgctggcaaggaaacgcattttcttacatttcttggtgggtgtggggttatcagtctccaaagctccaggagagggaccaagttgacttcaactagagctactccaacctgcccctccctgacgacgtcttgcgtggttcacgcctctggctcctgccggaaggaggcggccgcccctagtggtttcgggccaacctgcgcccggagcggccggcgccgaggcgattgcccggcagagggcgtcagacgtccaccctgcagcccagggtcggggtgcgggtaagcggagcccagtccctcaccccgaacccgcgtgcacgctggcgtccctggcccaggcgaggtgggcagacatgactctcgcgtcagcatcttccctggtgccaccgccgctacctcctgtggggaagctgaggccagaggcggacatgtgccaagccacaccgctggggcagtgcaaagttgaggggctcttcccggagctggaggccgggggcttctcgaacccggtgcggaggcacagccagccaatccgggagaccctgtctggccgcgccagccaatcagagggtccctgccgaaggcggagcctgctaatcaggggcacctggagtcgctgggcagccacgatcgggtctcgccggcgaggggcgcgacgtgacgcgcggagggtggcggtgggttgggggtgggagctttgctcgcagctgagccccgtttttccggtgctgcagtatccctgggactgagagctgaatacccacacccagggctgagaccttagcagaaaggaaactgaggctgggaggtcggccgggaggctgcctggcggaggcggcgctgctccgagtgggcggggctggttccggccccgccccgcccccgacctcttggctccgctagtgcccggcgcgccgccgccagtgctgcgggctccgggcaatggatgcccccggggccctggcccagaccgccgcccccggtccgggcaggaaggagctgaagatcgtgatcgtgggcgacggcggctgcggcaagacctcgctgctcatggtgtacagccagggctccttccccgaggtgaggc

SEQ ID NO: 10695 - DNA, 2300 bp, Homo sapien
gggctgtttttcttcaaatagatcgattttcaaagaaagtgtacaagctacggggaagaaagctgactagcatttagtgctgtaaacattttcaaaagcataaagctagaaccttagctttataaagcaagatcgtctcaagcatcttaactggcttatattagacaagagagacaaagacatacatgcagatgaaggttcggaaaattaaggacatctcagcaacattaacatcaaaactgtactgcgtcaggacagaatggattgggtacttacaatgtaaaaggttttttaaaaactaaaagagtaacaactgctcacaattttttgttgctgccatttcgctagtcctaaagctatatacatttaaaacattaccttgttaaaaagagagaaggagttaataagatggccaggtttaagtgtttaatagaggaaactagatatatttaaaaatttattgttcagtcaagagaatacagattaagacagctccaagctccccccacccacccatagaacaaaaagaggaaaaaaaatatgtcatttacttaggtttttttggaattcaaaactgttaactgctgacatgaatggtgtgctatgacctagttatacaagacaaagatggattccaagtcataaggaaaaatccagatctttttaaaaagtcttctccagtcttccaactgtgagtccttgggcctgttgacaaatgttaaacacactgagacgtcctgaactggatggtagagtcaaaggaaaaacattccccatttgcaacaaaggaaaaacccacttggccatttaattccattgcagaaaaatggcttccctcatctgttggcctctccttcgtgtctgatgaaggatgttttgagatcagcgtctaataactcaagccctatagaagccgcgcgctgattggctgccgcgccctgccgccctgctccagccaattacctacccacggccaaattacaaaccccgaaaagagccccaatatgagctacaccagctccgagccccggcgaggcggctcctgcgcctcggccgccagagaggagcggcagagggggctgcaaacgcgtcctcgcgaagcccgggagcctcggagttgaactcacaaaatggaagccgcgcgctgattggccgccgccactcccggacctttaataaagaaaggggaaggaaaagataaatgcaaaaaagggggactctctcctccgcgggtggctggaggaagggggggaagcatgtgttcaggacaattacagggcgctcccctccaaaaataaaaacagaagaaggcgtctatcgcccaggtccaggcgagggctgcatcctcccaggaatgcgaatgctaacgtggtgaaccctggtctcccttccccagctcagctccggggagggggtcgcgggccgcaggaggaagccggagcgcagatacctcgattgcaactcctctgagtcgacgccggcctccccccgcggctcccagcgtccacacacaccctcggccccccagaccccagccatctccccgggccccgcgcgcccgcctccggcccgggcagtttggaaacagttttgcaggcccgggacgcacgccgcggcggtcgcggctctgagggtagtcccggccgcgggaggtagagcccggggagaccccctcccccgccagccaagacccccaccccagtcccagaaaaataaataaattaaaaggccttcccccggggagggggaggcagtgtgggagcgcgcgagtgaggggtggggggccgctggggcccggggctttggcggcgcagctgccgccgccgggagagtgcctggggaagcggcgaggaaggagaggggaggaggaagaggaggaggaggaggaagaggaggagggtgagcgctcgggtcgggctccttagcggtgtattgtgggatgtgcggctactgggagccgagcctccgccgccagccgcctcccgggcagcagcagcagcagcggcggcggcagcggcagcagctccgggcccggcagccgcggcggcggcgcccccccttcctggcccccggtccggccgccccggcctcggctccctcgggggacaccatgtactggctggcggcgcagggaggccggcgcccggcggggatgtaagcgcggctcggggagggagaggccgcggccggcagccgggcggcccaagcccccggccccggccctggcccgagcgggcgagcgggcgggcgggcggcggcgccgccaggccctgccgccagcctcgcgccagagccgggcc

SEQ ID NO: 10696 - DNA, 2300 bp, Homo sapien
aacagtttctctttccccacccccctttctggccttctcttcctgctgccgggtcaggggcgacccctcaggcttaagaagttgtcctgtagtgggctagcgagaggggagagtctcggagccgagccccccgcggggcgtgcaggacactgtatctgcgccgtgattacagtttcacccagtgttattttgttttcagtagctgagaggggacaccctctcgccagcgctctacccctccccgccaaaacttccctggccccggacggcgggaactgggaatccggctgggctcggtcaggactggcgttattttcgaactcggggaggtgggggagggacggcggggcagtggggaggggtcctaccttgaatttgggcaccgacagctccagctccttgtttttggtccagatcccgacgacccggggatcttcgacaatttccaccgggcggttgctggacatctgtggggagaaattggggggccgggatgagagaactggtccccctccccatgggcagacccctttctcgaggcacttgtcaaactccagggctggggccccgtctgacagttggccgggggatcgggcggggggtccctggccgctaggcgcgtctccccggacacgacgcggggcacggctgggggggcgcgccggctactcaccgccaggctgaaatgctgcccatcgtagcggtacagtttatgatgcccctttttcagagccgggtcaatcatcaacttgtaacttctccaatggtggttcctcctctcgcccgaagggccgggctgcggcgggggctgctggtggtggtggtggggggggtgactgttctccatgccgttaacccaacctgaaaaccagcaagttgttgtcgtctccgccgcggcggcggcggcggccgcttctacacacacgcgaaagaatccaatcggcaggcccccaccccctcccaccttgccagcgcgccccgaaaggagctgtctcgctggctccccccaaaacaagaatggagcgagagaataacccttccgggagaattacgcgcccgcccgctcggccaccgtctcggggcggcagcgaggggctcccgggggtcccctgggcgggctggcggggcccggggcgcccggaggacgcggactccggcccatggtgcccgcccggccgcccggcgtggcgctcacccgctagctcggcccggctctggcgcgaggctggcggcagggcctggcggcgccgccgcccgcccgcccgctcgcccgctcgggccagggccggggccgggggcttgggccgcccggctgccggccgcggcctctccctccccgagccgcgcttacatccccgccgggcgccggcctccctgcgccgccagccagtacatggtgtcccccgagggagccgaggccggggcggccggaccgggggccaggaagggggggcgccgccgccgcggctgccgggcccggagctgctgccgctgccgccgccgctgctgctgctgctgcccgggaggcggctggcggcggaggctcggctcccagtagccgcacatcccacaatacaccgctaaggagcccgacccgagcgctcaccctcctcctcttcctcctcctcctcctcttcctcctcccctctccttcctcgccgcttccccaggcactctcccggcggcggcagctgcgccgccaaagccccgggccccagcggccccccacccctcactcgcgcgctcccacactgcctccccctccccgggggaaggccttttaatttatttatttttctgggactggggtgggggtcttggctggcgggggagggggtctccccgggctctacctcccgcggccgggactaccctcagagccgcgaccgccgcggcgtgcgtcccgggcctgcaaaactgtttccaaactgcccgggccggaggcgggcgcgcggggcccggggagatggctggggtctggggggccgagggtgtgtgtggacgctgggagccgcggggggaggccggcgtcgactcagaggagttgcaatcgaggtatctgcgctccggcttcctcctgcggcccgcgaccccctccccggagctgagctggggaagggagaccagggttcaccacgttagcattcgcattcctgggaggatgcagccctcgcctggacctgggcgatagacgccttcttctgtttttatttttggaggggagcgccctgtaattgtcctgaacacatgcttcccccccttcctccagccacccgcggaggagagagtccccctttttt

SEQ ID NO: 10697 - DNA, 2300 bp, Homo sapien
gtccgagcgagagcgagaccgggatatggcagacaccccctgtgagctcgccaagcgggaccccaagggcgtgggtgtgcggcggcggccggcgcggcctctggagctggacagtggtggggaggaggacgagaaggagtcattgtcggcgtcctcgtcctcatccgcgtcatcatcctcggggtcctcaaccacctcaccctcgtcctcggcctccgacaaggaggaggaacaggagagcaccgaggaggaagaggaggcggaggaggaggaggaggaggaagtccccaggagccagctctcctcctcctcaacctcatccacatcagataaggtgcctagcaggccaggaagcctcagggggccgggccaggcgacgagggccagacccttcggctcacctgtccccactcttccttctcccccaggatgacgacgatgacgacagtgatgaccgggacgagtctgagaacgatgacgaggacacagccctgtcagaggcgagtgagaaggacgaaggggactcggatgaaggtgagcagggaggccgtggctgcctggccctcccggagtccctctttccccggggcagagcctgagcaattgtcagaaatacttctgagccaaaatgttgtgcttttgagacgttaccttgttaaaacacacacacagggtggcgtacggttccatcttcagggagtgccgtgaacataatggcatgtccatagaaatagaaagcaggtctgtggtccttagggctggggagcccggtgttcaggggggcttgctcagcctacatggcttccttttcaactgataaaaatacttagggaccagatcgaggtggtggttgtgcaacattacaaatgtactaaatgctgctggaattatcactttgtaacgagcagttggccggacgcagtggcttacacctgtaatcccagcactttgagaggcctaggcgagtggatcacctgaggttaggagttcgagaccagcctggccaacatggtgaaaccccgtctctactaaaaatgcaaaaaatagccaggcgtggtggtgggcacctgtaatcccagctacttgggaggctgaggcaggagaattgcttgaatccaggaggcagaggttgcagtgagctgagatcatgccactgcactccagcctgggtgacagagtgacactccacctcaaaaaaaataataaataaaattttttttacaaagtgagcagtttttggctgggcgcagtggctcacgcctgtaatcccagcactttgggaggccaaggcaagtggatcacgaggtcaacagatcgagaccatcctggctaacacggtgaaaccccgtctctaataaaaatacaaaaaattagccgggcatggtggcaggtgcctgtagtcctagctactcaggaggctgaggcaggagaatggcgtgaacccaggaggcggagcttgcagtgagccgggatcgccccactgcactccaccctgggcgacagagcgagactccgtctcaaaaaaaaaaaaaaaaagtgagcagttttctgttatgttaattttacctcagtttttaaaagcgactactagcggccgggtgtggtggctcactcctttaatcccagcactttgggaggctgaggcaagtggatcacctgaggtcaggagtttgaaaccagcctggctaacatggtgaaaccctgtctctactaaaagtacaaaattagccgggcgtggtggtgcatgcctgtaatcccagctacttgggaggctgaggcaggagaatcgcttgaacccaggaagtggaggttgcagtgagccgagatcgtgccactgcactccagtctgggcaacaagagcaaaactcaaaaaaaagaaaaaaaagactcctagtgaacacatgccccacacacatatctgagggccgtgttcagcctgggtgccaccagtttgaggccattggtgaggggtctggtgggggctggggcacagcgggtcctcaggcagcccctcgtctgtgtcccccatccagaggagacagtgagcattgtaacctccaaggccgaagccacgtcgtccagtgagagttccgagtcttctgagtttgagtcaagctccgagtcctcgccctcatcctcggaggatgaggaggaggtagtggccagggaagaggaggaagaagaggaggaggaggagatggtggccgaggaaagcatggcttctgcaggccctgaggactttgagcaggacggggaggaagcggctctggccccgggggcacctgcagtggactcgttgg

SEQ ID NO: 10698 - DNA, 2300 bp, Homo sapien
cctcccaaagtgctaggattacaggtgtgagccactgggccctgccttatctatttttgatacaagttctcaccctgttccccaggctagagtgcagtggcgtgatcatagctcactgcaacctttaactcctggactcaagtgatcctcccacctcagcctcctgagtggctggggactacaggtgctcactaccaggcccagctaggtgaatgcttttctgcacaccagggtattttcaaggatgcgtcctatgaacccatctgatcagtgagcttcttgagcaaggcctctggaacccacctctgcatggtcgggcatgaagaacagagacagtcacacccagccactgctgatctgttatccagtggagcccagcctgaacagagagcatcagggaggggactctggatactgggccctgcaggcttgcctccctgctctctgcccagacatgtgaatggcatctaggggtgcacccagcatgggactgagacctacagtgttggggacagagttcctacctctagatgcctgccagcctttgcaacccactgctgttgacacacttccttgagttagtaaacattggcctttgtgcttagcatataagccagggcaggctccaggagtgggggtttgagttggccacagcaatcaaagtgacaagatgttcctgctggcctggaggggataggcaggctacacagagctcttctcctccatgggaaccttctgggcctgtgagatccaccctgggccacctccactcaagttttcccagttggatatttatttatttatttgagatggagtctcactctgtcacccaggctggagggcagtggcatgatcactgctcactgcaatctctgcctccttggttcaagtgatcctcctgcctcagtcccctgagtagctgggactacagacgtgcaccaccgtgcccagctaatgtttgtatttttagtagagatgaggttttaccatgttgccaggctggtctcaaactcctggcctcaagtgatcctccctccttggcctcccaaagtgctgggattacaggcgtgagccaccacccccggcccccagttggaaatttagacttaaggagctgaggtggacactgggagcacactgggcaggcccaggacaggcagaataagggggtgggaccaccttgcctgcctcctgaatggcccagaaaatagagaaaaggagggagaagtggtctgcactggtgcaatgagatccaacttcagaatcaaacaggccagagtttggggctctgctcttaccagttccatgacctgggagacatgtgttcacctctccaggcctcagtttccccatctgatggggatatcaatatctcccatttgtatagagggcaatctagcaatttaaagtgtgggtcctggagttagaatagcccggttcatgttccagttcttccctgccgcttgctgacctcatggcctaggaatgttctctgtcccaatgaattataaccaacactgagagtgtcctgtgtgccaggtcctgttccaaagagcgtgcttatctcctttaatccccaccacactattctcattcctgttttacaaatgaggctcaaagggatatggtgattttcccaagtcacactgtatgtaacagagccaggatgcaaaccttctcctgccgtgcctctcagagctatggaatacaacgctgtgacgcaaacaggactttggggccagtctccaaatgccccctcaaatttcctctaggcaagagttctggagccgccactgcactccagccggccttggcttctgagctttggattctgggcagtaatggtcacattcccagcgtcctggaaaagcttgcccttggcttctggccctgactctgcctcccactgactagtggacgtcactgcccctctctgggcctggcaacaccatcctgttcaatgaggctgcggctggatcagaggtccccaggcctggaaccttccagggctgggctcagctccccaccccatcccccaggtaggccaggaggcctgggcgggacctgcttggggttaaatactccggcccagcactccccaggcctctagtcccagtaggaggtttgactaagatcaatcatggtaagtgccatggccatctccccttgggtgggacatcttcagtaacgcttccagaagcaccttgtgttggaacctccaagtctcactgtccttctttttctccttagacgacttacagtgacaaaggggcaaaggtaagcaggcgaaatgtgggaaa

SEQ ID NO: 10699 - DNA, 2300 bp, Homo sapien
agaaatcatgacactacacatctaaataattgagcatttatctcgttccaataaagataaaagtgattctctcatataattgcaacaccattatctgactgaggaaatttaacactgatatactataatttaatataaagttcatatttagatttcaccagttggcccaataagtcttgtaaagctgctgtttctcattaaataattcaagtaaggatcatgtattgcatttagtcattatttctctcttcctccctttttaactttattatttatttatttatttgagacagagtctcactcggtcactcaggctggagtgcagtgacatgatctcagctcattgcaacctctgcctccccggttcaagcgattctcctgcgtcagcctcccaggtagctgggattacaagtgtgtggcactgtgccttggtaacttttgtatttttagtagagacggtgtttcaccatgttggccaggctggtcttgaactcctgacctcaagtgatccacccacctcagcctcccaaagtgctgggattacaggtgtgaatcaccacacctggtcctctgctaattaattattatttttttttttttgtagagatggaggtcttgctatgttgcccaggctagtctcaaactcctggacctaagggatcctcctgccttgatctcccagcataatgggactacaggtatgagccactgcacctgtatttctctctctctctctctcgataatgttagaaatgttagtttatttttgaggggtgcggtagctcactcctgtaatcccagcactttgaaaggccgagctgggctggatcacttgaggccaggggttcgagacctcagcctcctgagtacctgggattacaggtgtgtgccaccacacccggctaatattttatatttttggtagagacagggtttcaccatgttggcgaggctagtctcaaactcctgacctcaaatgatctgcttgccacagcctcccaaagtgctgggattataggcatgagccaccacacctggcccattgcatttagttgatgcacatctttagtgttcttaaatctaggcaattgcatatccgcctcctttctctgtcccccaccccttattccccatgtgtatttcacaacattgactttttttgaagttttcaggccagttgttttgaagtatgtcccttcttttggatatgtctgttttccaatgattagattcagggcaaacatgtttgaatactacacagatgaccgctgagcccttttcaagacaaaatattagaggcacatggtcagatatcaaagttgattgtttaggtaagctgggttggaattttggcctcacattttgctagttgggtaaattggttattgagacggttttctcagctgtcaaattgggatgtaataatctagcttcatgaggttgttgaattaatatatgtaaggcatttagaacagcgtctggcacattataagtatcaataaataaacactgttaccgttattattatcactacgatttttagaggccttaacaggaacatccagcaccttcaacagtatatggctcataggaatcattccatgaatatttgttagcagaaggacagctctatgagatagattgctatcaattactgccccattttacagatgaggaaactgaggcccagagaagccaagtagtgacctagggtcacacagattgccgttaagtggcaagatacggggtgtgtactcaggcatatcggatctgtaaagtgagggataaggaaccttaatgtattttgtaaatcctccagggctgtgtggatgtgaagaactgaattggagcgccacgcagcggttctctggcgtacagtatccatccatacagtaggcgctcaataaatgtctgctgcacgaatgagaaaatgagtcagctggggcgagatcatcccctagcgttggtgtgcaattgcgtggggatccattgcttccgacgctactcctgccgggtcaccacaggcgcacgtgttccggcagggcgcggcttccggtgacccagctccgccctaagccccatcccaagccccgccccttgactgttctcgcgttcgcggacggctgtggtgttttggcgcatgggcggagccgtagttacggtcgactggggcgtcgtccctagcccgggagccgggtctctggagtcgcggcccggggttcacgatgtccgacgaggaagcgaggcagagcggaggctcctcgcaggccggcgtcgtgactgtcagcgacgtccaggag

SEQ ID NO: 10700 - DNA, 2300 bp, Homo sapien
ctgcttgagcccaggagtttcagaccagtctgagcaagcaacatagtgagaccccatagctacaaaaaatacaaaaattagctgggcgtggtggcacgtacctgcagtctcagctacttgggaggctgaggtgggaggattgcttgacaccaggagattgaggctgcagtgaaccaagatggtgccactgaactccagcctgggcaacagagcgagaccctgtctcaataataataataacaataataatacatttatataagattaaaagtagatctatttaaataaaaatatcaaaggaataacacaagtggtatatgcatatagtatactgcatgtggtagaaagtaaactaaagtttgagaaattgctggtaatttgcttgaaagcacaggttctgaatgtaacagacctgaagtctgaatcccactttgagcatatagtcagcacccagtaaaatggttctctggccctccgtatgaaacttcatcttatggccggacgcggtggctcacgcctgtaatcccagcacttggggaggccaaggtgggcggatcacctgaggtcaggaatccaacaccggcctgaccaacatggtgaaaccctgcttttacttaaaataaaaaattagcctggcgtactggcgctcgcctgtaatccctactactcgggaggctgaggcaggagaatcacttgaacccaggaggcagaggctgcagtgagccgagattgagccactgcactccagcctgggtgacaaagcaagactccgtctcagacaaaaaaaaaagaaacttcatcttacatcacctaaaatgcattccatcccaccctacttgggcataattaattgcatcttcctctgcaaactgatctgtgattttacactagatggcataagaaaacctgcatcagcttttgagccagacccaccactgccacttccgaactacatgaccttagataggcgtttgccccactctgggcctcagtttcctccttatgcaataaggatgatgagccttatttgtaactcaaagttcggtccttagaccactagcatcagcattgctgggagtttgctacaaatgcagaatctgctcccttgcctcaaacaaaatctgcattttaataagatccccaggtaattcatatacacactgaagtttaagaattcacgatacaatcagcaaatgccgggtgcagtagctcacgcctgtaatcccagcactttgaaaggccgaggtggaaggatcgcttgaggccatgagttcgataccaacctgggcaacacagtgagactctgtctttacaaaaagtacaaaattaagataaggcagtcagcgaggcacatgacagctgtttaatcaccaagtaacacctgtttccccctccctaaaatggaaagagtaacagcatccacctcaaagggttgttgcaaagattaaattaactcaacaatgcacagcacttaaaccagcgcctagcacacagcagggctccacaaactcttgctggatatcaatatggctaactcttcagttgctaaagttctttgcctgccttcttgtgccgacagaggccgcacttgcggcgccttgggcctcccagggagatccgttgcggagcgcccaaactgaggccgccctggcatcccagtaccccagggactccgggccgggttaggcgacttggggcgccccgaacccacactcacgctttccagcacgtcatagttggccttgatctgcgcttctatctcctccttgcgccgcatcagctcctggacgtcgctgacagtcacgacgccggcctgcgaggagcctccgctctgcctcgcttcctcgtcggacatcgtgaaccccgggccgcgactccagagacccggctcccgggctagggacgacgccccagtcgaccgtaactacggctccgcccatgcgccaaaacaccacagccgtccgcgaacgcgagaacagtcaaggggcggggcttgggatggggcttagggcggagctgggtcaccggaagccgcgccctgccggaacacgtgcgcctgtggtgacccggcaggagtagcgtcggaagcaatggatccccacgcaattgcacaccaacgctaggggatgatctcgccccagctgactcattttctcattcgtgcagcagacatttattgagcgcctactgtatggatggatactgtacgccagagaaccgctgcgtggcgctccaattcagttcttcacatccacacagccctggaggatttacaaaatacattaaggttccttatccct

SEQ ID NO: 10701 - DNA, 2300 bp, Homo sapien
caatctggacttcccaggctcaagcaatcctcccacctcagccttgagagtagctgggactacaggcatgtgccaccatgcccagctaatttttgcattttgtggttttgccgtgttgcccaggctggtcttgaattcctgggctcaagcgatcccacccgtcttggcctcccaaagtgctgctattataggcgtgagccaccgtgcccggcgctttgtttaggttttggaggaccctccattactgttttccactgccgtgcaccgtttcacattcccaccagtggtgcacagggctccattttccccgcttcctcgccagcacttgttttctgtttcataatcagtgtgtggtagaatctcattgtggttttgattttcatttctcttatgattagtgacatggagcatcttttcctgtgctttttgatcatttgtatatcttctttgaagaaatgtctatttaggctgggcgctgtgtctcatgcctgtaatcccagtgctttgggaggctgaggcgggcggatcactcgagctcaggagtttgagaccagcctggggatcatggtgaaacctgtctctggaaaaaaatacaaaaattagccaggtgtggaggattgtgcctgtagtcacagctactcaggaggctgaggcaggagaatcgcttgagcccaggaggcagaggttgcagtgagctaagggattgcatcactacactccagcctgggcaacaggagtgaaaccctgtctcaaaaaaaaaaaaaaaaaaagaaagaaaaagaaaggtctattcaagtcctttgctcattttcttttcttttctttttttttttttttgagacggagtctcgctctgtcacccaggctggagtgcagtggcacaatctcggctcactgcaaactccgcctcctgggttgacgccattctcctgcctcagcctcccgagtagctgggactacaggcgtccaccaccaagcctggctaattttttttgtgtgtgtatttttagtagagatagggtttcactgtgttagccacgatggtgtcaatctcctgactttgtgatctgcccaccttggcctcccaaagtgctgggattacaggcgtgagccaccgcgcctggcctttttttttgtatttttagtagagacggggtttcaccgtgttagccaggatggtcttgatctcctgacctcatgatccgcctgccttggcctcccaaagtgttgggattacaggcgtgagccaccacacccagccctttgctcatattctaatcagatttttttgttgatgttgaggtataggagttctttatatgttctggatgttaaatccttattagatatatgatttgcatgtattttcttttttcttttttttttttttttaagacagaatctcactctgtcacccaggctggagtgcagtggcacattcatggctcactgcagccttgagcttctgggctcaagtgatcctcccacctcagcctcccaagtagctgggactacagatgtgcgtcatcaagcctggctaattaaaaaaaatatatgttttttgtaaagacgagatctctctttgttgccgggctggtcttgaacttttgagctgaggcagtcctcctgcctgggcctctgaatgtgttgggattacaggcatgagccaccgtacccagcatgtatgtattttctcctatcatgtgggttgccttttcactctgttaatagtgtcatttgatacatagaagttttagattttgatggcatcttgttttatttatttatttttatttttttgagacagggtctcactctgttgcccaggctggagtgcagtggtgcagtcacagctcactgcagccttgacctcccttgagcaatcctcctgcctcagcctcccgagtagctgggactataggtgcacaccaccatgcctcgctaatttttatactttttgtagagtcagggtttcaccatgcccagcctggtcttcaactcctgggctcaagtgatcttcctgcctcccaaagtgctgggattactggcgtgagccaccgtgcctggatatcgtattttaatttgtaatttttttggtatgtactccccctgctttaattttaattttttaaattaaagtactatatacaggctgggtgtggtggctcatgcctgtaatcccagcactttgggaggctgaggtgggtggatcacctgagatcaggagttcaagaccagcctggccaacatggcgaaaccccatctctattaaaaatacaaaaattatctgggcatggtgg

SEQ ID NO: 10702 - DNA, 2300 bp, Homo sapien
ggattaaggcattcttaaaaacttaggcttggcctctttcacaaattaggccacggccctaaataggaattccctggattgtgggcaagtgggcggaagttattctggcaggtactggtgtgattattattattatttttaataaagagttttacagtgctgatatgaccctgttgtcaccccagctgaatttcttatgaccctcccaaaccaaagctcagatggggtcagaagagcttcatagaaagttgggcaaaacaggctagcaattgcaaagtcaggctttgaccaacatatttctttgcactgaggccttgctgctgtggatacggaaatggttaagtactgtgcttcctcagcagctgggctgtcagggccatagtagctccctttggagaacagggaaagcctggaggcttcccaggtggcccagcgtggtgtcctgtcagcttcctctttaggaacccaccagagggcagcaagctcctttcacttcgctagtaagaacccctccgtttttgtgtgtttttgtttttgttttctggagacaaggtcttgctttgtcacccaggctggagtgcagtgtcgtgatcaaggttcactgaagccttgacgctgtgggcactgcctcagccgcccaagtatctgggaccacaggcgtgcaccaccatgcatagctaatttattttttgtagagacagggtctccctgtgttgaccaggttggtctcgaactcctgggctcaagcagtcctcctgccttggcctcctaaagtgctgggatcacaggcgtgagccactgcgcccagcccactgctagtttgactttttataattgaacctcctggctatgccctgagatcagcgctattttgtaaaccgctgaggtatggataggaacgagtagatcagacctcttgaaaatgcttattcttcctcccttttattttttgtctcttttaagatggtaaaatggttctcagggattcctgccaatactttgaattattttttcctctccatggtatcagtgttcatttccccagttcttgcacaccgctttctgttttggcagttctgccaggcaagccctgtgttccttgggactggttttgctgtggttggatacagataccagcttgccttgatgggattggtattgctgtgtgcttccagccacaggttctcacactcaattccaaagccttcctattgggcgaattccctcaaactctatttgacctgacagccatacgtattcccctctggtagccacagacatgctgtgtttaccaatgtttgctgtttaaattgcatgttctaattccacgtatcttccagtctcttttataaagtctcagactataataaacacagcttgcccagtttatcctttcttttttattttaagatgtatgcatattaatcaatttaccatcactggggcatggcagtgtgggcggggagaattattcacattctcctaaaatgacagcagcagagagccttctgcctcagtggctctggctggtttcctgcaggggtcccagtggaaacccgtgtggccacctgttgccgtcttccatgagatgttagtggagagccactttgacgtggaatgatcctaatagatatagccagaccggttttgcggaaacgctttgtgctgagaaccgcaagctggtgcaccctgtgtcatatctgcccccagccagctggaattgtctgcaacacgcggtgcccggtgaggaggcaggcaggacggttgtgtgctgcatccatgagacctggaaattcagtttgcttttggaaaagagcattgtatccgagttcatacttctccaccccatcttgccaaggttgcggaaagtaaaaattggcagtattggccgctgcagcttcttaggggacgggaccatgtgaaaaggtgggatcgtgcgagcggaggaaggacagaaaagcgaggaaagtctatgccgccagcgaccggcaggaggcacgtcgggcacgctcgtcaccgtttcctggcacgtgaccaccgccctgccctgtcgctttagggcctgtcgcttccggcggtggcggttgccatggggacggagcttgggtggcaaccagaactagggagctggtggagaaggtggcggccgctggaaggaggcccgggaggtggctgaggggtccaggcggcgggacgactctggccttttgaagaccggggtgggtgctctctgtaagtccggggcggaggccacgcggccctggcgagggggcccccgacctggcggggtctggtgcccc

SEQ ID NO: 10703 - DNA, 2300 bp, Homo sapien
ttcggggtccaactctttagggataaagtatccatccttattgttttcctagttcaaactcttgtttgttgtaaggaataaatggagaatatgccagaaggctttcaaactgttcatttctttgcacattagggttgcttttctctcaaataataacaactgctaccattttttcaagctgtatgtgccagaattgtgatgagcattttatatatgttatcacttctctacaacaaccctagaatttaggattattcttttcattttgcccatgagaaaatgcagactctgaggggtaaagtgacttgcccaaggtcacagagcaagtacgtggtggaaatgggattcaatgctaggacaagctgacagcaaggcccttgcttttaaccactaggctaccctgcttcttctcgtattcctgtttctagaattgttgctaatatgtgggttatgcattttgctgcctgtgggaatataaatatattttaaatgagtaaaaaggctacaaggtgtttattcccagaaagttgacaggccctggatcagtatttttaagatctgggccacaaatacatatactttaagatttcccagctgcgcgtgatggctcacgcctgtaatcccagcactttgggaagccaaggcgggcggatcacttgaggtcaggagtttaagaccagactggccaaaatggtgaaaccctgcctccattgaaaaaatacaaaaattagctgggtgtggtggcagacgcctgtaatcccagctgctcgggaggctgaggcaggagaatagcttgaaccctggaggcagtaattgcagtgagccaagatcgtgccactgcactccagcctgggcaacaagaacaaaactctgtctcaagagaaaaaaaaaaaaaaggtttcccacaaatgtgactttttttttttttttttttttttgagagagggtctcgctctgttgcccaggctggactgcagtggcatgatcttggctcgctgcaacctccgcctcccagattcaagctattctcctgcctcggccttctgagtagctcagattacaggcaccaccaccacaccaggctttttgtattttttttttttttttgagacggagtctcgctgtgttgcccaggctggagtgcagtggcacgatctcggctcactgcaagctccgcctcccgggttcacaccattctcctgcctcagcctcccgagtagctgggactacaggcgcccaccgccaagcccggctaattttttgtatttttagtagagacggggtttcaccgtgttagccaggatggtctcgatctcctgacctcgtgatccacccgcgtcagcctcccaaagtgctgggattacaggcgtgagccaccacgcccggccaactttttgtatttttagtagagatggggtttcaccatgttggccaggctggtctcaaactcctgacctcaactgatcctcccgcctcagcctcccaaagtgttgggattacaggcgtgagccactgtgcctggccagaaatatgacattctttttttgtttttatttttgagacagaactttgctcttgttacccaggctggagtgcaatggtatgatcttggctcactgcaacctctgcctcccaggttcaagcgattctcctgcctcagcctcccaagtagctgggattacaggcgcctgccaccacacccagctaatttttgtatttttagtagaaacggggtttcatcatgttggccaggctggtctcaaactcctgacctcaggtgatccatctgcattggcctcccatagtgctgggattacaggcatgagccaccgtgcctggtcagaaacatgacattctttttattcctatggaaagggaacagagccatttatgcacatttcatcagtaggttagtgcactaggagatggaaatgggaagctgagggccagctggttattatggtcaaaatctctctagaggaaactctacagagaagaatgtcagatgcagcagaagctccccgagaagcaacaggagaaaatggagaaacagaaatgaaagaagaggaggaacctaatccaaattataaagaagtagaagatccacaacaggaatcaaaagatgacacaatagcatggagagagtctcaggaggaggagaggaaaacgggcgaggaggaaggggaggaggaggggaaggaggacaaaaagattgtcatggaagaaactgaggaaaaggctggagaagtccaagagaaggaggcttcaggaatacaggaagaaaccacagtagagcccca

SEQ ID NO: 10704 - DNA, 2300 bp, Homo sapien
tttttccttccttccttcctccctccctccttccctctttttcttccttcttccttccctccctctctccttctcctcatccctctctcttttcttctttctttctttcgttctttcttttctctctctctctctctctctctctttctttgcttcatgcagtggcatgatcttggctcactgcagcctctacgttctgggctcaagccatcttccccacctcagcctcctgagcagctggggctgcagatgcgcacaaccacacctggctattttttgaattttttgtagagatggggtttcaccatgttgcccaggctggtctcaaactcctggcctctagcagtccacccacctcggcctcccaaagtgctggaatcacagatgtgagccaccgcgcccagcctagatttctttttattatgatcaaatacacataaaattgaccattgtaaccatttaaaagtgtacaattcagcgtcattaagtacattcacattgttctgcaaccatcaccactatctcattccagaactttcctatcactccgaaaggaaaccccacatccgttagcagtcactcctgctctccctcccccttgcctctggcaaccaccaatctgatatctgtctttatggattcgcctagttgtagatatctcccgcaaatggacttacgcatatttatccttttgtgactggcttctttcacttagcgtgtttcaaggttcacccatgttgtagcatgtattcattcccttttatggctgaataatattccattgtgtggatagacacatttatctgttcctcagtcactatttgaattctgacataatattttcctattttaaattttaagatacatttttttaaagtttcatgtggcccaaagcacatacctattgatctcacatatctctgtgagatctgttttatgacctgctgttgcatattttcccagaaaattctcggaacgattctctgaagtccttctttctctttctcttttttttctttttctttctctctttctttttttgttttgttttgttttattttgttttgttttgtttttttgagattcagttttgctctgttgcccaggctggagtgcaatggcatgatcattgcacctctgcctcccaggttcaagcattttcctgcctcagcctcccgcgtagctcagattacaggcctgcaccaccacgcccagctaatttttgtatttttagtagagacagggtttctccatgttggccaggctggtctcgaactcctgacctcgtgatctgcccacttcggcctccaaagtgctgggattacaggcatgaaccaccgcgcccggccttttttttttttctgagacagggtctcactctgtctcccaggctggagtgcagtggctggatctctgctcactgcaacctccgtctcccaggttcaagcgagtctcctgcctcagactcccgagtagctgcgattacaggagcccaccaccgcgcccggctaatttttgtatttttagtagagacggggtttcacccaccatgttggccaggctggtatcgaactcttaacctcaagtgatccacccgcctcggcctcccaaagtgctggtattacaggcatgagccaccgcgcccggccagtatttgttcttttcttcatttttcacgtcaggagactgcgtttcagaatagtaaaaacaaatgcctaggaaaaggcctgcggtctctccatttccacagtagcgtgttccccaaagaccaaaccctcaggggaaacgtctagaatgagtaacaacttaaggctgcaaccttaaactttcccaggactcagtttccccagctgtgaaatggctgctgtcgggctgtcatctccaggcccggggcgctgacatttgggccactctcggtctccctcttcattctgggcgcgcattagctctggtccggccggttccgctgcagctgaacagcaagatgcggcacccaggttaccctgatcatcgcagatttctccccggggctctgttctgaggcctcaaaagtgctccttgtagatgggaccaggggtcatttgggcagtagcagcgcctggtctcagtctggtactgaagtcaggaatggcttaaggtgaaatcgtggtcctctggtgaagctcagcgaagaccccctcgccttgtttatgacaagagaacttctgggggcgggaggaagagtccctgttacgatgctgatcatcattgagcttttgctgagcagaaaactctttagtactcaaggtcgagagtctctg

SEQ ID NO: 10705 - DNA, 2300 bp, Homo sapien
cataatattttcctattttaaattttaagatacatttttttaaagtttcatgtggcccaaagcacatacctattgatctcacatatctctgtgagatctgttttatgacctgctgttgcatattttcccagaaaattctcggaacgattctctgaagtccttctttctctttctcttttttttctttttctttctctctttctttttttgttttgttttgttttattttgttttgttttgtttttttgagattcagttttgctctgttgcccaggctggagtgcaatggcatgatcattgcacctctgcctcccaggttcaagcattttcctgcctcagcctcccgcgtagctcagattacaggcctgcaccaccacgcccagctaatttttgtatttttagtagagacagggtttctccatgttggccaggctggtctcgaactcctgacctcgtgatctgcccacttcggcctccaaagtgctgggattacaggcatgaaccaccgcgcccggccttttttttttttctgagacagggtctcactctgtctcccaggctggagtgcagtggctggatctctgctcactgcaacctccgtctcccaggttcaagcgagtctcctgcctcagactcccgagtagctgcgattacaggagcccaccaccgcgcccggctaatttttgtatttttagtagagacggggtttcacccaccatgttggccaggctggtatcgaactcttaacctcaagtgatccacccgcctcggcctcccaaagtgctggtattacaggcatgagccaccgcgcccggccagtatttgttcttttcttcatttttcacgtcaggagactgcgtttcagaatagtaaaaacaaatgcctaggaaaaggcctgcggtctctccatttccacagtagcgtgttccccaaagaccaaaccctcaggggaaacgtctagaatgagtaacaacttaaggctgcaaccttaaactttcccaggactcagtttccccagctgtgaaatggctgctgtcgggctgtcatctccaggcccggggcgctgacatttgggccactctcggtctccctcttcattctgggcgcgcattagctctggtccggccggttccgctgcagctgaacagcaagatgcggcacccaggttaccctgatcatcgcagatttctccccggggctctgttctgaggcctcaaaagtgctccttgtagatgggaccaggggtcatttgggcagtagcagcgcctggtctcagtctggtactgaagtcaggaatggcttaaggtgaaatcgtggtcctctggtgaagctcagcgaagaccccctcgccttgtttatgacaagagaacttctgggggcgggaggaagagtccctgttacgatgctgatcatcattgagcttttgctgagcagaaaactctttagtactcaaggtcgagagtctctggtggtctgcctggcaccaggcaccttcctacaaccctagttttccaaaaggacaaagcctggggcaggcgacgtcctagctcgcatttgaacagggccgcgggccagcagagatgcgcgatgcccaactctttccaagagcacctcgcgtcccgaaccggtgccttcaactcggagaagtcaagagacccgcaagaaacttgcacgactgcacccgccgccgcgctctgggggctgggcaggggcagctgggctggctcccggggaacgcgacccccccgcgccccgcagaccggctgtctcccatggacccctcggcacctgcagcctccgaggaagggtcagcgcgcgtgtccgcacgcccgcccccaccgcgcgcccagagccgggggtcgccgtgcgcccttcgccacctccccaggagggcgtccggggcgtcccctctgggggcgcaggaggcccgggggcgctgcccggtggccgcggcgcccggaggccgcactgccggcggcggcggcggcgcggctccccctgctctgtgcagctgccgcccggcgcttgcgcactgggccaggcgcgcggcggccccgggctttgtgtgtgtgtgtatgtgtgtgtgtgtgtgtgtgtgtgtgtgagtgtgtgcgtgtgagagtgcgagtgtctgtgcgcgagtgagtgagcggcgggcgggcgcgagtgtggccgccgcggagcgcgagcaggacccggcgggcgcgctccccagcctccgtctccccgccggaaccatgtcgggcaggtcggttcgagccgagacgaggagccgggccaaagatgatatcaagagggtc

SEQ ID NO: 10706 - DNA, 2300 bp, Homo sapien
gaaactccatctccaaaaacaaacaaaaatttggctgatgtggtggtgggcacctgtagtcccagctactcggttggctgaggcggcagaatcgcttgaagccaggaggcggaagttgcagtgagccaagatctcgccactgcactccagcctgggcaacagagcgagactccatctcaaaaaaaaaaaaaaattattcctttcagtaataacttaaccctagatcattgagattgttattaatatctttgtgtttgctttagggtttaccagttgtgtgtgtgtctaagcatgtatgtgtgtgtgtattttactgtacacaaatgtgctttcatttagtccttattaacacactctagaggaggaggcgtcattctgattttacccagggcactgctgtggtaggcagcaggtacgccatgacacagcagtggctgtctgattccgtagctgcctgctgtaccaccggtgaggccaggccatcagcatggaggtgggttagatgagcctttgaacttgggagagaaggaaggaaggaaggtgtgtgactactctgagtccctgacccgttgtgcagaggctgctgctgtctgcgtgtctcttgtgtgctgagaggatgcactgtgacatttttctgggggagtcataaccttctggcctgtattgcccaaagcctgggctccttgggggtttgggtggggataggcacaagggtcctgccaggggcacagccagggcatctgccttccagggcaggttccaggttcacagaatgtttgctgctcaggcgcctcctgtgaagactgcagctactgttggcaaatctcggcttgccacgtggcctttctgagtgggactggagaaggggcagggctgtggcctgtggtcagatcaaacctccacagccgcactgtgatatggaccagaaatagtgccttgcccatctcaagccatctgaaaaagagaaaccctatgcgggctgcccagagatggctcccggcctagcacttggaaaactgagctgcccaagacagctgtgccaccagggaggctgggtttacaagtgctctggacttattgaatgaagaattgttaattgagcccctactatgtgccaagccaccaaacgtcctccctagaggagctgcagtgtcaacagggaaaggtgcttgtgtgcagacactactacataagagctcccgtgagaccatccccgagtggaggagagcagaggggccctgaaggaatcagcagcagcctgggagaggccaggccagctcagaggagatggtgtcgggggcagcatcttgaaggattaggaggtggctgagtggagggccatcaagagtgaggaccatgtcagaggctctgggaggcagaataggccctgccctgcaggtgctcaggccagtgggatgctcgggtacttggattgtgaatgcctcgtgggggctggtggcaaagcaggcaggccacgaccaggtcacaggagcctggttttcactctgtggtcaacagatttcttctaatttttagttatggaaaatttgtaggatatgccaaagtagacggaagaatgtagtgaaccccacatgctgccaccgcacacaccagttgctgtgtgacccatgactgcccttggtctgcccctctctggaaacaagaatgactttgaatccaggaagggaggctggtcaaatgtgaataacaatgaacagcccaaatgtaacctttgctcctcctggagggcactcactgcatgcccagtgttcagtttgttagtctggttcatggaatcctcccagcagccctctgcagaggtgtttgggttaaagtcccttcaacagatattggtgggtggctccaaggctgcaaaacccccacggccagtcctgccctctgcgccctgacagtatccccgccatgccctgccctgtgtggttctgaagaaatcccccagtgacctgaattccatgaagccgggtgtatggctgggggtggatcagtcaagagtttggtcctggaatgatcgggtggcactttgtaatttcacttcaatttcagagtaaccactgagtctccccgctttgccttgcctttcagtgggaagttggtgtctccaaagtggaagaatttcaagggcctgaagctacagtggagagacaagatccggctcaataatgccatctggcgggcctggtacatgcagtgtaagtgccgcccagcctgggcgccggtggtggtcagaacttcacggcctggaggcctgggcacccagggaccagagtctgctcctggga

SEQ ID NO: 10707 - DNA, 2300 bp, Homo sapien
tgggggagtcataaccttctggcctgtattgcccaaagcctgggctccttgggggtttgggtggggataggcacaagggtcctgccaggggcacagccagggcatctgccttccagggcaggttccaggttcacagaatgtttgctgctcaggcgcctcctgtgaagactgcagctactgttggcaaatctcggcttgccacgtggcctttctgagtgggactggagaaggggcagggctgtggcctgtggtcagatcaaacctccacagccgcactgtgatatggaccagaaatagtgccttgcccatctcaagccatctgaaaaagagaaaccctatgcgggctgcccagagatggctcccggcctagcacttggaaaactgagctgcccaagacagctgtgccaccagggaggctgggtttacaagtgctctggacttattgaatgaagaattgttaattgagcccctactatgtgccaagccaccaaacgtcctccctagaggagctgcagtgtcaacagggaaaggtgcttgtgtgcagacactactacataagagctcccgtgagaccatccccgagtggaggagagcagaggggccctgaaggaatcagcagcagcctgggagaggccaggccagctcagaggagatggtgtcgggggcagcatcttgaaggattaggaggtggctgagtggagggccatcaagagtgaggaccatgtcagaggctctgggaggcagaataggccctgccctgcaggtgctcaggccagtgggatgctcgggtacttggattgtgaatgcctcgtgggggctggtggcaaagcaggcaggccacgaccaggtcacaggagcctggttttcactctgtggtcaacagatttcttctaatttttagttatggaaaatttgtaggatatgccaaagtagacggaagaatgtagtgaaccccacatgctgccaccgcacacaccagttgctgtgtgacccatgactgcccttggtctgcccctctctggaaacaagaatgactttgaatccaggaagggaggctggtcaaatgtgaataacaatgaacagcccaaatgtaacctttgctcctcctggagggcactcactgcatgcccagtgttcagtttgttagtctggttcatggaatcctcccagcagccctctgcagaggtgtttgggttaaagtcccttcaacagatattggtgggtggctccaaggctgcaaaacccccacggccagtcctgccctctgcgccctgacagtatccccgccatgccctgccctgtgtggttctgaagaaatcccccagtgacctgaattccatgaagccgggtgtatggctgggggtggatcagtcaagagtttggtcctggaatgatcgggtggcactttgtaatttcacttcaatttcagagtaaccactgagtctccccgctttgccttgcctttcagtgggaagttggtgtctccaaagtggaagaatttcaagggcctgaagctacagtggagagacaagatccggctcaataatgccatctggcgggcctggtacatgcagtgtaagtgccgcccagcctgggcgccggtggtggtcagaacttcacggcctggaggcctgggcacccagggaccagagtctgctcctgggacctggtgtttctaacagaagttcagtctgtgcagacaggaaacccaagccatcaggcccagcagaggggtggcatctgaagagtcagggagcaggtctaggaagactcaggcatgggccttctctctccagcccgagtgtcatggacccggtagcttctccgggagatgagtgtgctagggcaggcttgtgttgggctggtctttctctgagaagccacactgcctctctgactgaggcgttcgttattgacagattcctctcctttcacctggactcctttatttccctgaaatctccttttcctagggaaggagaaggaaaggatacctgggaatgtggtctgccctatgggaggggtgcagcagacaggctggggctccctcaggggtctggatcatggtgctgactctcaccctctctctgctcagatctggagaagcgcaagaatcctgtgtgccactttgtgacacccctggacggctctgtggacgtagacgagcaccgccggccggaggtacttggcagtgaccaagggtggctgagagtggaaacataccagcacctcaccgggagtggctcaccgcgggctggtcctgcaggagaggctgccgagggtagtgcagggcctgccct

SEQ ID NO: 10708 - DNA, 2300 bp, Homo sapien
ggggtctggatcatggtgctgactctcaccctctctctgctcagatctggagaagcgcaagaatcctgtgtgccactttgtgacacccctggacggctctgtggacgtagacgagcaccgccggccggaggtacttggcagtgaccaagggtggctgagagtggaaacataccagcacctcaccgggagtggctcaccgcgggctggtcctgcaggagaggctgccgagggtagtgcagggcctgccctacgccatccatgccctgggggccaggcctgggagctggtggcctctggcaaccccaggctgcagagcctcccccttctcagagggactggcccagggactgagggggttaatatctttctgttaatttttaaagtgtgtgtctatgtgtgattatacatgcacaggaagtgtctagaggaatatatagaagtgtctttattaagagacttcaggaacctctggggagtaggattagggctgccagatgagggggagatgctttcttcactgcatactcttctgtgtggctttaattttgtctaggcatgtctcactgttaacgataaagggggaatttagaaggtaagctaatgaaagacagttttgagacaggtataatctggtattagacagtatcaagggatatcattttgttgggtatggcaatattgtaatcagttctttttaacagaaaagcatctttgctgtcgaggacacacacacagtgtttgtaggtgaggtgatttgggccttgagatcagaaagtgaggcaaccccaggcattggggctccttatctctggagctcgaaggctgtcatgcaaggcatccacactggcatcacgcgaaggttggatgagaggcccctggagggcacattccatctgaaacttcctggaattggctgttcatttttgccctttgaatgtggcagaggctgtggggaaggggcatttatgggggggcttgggaattgctgcagcgttcccctgcttcttcctctgtggagcattctgctctcaccctgtcctcctggacagagcctcaggaccgtgcccccaaggcctttggctaccttaggtcttgaaatgacagcgcattgttagctagagggtctgctatagcatggaagaagtgggacgtaccttctgagtgatgtggtagccactgtggggtttcccgctggattgcctaaggcctgattgtagtgccggatactcagtacaccagttgagctttgctaatcaagcagagccccctcttcactctgctctctgtccctgtcctaggccatcaccacggaagggaagtactggaagagccgcatcgagattgtgatccgggagtatcacaagtggagaacctacttcaagaaaagggtatctggctggagtgttcaggcagcccgcctagggagggagtgggcagagtccctggttcagggccctggccgaggcggtaggctccacagccgccccacctgaacgtggagcgtcaagcagtaaatctggggcccagcgtgccagactagcctgggcaatggcctgcctcggtcaggttgtctttgctctcagtttccccatctgtgcactgggtggaagtctcctttgtgcaggcatcggcctggggatggtgtgagcaggacccctacctgcctccctgagatttctgtatattctagagcccttgggccctcctagggccattggtgaccgccgtgtcctgtccctttgcccacagctacagcagcacaaggatgaggacctctccagcctggtccaggtgggtgagcctgggagctctgaggacccccacttgacatgagacagcagggacttcggtggcccaccagggagccctgcaaaaggcggcaggccatgggccctccctggagtctcaggaatggctcaagaagcagtccagctctctctcctgggtgggctggagggagccgctctccaaatgcctccaccctgctgcctcacttccacggagcacccctttgacgaatttccccaggtgacaggcgtgggaattcttcgtcccactgttactctttgatgcttcctcccctgtgttggtgttgtgttaggacgatgacatgctgtattggcacaagcacggggatggatggaagacccccgtccccatggaggaggatcccctgctggacacagacatgctcatgtcggaattcagcgacaccctcttctccacactttcttcacaccagccggtggcctggcccaatccccgggaaataggtaacccaaaccagggccttgggcttt

SEQ ID NO: 10709 - DNA, 2300 bp, Homo sapien
tgtggcagaggctgtggggaaggggcatttatgggggggcttgggaattgctgcagcgttcccctgcttcttcctctgtggagcattctgctctcaccctgtcctcctggacagagcctcaggaccgtgcccccaaggcctttggctaccttaggtcttgaaatgacagcgcattgttagctagagggtctgctatagcatggaagaagtgggacgtaccttctgagtgatgtggtagccactgtggggtttcccgctggattgcctaaggcctgattgtagtgccggatactcagtacaccagttgagctttgctaatcaagcagagccccctcttcactctgctctctgtccctgtcctaggccatcaccacggaagggaagtactggaagagccgcatcgagattgtgatccgggagtatcacaagtggagaacctacttcaagaaaagggtatctggctggagtgttcaggcagcccgcctagggagggagtgggcagagtccctggttcagggccctggccgaggcggtaggctccacagccgccccacctgaacgtggagcgtcaagcagtaaatctggggcccagcgtgccagactagcctgggcaatggcctgcctcggtcaggttgtctttgctctcagtttccccatctgtgcactgggtggaagtctcctttgtgcaggcatcggcctggggatggtgtgagcaggacccctacctgcctccctgagatttctgtatattctagagcccttgggccctcctagggccattggtgaccgccgtgtcctgtccctttgcccacagctacagcagcacaaggatgaggacctctccagcctggtccaggtgggtgagcctgggagctctgaggacccccacttgacatgagacagcagggacttcggtggcccaccagggagccctgcaaaaggcggcaggccatgggccctccctggagtctcaggaatggctcaagaagcagtccagctctctctcctgggtgggctggagggagccgctctccaaatgcctccaccctgctgcctcacttccacggagcacccctttgacgaatttccccaggtgacaggcgtgggaattcttcgtcccactgttactctttgatgcttcctcccctgtgttggtgttgtgttaggacgatgacatgctgtattggcacaagcacggggatggatggaagacccccgtccccatggaggaggatcccctgctggacacagacatgctcatgtcggaattcagcgacaccctcttctccacactttcttcacaccagccggtggcctggcccaatccccgggaaataggtaacccaaaccagggccttgggctttgaacagccagccgcttccttctctgccaggccccctctgggccagggttccttcagggccatctctgagctgctgcacgtcacggttgggggcaggcagtaaggaagggaaggatggctggcctcatttgacatccaggccgcacgtaccgagtgggtggggtctgcagagtgggcccactgggcagctgccattcccgtagtgccatggtgggaggacagctgcagggtctagtctgagtcattggcacatttcagataccgttctcttcacggggtacgtgtgccgtgcctaagccgaggcggccgggccatgactcatgctaaagaaaatcagaagcactcccgggtgtgaccgctcaccttggtggcattcagtcttccagttaacctctcagggaagagcccaaagattgaaaattagaacagtgttcggggaggtctctgttctctcttgagctctttacagcttcctggggtgtccattccctgatactcaattttaccttcctggcaaaaacttactttcctgccttttgagggtgcggaatggccacaaaccctgagaaggtagaaatcccagccagctccttggaagactctgggatgtgagcagggccaggaagttctgttccaggccttttttacgttcctgcaacattgtctgagaagacaaaatggttcctctctctgtgattcttgcagcacatctgggaaatgcagacatgatccagccgggactgattcctttgcagcctaacctggacttcatggacacctttgagcctttccagggtgaggaccagaggcagagagagcacggttgcctccatctcccccagcccagcacagagcagatcgctgccttcctttaagaggcgagacttggtagaatgggcaagggggcgagcaaagaatttttttttaaactgaact

SEQ ID NO: 10710 - DNA, 2300 bp, Homo sapien
ggagttcgagaccagcccagccaacatggtgaaaccttgtccctatcaaaaaatgcaaaaaaaaaaaaaaaaaaaaaaagcagggcttagtggcatgcacctgtagtcccagctactcaggagaccgagatgggagaatcacttgaatccaggaggtggaggttgaagtgagctgagatcgagtcactgcactccagcctgggtgacagagcgagactcaatctcaaacaaacaaaggcatggtgtagctgctcctggaactctgagcaaacagttgtctccctcttccctcaggaagacgcgaatgagggagggtctctgacttagtgggctcagccagcaggggccttttccaaggacaggctttggagagtaaggactcttcagtctggaaagatagaaacaagagagttgggagtcaggcccctcaaataatcgagggagaggttagggccaaccattgccttggtctccggagtctcagaacacagaacttagagcctgctgcacagcctcacggggagtttggggaaaataatccagcagagaggaaaggaagcggaggcatttgttacagtaaagcagaatgggccgagaaggccgagtccacctgggactgagcacggtcactcactcctctaatcctagcactttgggaggcagaggcaggtggatcgcttgagcccaggagattgagaccagcctagacaatatagtgagaccttggctctataaaaaatgttttttaattaaaaaatataataataataaagagcccacctgcgaaatatctcgtaaagcgacaccagtgactggaacacgtcacacagggttgctccatcgtgttctgtgtggattaagggtgtttttgttgttgttattaatttaagattttcagggagtgaataagaataatctaaggaagcatgtgtgtgcagttgaaagaaccaagtgcaatacgtggctagcagcgagcacctcataaccctgcagagaccccaggctgcctcctggtggcgttgaggggccaggcctccgcccctcagaggagtctgttcttaccaggtcgggactgcccaaactcagggcaggcctctccgtgtgcatcggagcagagccccagtcctcaatctccccagaacaactgctcagggaaatccgaccccaaaaatgtggctgcactaaaggtaccgcatgtctcctcttggttcccttgggaggaggggagaggagtgcaggacatcaaggatctgtgtcttgtctggaacggagacctcagacccagccagagctgcccaggcaggggtggatcagaaatgggcttctccttgccccatgccacgaaccagccctgtggggatggtgggccccctggaggcttttgggtgagccccaagcctgggagccaacgctgagtccacgtagtgtgcaggtactgctcaggctgcccgcatcagttgcaggaggggtgtggccaccaccagagctgtgctgtggggaggaggcagggctgggtggggaaggcggagcttgcagcacctgggatgcaccggttcagccctgccgttcccagccccagctgtgcaccattctgcagagcgggttttctgtggttcccagtcttgtccctccggctcctcattggagccttcagcttctcgtcgtgccctcctcccacgtagctctctagccctggcccttgggcacccaggatcagcgtagggggtgaggaagggtggacagtgtgcctgcaatgtgcctgtcttagtgaccagcgggttctccagcagaaccggcagatgaagcacatctcagctgagcagaaaaggcgcttcaacatcaagatgtgcttcgacatgctcaacagcctcatctccaacaattccaagctggtgagttgccaagagcgtgggctgtggcagggcaggggagctggcaggacgtgctccctgcgtggtcattgctggtggcaggcctgctggctgtgggtgctgcctccagccacctgccccttctgcagaccagtcacgccatcacactgcagaagactgtggagtacatcaccaagctgcagcaggagagaggccagatgcaggaggaggcccggcggctgcgggaggagatcgaggagctcaatgccaccatcatgtgagcttctgggccttggggctccaaccaggcaccccatcccgatgcagggcctgcctcagaggtggtgggaccctgtggcctcatcactggtcagtgcctctttgctgcagtagttctgctctttgtcaacctccttccacagacctctc

SEQ ID NO: 10711 - DNA, 2300 bp, Homo sapien
tcccagcacttcaggagagtgagctgagaggaaggcatgagcccaggagttcaagaccaacctgggcaacatagtgagacctcatctgtataaaaaaacaaaacaaacacaaaagacatccaattgtaaactgtatgtatgtatgtatgtatttatttattgagacagtctcgctctgttgcccaggctggagtacagtggcatgatctcagctcactgcaacctccatctcccaggttcaagcaattcacctgcctcaccctcctgagtagctgggattataggcacaggccaccacgcctggctaatttgtgcatttgtattagagatggggtttccccatgttggccaggctggtcatgaactcctgacctcaagtgatccgcctgcctcggcctcccaaagtgctaggattacagatgtgagccaccacacctggcccaattatacactttaaatgggctaactttacagtatataaattatatgtttaaaaatgtttaaaatactgattccaggctgggcgcggtggctcatgcctataatcccagccctttgggaggctgaggtgggtggatcacgtaaggtctggagtttgagaccagcctggccaacatggtgaaactccatctctactaaaaatagaaaaattagctggtcatggtgacacgcacctgtaattccagctactcaggaggctgagggaggtgaattgcttgaacctgggagccagaagctgcagtgagccgagactgcgccactgcattccagcctgggtgacagagcaagagtctgttaaaaaaaagaaaaaaaaaaaaaaaaacctgattccagggcccagccaaaactactaaatcagaacctctgggtgtaagcctaggaatctgcatttcacctccctctcagcagtaccggctgtgtactttgtttagaaatcactaagcatttcaagacagtgatgagaacagagggtgaaaacaagctcagggccctctgagctctgggccccatgactgagtaggtcacaggctcgtgaagctggccctgcagcccagaatgaagcctgcatgctctacccaaaggacgacggagcatttggttagcgggtttgcctcttcatccaaggacctggaaggagaggagaaattagcaactttaaaggtttcctctccctgtaagagcagtgcggtggttttagtgagaagagtgcagcggagtcccccggcccgtggctgagtcatctccagaactgcgggctttcagtgacagaaggagaaaggctgagcctgcgctagatctgcgggagctccttggtcaatccatcaatccaatagcattaaatgactcttctggcagattggatcagaatgggaattcattaaaggagaccaggtggttcgcagaatcgctgtgagcctgttgctcatgggaacccgtctggggtggggggcaccaggcggccactgagagctcagcccctgttcctccagagaggggatcttgttgcaattgccacctctccgtgcaacgaagcacctgccaccatctccgctgctttgtgtcaccagcgtctgatttgaagtctgattgcattgccgcggtctcaggcccacaacctagctaagagggaggctgggaagacaagtgttgcatttcagtttctgcagcagacagcaggtccctctgcccaccaaacaacccttacccagagtgggcacatgtcaagcttttattcaactcggtgttgagggaatcagcgtaacacagctgattcaaaggaggagatgagagactagtattggtttctcatctgtctgtctgtctgttgtcagtgaagataaagaatgccagaatcaaacagctctgttagatgcgaaagtggttcatgccctacagtaaatacaaccataacctttggagtcatcttctctactgggtagagatcatttgcatcttatctgttttctctaagttcaaagaccctggggcctaatgaataatatataatacgtcaaacaaagttccattctctgagaacaatgccaaagttccattctccgagaacaatgccatctaatagaacttcctgcggtaatggagatattctgtctgtgctatccaatgaggtcgccactagccactgcagctgtcgagcacgcaagatgtgagtgacactgagaaactgaatttttttaaaaagttttttttttttttgaaatggagtctcactctgttgcccaggctggagtgcagtggtgcaatctccactcactgcaacctctgcctcccgggttcaagca

SEQ ID NO: 10712 - DNA, 2300 bp, Homo sapien
tcattttcacctgaggattttgcactcctgtcccgttgccttggaacactcttctcccaggtcttcccacaactggctccttcttgtctttcagtctcttcttcaatgtcacctctcagagagacttttgctgatcacctgacttaaagtatcctgcccgtcactctccaaccgtcacagtgctttctagcttatttatgaatgttgttgctattgtccgcagcccacagcaatgacgggcccacaagggcaggaactctaacttcttcaccgctattcccgataccctataaaatggcctgatcaaagctggcactaaaatatgaataaggaggccgggtgcagtcgctcatgcctataatcccagcagtttgggaatctgaggcgggcagatcacctgaggtcaggagatagaggccagcctggccaacatggtgaaaccccgtctctactaaaaatacaaaaattagcccggcgtggtggtgggtgcctgtaatcccagcttctcgggaggctaaggcaggagaatcgcttgaacccaggaggcggaggttgcagtgagccgagatcgtgctattgcactccagcctgggcaacaagagcgaaactctgtctcaaaaaagaaaaaaaaaaattagcatagtgatttgtgcctgtggtcccagctatttgggaggctgaggtaggaggatcacttgagcccaggggatcggggctgccgtgagttgtgatgatgccactgcactctggcctgggtgacagaatgagaccctgtctcaaaaaaaaaaaaaaagaaagaaaaagaaagctaatgaacttagaaatagtttctaaggccagagtggtggctcgcacctgtaatcccagcactttgagaggcggaggcaggtggatcacaaggtcaggcgtttgagaccagcctggccaacatagtgaaccccgtctctactaaaaatacaaaaattagctgtgcgtggtggtgggcgcctgtaatcccagccactcaggaggctgaggcaagagaattgcttgaacctgggaagtggaggttgcagtgagccgagattgcgctactgcactccagcccaggcgacagagcaagactctgtctcaaaaaaaaagaaagaaagaaagaaagaaagaaaagcaataaagtttctaggctggcgcagtggctcatgcctgtaattccagcactttgggaagccgaggcaggcagatcacctgaggtcaggagttagagaccagcttgaccaacatggcgaaaccccatttctactaaaaatacaaaaattagctgggcatggtggcacgtgcctgtagtcccagctacttgggaggctgagactgaggcatgagaattgcttgagcccaggagacagaggttgcagtgatcacgccaccgcactccagcctgggtgacagagcaagactccatctcaaaaaaaaaaaaaagaaaaaagatatgaacaaggatttcaagcaataactctggatcacagtctctggttctgggccctgagattgcagaggcacgatggagagtccagtgatgtccaaggccacatggagttgagatgaagccttcgacccgccacattcacagcagttatggggccgtccctgcacaccggcgtgggcatatgctgcagaaatttccagagataccgcattctgcacatctcatgccggcttcgcatttcctccccagaaattccctgtggccgctggccttgaactcctggaagtcacccgctccttggtggtatggtcgtgtctgtcaaccctgggcttcaaaattttgtctagtcaaatcaacaggctccttccaagaagaatggcaaagatgcattcatgtgccttcttgtgaagtatgtgtgtgtctgagtcaggcatctgcccacctggagggtaacctcagcatttccattcagccctttcactcagccgtggccagtagaacttttgagtgttttctggagaaaagctgagtaaatggttttgccatgggcgggacgctgactgctctttctcctcaccctggccctttatatacctccaggcagccatggcgaacacatctggctccagaagcccccactgaagctggccttgctctctctcgccatggcctctcactcaggtatcactggtcctggtgcttccggagtcttgggcatcatcttatctcaccaggaagattctggaagcactacccccagggttggctcagcagggctgcagggatggagccagggtgggcaggggtgtgtgatgtatgcgctcacggcatcgttctc

SEQ ID NO: 10713 - DNA, 2300 bp, Homo sapien
gctgaggcaggagaatcggttgaatctgggaggcggaggttgcagtgagccgagatcgcgccattgcactccagcctggacaacaagagtgaaactcggtctcaaaaaaaaaaaaaaaaaaaaaaaagccggaagtggtcatgcgcgcctgtaatcccagctactcgggaggctgaggcaggagaatcgcttgaacccgggacacggagattgcggtgagctgagatctcgccactggactccagcctgggcgacagagcgagactctgtctcaataaaataaaataaataaaaaatttaaaaaatgaggtctgggtgattaaacagttatacaggtggacagtgataaaatccctgactccagggttagagagaccaccctggaacccactggctggttggagtcgagatgtttgaccttgggccctcttctcctttctccatctgtcagatgggtataggatgactttccgtggggagtgcttgacaggagctaagaaacaggtcagctatggcgcttactgcctgcgggagctgccgcacttagaaccaccagctgttatcccatttttatagatgagggcagaagagaaaacgcaggtggttggggccaggctgtctgatccggatgggggacttttccctcggggcaggtgagagcgcctggagaggcccctgcccccgcgcacgcgtcctagcggttgccgggcaacgcggcccgggccatggaggcgtcgtacgagtccgagtccgagtccgagtctgaggccgggcctgggactcagcggcccgggaccgggaccgtgagcgcggccgtgcgcgagcacttgcggaagctgtgtctgcgcgagttcccgtgcggtgccggcagctgggtgcgggcgccggggccggaactctgggggcctggaccggctgcggggaggcacgggcccgggcgagcggagcgggctggtccctggggcctgggatctgcgcattctgggggccgccgacatgggggcgggtggggcttgagggtgacggtggggcccgagtcgcgggcactgcgcggggaggagagcggggcccgtcctgagcacatcagctgacctgggctggggcctctccctgacttgaagacgtcaacaccccagatttctagtgggcaggctccttttggggtgaaaagcttttgttttgggcaaagagttccacaacttttcccagcctccgagcatttaataagagcctgaggcagtgtgagaggtggctcagcctgaagcctgcgaccttgagtccaggagaaggggttaccccccatcctgcctccctgtctccagagtcctagacccttccctcccgtggcttcaaccacgaggggcgcccaggtgtggcccaggaaggcttactgcccaggctggagcatagtgacgcgatgtcgacttactgcaacctccgcctcccaagtagcagggattacaggcacctgccaccatgcccggctaattattgtatttttagtagagacaggatttcaccatgttgcccaggctggtctcaaactcctgacctcaagtgatccacctgcctttttaaaaggaatggcaccttttaattattttgtatctcacctcatctgtagttatatccatggctaataatccatcaaaattattgattattcactgtctagatttttttttttttttttgagacggagtctcgctctgtcacccagcctggagtgcagtggcgtgatctcggctcactgcaacctccgcctcccgggttcaaacgattctcctgccttagcctcccgagtagctgagactacagttgcgtgccaccacgcccggctaattttttgtatttttagtcgagacggggtttcaccgtgttagccaggatggcctcgatctcttgacctcatgatccgcctgcctcagcctcccaaagtgctgggattacaggcatgagccaccgcacctggcctactctctagatttctaaactctatccctaatcgtccagttttatgatctgttctgttttgagagtttggtgtccttaagggggctgtgtcacacctacagaaaatccctcctctgccactgcagaataagtcgcgctttcttcctcaaacttggcgaacttggagggagcttgtccccagagaggaggatgtggtgagccccggagaggagacggtggaggccctgctgggcctggtccgcagccgccactccccctgggctctgctgaacaactcgaatgcagaagacagtttcctgagagaattggccatccggaacccgctg

SEQ ID NO: 10714 - DNA, 2300 bp, Homo sapien
gggagaggccacatccccccttagatccagtgttattatttcttctctgcagccctcagaccacagggcctgtgtgggtggtgaccagggtggggaaggcacctgtggtagagccatagcggggcaagagcttggagctggggctgcctggggctcatctggttccgaggtgtctgcctccagcttcaggccatcggcccttatttgctgtaagaggggcctgggcttgtcctgtggggagctggagaagcatctgaaatgggtgcgtctcaggtttgaggttcagaaagaacaaccaactgggagggagagaaaggagacagggagtgccgtgggaggtggctgcaaaaagcatgaggcccgatcatagcagagcaacccatcatactgaagccgaaaagtggaaacaggcccaacatggtggctcacgcctgtaatcccagcactttggcgtgcggatcacctgaggtgaggagttcgagaccagcctagccaacatggtgaaaccccgtctctactgaaaacacaaaaattagccaggtgcggtggtgggtgcctgtaatcccagctactcaggagactgaggcaggagagtcgcttgaacctggaaggcagaggtggcagtgagctgagatcgcgccatttcacgccagcctgaagaagtaaacgttggagggcatatgctgctggacttcaaaacccatgcctatatgaacatgtgatttgtgatacttatctgtgggttaagatggccttaaaaaggtttttttttttttaatctctttaatgtttggcttaattgaagacagctggattcttacagctacttctgcagtcaactgcttgcaatatgttgctgtaattgacgtgcacaaagaaaatccaacctcaggcccataattggaaaagagggagtattttaatagaccttaaaataatataatttctttaatattacaccaaatttgacaagtggtaatttcttaaaggttgttacaatgtgaaaacaatctatattgaatttttcataatcagattaaaattcattaatctagtttgcattttgaacggatattttaccatgcagtttgtaacatgcatgagttacttgtaaactacaggttaacagacttatgcagatattccaacagttgacacctgtcactatacattttccaaagatcacgttctttactatcaccacccacatcattagaaaggtctttgcgtattggaaaattggtaaattcatggtggcagatacaatgttgtctcatttttagggcaaatgttatacatttattgaaatgctttcagttgtttcccctgaagtgctataattacttcatttttaagaaaatatctgcagctgggctcggtagtgtacgcctgtgatcctagcacgttgggaggcctaggcaggcggatcacttgaggtcaggagttcgagaccaggctggccaacatggtgaaaccccgtctctactaaaactacaaaaaatagccggtcgtggtgacaggcgcctgtaatcccagctacttggaggctgacgcaggagaatcgcttgaacctgggaggcggaggttgcagtgagccgggatcatgccaccgcactccagcctgggcgacggagcacgacactgtctcaaagcaaaaagcagccagtcttgcaactcaaacagctgcgatttattaaatgatctaattaaatacaatttaattttatttcttattactgttaacacccgaggaccaaaactgtgctcccgctgggacagggtccagggcttgcatatgggatgggtcagggcggccgagaacgccagcccatccgtctcccggggctcatgctcgcacttaaattttctcagaaaagccgaaagccgtgattccgatctacgaaggcgattaccaccctgagcccctgaccgtagaggtgcagatccagctgaaccagtgccgctcggcggaggaggctctgcgcatgttcgccgtgtagggcgtgggcagtaaaggctgttcccagcactcccgcctccgcttctgtcccgccgcacgcgtcggggggcgggtgtggcgccggcgtcctggggaggaggagcagcctctgcccgacccggctcgtgcggaccccaggaccgggcgcgggacgcgtgcgtccagcctccggcgctgcggagacccgcggctgggtccggggaggccccaaacccgcccccgccagaaccccgccccaaattcccacctcctccagaagccccgcccactcccgagccccgagagctccgcgcacctgggc

SEQ ID NO: 10715 - DNA, 2300 bp, Homo sapien
gcccctctgggacggcgccagcccggcaggccgccgaccgtcctggggctcccgcgcagcgcgatgccggcctcgtccaccgtccacgtgctgcagctgctgcgggagctgctcgccttcgtgctcctcagctacacggtgctcatcggggcgctgctgctggccggctggaccacttacttcctggtgctgaagtgacagcgccgtcgccgcgcccggccccgcctcccgcccggccccgcctcccgcccggccccgcctccctaactcaccaggaaattcccttcaagccctggcccgaactgagtccccgcccacccgccagcgtcacggcgcccgactcagctccgcgccggacccacctccgcgccctcaggccctgcatatgccccgccccgcgcggaagttccggcggttggttgccttgcgcggccgttacagcctttgccctaagcctcgccccctttccccctgcctgcccaatcccgactgcttccttgggtgggggcgtggctatggggcgaggcgctctcaggtggaggccgtgccccgctccgcgctcacgaagctgcgtcacttccggcgtgtgcgtctggcgtccgcgcgctgcacaatggcggctctgaagagttggctgtcgcgcagcgtaacttcattcttcaggtaccgctgcggccgcgtagaggggacaggaccagagggagggaccgacgcggacagcgctgtggcccggcccacggcgcccgccttccttacgcgctcatctctcgtccgcccagctgggtcgcggcgtctcgctccggtcgggaggactgaggacagccccgcctccgccccctgggtcaagcccggcttccttttcagttcgtccatcttctagaaacgagtccccgagaccccgggctgccttcttggggctgctccgcctcctgaccagccctcgtcagccactcgaagtccctgaggagacgtggagaggaggagggacacggcatggggggagtccgggaagggagacgagcgtctgaagacgtcctcccgagggcagaaggggccgggggagctggcgcagggctctctacctagcgctgcaggctcctgggcgattgtagcgggaccgtcacacacaactggcacccaggccaggggtccagagctaaattctgcctgcaggagcggttattgtggcatccgtttctaaaaagtttaaaggcaacattttattttattttaatttttttgagacaagatctgcctctgtcgcccaggctggagtgcagtggcgagatctcagctcactgcaacctgtgcctcccggcttcaagcgattctcagcctcagcctcccgagtagctgggattgcaggcgcccgccaccacgcccggctaatttttttttttctttttgttttgtttgagactcagtctcgctctgttgcccaggctgaagtgcagtggggcgctctcggctcactgcaacctctgcctcccaggttcaagcgattctcctgcctcagcctcccgagtagctgggattacaggagcgtgccaccactccgggctaatttttgtgttttaagtagagatggggtttcaccatgttggtcaggcagatttcgaattcctgacctcaagtgatccacccgcctcggcctttatttacttatttttttttaatagacacggggtcatgttgccagccatgttgcccaggctggtcgtgaactcctgggctcaagtgatcctcccgccttgcccttggccttccaagtgctaggattacaggcgtgagccaccaacaccctgcctgaggcaacattttaaacttggtgtatgttgaaaatttcaaaacccctcagctgtcctgcatcctcatttaggttcctgcttggctcgagtttgagtttacagcccctgcaagtaaatccaagagcctgttacagattggcggtcgtgccttatgaaatctgacttctacttccaggtacagacagtgtttgtgtgttcctgttgtggctaactttaagaagcggtgtttctcagaattgataagaccatggcacaaaactgtgacgattggctttggagtaaccctgtgtgcggttcctattgcacaggtactgtcgtgtgcagtgattcttatctagtgtaccgtgtcctcttgaagtctcaagtgggcggtgaagcattagacaagctaccatagtttttcccagtgctcccatcccttcccccacagtaccggcatcttttcacagttgagcagatatattaatattctcattttgattatctcatttg

SEQ ID NO: 10716 - DNA, 2300 bp, Homo sapien
taaaaactacggcaacgagcaaaataatcagaagcagcatagtttatgctttcgtttcctttgttgttgcatctgggaaagtgtctgttctttgcagaaatcctcactggctccttttgcctcacattgtgaggaggtgaaattggaagtgtcacattgggaaagtatctgtataatgagtctgtaagctgcaaaactctttgtaaatcggaatcaagcactcaggagatctcggtcacttaagcttggttctcacacccgtgcatgcttgcacttgcatgttttttaagacaacagcttttgctttagtagttgggcggtcgcaagtgaacactgtccagtggttcttctggtgcccagactcggaggagatgggactgctctcaatgtgtttgttagaaacgaaactgttcgcactataaccccataaccccttacaatgttcagaaaaaaacaagaaggggcttgaaatacccactagtgtgccgcctgctcagcccatctgggtctgtgaaaccacatctgagccctgtgggctgtggtggcgacacaggcagagggcgggcagggttgccagcgccccgcctgggctaggaacgcctgtgcgcagctccctgagagctcggggaccacgcggaggttgtaattggtctctagaccacacctagttgttgagtgccgctgcttgaaaatctcagttctgccgagatcgcagaatacacacaagctacctttgggcaccagagcagacagaaccgcggagcttcagggtggaagattcgtggaaactttgccaagtaagtgaggtggggagagaaggaagccagtgcctgacactgtggggagtggctgggcaaagcagcattggaggtgttgtagggttcctactgtctgatgagctggtgtggggttcttactgtctgatgtcgtctctggtggaagttagcagggctggggcagatgcacagagcacggtggcgggggtgagcccaggatcggattgatgcccacccaccacctggcaccctgcagtcccagctggccagaaggcaagcatgctggaccacaaagcaaagatcctccagctctgctgctggcaagccttggggccaggggactcacagaagagcaggtttgggcctgtgccttcctcctgcccaaatgggtctctctccccttccccttccagccagggccgcagctggggctgcagcttgagtgacgggaaaagaaaggtttactccaccagcgcattagcggcactcacagcattaaaaatgcaggaggtggtgggaggagcgggccagggaggaaaactcatgcagctgcggggcgcggggaagagccgggcttctgcctcctcagcccggatcagagccgaagaacgagggcagtttgggttgagaaggattctccagtgtaaccgagaagcgagcgtccaggaggctgttggggaggtcggcactgtgggcttcctggccttcgtttgctgtttcgagggccaggacctcgtgtgttcccgtccgcccctctgggacggcgccagcccggcaggccgccgaccgtcctggggctcccgcgcagcgcgatgccggcctcgtccaccgtccacgtgctgcagctgctgcgggagctgctcgccttcgtgctcctcagctacacggtgctcatcggggcgctgctgctggccggctggaccacttacttcctggtgctgaagtgacagcgccgtcgccgcgcccggccccgcctcccgcccggccccgcctcccgcccggccccgcctccctaactcaccaggaaattcccttcaagccctggcccgaactgagtccccgcccacccgccagcgtcacggcgcccgactcagctccgcgccggacccacctccgcgccctcaggccctgcatatgccccgccccgcgcggaagttccggcggttggttgccttgcgcggccgttacagcctttgccctaagcctcgccccctttccccctgcctgcccaatcccgactgcttccttgggtgggggcgtggctatggggcgaggcgctctcaggtggaggccgtgccccgctccgcgctcacgaagctgcgtcacttccggcgtgtgcgtctggcgtccgcgcgctgcacaatggcggctctgaagagttggctgtcgcgcagcgtaacttcattcttcaggtaccgctgcggccgcgtagaggggacaggaccagagggagggaccgacgcggacagcgctgtggcccggcccacggcgcccgccttccttacgcgctcatctctcgtccgc

SEQ ID NO: 10717 - DNA, 2300 bp, Homo sapien
tacacagacactgttttgtgtcttgctatagagtgttgaattctaaccaacagagaattaagtattttgttaattgtggagcaaaagagtaatggttgaaagagggatgatttaaaacagcacatttaattctcagagaaaactgggacagtctcattgtgagttctattcgattcagatctgccctcactgcaaatggattatgattaagcatgatgtgttggtcggtcttgttctcagttgtacactaaagaccagcctgtcaccaggaggaagtgtttgtattgagcagagtttaattcaagaagaaattatttttttgagatgaggtcttattctgttgcccaggctggagtgcagtggcacaatcatagctcaccacagccttgaacttctgggctcaagcagtcctcctgcctcagtctcacgagtagctgggactatagcaaagcaccaccacacccagcaatttttttttcttccttttagagacagggtctttgttgctcaaactcctggcctcaagagaaataattctttttttctttttcattaaatttattatctttttaattttctgttggctagggtggtctcgaactcctagctttaagcagccctcctgcctcagccccacaaagtgttgggattatgggtgtgagtcaccacaccagctgaaatactctttttaaaatatcaaaatgaactggatgtctaaagcagacagtaagagggactatgataaagatggtgaggcaaaaaaatgcagacatcacatagatgatcttctttagactgaatttattgtagactgtgatatattcagtcgtggtttaatgatgacatcctatagaaaatagaggataccttttttgtcagacaacagaagaaaaaggcaattatttaaaatttctcagattcttttatttctaaatggattagtgtgaatttcaagccacatagtgtttctttgcttaagttcctccgttgctgtaaaacacccaaaatcaggcggtaacaaggggccgcaaaggctagaacacttaactgcctggagacatccatttgaaggatgtgagggttaaaagggaacagaatcaggcctatttttaatagcctgtctgtttcatccattattttggtgtggaggagggtataaatctcagctgtactccgttgccactaggtaggacacggaagatgaccagttctctgggggagtaattactactcactggcttcctgagcagcttgataatgttctgctcctgttttcagcctcactgtggccaaggcaataatttgataataagagatcctgattaaattaaggagccatttgcttctggatgatgatgttgataaaagggttgatgtccacactgcctgctcttttcaaaggtcagaaaacagtcttgaactaaaaactacggcaacgagcaaaataatcagaagcagcatagtttatgctttcgtttcctttgttgttgcatctgggaaagtgtctgttctttgcagaaatcctcactggctccttttgcctcacattgtgaggaggtgaaattggaagtgtcacattgggaaagtatctgtataatgagtctgtaagctgcaaaactctttgtaaatcggaatcaagcactcaggagatctcggtcacttaagcttggttctcacacccgtgcatgcttgcacttgcatgttttttaagacaacagcttttgctttagtagttgggcggtcgcaagtgaacactgtccagtggttcttctggtgcccagactcggaggagatgggactgctctcaatgtgtttgttagaaacgaaactgttcgcactataaccccataaccccttacaatgttcagaaaaaaacaagaaggggcttgaaatacccactagtgtgccgcctgctcagcccatctgggtctgtgaaaccacatctgagccctgtgggctgtggtggcgacacaggcagagggcgggcagggttgccagcgccccgcctgggctaggaacgcctgtgcgcagctccctgagagctcggggaccacgcggaggttgtaattggtctctagaccacacctagttgttgagtgccgctgcttgaaaatctcagttctgccgagatcgcagaatacacacaagctacctttgggcaccagagcagacagaaccgcggagcttcagggtggaagattcgtggaaactttgccaagtaagtgaggtggggagagaaggaagccagtgcctgacactgtggggagtggctgggcaaagcagcattggaggtgttgtag

SEQ ID NO: 10718 - DNA, 2300 bp, Homo sapien
tgggaggccaaggcgggccaatcacctgaggtcaggagttcgagaccagcctgaccaacatagtgaaaccccatttctactaaatacaaaaaaaaattagccaggtatggtggcgggtggctataatcccagctacttgggaggctgaggcaggagaattgcttgaacctgggaggtggaggttgcagtgagccgagatcgtgccactgcactccagtctgggtgacagactgagactgtgtctcaattaaaaaaccaaaaagtggctggacacactggctcatgtctgtaatcccagcactttgggaggttgaggtgagcggatcatctgaggtcaggagttcgagaccagcctggccaacatggtgaaacccgtctctactaaaagtacaaaaattagtcgggtgtggtggcgggcgcctgtaatcctagctactcaggaggctgaggcaggagaatcgcttgaacccgggaggtggaggttgtagtgagctgagatcacgccactgcactccagcctgggcgagagagcgagactccctcttaaataaataaataaataaataaataaaataagagagagagagagatcctcccacctaagcctctcaaagtgctgggattacaggcgtgagccactgtgcccagcctacataagatttttttcatatatcagattattttctttccctggattccctgatgcaggatttttggggtgaaaggcacttggtacatgttgccaaattgctttactgcagagttacaccagctccatgccatccgtagttcatgagcacatgtggggtgttccaggaaaatagggactcacttggcttggcaggagcagagtagggagaaggagattaaggctacttcgcagaggaagtggataccatgctaaggaatttggaagcttattctagatcagggtgtacagctttttctataaagacccagatagtaagtattttaggcttttgcttgttacaaagtgcaggtcatacagaggaacctccttgtctctgtcattgtcatgtgaaagtagccatagacaatacaaaaagaatagctgtggccatgtgccaataaaactttatttgcaaaaacagaaagtgggctgggcatggtggctcacacctgtaatccagcactttgggaggcccaggagggtggctcacctgaagacaagagttcaagaccagcctggccaacatggtgaaaccctgtctctactaaaaatacaagaaaattagccgggcatggtggtgggtgcctataatctgagctactcaggaggctgaggcaggagaatcatttgaacccaggaggtggaggttgcagtgagccgagatcgtgccattgcactccagcctgggtgacaagagtgaaactccgtctcaaaaaaaaaaaaaaaaacagaacgtgaacagagtttggtcctcagaccgtagtttctaattcttgttctaggatggcttttaaactattttggattccaatccacagtaagaaatgtattttatatcatgagccagtatatacacacatgtatgcatgtgcatgttaaactgaaacaaaagttttatttaaaaaaaaaataaaacgaagccaccactagcttctctaacagcgtgtgataagcttttgtattttctactctgtgctgtttttggtactgttgttttgttttggtttcgtttggttttggttttaagatgctacttgcaacccaccagcttgatttcatgatccactaatggaacatgatctacagtttgaaaaaatactaaaagtcaatggggagatccttgaaagttttctgagtggaaaagtgacctaatccctgaataagtttaggaagtggacattgctgcatgtggtttatataggtgccccaaagataatgagaactgtggtatcagtattagagtcactacttcctgtactttgatcatggaaaatcaaaagctcagagctatgtgtcgtttgccgtcttccattttctcctgagttggaaattctgttttgtgcttggttaccggattggttcttccagtcattgcacacaggtgcttattcccttccactgctgctcaggttatgtgaaattacctccagagaaatttgcacctaagaaacagggcgatggtggtaaggacctccccacggaagcaaagaagctgcagctgaattctgcagaggagctctatgctgagatccgagataagaacttcaacgcagttggctctgtgctcagcaagaaagcaaagatcatctctgcagcattcgaggtgagg

SEQ ID NO: 10719 - DNA, 2300 bp, Homo sapien
aaaaaaaataagccgggcgtggtggcgggcgcctgtagtcccagctgctggggagactgaggcaggaaaatggcgtgaacccgggaggcggagcttgcagtgagccgagatcgcgccactgcactccagcctgggcgacagggcgagactccatctcaaaaaaaaaaaataataaaaataaaaaaataaaaaaataaatctctgttgaggctgagaaccaccttgaaaaccaggttgagaactaaagcatggaagcgtttccatgtgtgttttgtttttgtttttgagacgagtctcgctctgtcgcccagcctggagtgcagtggtgagatctcggctcactgcaaccttcgcctcccgggttcacgccattctcctgcctcagcctcccgagtagctgggactacaggcgcccgccaccatgcccggctaattttctgtatttttagtagagacagggtttcaccgtgttagccaggatggtttcgatctcctgacctcgtgatccacccgcctcggcctcccaaagtgctgggattacaggcgtgagccaccgtgcccggcctccatgtgtgttaaattattaaaatctaaatgtccttgctggaatcaaattgagaacagaagtttttggttgagtggctgcttttctgcaccatccacaaatatcactctgcttgttcagactctatgataagtgcttcataatgtaaactgtatagaagatgctggaggaggccgggcacagtggctcacacctgtaatcccagcactgggaggccgagacgggcggatcatgaggtcaggagttcgagaccagcctggccaacatggagaaaccccatctctactaaaaatacaaaaaattagccgggcgtggtggcacgcgcctgtagtcccagctactcgggaggctgaggcagaagaatcgcttgacccaggaggcagagattgcagtgagccaagatggcacgactgcactccagcctgggcaacagagcaagattccgtctcaaaaaaaaaaaaaaaaaaaaaggaagctttgcactcaaagaaggaaattttcatctttgaccagatcccaaaggcccatttccaccccaaagtatcaaaacgcatatatcctactaatattaatagtttattgagcaattaagttccaggcacccagttaagcctctcacgtggactgcacgatgaaattcataccctcattgatcctcactacaactcagaggtaacatggaattttactgaggcaaatggtgggacctggattccagaagcaatactatttgtgtgaaatgtcatgtcactgtaaaagtctgttagggattacccaaaaaaaaaaaaaaaaaaaaaagtccactcaagattccctcgactcctcaccatattgatacattttagctcagaaattaaaacagccttgattagtgcaaagctaagaaacttctgactgctataatttaagatttgagcagtgggtggcggcgcgcacctgtggttccagctactctggcggctgaggtgggaagatcacttgagcccgggaggtggaggctacagtgagctatgatcacgtcactgcactccagcctgggcgacagggcgagacactgtctcaaaaaaaaaaaagttttttttcctatccaagtttagccttaagatatcatcttgcagcaagtacctttgctgcaaataaaaattcgcgatttttaaaagggacaagagagagtcaatgtcttttttttttttttttgagacgaagtctgcccaggctggtctcaaactcccggcctgaagcgatcactcctacctcggcctcttaaagtgttgggattacaggcgtaagccaccgcgcccggtctactccagatctttaaaatcgcttttcagcgcccgacgactcctggagtgaccagactctgaaacgcgctctgggtcttggcgagaatctgaataaccaccggggtagaagaaagaggcggacactagggccagactaggtagaacccgaacccagcagattccggtttccgggttggcgtgcgctgccgtaccggtcacgtggacgtttggtcacgtgactgcgtccgtggtcctcccgtaggaaccggcggactcggttggcgttgtggggcagggggtggtggagcaagatggcggctcatctgtcctacggccgagtgaacctaaacgtgttgcgcgaggcggtgcgtcgcgagctgcgcgagttcctggacaagtgcgcaggaagcaaggtgaggggcgggaggcagcgacaccgccctcgcctc

SEQ ID NO: 10720 - DNA, 2300 bp, Homo sapien
gtgtataaatcacaagtcaaatttctttcttaaccatgcacgtgttggtaacttgtataagaagcattctggcagcgatctccttagaaagcagccaggctgagaggttgtgtgtgtgtgtgatgatgagcagagtttgtttggtggccccagagaagggcacctgtccctttttccttctgccagctggaggtttgtttatccctccccagcactaagcatctgtgggatcttggccaaatagagtcctgattatagggaaatctaaatctcttcttgataacccaaaatcctggttttttttagtaaaaacatttaaaattacattttttcaaatttgagttggatttatagcaagtgaagctctggaaatcattttttttttaacagaatcaactactaaatgcatttaatagaaacataagaaacccaggattttttttttcagacggggtcttgctctgttgcccaggctggagtgcagtgacactatcacagctcactacaacctcaagctcctgggctcaagccatcctcccgcctcaagccatcctcccgcctcagcttccctagtagctgggacaacaagcatgcgctgccatgcctagctaattttttttttttgtaagtttctgtagagacgggggtctcactgtgtcaaccaggctggtctcgaactcctggcctcaagcgatcctcctgccttggcctcccagaatgctgggatgacatggatgagacaccgcgcctggctgaaacccaggctttattgcatctttgggtgacatcagatatttttacttcccaggtggcaaaaagcacctgtacattcctttcatttaagttgctgttttaacctaagcaagagcctatgtcctaacaaggttactagcttagtaatttacccgcactgatgcccacccgttgccagtgcgtgagtaatgctggggtttttaattcaagaaatttctgtctcagattcttttcttactacttctcattctggagtgtaagtgtaagccacacaatgagataaatacaacacttatattttcatctttgtgtagagtttcaatttgccataagtcatgagatttctgtaacttgtgtgccggatatcttgggtctcactaaccagacatacattctgccgtttctaacctgggcctcagttttctgttcctccagttggttccaaaacagacaaccagtacatcctctgcattttcccagttccttggaatagaaccaggtgtgatttggcttcttgttaaggttatgaccactcactggtgactgtggtaatgtagtgtcttaggtcatatggcctgtggcctagcctaggaaacttttctccagttttgtttttcctaaagtatttttgtcattttcctctcgtgtttcacactgcatgtcatttaaaaaactttttattttaaaataattttagatttccagaagagttgcaaaagtagtgcatccagttctcacagaccttcccccagaggcccctaattgaacatcctacacagccccggcacactcatcaaaactgagaaactcccatgagcagcatactctcagctgaaacaagggacttcattcagatttcaccagtttgctcactaatgtccttttgtgttacagcatccaaactaggatcccgccttgcagttagttgtcatatctccttcgtcttctctatatgtgacagtttctcagccttttcttgtatttaatgaccttggcattttgaaatgcatgtagtttttataacaaaactttcagtatggccggctcacgcctgtaatcccagcactttgtgaggctgaggtgggcggatcacttgaggtcaggagtttgagaccagcctggtgaccaacatggtgaaaccccatctctactaaaaatacaaaaattagctgggcgtggtggcaggcgcctgtaatcccagctactcaggaggctgaggcaggagaatcgcttgaacccaggaggcggaggttgcagtgagcagagatcgcaccactggactccagcctgggcaacagagcgagactctgtcaaaaaaaaaaataaaaaaaacacacaactttaaataggtacacatatgtaaacacatgctagcctgctctttgggctgttttcactgtgtcctgcgttcctccctgttcctccttcgtctttccctttctcttctcactcccacaaccctctcattaaaggcctcatccccgccctctgctgataaccaagtgctgagtcaggccgagaacataaaccaggcgctctgaatttct

SEQ ID NO: 10721 - DNA, 2300 bp, Homo sapien
ttttaataaaatgatcagtaggccaggcgtggtggctcacgcctgtaatcccagcactttgggaggccaaggtgggtggatcactggaggtcaggagttcgagaccagcctgaccaacatagtgaaaccccgtctctactaaaaatgcaaaattagccaggtctggtggcacatgcctgtaatcccagctacttggaaggctgaggcaggagaatcgcttgaacctgggaggtggaggttgcagtgagctgggatcgcgccattgcactgggcaacgaaagcaaaactccatctcaaaaaaaaaaaaaaaaaaagtttagtaaattaattcttcattcttcaattgaggctttcattctacaggtgatgtgttattcattgaaacatttgataggtaattttagaccttttatgcaagtgctgtccaatagaagtataatgtaagccacacatgtacaatttataattttctggtacccacattacttttttgtaagtcacaagttaaattagttttaataatatattttatgtaactgatatattcaaaatattaatcaaaataaaattattaagatattttaaacattttaaaatataatttcagtttgtttttttttttttttagagacagagtcgtgctctgtctcccaggctggagtacaatggcacaattactcactatagcctcaacctcctagactcaagcaatcctcccgtcttagcctcccaagtacctgttaccacaggcgacaccaccatgcctggctaattttttattttttgcaaagacggggtcttgctgtgttgccgagactgatcttgaactcctggcctcaagtgatccttctgcctcggcctcccaaagtggtgggattacaggcgtgagccactgcacttggcccacaagacattttgtgatccttttcttctaagtcttcaaaatctgatgtgtattttgcacttataccacacctcacttcagatgagccacatctcaagtgctcaatagccacgtgtggccaacagctactgttccggatggcacagttctataagatcacctccatgaaatggataagcatttatgcaacctggatgaagtggggtaggacaaactggcaaaataaggaaatgttttctttcaggaggcagttatatctgtgaactttgaaagttactgtttctgttaacttatcagttaatggatatttatctgatttaagcttctttagaattggagatactaaagttggacttaagccattatcacagttagaaatatatattaacctataaacgttcataatagtttgctgcctgagatggggtagttattaaatatcttcagtgttaaagaaaataatcaggccaggtgcagtggctcatgcctgtaatcccagcactttgggaggccggggcgagtggatcacctgaggtcaggagtttgagaccagcctaaccaacatggtgaaaccccatctctactaaaaatgcaaaaattagctgggtgtggtggcgcatgcctgtaatcctagctactcaggaggctgaggcaggagaatcgcctgaacccaggaggtggaggttgcagtgagctgagatcgcaccattgtactccagcctgggtaagaagagcgaaactccatctcaaaaaaaaaaaaaaaaaaaaaaaaaaaaaaaaaaaaaagaaaagaaaatagtcaatgacttgttatttaaatgatctttttttctttggactgctgttaataggtggctacagtttcagaaaagtcacgtataatggaactggagaaagacctagcattgagagtacaggaagtagctgagctccgaagaaggctagagtccaataagcctgctggggatgtggacatgtcactttcccttttgcaagagataagctctttgcaagaaaagttagaagtcacccgtactgaccaccagagagaaataacttctctgaaggagcattttggagcccgggaagaaactcatcagaaggagataaaggctctgtataccgccacggaaaagctttccaaagagaacgagtcattgaaaagcaagctggagcatgccaacaaagagaactcagatgtgatagctctatggaagtccaaactggagactgccatcgcatcccaccagcaggcgatggaagaactgaaggtatctttcagcaaagggcttggaacagagacggcagaatttgctgaactaaaaacacaaatagagaaaatgagactagattaccaacacgaaatagaaaatttgcagaatcaacaagactctga

SEQ ID NO: 10722 - DNA, 2300 bp, Homo sapien
gatctcggctcactgcagcctctgcctcctgggttcagccaattctcctgccacctgagtacctgggattacaggtgtgtaccaccatgcctgacctctgcctctgttttcacgtggccttctttctatgtgttctcatctttttttttttctttttcgaggtggtgtctcgctcagttgcctaggctcactacaaccttcatcttctgggatcaagggattctcgtgcctcagccttccaagtaactgggactacaggaggcacgcgccacaacgcctggctaattttttttttttttgagacggagttttgctctcgttgcccaggcgggagtgcaatggcacaacctgggctcactacaacctctgcctcccgggttcaagcagttctcctgctgcagcctctcgagtagctgggattataggcatgcaccaccatgcccggctaattttatatttttagtagagacagagtttctccatgttggtcaggctggtctcaaacccccaacctcaggtgatctgcctgcctcggcctctcaaagtgctgggattacaggtgtgagccaccacgcccggccataatttttgtatttttaggagagacgaggtttcaccaggttcaccaggctggccttggactcctgacctcaagtgatccgtccaccttggcgtcccaaagtgttgggattacaggcgtgagccagtgcacctggtcacttcttcttatagggatgcttttcattgggttttgggcctaccaaggtaatccaggatgatcttatctcaagattcttaattatatctgcaaagatgctttttccaaataagatcactttcacaggtgctgggggacatgtctttgggggagggcactgttccatccgctggagtgggctgcatgtacctttgtcatccctggccagattctttgccagtggctggcgttggctgtgagggagacaagatgagaaagtgaggtctgtgcttcatcatccaagctctgctcgcagagaaaaatgcagaacattgtcatttgacagagtcattaaatggcagcatttttctctttgaattgttctgtttttaggtattatgtctgaaaatatttccctatattccaaaaccccaaggtaatttcaattcactttctatggaggtgaagagaatatgacaggatactattttaccttagtccaaaagtcatagattcatatctggtcttgagtaaaccagcagtatattgtttttttctagatagaaacaaggtaattttccctcatcacttcccaggtagggctttttcttacatagttttaatcttcctgtagtttaacatatatatagttttatattgtaaattgcataattctgtggatttaaaaaatatagctaatacaggcttgttgtagtaaaacttaagcaatatagaaatgaaagtaaaaaactgaaagcttcctttttctccccgcattgtttggtgtagatttttctgaaccctcttttatggattgtgtgggttttaggaactgtactgagctaagaacattagatatataaaacaaagcaaacactttgtttgtcttaattgcttatttttgtttttgtgttttttgtttgtttgttttgagttggggtcttgctctgtcacccaggctggagtacagtggtgtgatcgatcatggctcactgcagcctcaaactcctgggctcatgaaatccttccccctcagcctcatggctaatttatttttatttttatttttgtagagacagggtcttgctatattgatcaggctggtctcgaactcctggcctcaaacagtcctcctatcttagcctcccaaagtgctgggattacagatgtgaggagtgggtcatggcacctggctaactgcttgtcttgaggatagtaaattgcctttaaatccatttcagcagcattttcatgtgtttaataaccagagtcttctaggttcctaggttcagcctggagatggattattgtcaaatgaaaggaaagctttagtctatgaaagctacctgttgttcctacttgctcctgtagattataaaatctttttatttctttctctttgcagatttaatccagagactgacttcactatagaacccacagttgtatcaatggttggggaaagatagtggcaacaggcaaaggagaaacagctctgacatacaaagaaaatgagtatgctaaagccaagtgggcttaaggcccccaccaagatcctgaagcctggaagcacagctctgaagacacctacggctggtaatac

SEQ ID NO: 10723 - DNA, 2300 bp, Homo sapien
gtctggctctgtcgcccagactggagggcagtggtgtgatcttggctcactgcaacctctgagattacaggcgtgcaccactatgcccggctaatttttgtatttttttgtagagagaggtttttgccatgttgcccaggctggtctcaaactcctgacctcagatgatccacccactttggtctcccaaagtgctgggattacaggcatgagccacacgcctgaactcttccatcttttgattctgttgtcttcagtacatgctttcgaggttgctgggcttgtctccatcaagccatcagaagggcaaagagcatgggggattgtacacagtaggttcctctgggctaggcctagagtggcacatgcctcacacacttattccactggctagaactcagtcacgtgatcatactgaactgtagcgggagctgggaaatatggtgtgaatccaggaagaaaaagaggccaggcacggtggcttacgcctgtaatcccagcactttgggaggccaaggttggtggatcgcttgcacccaggagttcaagaccagcctaggcaacatggtaaaaccccatctctacaaaaaaaaaaaaaaaaaaaaaaaaaatttgccgggtgtggtggtgtctgcctgtagtcccagctacttgggaggctgaggtggaaggatggctggagtctgggaggtcaaggctgccatgagccatgagtgcatcactgcagttcaacctgggcaacagggcaagactctgcctcaaaaaaaaaaaaataaacaacaacaaaaaagtcttggtgaacagctagccaccctctccccctctccatatgtattcacttccatcctggcttggctgtactgcactcttgtttctgtggagaaagcagctcagtagagtctgtttcttcactctttcggttgaagccgttttactgtggctcaaaagaattttttttctgcctgtgaaattaattatacctgttcattaaataaaatttctatagacccaagaaaacacagataaaaattaccagtgattccattgagataattgttctgagtccctgttacagttcccttcaatttcagaatttttaagcacttagaaataataaaatgtcactaattcttactctgtgctggcttgcaaacttcaaaactcttaagagggaggaaacaacagcctggccattttgccttttcctcacaaagatacacagggctattccggagctgtcccgaggctttattcttctggcattttcaaaatgacttagacatcttaatctccacttctccttagtaaacagggtaaatattggggctggtgaactcaatagtttattaggatggcaagggtaacattttaagtttatgatttattttctactcagttatcaggattcttttttctttcctttttctttttttttttttgagatggagtcttgctctatcgccaggcaggagtgcagtggcacgatctcggctcactgcaacctccacctcccaggttcaagagattctcctgcctcagtctcccaagtagctgggactacacgcacgcaccaccatgcccagctaatttttgtattagtagagacggggtttcaccatgttggccagggttgtctctatctcttgacctcatgatcagcctgccttggcctcccaaagtactgcgattacaggcgtgagccaccacgcctggcggggatgcttaaatgtagcccaatcctccagtaaagaatactaagaaaaagtgtttggaaccgaaccaaaataaaaacttgcgtaccagaagtttgcaggtaatacagatatgcgtacatgactggtgttcagctatttaggtggacttgcttgtctctgcttacctgtgttgctgatgctggtcagcagtggagaaaactgagattagatgctgctaatctcagatgggaggataatttcttaggaggaaggacatttcttgagtcatcagctccagattcctttaaagtggtgaggcttcagcccagagggcgactaacatgagaattcctgtttgtgaggtcattgtcatgacctcatagccaggctgttcaaaatgtttgcccagcttctggcaggatatgagctgatgcctgccccgattctacagacaccatgaggtactattttcatattctagatttgtgttgattttcttcaacttcttatagataaaaagtaaagacattgacaccaggccctctttattttgctgaaagagatcgtataatgatgagaaaattattgtgagtatcctctggcagg

SEQ ID NO: 10724 - DNA, 2300 bp, Homo sapien
ggcgtggtggcgggcacctgtagtcccagctactcgggaggctgaggcaggagaatggcgtgaacccgggaggcagagcttgcggtgagccgagatcgcaccactgcactccagcctgggcgacagagtgagactccatctcaaaaaaaaaaaaaaaaaaaaaaattaacgccaagactccatgatgaacaaaatgatataattataaataaataagcaaatgatgaacatgacaatgacatagaataacccatgagaacaagcaaatatacacacacacacacacacacatatatatacatatatatatacatgtgtatatatatatatattttttgagacagagtctccctccggcacccaggctggagtgtagtggcttgaactctggtcacagcaacctccgcctcccgggttcaaacaattctcgtgtctcagcctcccgagtagctgggactacaggcatgcaccaccatgcccagttaatttttgtattttttgttagagacggggtttcaccatgttggccaagctggtcttgaactcctgtctgcaggtgatccacccacctgggtctctcaaagtgctagaattacaggcgtgagccaccacacccagccccaaaacaatatttttaataaagacaggctcagcctactgagtagagaagaaaagacaagcccataagtgttcctagctgaactcccccattagaagtggtctgtgcctcatcctatgacatctatgattccacagcttgctgattacagctgaagactgtttagattagggggtgaggcgcgcctttcagattaggaatatggatatgggatttcaggagtaccaccaccacctgaccttgcagcctgtaaattagggcgatgttgaattaggtaacagcatttcgagggatttcagacatgaatggagaggaggggccaggagacaaatttacatagttcagaacttcgtgcattaccagagcagttccctcttcctgctggtccaggcagcacggtgctttgaataaaggtcagctagaggggtcacccgccgattattctcttctactggcaaggaggaggaagcccctgcccccttatccaccacaaaatcctgggcttccccgacagctgcaaattcctccctggagatgtaaggcttctggggttgccatggtccatgggagtgaaatgctggccgccctctgctaccccagccccgagcaggctgttgcagccttccctcctgtccctttcaaaagcttttaaaggaaatcccaggggggaaggaggatgggacactaaccagggcttccgtccaagcagccagggcgaataaaaggggcttttctcaaacgaacggagcaaaccctgggatcgtttcaaaggatttttaacccgcggtcgttcccggagggaagtggggagcagatacagttcttcccaagcttaacctgctctacagttcctttcagcattttctccagggacgcctcatccagggtctttccctggagggaggcgagggcagagatgatccttcccaatccccaacttaacctgcttcggaagcgccttgcagcctgtttcaaaggatttctcacccttgtctggcgggaaggggagggcaaacaaatgaatcagccccaaagagcgggctgaggtcgaggctgaatggggctcttgggtgtgacttgcaaattctgggaacactttgcagaaatgacgagaagcccctcggagcaggcctgtgggttttccctcgcaccttgctccccaagccggggctcgggagggttcgagggcggagcggcgggcgcgccggggccagggtcctcccggggccgcggtgggcgcagacaaagaggcggcggggcggcgcggggccgggcgcgggccgcagggccggtgcggactcgaggggccgggccggccgggccggccgggcgggcgcggcggcggagcgctgggaggagccgcgcggcgtcttctcctggcagcgcgcgcccgcccggccccgcggcggcggcggcgcgtcacgctctcccccgccccgagccgacgagccgggaggcgggaggcggcggccgcggcggctgctgctgctgcagtgggacaggtggcggcgaccggcggcgtccgaggaggtgagcagggggcggcgcgggccctctccctttcccggcaccccctgctcccctgccggcttcccggcctgcggggcccgcccagggtcgggtcgggggtcgaagcccggcgtccgggagcggggccgagcctcgcgcgccggagccgtcc

SEQ ID NO: 10725 - DNA, 2300 bp, Homo sapien
ctggtgtggttgtgcgttcatgtagtaccagctatttaggaggctgaggtgggaggatcacttgagcctgagaggcagaagctgtagtgagccaagatggtgccactgcactccagcctggtgacaaagcaagaccctttctcaaaaaaaaaaaaaaaaagttctgtcctaatgatttagaaaaattataatgaaaattgaaagccatttcaaaactaattctgttgccatgattataagcactttccaggtgtacttttggtctggggagggatatatattgacatttagcaatattaacactttttatggtctgtaatagatggcactgatggggaaacagaagttggagaaatacaacagaataaaagtgtcacttacgatctctcaaaattggtcaactatcctggttttaatatatctactcccagaggaattccagacgtaagtatattgatttttttaaattatcatgtgatgtgatattattatgttaaagattggtcaaaatattaacttgttggctaggcatagtggctcacacctgtaatcccaacactttgggagtccgaggcaagatgatcacttgagtcccagagttcgagaccagcctgggcaacatagcaagaccttgtctctatgaaaaaatttaaaaactagccaagggtggtggcacatgcctgtagtcctggctactagggaggctggggtgggaggattgcagaggttacagtgaggtgagatcacactagaccctgtctcaaaaaataattagttaattcatatacacctacaaacttatatagcagttactatttaaaggaataaatttgttacttgtttacatttttaatttcttttatagaatctttctagaatcttaattgaagtcttatattcatcaacagcagttttctctgattttgtgccctcagaaagggagccaaaatagattggttagagtatctaaatctaaaagtactctaacattttaaaagtttttaacaatatggatttttctgagacagtattattaattttacagaattaacttgggaaataagtttctatctataataaatctaaatatattatcactctttttcctgattattcttgccttttttcccctcaaagtaaaatttctcattttttatatgaatggtttttccatacttaactcttttccagcttccatcttaggtctcaggattcaacaatgaactattgtactgttttatttaaaaagcatattcttggccggcgcagtggcccgtgcctgtaatcccagcactttgggaagccaaggcgggtggatcacctggagctcaggagtttgagaccagcctggccaacatggcaaaatcctatctctactaaaaatataaaaattagctgagcgtggtggcaggcgcctataatcccagctactcaggaggctgaagcagaagaatcacttgaaccaaggaggtggaggttgcagtgagccgagatcgtgccattgcactttagcctgggtgatgaaagcaaaactccatctcaaaaaatataaaaataaaaagtgtatccttggtgttcttaggaactggacagtagggaaacagccaaagacttgaagttagagtctagtgagcagatagaaagttctcaatcacgcaagactgtgtaattcattacgggcggaagtgcatgatacaaaccatcagtgcttctggaagccagtccagcttccagtctacttcagagtcccctgggaatactcgttagaaatgtacattcttgagtcccacccttagacttaactgattcaaaacctagaacctgtatgtttcacaagagttccatgggattcttaccgagaaccactgttgaatgtgcgattggagatgagagagaaacaagctgtgtggaatctttaaagatgatgctgtatttggaaagagaaagagcagaagatagaaaactcatgagtaagtgtgttaggagaattgggcgatgaatggccctgttagcagtgccagtgcttgatgggagagagactggagcctgggaggccccatagcagtcactcctgcctacatcttctgcttgcagtatgtagaaccttttttggccaagtgattgtgtcaggtagtcttttagtattcagtcttaattattttgcaggcaagtttagttttccttcaacacattattttccttaatttccaataaaggaaaagtaacataagaaggaaaaatgtaatttgagatctccactgtacctcctttgagcaaaatctcaaaacatgacattttcc

SEQ ID NO: 10726 - DNA, 2300 bp, Homo sapien
gcatggaggtcattgggaagctccattgttaggagctcagcccagtgatatgtatagaagcattactggaaatgttcaagagagagggcagtgtcattaaaaaaatggaggccaggcacagtggctcaacacctgtagtcccagcactttgggaggctgaggcgggaggattgcttgaggccaggagtttaagaccagcctggacaacatagcaagaccccatctcaaaaaaaaaaattagctgtgtgtagtgacacaactactcaggagactgaggcaggaggatcattttagcccaggactttgaagttacagtgagccaagatcatgccactgcattccagcctggacaacagagcaagaccctgcctcaaaaaaaaaaaaaaaattaaagagtatatgtgaggccaggtgcagtggttcacggctgtaatcctaacattttgggaggctgagtcgggtggatcgcttaagctcaggagtttgagaccagcctgggcaacatggcaagactgcctctactaaaaatacaaaaaaatagctgggcaaaaaaatagctgaccgtgcttgtggtcccagcttctcaggaggctgaggtgggaggatcgtttgagcctggcaggtggaggttgcagtaagccaagattgcaccactgtactccagcctgggcaacagagaccctatctcaaaacaaacaaaaaagtgtatgtgtgtgtgttcggtgtatgtgtaaagagagagagaggcagacaaaaatgttaaactattaacagttgtttaggtgaaggatacattgggtattcattgtaccacttttccaacttgtctgtatggaattttttcaaaaagaactggagggataagaaaagagtaaatgggaagaaaggaaatggaaacaataactaaagggtctgcatgtcttgcaaagagaagcaatgaaatggggcattggagggaaatatgagagtcaaggttttcattttttgtttgaattctgtagagaatgcagctgatagtcatgatccaatacagaggaaaaactgatctagcagagagagggaactgacgatgtagtttctacttacacatcaaagtctggctccttaataacaaggaagttattatttctaataattccatccaaaaataaattgttaaaacagttaatcataatcttacattatttaatgtctttttttctgcttaaatagcaatattttttgacttgttttctgcaggttgtaggaagtgtcctgtattttactaatttttgccttgataaattggggcaaccgcttctaaatgaaaaccctcagctttccgaaggatgggaaatacccaagtatcctacatagtgaatgaagatcttttatgcatcttgccactaagttcacctttaaaacaatttccaaattttgcagaccatgataactattccttaataaaattcactaaaggtaccatcaagtcttcagccacattgtttctctagaagggcaagaaatacaagtaaaggcaaaaaggtttgtgtggggagttgttttgttttacttatttacttttttaaccaaaatcataaacttttggcttgaaaagttcatgttctttactgctggtttactctaaggttaattacagattgagctagaattttaatccatacatatatgttaaatgtttaaatgaatcatctgcttcctggaattcattggttctcacctaatgtgcctgggtgggtggaaaggtataattgttgctgtcaatttgattgcagtcttataaccatctgccttctttccatgttacctaacggaaatatgatcaatgtgttcaccttgattcttcgttgttaaccactgaaaaaactcaaaagaggtaacagatcagtcaggaacagaagggttcttggttaaaagactctgcatagtactatttaaatcactaaataaaggagattaaagtgtacttcttgttgcagatattagtgatctgtgatcaacttgctttcttgtctctctgatacactttgctgtcatatagaattttattgatttgcttttctatttttattgacattataaaaatctttgtcttttgaccaaataggccaaagcctcactgtttcaattgtggttctgaagaacaccaaatgaaagattgcccaatggtaaatttttctcatgttaagaaaagtctttgaacaagagctttctaatgttttcaacacatttatgttattgtatgacatgaaggaactttctttgttcctttaatttgaaatcttgtgtcctttaatttg

SEQ ID NO: 10727 - DNA, 2300 bp, Homo sapien
atcctagctcactgcaacctttgtctcctgggttcaagcaattttcctgcctcagcctcctgagtaattggaattacaggcacccgccaccacgcccggctaatttttgtatttttcgtagagacggggtttcactatgtcagctaggctggtcttgaactcccgggttacaccatgttggccaggctggtcttgaactcctgacctcatgatccacccgcctgggcctcccaaagtgctgggattacaggcgtgagccaccacgccaggcctcatgcagatttttcagtgaaagtaaacctgggaggcggaggttgcagtgagccgagatcatgccactgcactccagcctgggtgacacagtgagactctgtctcaaaaaataaaatttcaaaaaaaaaaaatttaaatggccaggcacagtgggtcattcctgtaatcccagtatttagggaggcagaggcaggaggatagctttagctcagaagttcaagacctacctgggcaatatagggagatcctgttgtccacaaaaagaaaaaaaaaatgttaaaatgtgtaagtgacttcccaatgttgtaaacggaaagaggcttccttaagggcctttgagcactgacctagcagtgttccaacctcatcttgctccactctgccttttcactcaacatggtggtccttacacctaagacactcttccatcctcccacccccaactttgccgatccttaaagtctcacttcctcactttactgactcccacagactagggtgtttgttaaatattcataacttcctgtgtttttcacctttttttttttttttttttttttgagacagagtcttgctctgtcgcccaagctggagtgcagtggcacgatttcggctcactgcaacctctgcctcccgggttcaagcgattctccttcctcaacctcctgagtagctgggattacaggcgtgtgccactacgcctggctaatttttgtatttttagtagagacagggtttctccatgttggtcatgctcgtcttgaatttctgacctcgtgatccacctgcctcggcctcccaaagtgctggggttgcagatgtgagccaccgcccccggcccacatttctttgtgtgatcaatatccatcaacaaccatctcgacccaagaacaggaacatttataattatggggtttttgttgctttttgtggactacagccttcgtgagaggaggaattactctattgtggttactcttgtaaccatactcaggtcctagacaagtgcctggcccatcgaaggtgtaagtaaataatgtgattgaatgacagaaagcctcaacagacaaatagttgagtctagctaatcttacattaaaaacgaagcaagctcaataaactaatctacaacagtcatctctgtagcaaagctggagtttcttattctcttttatgtttatttttattcagttccctttcaggctatggagttccttattctctggtgtggcacgcacaccagaatctgtgagaagctatgcgtcgtgctctgatttttcacccttagttgcctaacaggaacatcccatactggtttttgtttttctttttctttttgagacagggtcttgctttgtctcccaggctggtgtgcagtggcgccatctgggctcaatgcagcctcgacctcttgggctcaaaccctcccgcctcagcttgccgagtacttgggactacaatcgcccagctaatttttatatttttttgtagtgtctgggtctcgctctgttgcccagggtggtctccaactcctgggctcacgtgatcctcccacctctgcctcccgagtagttggtattacaggtgtgagccaccccgccctgcccccagattgctttagcgcattctgacctactccagctttcttcacatttcaaaaagcaccaatcccaggatgcaatgcagacaatgagtaccagtcgcttagaaaccacacgtcccagcatgccgtcctccgggcaatcgcaagcccgataggccccgctgcattccgggagttgtagtctctagcgactggccccgccccgtgtgcagctttcgcggcctgcgtctggagaaaaccctagcgggtggctccgtgcggccagagctctagagagtggtgccgccttccaaccttcttccccaagccctggtggccggctccgcctcttctcgaatcttttccacagcccaaaatggccgcagaggtgtattttggcgatctagagctcttcgagccgttcgaccacccagaggagtcgatt

SEQ ID NO: 10728 - DNA, 2300 bp, Homo sapien
gtcccgagtctcctggtgcctgacagttgctcaggatttttaaacagcaatcatctttacatagcaataccctagatatctgtgcgctgctttttccttatgaacgataacaggagttctcttttcttttgcaaactagttcagtttccctaatagtagtattgaattttgaaataaaggtttgagtgagggacagctgaaaaggtggcggtgacaccaaaacttgaggaaaaagaaaggcagcagctgtattgcaaaggagttacttgttcacccacctgagaagacaaagaatgagccaataaggaagtgtagaagtagtagccagaaagggagaagagtcttgtgggggctgggtaagggactcctaaaacaagagtgggcagggacttcacctcttcccgtaatggaagctctgttaaatttttaatttaggagagtttttgtgaaaatgactattttgtttagctcacatgataacatttctataataaatcatactcagcgtgcttatgcgcgaagagactgaactgaagacgctgcagactcagatagcaaaataataagcctacttcatgataaggtaactattagtcattcaaactcctatttcccttaaatatatcttaaatcagttaagggttttaatgttttttttaaattaatagtaatgttatgtttgaaaaactggtttgaaataaactttaaaacctttagaagtttaaccacttaagacttttccagtctgcctcgttatagcaaaaccaaggaaaatttcttttctaagctcctatagagaactggcaatgaaactaaaatttaattgtgtctccaggtctcttatttttctgcaaataataaattatgtactatgatcattttcagataaatcatcatgcatgttccaaaatgattggccaagttttatttttaagaaacattaatcgtgagtggaaagaaacatgctatggccttttgggagacagtagtgtcttattacagtggaaaagtggtagcgtgggcatcagaaaaacatggggaaggttcagctcacccatgtagctttgtaactttagatcttagttatacataaaataaggggattaagttagaggatcttagtttccttccagaattaaaatttagtgattcagagatgtctaggattttaaactttcactacaagatgaatttgacagatcttcctgtagggaactgtagtatgtagcacttctactttggtatttggtaggatgagacttgatcatgcagttaatttgagctgagtctctgaatgcacatgtgaaggccttggtctttttaaagtgtgggggcagtatgtattgtgtgatggcatgtggattgttatacctagtttggtttctttaaaattgaaacatacagttgccatttctaccctaggtacatgaagtgtaatactcctctaagcctattgggatactgcaagatgaaaagtgattgcttcacagtttagacattgggaggaaaatcaagagctgtcttttagaggatgtagcaggcagtataactgtaaaagggacactgcatctctgtgtaaaataatttgaaattatagaaaatattagtacttagtaataattatatttagctacctaattgaaatgcgtttctggtgcactttttgtgtcattatctccattacttacttaaacttaacattatgtaatctggatttagaagttgatgtatatacatggtctgtattcttttagataaacataagggattcctcttttgtctggcataatggcttttcaatatttcaactttaaaaatcattgtttctgttgtattgaaaatattttggggaggaactacattttgggtgtttatagtaaaaaaaatagtaattacatctgcaacatttgggtgatgtgaaactagatcttttttttatttgccacacactcctaaggttactaatgttgcatcacaacatttttgtctactgatacccatactaactctctttgttgcactattttcctgaaagaaccaacttcttcttaaaacagggaagaagacatgaatccaaagataaatcctctaagaaacataagtctgaggaacataatgacaaagaacattcttctgataaaggaagagagcgactaaattcatctgaaaatggtgaggacaggcacaaacgcaaagaaagaaagtcatcaagaggcagaagtcactcaagatctaggtctcgtgaaaggtaagtcatgttgtattataatgtagtaccttctaacaagttacataaagtt

SEQ ID NO: 10729 - DNA, 2300 bp, Homo sapien
tttgcaacaaaatgtaaattataagaaaccaaagtggctacctcgtagagccactgctggaatagaaggctgttttgcagttaacgtttatgtgtacacatagattagtactaaattaaagcttagaaaatttcagagcaattttaatactcagtttttggtaggtttttttcctggatacctgtattatgctactataaaatatcctcagggaaataaaagttttccatggcctcaatgaccacctatcattcctatttgtttagtgttaagatggtttttgttgttgctctgtagtatattttacagatgaaaatggttgatgatgtaagtttaagttagcctatgtcacagggaggtttctctgttgtccagctttgtgatgttaagcatgaagttaaagttagataaaccattgcctgaaaactgcctaggctaagcactagattttccatgagaaggttgttttcgattctagtcttgttctctgcaaaagtaaatgggatttgccactagttaaggaattctgtctctggcaaaagtgtcgtgcaactgagagaagtaatagcggtgcttaaaattttcgagatcacttctgtttaccaagtgtaagctgtacaaacactcagcaagtaataaatgagtctgaaatagtcctcaaggataacgatgaaaaaaaaaagtgtccagaattcattgtgaaaaatcagaatcatccttaatgatacagcattatttattagtagtaaacagtaaagatacggagatgcagtatcattttaagcaagtcagctaatgttgctggatctcatctgtgaaacgagaaagttgaactctattctaaggggtgaaaacctttcagcataaaaattttatggttccagaagtcacccagactggagaaataagtacatatacaatatgctggcatgagagcctccctggtagttaatttcttactgttctttttgtgccattgttagaggaataacacgtaatttatgtctttcatctcataattgaactgcaaaacctttctgtttttaatttatcattttattccctaagtctagcattggttttggcacatttttgacccttagtaaatacttgttgaagtaactcgacctctcacaacttcatttattaaagtacaatacacccatttattgtacttgatacttgtttaaaatttgttaaaatacaatacccccatttattgtacttgatatttggtattcattttctggactaactttcctaaaggaggaagttctctaatgtgattcctcctgctgaagactatcgattccctatttattcaatccagattccgtttgatgttatacgtgaaaagtccataaactgtttctgtaaagggccagacggtaaatatttttggctttgtgggccatgtgcagtctctgtcacattctttcccaggctggaggggcagtggcgcaatcttagctcacttcaacgtctgcctcatgggttcaagccattctcctgtctcaacctcctgagttgctgggattacaggcacgccccaccactcttggctaatttttgtgtttttagtagaagcagggttttaccatgttggctaggctggtctcaaactcctgacctcaggttatccgcctgcctcaacctcccaaagtgctaggattacaggcatgagccacaacactggcgttttaagtgcctttagttttaacagttcagtctttacagtgctatttactgaagttatttattaaatatgcctaaaatagttttaaaaaacgtaaaaaaccattcctagctcaaggccatacagaaacagaatgaggaccatagcttgccaacccttcctaagtaatcaattccccaggtgtatcaattattttattttcatgttatcttctctggtcagatagccgagcattgtctaccttctgcattagttgaaacttgtaaaatttatattgtaataattacttataaaatgctttaaagcagaaacaacttaatgttttcatagcccagagcacatgtgaggagaggcagaccatattttgcagcagcactgtgccaaggggctgttttcattaaagagggttaatgacattaagatgaggttctcacttaggtaagttaattttctgtttattattttataatattcttagggcattgttttaagattttatcgtcttgagtatctttaagctttaacaactcatttttgatgtttgacatgtatgctaatttaaaagtattggtaaagtcagctaaatgcattcacacatctaaaa

SEQ ID NO: 10730 - DNA, 2300 bp, Homo sapien
ggtggatcatctgaggtcaggagttcgagaccagcctggccgacgtggtgaaaccccgtctctaccaaaaatataaaaaaattagccgggtgtggtggtgggcgcctgtaatcccagctactcgggagtctgaggcaggagaatcgcttgaacccgggaggcggaggttgcagtgagccaagatcgcgccatcgcactccagcctgggcgacaagagcaaaactccgtctcgaaaaaatacaaaaaaacctgcaacccaagaaaaatagtattactctttaagtatactgaggcccaaaacactaaacaaaggaagacagtaaaagaaacgggtttaaactcaatcacctaaataatagaggggtatgggggaaaaagaaaatcatctgcctaatcccaggcattccaatcgttaggaagagcaaactttaaaactatcactatgtttaagagtcataattattatcgaaaatgatgtaattttttagtcagtaaaaaggaatgcaaaatctttacattttccttttaacggaataaaaatgaggtaagcacaaaataatgtggatccgtcagaattgggtatcttatacacacgcaggcttattgttcagaatagataatttacgaactgtagctcctctggggtcaacgaagagttttttttttttttttttttttttttttttttttttttgagacggagtctcgctctgtcacccaggctggagtgcagtggcgggatctcggttcactgcaagctccgcctcccgggttcacgccattctcctgcctcagcctcccaagtagctgggactacaggcgtccgccactacgcccggctaatttttttgtatttttagtagagacagggtttcaccgttttagccgggatggtctcgatctcctgacctcgtgatccgcccgcctcggcctcccaaagtgctgggattacaggcgtgagccaccgcgcccggccaacgaagggtttaaatttaaaggaacaaggtcagtgacaagacttaactgtaacgcttctcggacttcaaattgattacatcacgggccacttcggaaaccgcgcatcagtcagaattggtagttccacaaccttttaagttgaattttcactccctttcagcaataccttcctagctcgttaatacacaataataaggtttacacggacgaacactaattgaaattatgcaactagaagcatctcattgagcgtacaaaaaaaaaaatagctacaagtcgctctcttctcccacactaccctttacagacactgcctttttgacccaatacttttcagagaccactcctgatcgtctttctcttccccagcccctttctccaccgcaaattctcaggccctaaaaaaaacttagaataaatcactagccagggtgaataagcgaaaatggaggaagttcagtgaggcgaaaggaacgtagggttggggaagagaggaggaaagttctggaaaaaaaaaggcactccctgcggctccccacccccaccaacaccgccttacttccccctccctacagcaggcagccatgatggcgggcgcagaagaaggccgcggcgccattttgtctacacacatacacacgaacaaggttctgggagccgttcacccactgttggaacgtagcagaaaaatatccctggctttaaactcagattcggtacctaccgccatagttcagagtcccggccgctagagcggcgcctccacttgtcgctttcaacagtaccggccgctccgaagcttcgcctcagactaaatcgctcgcgcgagagacccggatggcacaaaggcgaggaggcccggcgcgtcgcacagcttgctgggagaaaaaggggcggtaacaaaagtttctataacaacgcaattcgaggcggtgattgggtgttctttcataggggagtgtaaagaccgtgaagagggcggggccaagaatacacccccggaatgcgcagtcgggagaacggaatgggcggaactcagggtggggcaacttcctatttcgagtctaaagtaatcttggtctcttccggccgccgtaaaggggttgggtttagtgttctcccgccaatttaagcctgtggcatggaacctaaagactagaggcggttgtgtgagtcaggaagaggggccagatatctgagtgttcctctttagtttcttcaattgcaggtgaggacggggagctgcgctgtgtagggaactgggggtgggttcaggacgaagtagctgcagcctctgctcagttcctgttgttttccccttg

SEQ ID NO: 10731 - DNA, 2300 bp, Homo sapien
aggcttaggcaggtggattatctgaggtcaggagtttgagaccagcctggccaacatgacgaaaccccctctctactaaaaacacaaaaaattagccgggcgtggtggtgtgcgcctgtaatcccagctactcaggaggctgaggctgtagaattgcttgaacccgggaggcggaggttgcagtaagtcgagatcgtgccacttgcactccagcttgggcaacaagagtgaaactccgtcttggaaaaaaaatatatatatacagtttgccgtcaatatccatgtgttccacatccctagattgcacctacaggcatagcacatttacactgttacgcaagataagaaatcaagagatgatttaaagtatacaggcagatgttcctaggctacatgcaaatactatgccatttaatgacagggacttaagcatcctagggttttggtatctgtgggaggtcctggaaccaatctcccatggataccaataccaagggactaatttagttgtacccacctgaaggagttttctatttttcacttctggttttttgagagacgagggtctcactattttgccctggctggccttgatctcctgggctcaagcaatccttctgcttcagcctccaaatgttttgagttttaaatgttcacagaacaatgcttggttgatggcaaacattcaattttaggtgttagctaatttgttattgggctgagaattgaagatcatagttttataaatgtttaaagagttcttcctaagagcataagcaagggaacagaaacaaaacatgtttggagaatagagaagtttcagtggctggtgtttgggtgggagtgaggagatgaagaaggagggacaggttggaatgaatacctttatgggtctcaatttcccacatctgtgaaatagagaaaccgcccgtaactgccatatttacttattcaacaaatgtttattgaatacctatttactatgtgccagacacctttctaggaactgggaatatagcttgaacagaacacaaaatgtctttgccattatgaagtttatgtttttgcgggaaaaacggacaaaaataaaattgttaatacgtatcttgttatgctacctccacaaaaaagcaactgcacaaataattacaaaaagtgctaaatgatttgaaggaaacagtgattaaatggataaggtgaggcgtcgctgaagaaggatttgtttgggaagggaaggaggtgacatctgagctgagacctgaataacaagaagtacgcaaaacttaggcggaacgcgacgtaggcagagggaacagagtgcaaagactcggaggctgggtaggaagcgtttgatgctgctgccgggtcaaagcaaaagcagaagacagtgagggagagagcagtggagtccaataaaacctcgacctcaagattgaattttattctcagtacaaggggtagaaggggaactcagcaaacgagtggtctgattttataattttgagatcactctggcggcggaatgcagaacagattcgcgaatacgagagaatgagcaagatgaaacacttgtcagttaggcctccatacttaaacgctctccgctggacatcgccgccagcaaaaaccgactccaacctctctcctgccagcgtcaaggggaaaacaacaggaactgagcagaggctgcagctacttcgtcctgaacccacccccagttccctacacagcgcagctccccgtcctcacctgcaattgaagaaactaaagaggaacactcagatatctggcccctcttcctgactcacacaaccgcctctagtctttaggttccatgccacaggcttaaattggcgggagaacactaaacccaacccctttacggcggccggaagagaccaagattactttagactcgaaataggaagttgccccaccctgagttccgcccattccgttctcccgactgcgcattccgggggtgtattcttggccccgccctcttcacggtctttacactcccctatgaaagaacacccaatcaccgcctcgaattgcgttgttatagaaacttttgttaccgcccctttttctcccagcaagctgtgcgacgcgccgggcctcctcgcctttgtgccatccgggtctctcgcgcgagcgatttagtctgaggcgaagcttcggagcggccggtactgttgaaagcgacaagtggaggcgccgctctagcggccgggactctgaactatggcggtaggtaccgaatctgagtttaaagccagggatatttttctgctacg

SEQ ID NO: 10732 - DNA, 2300 bp, Homo sapien
ccatgttggccaggctggtctcaaatgcctgacctcaggtgatccacctgccttagcctcccaaagtgttgggattacaggcatgagccactgtacccagcctgacttcctttctttttgtgttaatatgtatatatgccacacaattaattcttgcactatagtatatagttagagctaaaacagaatcctttgagaaacttgcttggaggcccacagttttactcatgtcatttctaagaaaaggatcagtttctttctgttccaattttcccatcgtaaatgaaagaaagggaactttaatttcaaaatcttataaaattttgaccatacccctaccctttctatgcttttagtatcttaagagcttccttcttttttttttttgagacatagtctggttcttttgttcagcctggagagcagtggcgtgatctcagctcactgcaacctccacctcccaggttcaagcaattctcctgcctccgcctcccaagtagctgggactacaggtgaatgccaccacacccagctaatttttgtatttttggtagagatggggtttcaccctgttggccaggctggtcttgaactcttgaccccaggtgatccacccgccttggcctcccaaagtgctgggattacaggcaagagcatccttctttattaaaacaagactgccttgtgcagcttttaaaaacagcctttgatacctttttttagcatgtatgtttatcctcacaggtaattttagaggtgagaaaattgtagctctttatttttttatttttattatttatttttgagatggagtctcgctctgtcacccaggctggagtgcagtggcgcaatctcagctcactgcaagctccgcctcccgggttcacaccattctcctgcctcagcctcccgagtagctgggactacaggcgcccaccaccacgcccagctaatttttttttgtatttttagtagagacggggtttcaccgtgtttgccaggatggtctcgatctcctgacctcgtgatccacccgcctcggcctcccaaagtgctaggattacaggcgtgagccaccgtgcccggccgattgtagctcatttttaagggagtaattaatttaacaatgtagtgcagtgacatttttatatttgtaatctgtgctgattattgtaattgaataaaatttcaacatggcaaagtcttatcaagttttgatatatttttgtttttatacagttggatccttatgactatgaaatgattgaagttgtcttgaaagttatagaacgagctgatgaaaagataaccaatattaatattaatcaggtataacaaatatatcaaagatgtaaaaatcatctttctgcttttatttggatcataaatcatatcattatccagggcctttccaaattatccattgaattccctttaaactctgtggtttattttaggtttttaaaaatctttacaaatctttaaaaaaagaaaaagattttcatgacattcctattttatcacttatcttcatcctttttttgctgttttgaggtgatttaaataacctctcctgctgtcgaagagtatgaagtcactacagaactaattgtgaagaattaaggaaacatttgccatgtaggaagtgaaaaaggccatgggactgagagttaggtcagctctgtgtattaatgggtaggtccaagacctactcaattatgtctcagtactttcattaacttcttcatcgtttctgaattttggtcatagtggcttttatactttttaatttgattttagaaattaatattttagaaatattttaatattatgttaataagacttattatataagaaaatatatcaattcaaaagattatacaaagtgtcctaatataaaatataaacataggaaagataagagcgtagagaatttagatctgtagcctctatatttaaaatgaaatcaagtattttgaattatatctcaaattatttgaagagcagataactgtcaagctcttatttacaaaacatctaccaacaacagggcaccagtggtttctcctcataggattcctttaatcattgtatataaattatagtttagatgaataatgttaaagagaatactagaaaaggttttgatcctctttctgaaaacaagatggtctcaggaatggaaacttttgatggtatactattagatgattttatgacagtttaggattgggttactcttactggacaaaagttttttattttaatataggcattgagtattctgaaacatttgaagt

SEQ ID NO: 10733 - DNA, 2300 bp, Homo sapien
tgtgaagagtctataagctcctattattgaacctgcgtttgcagctaaagaaataaattgacatcttatggtggcagcgatggttcacacctgcaatcccagcattttgggatgccaaggcgggaggatcacttgaagtcaggagttcaagaccagcctggccaaaatggtgaaatccatctctactaaaaatacaaaaattagccaggcatggtggcttgcacctgtagtctcagctacttgggaggctgaggcaggagaatggcatgaacccgggaggcagaggttgcagtgagccaagatcatgccactgcactccagcctgggcgacagagcgaaactccatctcaaaagaaaaaacagaaaaaaaaaaaaaaaggaagaaatttacattttataactcaaagtagaaggaacacaatttagaaacctcctgcatggaagaattcataagaccaaaatattaaagggagaaaacattctataggatgacacccaatcgcactgacaagcagagaaacaatgtgtgcaatggtgtcccgctacaaggcggggttccatgtcctcttaggtcctgtcactctaagtttaattttacaaaaatgggggctttgaaaatatcacatacttagtgggggaggttttgcgtgtgtggagacagagtgcacaggaccgtccgtactttctgctccattttgctgtgaatctaacactgccccaaaaaataaagttcattaaaaaaaatcacggccaggcgcggtggctcacgcctgtaatcccagcactttgggaggccgaggcagacggatcacaaggtcaggagtttgagaccagcctggccaacacagtgaaacctcgtctttactaaaaatacaaaaaattagctgggcgtggtggcgcacgcctgtagtcccagatactcaggaggctgaggcagaagaattgcttgaacctgggaggcggaggttgcagtgagctgagattgttccaccgttctccagcctgggtgacagagtgagactctgtctcaaaaaaaaaaaatcacatcctaaggtcccaaggacataaaacaagttagagacctcatccagttttttgtttgtttcagggacctgcaaccaactttcttactgaccagtttcctgggctgtctagaacagacagcttatggggtactaaccccatgctctatcctaaggtacccctcttcatgcagagcgacacagaaaaacaaatttgtagcacaaagtacacccgatttgctacagcttacgactagcctcatgaatcctttttctcattaattcaaagtttgcaaaaaaaagaaatcacatacttaaaaataaatcacttgagcacagaagcatatcaaaatctaatataaacaaacaaaaaacccaacttatgttaacatgccactgaaactgggctcaagttttcaaatgtcttatgaaatattacactctccagcaggctattttttttttcctaactggagatgaatggcagagttctgatatggaaaagcactccatgtttgtacagaaaggtagcataggaaaagtggtcaaattcaaccagtctgtcctcatcaaacaggcaactactgtcttctcagcatttccaaaagaaatcatatgtctgctactgtttatgtcatatgcctgttaatttttcatgctaattcttagtgtttctggaaaacctcactgtttggcaccaaaaattgttattgctattgttgttgttttgttaattatgtcagccaagcagatgacggtgaattaattctgcaacgttgagtactcagttggcatacaagcacccagccttccaaagggatgtccttcatgtttcactgattttcgaatgacagtcggcttgcctaaacttatcctttacatttaagacattttgtgggttcccgtctgcccaggggattcttattacttgtttatgcaaacagcaggttgcataagagccttgctggcttttttttttttttttttttttagagatttcgtagtttcctggtaaccattcagtcatctatttcaacaccctgacatgacataaaggcaggcgtggaaccacacgttcaccacacagacacacacctccttgctggagcattcactaggcgaggcgctccatcggactcactagccgcactcatgaatcggcaccatctgcaggatcactttctggaaatagacaagaagaactgctgtgtgttccgagatgacttcattgtcaaggtgttgccgccggtgttggggctggagtttatcttcgggctt

SEQ ID NO: 10734 - DNA, 2300 bp, Homo sapien
actctagtttacttgaagactctataagctcctattattgaacctgcgtttgcagctaaagaaataaattgacatcttatggccggcagtgatggttcacacctgtaagcccagcactttgggatgccaaggcgggaggatcacttgaagtcaggagttcaagaccagcctggccaaaatggtgaaatccatctctattaaaaaatacaaaaattagccaggcacggtggcgggcacctgtagtctcagctacttgggaggctgaggcaggagaatgactggaacccaggaggcagaggttgcagtgagccactgcactccagcctgggcgatagagtgaaactccatctcaaaagaaaaaaaaaaaaaaaggaagaaatttacattatataactcaaagtagaagcaacatagtttagaagtctcctgcatggaagaattcataagaccaaaatattaaagggagaaaacattctataggatgacacccaatcgcactgacaagcagagaaacaatgtgtgcaatggtgtcccgctacaaggcagggttccatgtcctcttaggtcctgtcactctaagtttaattttacaaaaatgggggctttaaaaatatcacatacttagtgggggaggttttgcgtgtgtggagacagagtgcacaggaccgtccgtactttctgctcaattttgctgtgaatctaaaactgccctaaaaaataaagttcattaaaaaaaaaaaatcacggccaggcgcagtggctcacgcctgtaatcacagcactttgggagaccgaggcgggtggatcacaaggtcaggagttcgagaccagcctggccaacacagtgaaacctcgtctttactaaaaatacaaaaaattagctgggcgtggtggcgcacgcctgtagtcccagatactcaggaggctgaggcagaagaattgcttgaacctgggaggcggaggttgcagtgagctgagattgttccaccgttctccagcctgggtgacagagtgagactctgtctcaaaaaaaaaaaatcacatcctaaggtcccaaggacataaaacaagttagagacctcatccagttttttgtttgtttcagggacctgcaaccaactttcttactgaccagtttcctgggctgtctagaacagacagcttatggggtactaaccccatgctctatcctaaggtacccctcttcatgcagagcgacacagaaaaacaaatttgtagcacaaagtacacccgatttgctacagcttacaactagcctcatgaatccttttctcattaattcaaagtttgcaaaaaaaagaaatcacatacttaaatcacttgagcacagaagcatatcaaaatctaatataaacaaacaaaaaacccaacttattttaacatgccactgaaactgggctcaagttttcaaacatcttatgaaatattacactctccagcaggcttttttttttttcctaactggagatgaatggcagagttctgatatggaaaagcactccatgtttgtacagaaaggtagcataggaaaagtggtcaaattcaaccagtctgtcctcatcaaacaggcaactactgtcttctcagcatttccaaaagaaatcatatgcctgctactgtttatgtcatatgcctgttaatttttcatgctaattcttagtgtttctggaaaacctcactgtttggcaccaaaaattattattgctattgttgttgttttgttaattatgtcagccaagcagatgacggtgaattaattctgcaacgttgagtactcagttggcatacaagcacccagccttccaaagggatgtccttcatgtttcactgattttcgaatgacagtcagcttgcctaaacttatcctttacatttaagacatttggtgggttcctgtatgcccaggggatttttattatttgtttatgcaaacagcaggttgcataagagccttgctggcttttttttttttttttttagagatttcgtagtttcctgataaccattcagtcatctatttcaacaccctgacatgacataaaggcaggcacggaaccacacgttcaccatacagacacacgccactttgctggagcattcactaggcgaggcgctccatcggactcactagctgcactcatgaatcggcaccatctgcaggatcactttctggaaatagacaagaagaactgctgtgtgttccgagatgacttcattgccaaggtgttgccgccggtgttggggctggagtttatctttgggcttctgggcaatggcct

SEQ ID NO: 10735 - DNA, 2300 bp, Homo sapien
catactggaaaggtaggttgggaaccaactgtgaaggaccttgtacgtcaatccaaggaatgtgaccttcaacctagagcaagaggtgacaaactcaaaatcccacagagactaggcttgccaatgaggaaagccaaccaggtgtaaggcaatagggagtggtggggactgtggcaaacagtaaagctcattctctgtctacaggggctcattctctgtctctactccatctactctaagctccagctgattgtttccatgtgggagtgtcggtccagtgtggccagatcttccagtgttctaagagacaacagaaatccaggtttttataggactgcaccaggttttaaaaacatatcggccaagccaggctggtttttaaaccagatatggtccacaggccatcattctagccccttggcagattgaagggagctagtgaagatttttaagtgaaaaaaggtatatgataatatctgtgcttcagaaaaatcagattattgtgtagaagatgacttacaggaaatagatgagaggaagggaaaccagttaggaaactgtttcaacagttcaggtgggaagtgactgcggtctgtgctagggcgaggcaggggagaatgtgggtggacagatttggagtccagcatccagtgggaagaatttagcttcagtgtgcatctagaagacagacacattctttcaatgcaccccctcttttccgccccattttttttttttgagacagagtttctttctgtcacccaggctggagttcattggcacgatctcggctcactgcaacctccacctcccgggttcaagtgattctcctgcctcagcctcctgagtaactgggattacagacacatgccacaacacctgactgatttttgtatatttttagtagagatggggtttcaccatgttggcaaggctggtcttgtactcctgacctcaagtcatccacctgcctcggcctcccaaagtgctgggattatagatgtgagccaccgcgactggcctccaccccattttcttctttctttcttttttctttttctttttcttgttgttttgtttgtttgtttgtttgtttgttttagacggagtctggttctgtcacccagactggagtgcagtggcgcaatcttggctccctgcaagctctgcctcccgggttcacgccattctcctgcctcagcctcccgagtagctgggactacaggcgcccgccaccacgcctggctcatttttttgtatttttagtagagacggggttttaccgtgttagccaggatggtctccatctcctgacctggtgatccgcccgcctgggcctaccaaagtgcttggattacaagcgtgagccaccgcgcccggcctccaccccattttctaaactggaagctgaaaggcacagggcagattaataatccttaaagccaaaggacaggaaattttagcaaagactccaattttttgtgcagtctaatgttactcatgattgctttagagatggactccttaatcaactcctccaatcctcttccgcccccagggggcagttttaattgatgggctcagcacataattgaaattaaaaacgtacatctcatggtgtttggctcattcaacagccaatggaaactcagggccaaatctttgtaaaagttctaggctctgcttcccagcagagggggaaaccggctcccaaagaggccgttttgtggagacagacatatgagaagtgggcttcagatctatttcatggtcttggtggttgtgcaactggccactttggttcacggaaggatgtaaagggcagggaggtgggaatagagcgggggaaaggtgactcccgtcaaagaatttttctaacatccatcaagtatcgtgattagaacttttctctccgcagactcctccaatttttgagcgcggtatttttcggcacaggaaatggcccggaggagctgcagagcaaagcctcccctctctggcaccgcatgggagtgccccgtgggatgagggagaggacaaggcagtcaggcaaaggttacgggaggaaagcaaaggcaggagcccagaaccactccaggaaatgtttggatttctccaccaggagggaggacaaacaagctttcttcttgccttctgggcagctttgtgtgctctccagcacggagtccgaggaggaacagcgaagctgaaaatgaaaattactctggcgctggacccaatcgctcctctacggcatcaatctcatcggacccccccaccctaccgcctctcagaaatga

SEQ ID NO: 10736 - DNA, 2300 bp, Homo sapien
tgtttacccaaaatcaccaaacatacacacttctcacatttgttttagaattctctgagagcaagagtgagagaaaggttctagaatacgttgttttatctgcaggatccaactattcttgaaaccaagatctattcctgaaggggtgggttgcccctccacgcctgtgggcatttctcgtcaggtggaacgagaggcttggaaaagaaagagacacagagacaaattgtagagaaagaaaaatgggcccaggggaccggcgttcagcatacggaggacccgtgcccgcaccggcctctaagttcccttagtatttattgatcattagcaggcatttcccggacagggggatgtgccaggataatagggtataatagtagagagaaggtcagcaggaaaacatgtgaacaaatgtctctgcatcataaacatggtaaagaaaaaagtgctgtgcttttgatgtgcatatacataaacatctcaatgccttaaagagcagtattgctgccagtatgtcccacctccagccctaaggcggttttcccctatctcagtagatggaatatacaatcgggctttacaccgagacattccattgcccagggacgagcaggagacagatgccttcctcttatctcaactgcacagaggtgttccttcctcttttactaatcctcctgagcacagaccctttacaggtgtcgggctgtggaatggtcaggtctttcccttcccacgaggccatatttcagactatcacatgaggagaaaccttggacaatacctggctttcctaggaagaggtccctgcggccttctgcagtgtattgtgtctctgggtacttgagattagggagtggtgatgattcttaaggcgcatgctgccttcaagcatttgtttaacaaagcacatcctgcacagcccttaatccatttaaccctcagttgacacagcacaggtctcaggaagcacagggttggtggtagggttacagattaacagcatctcaaggcagaagaatttttcttagcacagaacaaaatggagtctcttatgtctacttctttctacacagacacagtaacaatctgatctttcttttccccatatattcccatactcttacatttttctttttttcattaaaaaaaattgtaggccgggcgcggtggctcacgcctgtaatcccagcactttgggaggcggaggcgggaggatcccttgagtccgggagttcgagaccagcctggacagcatagggagattcccccacctctataaacaaattaaaaattagctgggtgtggtaacgcgcgcctgtattcccaactacttgggaggtcgaggctgcagtgaaccgtgtttgtgcaactgcactccatccagcctaggtgacagagtgagaccctgtcaaaacataaagaaaaggatgaaggaagggagggaggaaggaaggaagggagggaggaaggaaggaaagaaggaaggaagggagggagggagggaaggggaagaaagagacagaaagaagagaaagaagaaagaaaagaaagaacagaaaagaaagaaaaaagaattcctttaatttagtgtatggtgttaaaacgcaaccaaacgctccatccggcgaagagagagagaaaagaagagaggaaggaaagaaggaagggagggagggagggagggagaacaccttcctttaattcagtgcatggtgttaaaatgcgaccaaacgctctatccggctgcaatctccccgcacgggagtgatttatgcagtagctggaggttagtcaggactccaggatgcaccgcagacaccgaggcgatgatcctcggactcattaatagggagtcatttgtgactcaggtgcgctctctgcgtctgcaagtcacgttcccttcggcacgcccatctcgaggattcatcctctccaacgggtgacgagcaccgcctgccggcggcccgcctctcggcctcttggccacgccccccaccggagggcaaggcgcacgctccgcaatttttctccgcccccgtcttccggcttctcgcgacatccgcccagcggcggccggaatctcgcgataaaggctcattgtctcgcgggagcgctgctggcggtcgggcgctcgggcggccctggccggggagacgagttgcatgtgttggttcagctggcgatagcggcgggagcggagccggcggggcctgtgcgaccgcctgggtaacgaccccaagtgcttctcccgctcccgagaagctcgtagagagtgtgggggaagctgagatgctgcc

SEQ ID NO: 10737 - DNA, 2300 bp, Homo sapien
aaaaatatcaagtcttaacaatggtgaaacctaagaaacgtgaattaaaacactcctcacttcaaaaattgacattcaacccacattcctttacatctcatcaccaccaacttactgcagtcatctactgctagactgtttttagcaaatacccacccagaatttgctttgttgatttatttatttatttttatttttttgcatttctgtaatgatcagggaagtagaccacctttttgtatttattggctatttggttttgggttttggtggtagtggtggttggtgtttttttgtttttttttttttttgatacggagtgtccctctattgcctaggctggagtgaggtggcgcagtcttggctcactgtaacctccatctcctgcattcaagcgattctcctgcctcagccttccgagtagctgggactatgggtgcgcaccaccacacgtggctagtttttgtttgtttgtttgtttgtttgatttttagtagagacagggtttcgttgtattggctaggctggtctcaaacttctaatctcatgatccatcctcctcggcctctcaaagtgctgggattacaggcgtgagccaccacgtctggcctgatttttgtttttttgagtcaaggtctcactctcgatcggactggaatgcagtggcatgatcacagctcattggagccgccatctcccagctcaagtcagcctcgtgagtagctgagaccacaggagtgcaccaccacgcccagtttaaaaaaaaatttattttttggccaggtgcggtagctcacacctgtaatcccagcactttgggaggctgaagtgggtgggtcaactgaggtcaggagttcgcgaccagcctggccaaggtagtgaaacccatctctactaaaaatacaacaaaggtggcgtggtggcgggcacctgtaatcccagctactcgggaggctgaggcaggagatttgcttgaggccagaggcagagtttgcagtgagccgagattgtgccattgcactccagctcaggcaacaagagccagactccatctcaaaaaaaaaaaaaaaaaaagttttttagaggtgggtgtcaccatgttgctcaggctggtctcaaactcctgaacgcaacagatcctcctacattggcctcccaaagtgctggggttacaggccactgcgcccagctttcttgattttaaattctaagacattgctttggtctcccaaacatgagcctatcagtaaagcttcaaaataagaaatcttaattttgtttttccattttcagattgtattttttgaacacaagggcatgttttggcatttcatattcaaccaaaaagtaaagttgaaaccctgtaagaccgaccgtatttagtaattgtgttgctgtctgatgggttaagcattcagggatgggcagccggggctgaagtgtgataagccttattttttcctagtcccgttcccacatcttaggaagagtgaaagggggatgaagaggtgactatggaagaacaggtgaaaaagcttagattcaacccagaatatcgtagattttgtcatgacaaagtaccgtggttctcctcattgcttttcaggagctcccaagagtaaatttccccctcttcatctgtgattcttggtttaaagtatcaaaggtgctagggtagcccgcaactgttatccccgagggctgggctctgcctccacgcattcgagtgtcaggtcctgttctgggagccagctacacaggagcgagcacggccgagctcacggttattagggggaagatggaagatagggaagtgagcaactcaaatgtcataaaccagagtgctgggggcggcgcagcagcctttattgacttcttcattctctgggtagtggtgaacagccggttctttcaggccttccagcgccggagcctcgggcgtgggcaaaaagcgtccatacgcagcctgagccacttgggagcccccagtttccgaggcagaagaacagtgcccaccagcgcagcggggctgcggcccggaaaccctggcggggagccccgagccccggcgggcgcacgccgcgtgggcaccaggcaggcggttggagtacggggcgggggtcggccgagggcgcggggccccggggctccgggctcgcccccgccgctcggggcaggcgcgccgatggcgtttctgaggtgacgccgcccacaccgggcttctccgggggcggaggaaacacctatgaaccctccggcagccttccttgccgggcgccaggtaagcagcggttccgggc

SEQ ID NO: 10738 - DNA, 2300 bp, Homo sapien
cggcccggaaaccctggcggggagccccgagccccggcgggcgcacgccgcgtgggcaccaggcaggcggttggagtacggggcgggggtcggccgagggcgcggggccccggggctccgggctcgcccccgccgctcggggcaggcgcgccgatggcgtttctgaggtgacgccgcccacaccgggcttctccgggggcggaggaaacacctatgaaccctccggcagccttccttgccgggcgccaggtaagcagcggttccgggcgcggcggggcgccgcgggaacggtgcacattggtcgaaatctattgcttctcaagaacggtgtctacttaaaatgtgaaacaggccgggcgcggtggctcacgcctgtaatcccagcgctttgggaggcggaggcgggcggatcacgaggtcaggagatcgagaccatcctggctaacacagtgaaaccccgtctctactaaaaataaaaaaaaaaaaattagccgggcgtggcggcgggcgcctgtaatcccagctactcgggaggctgaggcaggagaatggcgtgaacccgggaggcagagcttgcagtgagccgagatcgcgccactgcactccagcctgggcgacagagcgagactccgtctcaaaaaaaaaaaaaaaaaaaaaaagtgaaacaatacactagaggaaaacggcgtcacgaccgtttccttaacccaataacaccttgttattcagcccgggccacagagtagcgcgtacccggtgcttactgtttaaggaggacgattggcgtctggggagctgctttcccatttacctctcagggtgtccttaatttacacaacctggcgagtagaggaaggagctctcacaactccactgtaccaaaaagtctggaagtgggcttgcccaaggttcgcgtccatcagtgtaagacgacctgcctttgtgtactcggcttactgcctgttttcctggagtggaatatgtgctccttgcctggaggtctgtggcccagccactggcgctcaataaattatttgttgagtgcatgaatgaagggctaacccaacactggaattcaagccttgggacttgaaatcccttgactccaaattccattttccttgttaagactagcaactgtaatttattcatcattcttatttatttatttttgagacagggtctggctctgtccccagggctggagtacagtgacgcaatgtcggcttactgcagcctctgcttcccgagttcaagcaatcctcccgcctcagcctcccaaatagctgggactacaggctcccaccaccatgccgagctaatttttgtgtttttagtagagacagggtttcgccatgttggccaggctggtctcgaactcccgacctcaggtgatctgcccacctcggccttccaaagtgctgggattacaggcgtgagccactgagcccaacctcattattcttgtttatttacaaatcttacttttcaaaaagcagtaaggaggtacaaagggcctctgttgaacctttaattactgtctttaaggtggaactctattaaagtaacacttttagttgtttatttcataggcagggacagcaccatgatttgaaatgtggtttacagtgttaatgagagctgatgtttgttgagtgattacaacgggccaggctttgtgctcagtactttacagagtttgtcttgtttaatcttcaccactccaagatgttaaaatgcagttgctatcgttttacaggtgaggaaactaatgcttagagaagttaagtaacttgcccaaggttatgtagccactaagtggctaattctgggatcacaatttggtcaggccaacttgttagattttaaaatgctgtatacttcaaagaaattattgtattaatagataatattgttagatataaaaatggcatcatggttatataggaaatgttcatttttagagatgcattctgaagtatgtaagggtgaaatggtattttttaaccaataatgaaaagaaaaggacattgaagcagccgcagtgaaatctcaataatggtagaacccaggcacagagtatatgggagtttatcgtactattgtctttgggtacatgtgaaagatttccttacataatttattttttaatgatgtatgttgtatttggatcagttacaatattaaattgcccttaatagattgagtatgtatagatgccttagatgttgtagttgtcatgcatattgaacactggaagacttaattttctttttatagactaaaattcccattgttta

SEQ ID NO: 10739 - DNA, 2300 bp, Homo sapien
gcatggcacaagggctacactctaggtatttggtatttattgaatgtttatatacaccgaggtaaaatattcaagtagaaagaagtctgttctgtcaatatttatatactaaaaacattttataaattcaatattaaaacttttttttttttgagatagtgtcttgctctgctgcccaggctggagtgcaatggcgtgatctcagctcactgcaacctccacctcctgggttcaagcaattctcctgcctcagcctcctgagtagctgggattacaggtgggtgccaccatgcccggctaatttttgtatttttagtagagacagggtttcatcatgttggtcaggctggtctcaaactcctgagcttgtgatccacctgcctcagcctcccaaaagtgctgggattacaggcatgagccaccacacccagcttaaaactttttttttagaaaagaaaaatagtggctgggcatgatggctcacatctgtaatcctagcactttgggaggccaaagcaggcagattgcttgaggccaggacttcaagaagaccagcctggataacatggcagaaccctgtctctacaaaaaattagccaggcatggtggtgtgatcctgtagtcccagctactcgagaggcaaagtgaaaggatttcttgatcccaggaggtggaggttgcagtgagccaagattggccactacacttcagcctgggcaacagagcaagatcctgcctcaaaaaaataaaaaaaaagaagaggaatttttatagagctcaatctccagccctccctccccttcctggaggtccacaagtgggactgcaggttccagccctgtcttcacttggtgtttctggtggctgtctgcatcctgaggccacgtaggagctccaccctgagtcacctcgttagcatgtagtctggtgtaatcaactgactcttcatgaatgacaaaagatgcttctgtcacttaggaaattccacaagttttaggagctctgttctccaggaacagaggacaaaaaccacatctatttcttcttataccacagacatactcaaggaacagaaggaaaggagggaacggcggtggggagatgggcaggtcaggtcatgctgggctctgcagtttgtggtaatggatttggatttcatcctcagtgcagtagcaaggcttctcactgagaaatgacacgagcagatttttatttttagttttatttatttatttatttttgagacagaatttcactcttgtcgcccaggctggagtgcaatggcgcgatctcagctcactgcaacccccgcctgcctctcaagcaattctcctgcctcagccttctgagtagctgggattacagtcgcccaccaccacacccagctaatttttgtatttttagtagagacggggttttaccaggttggccaggctggtttcgaactcctgacctcaggtgatccacccgcctcagcctcccaaagtgttgggattacaggtgtgagccactgcacttggcctttatttttattttactttacttttttttgagatggagtctcactctgttgtccaggttgagtgcagtggcgtgatctcagctcactgcaacctctgccacctggattcaagcgattttcctgcctcaggctcctgagtagctgggattgcaggtgtgtgccaccacacccagctaatttttgtatatttagtagagacggggtttcaccatgttggccaggctggtctcgaactcctggcctcaagtggtttgtccgccttggcctcccaaagtgctgggattataggcgtgagccactgcgctgggcagattttgatttttaaaagattgctctgtgtacactgggctgtcacaggagaggcaaggctggtgcagggaggtcagtcagatgagagcaagcgaagcctccaaccaggggtccttgccaggtgtggagatgttggctgtgaaacagattttgtctatagatccatcaggaccggaaggagccgctgaggatgtgagagttaggcatagtgtgtatatgaggactggaacctagtatttatttgaggactttctttttcttctgttgtgaagaggacctcaatgaaaagacgacagaaaataatgagcaacgagaagagatcattcgcctcaagcaagagaaaagttgcctgcacgatgaattgctttttactggtaaaacagatgatcgaatgtatttgtaacctagacttgcaatgatgacaggctgaaggaattatacctctcccaaaatggtttttttttttttt

SEQ ID NO: 10740 - DNA, 2300 bp, Homo sapien
aagccgaggtgggtagatcacgaggtcaagagatcgagaccatcctggccaacatggtgaaactctgtctctactaaaaatacaaaaattagctgggcgtggtggcgggcgcctgtagtcccagctacttgggaggctgaggcaggagaattgcttgaacccgggaggcagaggttgcagtgagccaagatcgtgccactgcactccagcctggtggcagagtgagactccatctcaaaaaaaaaaaaaaattagctgggcatgatagtgcatccctccagttccagctacttagaaggctgaggtgggaggatcacttgagcccaggaggcagaaattgcagtgagctatgattatgccactgcattccggcctgggtaacgaagccagaccctgtctcaaaaaaaataaataaataaaaataaagttgttgatgctttattttttatttatttattttgagagaaggtttcactctgttgtctaggctggagtgcagtggcatgatctcagcttactgcaacctctgccttgcaggcctaagtgatcctcccacctcagcctcctgggtagctgggactacaggcacgccatcacggccagctaagtttttcgtattttttggtagagatggggtttcaccatgttgcccagaatggtttcgaactcctgagctcaagtgatccacctgcctcagcctcccaaagtgctcggaatacaggcgtgagccactgtgccgagcctcatcaacaactttaaagaagaataagtgagatactgtttaacagatgctgagcctggtgcccggcacagtaataggctctgtgattatttaaaaagccagttgctaatgggaagtctctgtggcagatgtgctagacctacaggggctgttgcctggttgaaaagggatgctgtatatgcgtgaagggtcacaggagaaccacttttgttccgtgtggaaaaaggagtgtgagaaacagctggagtaccgcaaaaagcccctttactgtggtctttattagagcacagctatcaactaagttgactaagttacatatgaagggtttagcccagtgcctgccaaataataagcattcagtacatatcagctattgtgattctaccgttattctgataaagaagctttttagtgattggaattagagaaaacaggattaatttctccttttggtgcagtgacaggagagtcttggcaaatgttatcttttggggtcagctctagctcttgggctggagggtgaggaatcagttaaagaaaagggtccctggcggggtgtggtggctcacgcctgtaatcccaacactttgggaggccgaggcgggcggatcacctgaggtcgggagttcgagaccagcctgaccaacacggagaaactctgtctctactaaaaatacaaaattagccaggcgtggtggcacatgcctgtaattccagctatttgggaggctgaggcaggagaattgcttgaacccaggaggcggaggttgcggtgaggtgagattgtgccattgcactccagcctaggcaacaagagtgaagctcggttaaaaaaaaagaaaagaaagaaagagaagaaaagaaaagaaagaaagaaagagaaagaaagaagagagagaaagagagaaaagaaagaaaagaaggaggaaggaaaggaaagggaaagggaaaggaaaggaaaggaaaggaaaggaaagggtctctgacctcagacaggttacagtctcactagggagacaagggtcaggattacgtgggcgtcattttcctccttacaggcaggcggtgcctctcccttcaaaagcaagggacctttatgcatgattccacatctgcattccgataggaaagggaaacagcagaaacacaatacccatctgagagctacgcttagagaggactctgggcttttatttatttttttacttcagtcttgtgaccagtaattttaagggaaagccaataataatgtttttaaaaagcctcacgccacccctggcggcatctcctcggtgtactttgctgttcagatccgcctgccttctgtgccagcctaacagcgcccggcctcagcccccattgtccctggagctggcgaggtgtccggttgcggagccggcggcgtctctggaaatgcatcctgcatccccgcatggataacagctgcagctatgtcagaattgcacaaagaggggagagtgtcattgtgtgccttttgacacatacattaagaccaaaaaggaaaaaaagcgtctatctgtgctgccaccgaccagac

SEQ ID NO: 10741 - DNA, 2300 bp, Homo sapien
tgagccactgtgccgagcctcatcaacaactttaaagaagaataagtgagatactgtttaacagatgctgagcctggtgcccggcacagtaataggctctgtgattatttaaaaagccagttgctaatgggaagtctctgtggcagatgtgctagacctacaggggctgttgcctggttgaaaagggatgctgtatatgcgtgaagggtcacaggagaaccacttttgttccgtgtggaaaaaggagtgtgagaaacagctggagtaccgcaaaaagcccctttactgtggtctttattagagcacagctatcaactaagttgactaagttacatatgaagggtttagcccagtgcctgccaaataataagcattcagtacatatcagctattgtgattctaccgttattctgataaagaagctttttagtgattggaattagagaaaacaggattaatttctccttttggtgcagtgacaggagagtcttggcaaatgttatcttttggggtcagctctagctcttgggctggagggtgaggaatcagttaaagaaaagggtccctggcggggtgtggtggctcacgcctgtaatcccaacactttgggaggccgaggcgggcggatcacctgaggtcgggagttcgagaccagcctgaccaacacggagaaactctgtctctactaaaaatacaaaattagccaggcgtggtggcacatgcctgtaattccagctatttgggaggctgaggcaggagaattgcttgaacccaggaggcggaggttgcggtgaggtgagattgtgccattgcactccagcctaggcaacaagagtgaagctcggttaaaaaaaaagaaaagaaagaaagagaagaaaagaaaagaaagaaagaaagagaaagaaagaagagagagaaagagagaaaagaaagaaaagaaggaggaaggaaaggaaagggaaagggaaaggaaaggaaaggaaaggaaaggaaagggtctctgacctcagacaggttacagtctcactagggagacaagggtcaggattacgtgggcgtcattttcctccttacaggcaggcggtgcctctcccttcaaaagcaagggacctttatgcatgattccacatctgcattccgataggaaagggaaacagcagaaacacaatacccatctgagagctacgcttagagaggactctgggcttttatttatttttttacttcagtcttgtgaccagtaattttaagggaaagccaataataatgtttttaaaaagcctcacgccacccctggcggcatctcctcggtgtactttgctgttcagatccgcctgccttctgtgccagcctaacagcgcccggcctcagcccccattgtccctggagctggcgaggtgtccggttgcggagccggcggcgtctctggaaatgcatcctgcatccccgcatggataacagctgcagctatgtcagaattgcacaaagaggggagagtgtcattgtgtgccttttgacacatacattaagaccaaaaaggaaaaaaagcgtctatctgtgctgccaccgaccagactcatggaggccagattttctccaattaaccagatcttgccctggtgcagacaagacttagtgagttcggaggaggggtggggagagggaattggctggggtccctaccctgggtggaaggaggagggaggggttccccctcccccttcccctaccctcccctccgggtttagggaggggattagaggtggggaggagctgggggggcgtttggcctgtgccccaaccttgtgagtgaggtgggggttggaggtgtgcggggggcggggcgtgtgccggggtcgccgcgggatggggggttggggatgtgcggggagaggcgcgtgtcccgagatcgcggggggtggggttggaggtgtgcgggtggaggggcgcgccctggagttgggggcgggcgaggcgtttgcgggcgcggggggcgggtttggaggtgtgcgggggaggggcgtgccctggagttgggggcggggcgaggcgggctcctccccggcgggcgggcccgggcgcggcgcggtggcctcgcggtgcctaggctggggctgccggaccgtgaggctgtgagtcgcgcggacggagccggacaaaagcgggcggcggcggcaggatgaacagcatcaagaacgtgccggcgcgggtgctgagccgcaggccgggccacagcctggaggccgagcgcgagcagttcgacaagacccaggcgagcgggcggcgggcggcgggcggcg

SEQ ID NO: 10742 - DNA, 2300 bp, Homo sapien
cgatgcatccttttgtgtccggcttcttcactcagcatcacgttgtcaagggtcaccacatcatagcctgtgtcattacctcattccttttatggctgagtcgtactctgccgtgtggacagaccacattgtgtttatctgttcatcacttggtggacattgggtttgttgcaactttctggctgttgtaaatagtgctgctgtgggcctttgagcacaagtttctgtgtaaacatctgccatcacttatcttggatagatagctgatgtgtgtggaacacagtagaactgctgggtctcacctctgttaccctgttgagaaactaccagactgttttccaaagtggctgcaccattttacactcccaccagcaacgcatgaatgttccagtttctccacatccttgccaatgcttattattgtcttctttttattttagccatcctagtgggtgtggagtggtttctcacggtcttgatttgtgtttccctgatagcaaagggtgctacatatcttttcatgagctacctggccatttgtgtatctttggagaaatgtcttttaggaccttgagctcacgttttaattgggttatctttttattcttgagctgtgcactgtgtgggaagcctctttctagaaatctccacccccctgaccagtgagggtctcagctgggctccaactggtggcccatgggtcattccagggctggggcacatccttggccttggggaggatctctaacctgtcctcttcacccccattgccaggagtctcaggagcaggggctgcggcagaggctgctggacgagcagttcgcagtgttgcggggcgctgctgccgaggccgcgggcatcctgcaggatgccgtgagcaagctggacgaccccctgcacctgcgctgtaccagctccccaggtagacagtggggccacactcagccgctcccctgcctccttcccatccccagccctgagcagcgggtggcaggggcctcagttctcctcgtgcttgcagactacctggtgagcagggcccaggaggccttggatgccgtgagcaccctggaggagggccacgcccagtacctgacctccttggcaggtgagtgtagccagggcagggcggaggcgggggctgtgtcccagttccagcgcccatggccacctcttgccttttgggaggtttacagacagcagggacctctctgggaagccaagcagatgccccctgcctgctccttcccaggaacccacccctgccctgtggacaaataggcttttgcctctggggcctgggccaccatatgtctgcaggtggcagagcactgaagggcccggggccacacacactgtggtgtggttcccactgcctcctggacgttgtcttgccgagccctcctttcctcttcctcctcctcctgggatagctggccaccgacggtggtcccagtgctagtgtctcagtgtcatcctcccccaaccttggccccacccacccgcacagacgcctccgccctggtggcagctctgacccgcttctcccacctggctgcggataccatcatcaatggcggtgccacctcgcacctggctcccaccgaccctgccgaccgtaagtgggtcctgggatggcaggttctgtccacctcactggcttgtctcccctgggggtccttatggagcctgtcggtggggggggctccactcacggtcctttctcaccccaggcctcatagacacctgcagggagtgcggggcccgggctctggagctcatggggcagctgcaggaccagcaggctctgcggcacatgcaggccagcctggtgcggacacccctgcagggcatccttcagctgggccaggtgaggcacagctgagtgtgggtttgggaggcttgggcctgcctctgacctctgcacccacctctgggttggctgaacaggtgtttgtgcgtggagcctgcagcctcaggacacagggtggggaccatgcaccctcctcgatccctgtggtccccaacctctttcccaggctgcccgtgggacggggggggacggaggctacccctgtctgactcccatcctcaccaggaactgaaacccaagagcctagatgtgcggcaggaggagctgggggccgtggtcgacaaggagatggcggccacatccgcagccattgaagatgctgtgcggaggattgaggtgagcacgggatctggggactcccctcattcctgtggagctttgggggccggaggccccaactgggctgggtacaggctgcacccactcc

SEQ ID NO: 10743 - DNA, 2300 bp, Homo sapien
atacaagagggaatagggagtttgttagggaagatgaagggctctagaggtagatggtggtgatggtggcataataatatgaatgtactcggtgccactgaactgtcaactgttctcttagaaatgattacgatggaaaattttatgtatattataccacagttttttgaaaaagagaataagaaaaaggccaggctgggtgcagtggctcacacctgtaatcttagcactttgggaggccgaggtgggaagattacttaagccccgtagtttgagaccagtctgggcaatatggcgaaactccatctctacaaaaaataaattagctgggcatagtggcacacacctgtagtcccagatattcaggaggctgaggtgggaggattgcctgagcctgggaggttgaggctgtggtgagccatgatcatgccactgcacttcagcctgggtgacagagtgaggctgtctcaaaaaaaaaaaaaagccacgtgtgaattctaaatgacattgaagttcagatgaaaaagctctctggctacattaggtttctgatgcaagagacagactttttttgtttttgttttttaacttacgttcccacaaaacaaaagagacagacttggtgggtaggtaaacgttaagaaaataaattattaaatagaataatatctaccagagggcacagagaataaggaactttgtctacctgctacccagccgaggaagtaaacactgccaaccggcggaaccccccgccttgtgctctgccctcagtgtgctcttccccatgtccactgttgtgaattatttatttctctaagtaggcttttgatggacaaaaatgggggctcaggaggaagtgacacaggcacagaggcaggaaagcagggatgggttgtccgacgagcgagttctcgtctactttggccagatggcatgtacttgtgtgtagagaaatgacaagaaatagggctggtgagggggagtgccagggtgtgcgccccatggtggttaatttaggaggaaacaaggagcttcgtgatgattttggagcagagaagcagtcggatgaaactgctcttttttttttttttttttgagaccgagttttgctcttgtctcccaggctggagtgcaatggcacaatctcggctcaccgcaacctctgcctcccggattcaagcgattctcctgcctcagcctcccaagtagctgggattacaggcacgcgccaccatgctcggctaattttgtatttttagtagagatggggtttctccatgttggtcgggctggtctagaactcctgacctcaggtgatccgtccgcctcggcctcccaaagtgctgggattacaggcgtgagccaccgcgcccggcctgaaactgctctttagggaggttaatctgtcagcaaagcgtgggctggcttggcgtggcaggaccaggttggcggcggaagtggaggttaggaagaaattaggatttgagctagggctctgggagaggtattcggaccagctggcccgactccctttctcacttcccctctcctgctgacctgaagtgctttccccacctctgtcacaggcacgtggtctcttagcttctttgtatacctctcctgtggcacttgacacacattttgtaagtcacttccctgtgtcccccactggcttgggggctgcattttgtcatgtttgtctttttgtccttggcacccagcacagtgcctggcacccaggatgtgcctgggtagtgctgctgagtgagtggtgataaccgggcttcaagtggaagtgagtaggagacagggctctggtgagcggggaggggaggggcagtgggggtgcaggagggagggagtcattgaggccggattaggcagagcatgagggatgggcagggctttgtcccgcaggcagttggagtgtggttctggagctcagggtgaatgctctgcttggagacagaaattcaagccactctcctccaagtgcttgtggaaatcaaggagaatataaaagtttgaaaggccactaggagctattagtgggttgggagaaggaaagagctgccatcgaagggaggggagaaacgagagaaacaagttggatgacctaacatcctgttagagactggctggaagaggaacccagaagtagactgcactgtttgaccctcaccggtcggtcgtatgcagagtggttgtgttcttgagctgaggaatgccggccttgttgcctgtttggctttgattacagtatttgtagcagaatgttgctatggagattcatgcca

SEQ ID NO: 10744 - DNA, 2300 bp, Homo sapien
cttcaccaagtataacaagttagaaggaagaaaattaccgagtgtccttttgagctcaataaaacctttagcttggccgggtacggtggctcatgcctgtaatcccagcactttgggaggccaaggtgggcggatcacgaggtcagaagatcaagaccatcctggctaacacggtgaaaccccgtcactactaaaaatacaaaaaattagctgggtggggtggcgagtgcctgtagtcccagctactcgggaggctgaggcaggagaatagcgtgaacctgggaggcagagcttgcagtgagctgagattacaccactgcactccagcctgggcgacagagcaaggttccgtctcaaaaaaaaaaaaaaacaaaacaaaacaaacaaaaaaaaacctttagcttacggattatatgaaacatttcttttggccgggcggggtggctcaggtctgcaatcccagcactttgggaggctgaggtgggcggatcacttgaggtcaggagttcgagaccaacctggccaacatggtgaaaccccatttcgactaaaaacacaaaaattagcttggcgtgatggcgcatgcctgtagtcccagctacttggaaggctgaggcaggagaatcgcttgaacccaggaggcggagattgaggtgagctgagatcgcaccactgcactccagcctggacgacagagcaagactctgtctcaaaaaataaaaaaagcaatagttcctctaactttcatcatttttctgcaaacacgagcccttagtacaacgggctggaaggagagaagaggttggcagagcccagcctaacgtatggatggagaacacagaccttatgttttacccatggagttgcagaagaatcagctttatacacaaagcccctaagtctgccgataagcatttgctgaatgcctcgactgtgttcagagctgagttatgagacgaggtcagtgtgttatgatgccagcgtggtggacgccagactgggagccaggagacctgccaattacttgattttcagaaacaaagcaaaagcccaaaaaatttccccttctcagggcttcagttcccttatgtgtaaaattagggggctgtcatggttaacctcagccttaggtttcttctaactagaactgtgacagattccaaagtaggataatgagttcccaggctcctggatcttaagaggcttcccggtagctgagagactgagagcgactgcaccctaaatcgtgttgtttctgaaagagcacaggttggcccacctggatgtctgggcaccttcctctgaggtgatgcaaaggggccactcaatgggtccttgctcaaaatgctccagccttactggccttcttcccattcctgaatgcaccaagttagtcctgtcccagggcctttgcacgtgctggttttgctgccttgagcttcctacaggaatggtggctggttcctcccttctcatccttcacatttccttagacgccaccttctccgaaagtgccatctcttactaccctaaaggtctttttattttcttatttcagtgtccattcccttatttgtgatcgcctaattattttacttatttcttgttttgtttgcgtcctctttcattctgttagctccatgtaagcaggggtccgttttgctttattcagaactgtatactcaatgcccagtacagagtaggtctcaaaacatatttgttaaatgaatgacgtggcagctccacaattccaagtaaccaatgacacctaaagttgtttccccatgaagtctctgtcttttgggttccgtgcatcgggctgggctcacaggctgcgggaacttccttcccactgcctgttttccttggatcgcggtatctctcttcctggaggaaaaaggctcttatgacctcatggcgcgctctcccgagccgcagtgacgtcattaatgcgctcacgcgtcacagcccaatcatagggcccttcccctccctttagaagtcccgactgtccctgacacattccactccaagcgagccgcgacacttacgtcacgtccgcccgcccgcgcggtgatgacgtcacgacccagggctggcgtcacgtgtcccccccgcggggggcggcccttgagggcggcgcttccggtcggcggagcctggtggccgcagcggcggtggcgacgacggccgagacgtggggatggcgggcgccgggagcgaagcccggttcgccgggctgtcgctggtgcagctcaacgagctgctggaggacgagggccagctgacggagatggtgc

SEQ ID NO: 10745 - DNA, 2300 bp, Homo sapien
tgaaaagggccctcatcccatcctggagagctctgccctatcacattggcgattatgtttcaatatgtaaattttgggagatgcattcagaccacaggaggaagggaaaagaaagagcccccaggttgaaagccagtttaggtttgagtcccagcctttccccttgctgtgtgacctggagtaaattcctcagcctctgtgagtctcccattccaccccaggattgttgtgaaaacacagtaaggcaagcgggtaagaaagcacccagcaaggtgtcaagtgccccaccaggaggggtggggtggcaatttccagcattgcttggaaccagaatagcaacgtcttctgaggttccagaatttggactctgaacccattgagaagaatgaaatcaactttggcgtcaatcagccactgattgccatgtggcctggacgagtcatctcattcaacttcactttcagccggacgctgtgactcaggcctgtaaccccagcactttgggaagctgaggtgggtggatcgcttgagcccaggagttagagaccagcctgggcaacctagcgaaacctcgtctctacaaaaaaatacaaaaaattagctaggcctggtggcgtgtgcctgtagtcccggctactcaggagtctgaggtgggaagatccactgagcccaggaggttgaggctgcactccagcctgggcgacaggagtgaaaccctgtctcaaaaagttaaaaaaaaaaaaaaaaaggaaaatattttagaaaaagaaaaacaaattaatttttctcatttgtaaaatgggggtgattccagggcctgctccaaagggaatgaaacaaagttcaggagcggtggctcatacctataatcccagtactttgggaggccaaggtaggaggattgcttcaacccaggaggttgagaccagcttgggccacatagtgagacccctgtctctacaaaaaaaaaaaaaaaaaaattagcctggcatggtggcacatgcctgtattccctactcaggaggctgagacaggaggatcacctgagcccaggagtttgatgctgcagtgagctatgattacaccactgcactccagcccgggggacacagcgagaccctgtctcaaaaaacaagagaatgaagcatcctgcaggagccctggctcgatgcctggtagccactataaataaagaagaaccagcaggctgtgtggatgcaaggcccagtgctcccctgttctctgaggaggggggcattaagcaccctggggccccacgatgggcagcaagagtttgccgagggaggaaagcccaccggtggagtgggcagaggggttggtgtgtggacttctggagcctcaggaggaagggtgcgggttcccctggctgcagacgtccctgaggctgccctgcctcccccaggagagaccttcctgccctactacacgggccgcgccattgatggcatcgtcatccagaaaagcatggatcagttcagcacggctgtcgtcatcgtgtgcctgctggccattggcaggtagctggctcaacccccacgccctgccccgcacaccccgacctgcaccagggagggaagggagggcctgttcctaaggaagacaggggccagggaggccctggaaatgcccctggtgggcctgtccctcagctggtcaccctgggaaccggcttccacactgtcttagagcaccctagaaccacaccctctggtccctgaaaagggcttcagtcctcagggttccctgctcaccctccctggctgttttccaagtaggaatctggtcccaaacagaaccggctttgtctgagctgttctggaaggaagagggtctggctggcacatttgggtctcttgtcccacaactgtcccctttgccctcaccttgaggggggctcccactgggaatgagggggaccccgcagggatgccagccctggagtggggctgcggtggggctcccaggcctgccggcagcgggagggggcagccgggtgtggtcactggtctggaaggacatcgtgctataatatctcttatctgcaattagctcatttgccgcaggtattcggggcggcatttttaccctcatatttgccagactgaacattcgccttcgaaactgtctcttccgctcactggtgtcccaggagacaagcttctttgatgagaaccgcacaggttggtccttccagtgccctaggtgtcctgggggctgggccccacccctgtgggcttgcctggcactgaggaatgaaatgggcgtgtgggtggtctcag

SEQ ID NO: 10746 - DNA, 2300 bp, Homo sapien
agagcccagcccattttgcagatatgacaacaaaaggcccacgggaggaaggactggagctgagacaggaggtagcacccagggacacaccccagcccggtcctaaccctaccgtggacaagccccactcacaaactcaggcctccaggcccacttcccgggtgtccctgcggctctgggggagtcctgagggacccagtgccgggagatgccttggataaagcagacatcaagattcagaaaaccaaaggggcctagggctgggcacgagggccaacctgggcaggaggaaaagattctggaaacttccaagcagatgccaaggtttctggattgctgtgtggcctgcaagccacccccacagctgtcaagttccctcttagaccaaaatagtttatttggggttgcagagatagaaggcctgacgtgggaggagaaaagtggacaaacatttattaagcacacactgtatatggttgattacaatcagcagcaattatgcaccaggcactctgcccagaactgacacattgaacctcacactcacattttgcaaatgaggaaacaggttcagagaaatgagtagtggtagtaaagacagcggctgtttattaaactctgcttatctcagcttcgtcctcactatggatgcaaaatcctccagatactccccaccctctctgatctcatggggccttgctgccttcccaaggggcactcctgccttggggctctggcactgtttcacctgtgccaagtgcttttccccagatagccacttggcagacttccataactctttcaagtcttgctcaagtgttacctacccagcgaggtcttctctggccccctatttaaaattgatctctggccccgcacagtggctcacgcttttgatcccagactttgggttactgaggcatgtggatcacttgaggtcaggagtttgagaacagcctggccaacatggtgaaaccccgtctctactaaaaaaaatacaaaaagttagctggtcatggtggtggggtacctgtagtcccagctacttggggggctgaggcaggagaatcgcttgaaccagggagacggaggttgcggtgagccgggatcgcaccactgtactccagcctgggcgacagagcaagactctgtctcaaataaataaataaataaaataaaattgatctctgtcttcccccacccctatcctattcaccctcaccccatcctatttacccccctcttttttccaccacaacccttatctctttttttaattaaaaaaaatttttttttttagagataggatcttgctgtcaccagggctggagtgtagtggcatgatcatagctcactgtggcctcgaactcccaggctgaagaagcgatcctcccatcttggcctcccaagtagcttggactacaggagcatgctaccacactcagttaatgtttgtttgtttgtttgtttgtttgctttttaaagacagggtctcaccctgttgcccaggctgctctccaactcctggcctcaagggatcctccaaccttggcctcacaagacacacattatttccttattatcttttttttttttttttgagatggagtctcgctctgtcacccagctaaattttgtatttttagtagagatgggggtttcaccatgttggccaggctggtcttcaactcctgacctcaggtgatccacctacctcggcctcccaaagtgctgggattacaggcgtgagcccatttccttattatctgtctcctgcatgagtatgtcatctccaggagagcagggatctttgttctttttgttcatgacaaagaacaaagaacagcacctggccgcagtgggcactcagtaagtatcccttgaatgagtggaatcttagtacccgggaagttgatattgccattttacagatgagaaaactaaggctcagagatgtcaagtgactttctcaaggtcacacagccagcgagtggcaaacctgaaccccttgtgctgatgtttgctgttgtccctacaggcctggcctcgccctgtggatgatgatggccttgcccccgtgagctacaacctggccttcagcacccgcccacctccaaccagcaggatgcggctgtggaaggcggtggtggtgactttggccttcatgagtgtggacatctgcgtgaccacggccatctatgtcttcagccacctggaccgcagcctcctggaggacatccgccacttcaacatctttgactcggtgctggatctctgggcagcctgcctgtaccgcagct

SEQ ID NO: 10747 - DNA, 2300 bp, Homo sapien
caacatccatgtgaagaaatagcatgtgatgaggccgaattgtttctgtccgtttcacatttctgacagctcctgttgatttttgctatactatgctagtagttacataaaggttcagtcatcccatctctcctaaaaataatccttgttctcctttactgaaagtttatcacatgccaggggctgccctcactggccttgtcacattttacctttacctgatgcagtcgatatctttattaccccatttctctgatgagaaaacaggctcagataggcaaagtcacctctttaaggtcacacagcataaatgacagagcccagctctgagtgactcctgctttttggacagtccatccaagatatcgtcttcaagtacaattagatatttgcctttgtttttgcaccaatagtaacatggttcaactttattctctccttggtttttactcaatacatttaggaggtcattccatacctttatataactctatgtcttctatttttttttttctggctacagagtattctgttgaacaggtgttctctaattatttggccagttccctatggaagggtatttaggttatttccagacttttgctactgtagtaactacctttaagctagtaccttagctcccttgcacaagtctatctgtagaggaaattccttctgggttaaaaaaaaacatagtgttgtaagttctgaacaaattcccctctaaagaagctgtcccaccaagtagcagaggacatttccaattcagagagtgctccaaaaagcctctgttcagggctgggcacacatggctcacgactctaatcccagcagtttggaaggccaaggagggcagatcacttgaggtcaggagtttgagaccagcctggccaacatggctaaaccccatctctactaaaaatacaaaaattagccaggcgtggtagcggacacctgtaatcccatctacctgggaagctgaggcaggagaatcacttgaagctgggaagcagaggctgcagtgagctgagaactcgccactgcactccatcctggagtctctgtctcaggaaaaaacaaagcctctgatcagaggatccagggatgtgggcagttctagccccacctgctgcccctctgggccgtaagtccactcccccacccacttcccacggttcaggccacatggacccttttctggtcctcaagtggccaagttggttcccacctcagagcctttgaacttgcaggccttagcgtaggatgttcctccctccccgtggctcacgccttctcacctttcacttacacaattttatttattttactgcatccagtacctgaatggccttatgcacttacttgctgatgttctgtccccttcacgccatgaaggctgggagttttctgtcttttcacacacagctgtgttcccagcacctggcagtcactgaggacatatcgctgcctcccctctccaatgccccgaatccctgatcttgcaccaattttctccgtaaaatgtattcccttccaatatatctcatttgcttatatgtgttgtctgacaccctcactagaatgtcagctccagaagggcaaggatcttgttttgttaattgtttaatttcaaatgcttaaaagggcatatggcacgccgtaggcactggataaatatctgttgggtgaacgaatgaaagaataagtgaatgaatgaggaccataacccaccctcctggactggctggctgtccctccagggaaaaaggccagttaaaaagctggcctccttcaggtgaaaccatttccgtcccctcaggatgggcccgtggctccaggtggaggccagcacgcagtgtggagggcctggttggccagatgtgggaggagtttgccacaggtgagcaggtggccagctgtggccccgcccccaggaggcccgtccccacccggaggcttcgccagccccctcctcgggggccccgccccgtccaggaaagcccgcccactcctcctgaggccccgcccctcccgggaggctccgccggtccctgccccaggatccccgccccctccgtcactgaggccccgccccgtccatcagcctgtctcaacgcacgccagtctcagctccgaccttgcagcggcgcagcgcgggtgggaggcggggaggagcagcgggaagagcggagcgaggaccgcgtccggcgcagtcttcaatgagcagcgcggaaactgcaccccagacccgagcctgctgcgcgccccctcccagagctcacctggtgccaggtaacagg

SEQ ID NO: 10748 - DNA, 2300 bp, Homo sapien
tgggttcaagtgattctcatgcctcagcctcccgagtagctgggattacaggcgtgtgctaccacgcctggataattttgttatatttttagtagagacggggtttcaccatgttgcccaggctggtctcgaactcctgacctcaggtaatccgctggcctcagcctcccaaagtgctaggattacaggcgtgagccaccacacctggcctctatgtcaatttttaaagtatgtgtaaatatacacatatacagacatatacatatgattgcacattcatatacatatattcacatacacatatacatacgactctggaatcaagatactctaattctggagcgttctaattctggtctgctactcactaggtttatgactctagacagattcctgtacccacctcactttccttatctgtaaaatgggggtaataataccttaagcagtcaacaaagatacatgtcagcgctggctggcagcacatgttgattcagtacttgctggtaaatattcttcttgctgctgctcccttcggtgactgagcccagagtgtctggaaggaggagagggtccatggagagggccaatctaaactgataagcaggccaggcgcagtggtctcagttctagaccagcctggccaacatggcgaaatcccgtttctactaaaaatacaaggccgggcgcggtggctcacgcctgtaatcccagcactttgggaggccgaggcgggtggatcatgaggtcaggagatcgagaccatcctggctaacaaggtgaaaccccgtctctactaaaaatacaaaaaattagccgggcgcggtggcgggcgcctgtagtcccagctactcgggaggctgaggcaggagaatggcgtgaacccgggaagcggagcttgcagtgagccgagattgcgccactgcagtccgcagtccggcctgggcgacagagcgagactccgtctcaaaaaaagaaaaaaaaaaaaaaaaaaaaaaaaaaaaaaacaaaaactttgggaggccgaggcagggggaccacgaggtcaggagatcaagaccatcctggctaacacggtgaaaccccgtctctactaaaaacataaaaaattagccgggtgtggtggcgggcgcctgtagtcccagctactcgggaggctgagccaggagaatggcgtgaacccgggaggcagagcttacagtgagccgagatcgtgccactgcactccagcctgggcgacagagcaagactccgtctcaaaacaaacaaacaaacaaacaaaaaacaaaaaaattagctgggcgtggtggcgcctgccgataatcccagctattcgggaggctgaggcaggaaaactgcttgaatccgggaggcagaggttgcagtgagcggagatcgcgccactgcactccagcctgggtgaaactctatctcaaaaagtaaataaacaaataaataaactgataggtacaacacactcatcttgcaaactgctgcaaacggagagggggtgagggtggggtggggtgctgcatgtgccaggcctgcctggtgggtggctggggagccgacctgccctgggcctcctggggaaaaagggcagttaggcgggtaatgaacattgatctggggaaatggatcctttcctagatagcagggcctctcactatcactgggcaatcaagacgactgtaaaacgttaaacaccttctcgggccgggcagctctgcacgagaaaaccccaaatcccacatacttccaccactcccagaagccctgtggtggttaactggggaactctgtagggttcaaacgccatatttgccccttactggatgtgtgacctgcggcgggtccctgtgcctctctgggtctcagtttcctcatctgtaagacggtgatataatagtacctagctcaaaggtttaatgctggtagattcctgagcaaaggtccggggagagaagaggctcggtctgcaagagttgtcatttgttggctgcggtgagaccacgccccgtcgccctcccacacctgaccccgccctcccgcgtccattgggaacgccaccggaagtaatgcgagacggagcgttttggtggagacactcactggggcaatctgaggtaatccaacagactgtggcggagggaccggaagcgccaggcagggacccggggtagatgctaaatccaaactgaaacgtacagggctggatgattgaagcaccagcgggaactagtcggacctccgagctctttaaactgtcctcagctcggctggttctccacgagctccgg

SEQ ID NO: 10749 - DNA, 2300 bp, Homo sapien
tcttgctgctgctcccttcggtgactgagcccagagtgtctggaaggaggagagggtccatggagagggccaatctaaactgataagcaggccaggcgcagtggtctcagttctagaccagcctggccaacatggcgaaatcccgtttctactaaaaatacaaggccgggcgcggtggctcacgcctgtaatcccagcactttgggaggccgaggcgggtggatcatgaggtcaggagatcgagaccatcctggctaacaaggtgaaaccccgtctctactaaaaatacaaaaaattagccgggcgcggtggcgggcgcctgtagtcccagctactcgggaggctgaggcaggagaatggcgtgaacccgggaagcggagcttgcagtgagccgagattgcgccactgcagtccgcagtccggcctgggcgacagagcgagactccgtctcaaaaaaagaaaaaaaaaaaaaaaaaaaaaaaaaaaaaaacaaaaactttgggaggccgaggcagggggaccacgaggtcaggagatcaagaccatcctggctaacacggtgaaaccccgtctctactaaaaacataaaaaattagccgggtgtggtggcgggcgcctgtagtcccagctactcgggaggctgagccaggagaatggcgtgaacccgggaggcagagcttacagtgagccgagatcgtgccactgcactccagcctgggcgacagagcaagactccgtctcaaaacaaacaaacaaacaaacaaaaaacaaaaaaattagctgggcgtggtggcgcctgccgataatcccagctattcgggaggctgaggcaggaaaactgcttgaatccgggaggcagaggttgcagtgagcggagatcgcgccactgcactccagcctgggtgaaactctatctcaaaaagtaaataaacaaataaataaactgataggtacaacacactcatcttgcaaactgctgcaaacggagagggggtgagggtggggtggggtgctgcatgtgccaggcctgcctggtgggtggctggggagccgacctgccctgggcctcctggggaaaaagggcagttaggcgggtaatgaacattgatctggggaaatggatcctttcctagatagcagggcctctcactatcactgggcaatcaagacgactgtaaaacgttaaacaccttctcgggccgggcagctctgcacgagaaaaccccaaatcccacatacttccaccactcccagaagccctgtggtggttaactggggaactctgtagggttcaaacgccatatttgccccttactggatgtgtgacctgcggcgggtccctgtgcctctctgggtctcagtttcctcatctgtaagacggtgatataatagtacctagctcaaaggtttaatgctggtagattcctgagcaaaggtccggggagagaagaggctcggtctgcaagagttgtcatttgttggctgcggtgagaccacgccccgtcgccctcccacacctgaccccgccctcccgcgtccattgggaacgccaccggaagtaatgcgagacggagcgttttggtggagacactcactggggcaatctgaggtaatccaacagactgtggcggagggaccggaagcgccaggcagggacccggggtagatgctaaatccaaactgaaacgtacagggctggatgattgaagcaccagcgggaactagtcggacctccgagctctttaaactgtcctcagctcggctggttctccacgagctccgggcagacggcggggggtgggtcggcgtttaagtcaaaggccttggggctccgagtcccttcctctccccgtcctgtgaaggcacgacccagttcagctgtctgtaaagtggagccattagtccctgcctcgtagtgggaaaactgggaggcggaacgaggaggccgccggtcccaacccggcccaggagcatctttctccgcagaccgtttcctggcgaggtgcgtcttcgtccttttccgcccttgggaacttagagcggccccttggccgctggttccgcgcctcccgcggttgggggcgtgcccgaagtctctctacggaagctggtagggctgtgggtgcttcactatggcgacggtgggggctccgcggcacttctgccgctgcgcctgcttctgcaccgataacttgtacgtggcgcgctatgggctgcacgtgcgcttccgaggcgagcagcagctgcgccgggactacggcccggtgagtggccgctgtcgtccctacggagcagtgggc

SEQ ID NO: 10750 - DNA, 2300 bp, Homo sapien
cccatacctgtctcaatggtccctttaagatcttggatcagccctgtttgagtgtgccagctgtcccacacatgacacaaatatccactatttgctggatgagggcacgaaggaagggtgaaggaaagaatgaagataccaggctcatggcaggtattgaatgaatgaatgcggatgtcctgctcctggcaggttggtcccactgacccttccagctcctgctggtttggtttttggaggcagagatggtggctggagggaccccagcatcccacacccaggtttcccaggctgccattccctggtcctgccaggtctcagggccaggacctcacccgatactgtctccagccgctggagaaggcccttgaggtctgcgtctggggacacgctgtactcagtcacggccaggaactcgggggccagagctgcatcctgggagcaaaacacaccagctgtggggcaggcagcacccccagccctggatgctacctcctctttccagtaccggccttcaagcactctggctggctggtacctgcagtgagtcgtagacctcaggccgtgccgggtggtaggaactcgcgatgagggctttcctagctgctgactcctgccccagccgctgccgccgctccacctcctgctcaagctggggtggcacagggttgttaccaggtggggcctcccatcctcctgaggccactgtacagatgaagaaactgaagcccagaacgccagacagggcccaggctggaagccaagtctagcctacactcctgaatctatctgggtcaactgcaagttccagactgttagctgaaagggacttctagaaggggacccatcctgtttcaggctgccccaacctgagcctagctgggatgagaacccctagatgtacctcaaccatctgggcccacacagggacaggagacagtcatggccaagtcctgtgttccagaggttgctgaggactctcctgggaagcttcccaccactgactccaggggaaggaggaggagggagtggggcagcagccctggcagcagcctgcggggtatatggtaaggtgtgaggagcccaggggcctggaagctgtggctgggatcacatctgctcctgctgtaaaagcttgggcaagggatccctctttaagcctcagcttctcaatccaaaatgagagtggtgcttgtgcttatctcacagagctgttaagaacggcatgactaggcaacttagcaacttagcatttccccttctctctcctggtgccaagactcaggtgtggagggatgagtggggggcaggaaggaggaaagtgagggcctaagtgacccttcagggatcagggactgaggctaggctcaagctgtgtcctcaagctgcggacacaaatctaacgaggaggagctgtgcaggggcaggggactggtacctctgctaacagctgctggaagtccttggcgctaacacagcctcggctgcgcaggatctgggagcagaaagaacactgagcatgactgtatgacctgaggaaatcccttcactctctaagcctcagtttcccctgcttaaaatggggagaggagccccgacctcaaaggatcatggagagaatgaactgcggaaccctgtcaagctcaggacagggctccgggctggtgttgctgtgaggcggcaagctgagcccggccctgtcctaagcaccctacatgcttgttcattccttcctcacaatctcacagggagatactattacccctttacggtgagaaaaccgaggcagagagaggccgtcattcttgtatttgaagatacggtgcgcggcgtgcgcaaagcaaacgaccctggggacgaacttccctcctccactacccctctctgcccactgctccgtagggacgacagcggccactcaccgggccgtagtcccggcgcagctgctgctcgcctcggaagcgcacgtgcagcccatagcgcgccacgtacaagttatcggtgcagaagcaggcgcagcggcagaagtgccgcggagcccccaccgtcgccatagtgaagcacccacagccctaccagcttccgtagagagacttcgggcacgcccccaaccgcgggaggcgcggaaccagcggccaaggggccgctctaagttcccaagggcggaaaaggacgaagacgcacctcgccaggaaacggtctgcggagaaagatgctcctgggccgggttgggaccggcggcctcctcgttccgcctcccagttttcccactacgaggcagggactaatggctccacttt

SEQ ID NO: 10751 - DNA, 2300 bp, Homo sapien
gcctggtttcttccccctcagggcccagcaagaaagaacagccccttctggccttcctgctgggggacagaggctcccagagccacttctgagttggggtacagacttcggtggctcatcagatgaaaggaggtgcagagagagcctgaagttggctctgtgatcccgacttggctgtcactggcctgctgggtgtccctgggctacttccttcccctctctgggcctcaggacccatatgtgagctcccagggccagccctgtggacacttgtagagtctggggaaaggttccgggcataagtggggggcatgggaatcggcctcccctgctcctcatgttacttccttaagtcatcacaatagccctgaaaagcaaaggcctcatctccatggcacaggtgatgaaacaggaagactgaagcccaggcctggccggcccacggccacattcaggccaacagaccatccctccttccacagaggagaagcgcatctaccgggtgcctgttttcacagcgcccttctgccaggccctgctggaagagctggagcacttcgagcaatcggacatgcctaaggggaggcccaacaccatgaacaactacggggtgggtgaggcctggccggtggcagaggagggggtggctggggtcaggaggcagtgtcagaggttctgcagatgggctgcctgcccgggctgcgaaagaaggtcacagtgggatcaccgtggagtggaagcccagggttgcagccctctagtttccttgctgaccccaggaatcccctcccaggtgctgctgcacgagctcgggctggacgagccgctgatgacaccactgcgggagcgcttcctgcagccgctgatggccctgctgtaccctgactgtggcgggggccggctcgacagccaccgggcctttgtggtcaaatacgcaccgggccaggacctggagctgggctgccactatgataatgccgagctcaccctcaatgtggccttgggcaaggtcttcacagggggcgccctgtattttgggggcctcttccaggtgagtgtgtgacccatgcggcagggcctggggcagctgtgagtgcccaggcctgagtcgtgccatctgcaggcacccacagccctgacggagcccctggaggtggagcacgtggtgggccagggtgtcctccaccgtggcggccagctgcatggagcccggcccttgggcactggtgagcgttggaaccttgtcgtctggctccgagcctctgctgtgcgcaacagcctctgtcccatgtgctgccgtgagcccgacctggtggacgatgagggcttcggtgatggcttcacccgagaggagcccgccacggtggatgtatgtgcgctcacctgagcttgcttgggcccagtgtgggggtggcaggcaggtgagggctccgttgccttggtctgggggcagaaataaaatccccgcagcctactgcacttcttggctcaacggtgtgccagcttctgggtcattctatgggcaaagatgctgccttagttcaggtttgtcagaagcagggtctggaatggggcttcagcgagggagtcagggaagcaggggaggggagggagcagctgggcaaggaagtggcttcagaggacgtccagcctcagctggccccacggagagctccaggcagagcccacagtaccacagtgtgcccacaccaccggttactggctcctggatgagggggccagagaggagtgaataacttcccagacacttatctccagggcagggtgccttccagtagccaagggaagcctccagagagcacagatgtgaaccctcagcagcaggcatcaccccccagtggactcgggtgggccaccagtagcatcttctagatggcagaggggtgaatggcagggccaggaaccaggctgcccgggttcccattctgcttctgccacttccagctgtgtggctttaggtgagccttcaccttttggtgccttcgtttcctcatttagcacctacctcctagagctgttttgggagtcaaatgcgctgacgtatataaagtgctttgcaagatccctttgtgtttgcggctgtcattgtggaagagttgcaacttgggggcccgagattggatgaagcgcacagccacgctttgggttacacatttgaaactcagggggcttccatattgcagtcttgagtttggtctccctgggaaggtggggcaccagccccatgccacgttgcacgtatcagctggagcagaatcctggcttccttccggatgggc

SEQ ID NO: 10752 - DNA, 2300 bp, Homo sapien
tcagaggttctgcagatgggctgcctgcccgggctgcgaaagaaggtcacagtgggatcaccgtggagtggaagcccagggttgcagccctctagtttccttgctgaccccaggaatcccctcccaggtgctgctgcacgagctcgggctggacgagccgctgatgacaccactgcgggagcgcttcctgcagccgctgatggccctgctgtaccctgactgtggcgggggccggctcgacagccaccgggcctttgtggtcaaatacgcaccgggccaggacctggagctgggctgccactatgataatgccgagctcaccctcaatgtggccttgggcaaggtcttcacagggggcgccctgtattttgggggcctcttccaggtgagtgtgtgacccatgcggcagggcctggggcagctgtgagtgcccaggcctgagtcgtgccatctgcaggcacccacagccctgacggagcccctggaggtggagcacgtggtgggccagggtgtcctccaccgtggcggccagctgcatggagcccggcccttgggcactggtgagcgttggaaccttgtcgtctggctccgagcctctgctgtgcgcaacagcctctgtcccatgtgctgccgtgagcccgacctggtggacgatgagggcttcggtgatggcttcacccgagaggagcccgccacggtggatgtatgtgcgctcacctgagcttgcttgggcccagtgtgggggtggcaggcaggtgagggctccgttgccttggtctgggggcagaaataaaatccccgcagcctactgcacttcttggctcaacggtgtgccagcttctgggtcattctatgggcaaagatgctgccttagttcaggtttgtcagaagcagggtctggaatggggcttcagcgagggagtcagggaagcaggggaggggagggagcagctgggcaaggaagtggcttcagaggacgtccagcctcagctggccccacggagagctccaggcagagcccacagtaccacagtgtgcccacaccaccggttactggctcctggatgagggggccagagaggagtgaataacttcccagacacttatctccagggcagggtgccttccagtagccaagggaagcctccagagagcacagatgtgaaccctcagcagcaggcatcaccccccagtggactcgggtgggccaccagtagcatcttctagatggcagaggggtgaatggcagggccaggaaccaggctgcccgggttcccattctgcttctgccacttccagctgtgtggctttaggtgagccttcaccttttggtgccttcgtttcctcatttagcacctacctcctagagctgttttgggagtcaaatgcgctgacgtatataaagtgctttgcaagatccctttgtgtttgcggctgtcattgtggaagagttgcaacttgggggcccgagattggatgaagcgcacagccacgctttgggttacacatttgaaactcagggggcttccatattgcagtcttgagtttggtctccctgggaaggtggggcaccagccccatgccacgttgcacgtatcagctggagcagaatcctggcttccttccggatgggcctggggtccatgcccgcgctcactgccaagatctttctggcccctacggacacgagtttgcgacctctgagtcactgggtgggcgcgtcggaaagaccagggcgcctcagtctggagctcgcagtcgtatggagagggcaggaccagccggggaggagggcggcgcgcgcgagggtcgccttcttcccagggcaccgggggcgtgggtgctgcgggcgtgcgccgagagggcagccttggaagtgggcgcagcttcggcagacacaggcgtgaggggctgcggagctcgagggccggcgcccctgcttgcctctgcgggaggtgggcgcgcccgggacggaacctggggcgtcagaacgaaaggcagcggcgccgcgcttcccagccggccagcctcccgcgcagcgccccggccggaagcctcctcgccgccgcttcctctcgagaaggcgcggggcgggctgtccggcccgcagggcggtcgaggtgggaacggagcagccccgggggcccccttgaggcggcgaggccgcgaagggcgcggggctggagggtaggagagcgcgggaaagcgccccagacgccactcgcggcggacggcggccagttcccaggggtttggagccgggtgcgcaggcgtggggcctccgggcacggggcgggccc

SEQ ID NO: 10753 - DNA, 2300 bp, Homo sapien
tgccttctctttgatttctaaagagggattcagcagagaccccccacccctccctggctcggtctgagtcccactgcccaccccatcacagccttcacgtctcagcccctcccgtctggtctgtccgtgtgccgtctgtttctctgggccatgtgtgagcagtgtccccatctccccatccgtccctgctgtccccgcatcattgggcctgagtgtgctctgtatacaacgtcatgtctgttacaccaattaaagaagcgggaaggcttccttctggatctctttactgcagtggcgaccgtggggcatggtgggatgggggcatggaacagtaatgctagtgacactcacagtgacgccaacacgtgagtgcggggctgactctaggcctagcctgcttctagctccttcctgggatggaactcagtttgccctcacagacctcagtgaaacgggtgctgtgagcctccctgcctcagagtggaagacacagctgggcagtgagagccagacctgccacacaggccacccagccccagcacctggctctgcactgctgcgatctgtggaatgaacatggcaggggaagccgactctctccatgcctgagtgcatggcatttcagagccagctctctgggtttggggttcagctggcatgaggtctggtccaggcaggctgacctgaagaggaaggcacaggcgctggtgtggcctgtgctcacgaccaccagaggacaccccagctttgcccaaaagctcccggagcccttgtttttccctggcagtcatgtagcacccttccctcccactcagcacaaaaagccacagaacagagaaagtctatccagggggcctttaatagctgagaagtgctgctctttcagatgggggtgccaagcaggccggtgaccccaacctccaccccctgcccctgagaagagactgggctgggccagagaccaatccacgggggaaaggccaccagcacccatcaggcttcccactggcaccctgaaacctgcccaggctgggccgccagcgtcgtccacaggccttggccagcgggggccctcagggaagcaacccagctcgcatctggaaggccaggcagtcccctcgggtggcttgctggggaagaaagcacacaggaggaggggtacatcacaaacagagctgggggcggatggcaggcagaggggccacacccaccttgttgatctctctgtgtcgttctttggttacgatttcctctaggacctcgccatctcccttaataagcctgggggtgggagggtctccgttcagcaaggaataggcaggtcccctaatgccagaggagcagaaccacaagcagccggcagaggggtcccagggctcccaccccgcagccttgagtggacagaccctggggcctcacccactctccctgatgaaggcagtggagctgggctctgccttgccagcctcagcccggccaacaacagccctttcaagagcctcctccaggcccttccagcccctgcaactacttactccaagtgaccgtatttttgcccacatttggcctttttcaggcaccaggaaccccgcccggccccactcctcccgagagcacacatcttcagccaacactcccagatcctgtggtgtaagtcaggccgaaagctccccacctggtgcgccccgtctcagggtccaccaccttgcggatgatgctctgccgggcatcccactcctccttggtcatgggcttcatggcctggattcgggacttctgctcatccgtcaggactggaagggaagacggaggtggtggccaggccttgggaagcgaccttctccctctcaggtgctgggcagcacagtacctgggccatcctcttcctccccagctgatcggtgccactggtccagcgaggggcccggcagagcctccacctgctgtgcttccgccttctccttgcccttcttcttcagcttcttcctcttcttcttcttcttcctcctcttgtccttgtacttcccccgcttcttccggccatcactggaggaagaggaggaggacgaggaggaagaagaggagctagaagaactggaagaagaggaggaggagctggatcttgttctcctccgggccttctgcttgcttctctctgtgatgcagggagaaggtgaggctggaaggccaggaggggaagaggtaaaccttcgtcccctgctctggcctggggcaggcacagaccggctacagggtgagcgcttcctgaggggctttccagaacagagatggagcttccc

SEQ ID NO: 10754 - DNA, 2300 bp, Homo sapien
agaggggatttctgtgtccaggtgatgctgctcagcagcaccatggggagtctgggtcagagacctccaaggggcagttggggtctgggatccagggttatcttatctacagccagcagatgttgggtgcagtttctggggtatataaagtatctaggctctaatcggctaaaaaagagcttcacttggactatatttaaagcaactggatgtgagaattgggttcttttttaatagagaggagggtcttgctatgtttcccaggctggtcttgagcttgcttgacctcaagcagtccacctgccttggcatcccataatgccaggatggatgtgagaatttgaatgggcttcgggctgacgttcctacctgctgtgaactaaacaactgggagccgctgttttaggctagcacaagggatggagcccctttatcagacctttcctctctctgtctttctccctaagtggcttatttaagaacttcttttaaccctgtctactggtattcctgagagttctgataaatgtttttctcaaccttgttagctacccagtaatgctttagcacctgggtgatactccaatgcccgatagagagccgtgccctggggaagttgcctgactggccaggcccttgcttttatcacttagcaggagtcctgcccatggtcactgtgaatcctccctggctgctgtccttggagtagtcttgctaaaatactaccgttagccgggtgtgggtggcgtgcatctgtagtcccagctactctggaggctgaggcagaaggatagcttgagcccaggagatcaaggctgcagtgagctgggattgcaccactgcactctagcctgggtgcagagtgagaccttgtctctaaacaataaataaatgtaaaatttatttatcatccatcctgaaaaccttcacttggcttcatgttaacagcatgtgacctttggaggtgaccaaatgatatttatggcaaagcttcagccatctggggcttgggttttaaggggtgatttcattttccggataactgagtatgcgcctcttccaagcaccaagtttttgtttttttttttgagacggagtttcactcttgtcccccaggctggagtgcaatggcgcgatctcagctcactgcaacctccgcctcctgggttcaagcgattctcctgcctcagcctcccaagtagttgggaccacaggctcctgccaccacctgcggctaatttttgtgtttttagtagagacggggtttcaccatgttggccagtctggtcttgaacgccgaacctcaagtgatctgcctaccttggcctcccaaagtgctgggattacaagtgtgagccactgtgcccggcccagttaaaaaaaaatgtgattgcttagggacaaatcttcatcaaatatattctttgtcacttaaatagaggtggctatgagcacactctctgcttatcttgtctcatctacttcccagacatagcccaatggaaggaataaaatagatgccaataaatgtttcttattggattgaactgaaaccaaacgttaaatcactcagagtctcccccttgggatgtagtgatgtcatctgcccctaatggcatggctcagactgctgacttgtgaatgtctcatgtctgtgctgcttagttttatttgatctgcctgcttttccatgaccagctatcattactcactgtgtcagtaccggggaaatagatgctgtaccttgttaggattgtgagtaaaacaagagcacggtgttcttaccctggcccttgtttatggagtgacaattctttacttccccgtggctgtttgttgatcagagagcttacacatagcctctcacttgtccttttggtagctgttagcaaacaagaaaaataaaggttggaaaggagagaacctgctcaaagttgcaccgttggatcatgcctgatcagaggccacaattccagcctcaggtgtagaccgggcctttcctctgtgctatggtattcaccagcctttgcagaaagtgactgttctgttctgtcctctctgtctcccaggggtccttggtgaattttgtcatggttatttaaggaaccttgcctagaagtcccaacttgcagttccccatcgacgggaaggcttggactccaagatgattataaaggaatatcggattcctctgccaatgaccgtggaggagtaccgcatcgcccagctgtacatgatacaggtgggtcgtggggcaagggtgggtcatggggtgagggtgggtcgcgccagcgcacaga

SEQ ID NO: 10755 - DNA, 2300 bp, Homo sapien
ggcacagcccaatcccatcgctttctccctcagtgttttatttcacttctttttcttttttcttttcttttttttttttttttttttttttttttttgagacagagtcaggctggagtgcagtggtatgatcacagctcactgcaacctccacctcctgggctcaaaacaattctcctgcctcagcccaagtagctgggattataggcgcccaccaccacacccagctaatttttgtatttttagtagagacaaggtttcgccatgttggccaggctggtcttgaactcctgacctcaggtgatccacccatctcggcctcccaaagtgctgagattacaggcatgagccaccgtgcccggcctctctctcactgttttatgatgaaagtgttcaagcatatggcaaagttgaaaacattttataatgaacatccatatattcaccatctagattctaccgcttcttctcactttttttattgcagtaaaatacatataacacaaaatttaccattttaaccattttaaagtgttcacttcagtggcattgagtatattcacaatgttgtgcaaccaccacctctatctagttccagagtttcagcatcccaaaaggagacccattagcagtctctctccagtcccctctcccccagcccctgtcaacaaccaatctactctctgtctgtctctatggatttgcctattctggacatttcatataaatggactcataaactacatggccttctgtgtctggcttctttcactcggtatcctgttttcgaggtccatccatgttgtggcgtgtgtcagtccttcattctcttttatgattgaatcatatcccagtacatggatggaccacattctgcttatgcattatccatcagccaatggacatgtgagctgtttccaccttttggctattgttgtcacattttttttttaagacacagggtctcactctgttgcccaggctggagtgcagtggtgtgattatagcttactgcagcctcgacctcctggattcaagtgattctcccacctcagcctcctgagtatctggaaatacaggccagggtcatgccactgtgctcagcttctcacttttaaaatgaagtcttcagagcccagtgaaatattccagagcccctcctaagggatttgttcccaaagttgcaggcccagaggccccaaactgagtgctcatctcaccctgcctttccactaaagcaatgctccccatgggtgaccaagtaagggaggctccagctggccctggggcccaaggcagagatcctaaaagcctgtgtgtagcccacaagtgggcctccagcctcctccaacccatcccaggtaagcagtcagctgggcagggagacacatgcatgtgccaaccccacacccatgctttgagatcaaatgaaacccggtgccaggaccactggcactcactgactacgtgactagccagtcatcacccctctctgagcttcagcttcttcagctgtgaatggggcaacaatctctaccccatgggtttgctctagagatgatgctggcgccacccaatagaactttccccagtgatgaacatgttacacacctgcactatccagtgcagctgccgtgacctgccactggccccaggtggctactaagcacttgaaatgtgatgaatgggagtgggaaatagaacttttccattttatttcactttaatttataattgaacttaaatagtcacactagactggtggtcagttctaaggcctgaggagatgacaagtgtaaaaggacgcatggtccaggcccaggcctagctcctggtctcttccctcaacccctcctctcctacttaccccacagtgtctgggcaggggagcaggctctgtccacagcctagctccagaggcacctctaaaaggagagaaggtggatggtggggctctcagggaacagcatagataccaactggggagtgggcaccatagactccataatgacgtgggtctggaactgcaggcctctcctctgccctgttctagaacccctcaactgctgtttcccctagcaactcctgcggttatccctggaatgtctgggcaggggctgtaaaattggaataggtccccccccactccttaatgtggtggcagagacccctgaggggaaatgcagagggccttggttctcggctgggctgtggagctgggcactcagggagtttcacatagccacgaagctgctttctcaggctcctctggcagggagcgtcaggatgagaatccagacc

SEQ ID NO: 10756 - DNA, 2300 bp, Homo sapien
cacttgagcccaggagtttgtggctgcagtgagctatgatcgtaccactgcactccagcttgggcaacagagcaagacctcatctcaaaaaaaaaaaaacgcaaaacaaaattcacaagtactagcctgccattcagatggtatgcaggagtgtgcatgttcatgtgtgtgtgttgttttccccgtgttcctctcccctctgtttcctctgtaggcaagaactctatgcatttttctgtgtctctgtgttcccccagtacaagtacccagcacaggactcattatgctgggttgtgggccagcctcagaaacataaatattaggagatctactaaaagaaaaaagagaaaaatatacaaataaaacaactactgtgctttcagttgatgccagaaaagcatttgataaagttcactatccatttaattttttttttttcttgagacggagtctctctgttgcccaggctggagtgcagtggcgcaatctcggctcactgcaagctccgcctcccgggttcacgccattcttctgcctcagcctcctgagtagctgagactacaggcacccgccaccatgcccagctaattttttttgtatttttagtagagatggggtttcaccgtgttagccaggatggtctcgatctcctgacctcgtgatccgcccgcctcggcctcccaaagtgctgggattacaggcgtgagccaccacgcccggcctatccatttaatttttttagagacaggactcccatgttgcccaggctggccttgaactcctgggcttaagggattcccctgcctcagcctgccgagtagttgggactacaagtgtgcgccaccatgcctagcctcattactcctttttttgagattgagtttcgcttttgttgcccaggctggagtgcaatggcagtgatcttggttcactgcaatctctgcctcccgggttcaagcaattcttctgcctcagcctcctgagtagctgtaattacaggtgcccaccaccacacctggctaatttttgtatttttagtaaagacgggatttcgccatgttggccagactaatcttgaactcctgacctcaggtgatacgccctcttggcctcccaagtgctgagattacaggcgtgagcccactggccccagcctcattaatcttaaaaacgtagagactgagggataggcaaatatttcaacatgataaagaatatctcccatcggtagctactttatcttttttttttttttttgatatcgagtctcactgtattgcccaggctggagtgcagtggcgcgatctttgctcactgcaacctctgtctctgggttcaaatgattctcctgcctcagtctcccgagtagctgggattacagacgtgtgccactatggccagctaattttttgtatttttagtagaggcggggtttcaacatgttagccaagatggtctcgatcttctgaccttgtgatttgcccccctcagcctcccaaagtgctgagattacaggcatgagccactgcgcctgcccccccacctttttttttttttttttttaacttgagacggggtcttgctctgtcacccaggctggagtgcagtggcgtgatttagctcactgcaacctccacctcctgtgctcaagtgattctcccacctcagcctcctaagtagctgggactacaggtgtgagcccgcttttttttttttttttttttttttttttttttttttttttgtagagatggggtttcgccatgtttactaggctggtcttgaatgcctgagcttaagtgatccccctcggcctcccaaagtggtaggattataggcatgagcaaccgcactcagatactttatccttaatagtcaaatgctctagtagcattttccaaagtatgtttgaggaacacagaatgctcctgggtattgcatcaaaaaagcattccagggccaaataacatctaggaagcactgttgctctaagacacattccttttaatgtctgttgcaagacaagcatgccttctctctctttagtactgttctttattctagattcaagccaatgcaacaggctaggaaaaagaggcaggctgggcgcggtggctcatgcctgtaatcccagcactttgggaggccaaggcgggcggatcacgaggtcaggagattgataccatcctggctaacgcggtgaaaccccgtctctactaaaaatacaaaaaattagccaggcgtggtggcgggcgcctgtagtcccagctacttgggaggctgaggcaggagaatggcgt

SEQ ID NO: 10757 - DNA, 2300 bp, Homo sapien
gacaggtagattatatttacctgtcatgagggaccatgtatggttgacagttgcaggtttgattaaatccactatattgcacaaattttgctggaaataatttcctgccctgccaagagctctatggtagtttgataataaactactaccccagtattcttaggaactgtgttactaagtcttttctgcctgatttgtactttatttccatagacccctcagatatgtgaggaatcaagccataaatgtgcatttgctggacattatgtaccatgtcatctctatgactacagatttcaaggataatttttacatctaacaatttcactgtaacagtgaccgataatgtgagaaatgtgctttttacagtgctgctggtgggtagacaagtgcttgctgcagttgtttctgaatctagccagatgctggagtcgtgaagctgtaagctccgcgggagcagggaccatctctctttcttgcactacaggcactcaataaatacttgtggctgtgaactggcgtgtggcctttgtgtgtttatttctgctagctggctgcaggagcgggttgttggtgattttaagtcccaggcatagagaagtccttgagttatgggttaaggggcgtccatccaggagcacagttcccgttgggactctgtgggctccgcagatctttctggatggatcctagggcacctcttggtggagggaaggagctgaagcgttctaggtgatggtggtacgccttggtcctcctctgcgtggtcatggtcaggggcacctggaggcgagtcgggaacgatggccttcctggcccgttcagttgggttctgccgtgaccccaggaggtgagcagctgtcaggggctcggcctccccggcttcatctggagtcatctaggccgccttaattttagcttgtcctctctcctccaggggagcaccgccgtctcctcagccttataaggtgacaagtagggatgggtcacacatcactaagttttaggtgtgctctctttagttccatgacttcagattttgccaaacaagtccaccctggctcaacctaacaaacacctcatgtttttaaggaatgtcaccaggcgctcccccaccgggggctcttcccattggagagccctgtcgtgccagatcatccggattaaactgttcgtgatcctcttccagctactccctgaggtggggaccgggacggctgcgctcccggctctgccgttccctgggccgcggcccgggcgtcctgaggggagagcgcggacccaccgtgtggcgagcaccgcgcccggggctgggcttcggtgagctgcccgctgcgctctgccctccctggtttaccatttcgctcctaagaaacttcattttttaaaatgaggctgttttaagagtcacagtggccgcaagtcggccggttcccgcccccgagtgcgctcggctgctgcggacggtgggcgaggagcccggggcggggatccgcgccgccgcccccgagtccagtcccgggccctgaggacacgggcgagccggggaggagcggggtcgccgcggcaggtctgaggaaccaggcgggctgcccgagtcggagaggtttcttccggcggaggcggcggggccgggccgagactccgcagggacgcgcccccgccgccgccgccgccgctcccccgcgcggcctgaggaggcgccgccgccactgagggaatgcgagcccggcccggcgcgcgcgggcagcagcggccgctggggtgcgcggggcaccgcggcgccgcggcgtagagctgtccagccggccccggccgcccgcccggcgcttccttctcagctcgcggccgcctcagcgagagccgcccgccagcacgtgcgccgccgccgcccgcctgcgacgctcgggagcaatgcccgccggggctctgccgctcgcccggggccagcaggcggcgggggcgcgcggggcgcagccggccgggccggggccgcggggcgggcgctccccgtgaggcggcgtgaggtggcggcggcccagccggggccccgaagaggacagagcccgcggccgcgccgagcggggtgagtgcgtccgggcggccgctccgcaggcccgcggtgagtcccgcagtgccgggcgctggccggggacctggggatctgggcggcggctcccagagaggccccggcccgcccgcccgccgagcctccagcccgccgggggctggaggagggagcggagacccgggcagggaggagggtgtggcgtacgggagccccgctcgggagaccgccc

SEQ ID NO: 10758 - DNA, 2300 bp, Homo sapien
ggttcacgcctgtaatcccagcactttgggaggctgaggtgggcagatcagatcacctgcagtcaggagttcaagaccagcttggccaatatggcgaaaccctgtctctactaaaaatatgaaaatgagccgggcatggtggtgggcacctgtaatcccagctacttttgaggctgagggaggagaatcgcttgaacctgggaggcagaggttgcagtgagctgagattgtgccactgcactccagtctgggcaacagagcgagactccgtctcccccaaccaaaaaaaaaaaaataaaataaaagtggtatgcatatatatgtatgcagaaaaaacaggaaagaggaacagtttttttttcttttttgcttatttgtcttctaaattttctatattctaagtgttctataatccttttataattaaagaaaaaaattttaagttttatttcaggacaccattggaattaatactgaataaattaactaaaatgaggctgggtatagtggcttatgcctataatcccagcactttgggaggccgaggtgggtggatcacttgaggccaggagttcgagaccagcctgggtgacatagtgagatcttgtctctgcaaaaaaaaaaatgtttaaaatcagccaggtgtggtggtgcctgcctgtagtttcagatactcgagaggctaaggtggaaggattgcttgagtccaggagtttgaggctgcagtaagctatgatcatgccattgcagttcagctttgggtgacagagcaagaccctgtctcaacaaaaacacagaagtatgtataatgatatatagtccaggtattatttaacagtaatattgtttattttaaaatagcaattgttaattcattgtgaaatctatttttttttttaagaaaagtatccttcagtgttttttttttttcctttttaacttagaaattttggtgagaagaaagttatttgatctatgtatgtgtgggatgcagcactgatcaaatgtgtccatttcttctggtgaaatgtgtgaagcacctcctaggctcctcttgtactgttctcacttcagcagagccaaagaattatcctcttccagttggttgtattgctattactagaatttccatatactcaatgtgtcaaacatattgagaatattttaaagtacagcagttatttggaatagttgaaaagctaattcatattgtccagtttaaaagaaatcataagatgtttcgtgtagaaagcaaaataattgtaattttagtgtttatacttgctcttttgctaaaagaaaggtcagtttggtggtgattatagaacttggtatagaattctaattaaacttttcccattgttttcacctaggaagccttggaagatcgtttggaaaggattaatcgagaactgggttcagttcgcatgacgctaaagaaattccatgttttgcgcacctctgcaaatctttgagatttgtagccattaaattttgagacatttttgtttgcactaatgtataattatgcagtcagaaaaggcaaactattttgtactgtttataagccttcaaacagtagttttacaatcatgctattcttacacttgctattttatacttcaaatggccacatattttcaagatatttttgttatgctcaggaatctcttgtatattttactatttaaaaagcattatttttaaatagtatctgtctccaatttatatcaagaataaggaaatataaacagaggaagcagcttgtttctaaacaaatagtgttatccttttacaattaactgcacatcaattttatagacttgttctacattgtaaatacaattcagtttttaaaaaataaagcttaatagcttccataatgatagactagtacatgctgaatacataaacaattacagtgtaccttggatttcagttgtgttgaggtttttaaaaaatgataatgcaattcgtatttgaaacgtgtcttagagtgaatatcagaatagtaataatggactcttggaaagctttgaaaactacatgaatataactcattttctttaaactttattgtctgtaagagaaaaaagagagattgtaattctctaattttatcttttctaaaaaagttaaacaattggagagccctctctggagggctctcagagtagctctctgcccattgttctgaattaacttgtgtcccaccctggacaataaatggacagataaaccctttgaaatacaagccaccaccccgtgagggattaagagggcagcctggttttcttagt

SEQ ID NO: 10759 - DNA, 2300 bp, Homo sapien
ctcagctcactgcaacctttgcctccctggttcaagtgatactcctgccttaagtctcctgagtagctgggactacaggtgtgggccaccacacccggctaatttttgtattttcagtagagacagagttccgctgtgttggccaggctggtctctctcctgacctcaggtgacgtgcccacctcagcctcccaaagtgctgggattatggtgtgagccaccgtgcctggccccaattttatgttttttattttcttttttctagtctgtatgttgctgaatgtttttgtttgtttcttttgttctgtttttatttattttttgagatggagtctcgctctgtcactcaggctggagtgcagtggtgcgatcgcagctcactgcaacctctacctcccaggttcatatgattctcctgcctcagcctcctgagtagctgggactacaggcatgtaccgccacgtccggctaatttttgtatttttagtagagacggggtttcgccgtgttggccaggctggtcttgaactcctgagagtttagtagtcttacaacatatgcccaccttggcctcccgaagtgctgggattacaggcgtgaaccactgcacccagcctgaatgttttttatgtataagaagaatttttataaatttagtgacatttcatgacaaaggaggctttttattaaactgtgactgaatgtttgtaaaacaagtaatccttaaaaatttcataatttatcccaagtttttagtttcatgtccctgaattgtgtcatctaaagcaacacaaatcttatgtatgttcaagtataatgattgatttatgccaacaaatacactctcattgtagagatacatttagcacttggaagggcaaatgtggtggtttttgttctagtctatggctacagactttttgtattattagtcactgttagtcttttttttttttttttttttgagacagagtctcgctctgttgcccaggctggagtgcagtggcgcaatctcggctcactgcaagctctgcctcccgggttcacgccattctcctgcctcagcctcctgagtagcttttagtagagacggggtttcaccatgttagccaggatggtctcgatctcctgaccttgtgatccacccgcctcagcctcccaaagtgctgggattacaggcgtgagccactgcgccaggcctgtcactgttagtctttttgtttactttgcctttgataataagaaattgaaaaaagtaatgtaggtgaattaataaaaattcattgtcttaccgctagtagaaaaaacaactggctgggcgcagtggctcacacttgtaatcccagcattttgagaggctgagacaggtggatcacttgagcccaggagttcgagatcagcctgagcaacatggcaagaccctggctctacaaaaaaaatagaaaaattagctgggtgtggtggtggccacctgtggtcccatctactagggaggctgaggtgggaggatcacctgagctgaggaaggtcagactgcagtgagctgtcattgcaccactgccgctgcattctagcctgggtgacagagagggtctctaaaaaacaaacaaacaaacaaacaaaaaccacacacacaacaactgaaagcaactggtggttagctttatatgtgaagtacagtatctaaagaaataattttggaacccagtgtggtggctcatgcctgtaatcccagcactttgggaggctgaggtgggcagaggtcaggagtttgagaccagtctggccaacatggtgaaaccccatctctagtaaaaatacaaaaattagctgggcgaggtagtgcgtctgtaatcccagctattcaggagactgaggcacgagaattgcttgaacctaggagatggaggttgcagtgaactgagattgcgccaccgtactccagcctgggcgacacagcaagactctgtctcaaaacaaaaaaaaaaagtaattttggttttctcttcttaaatagtaatgctataacatcatgggcacaaaaactgaagcagaaccaaccaaagagagcacatgtagaagatggaggttcaagatctaaacaaggaaatgagcaaagtaagaagacaccaattgagaaagtaggtgactagtcactttccctgcgggctccagtactgatgattatgtgggtttagtacacgctcatgaacaaaactcttgtgccctttcttttgtattgttaatttgttcatttatacattttttttgttgttgtttttttgagacggagtttcgct

SEQ ID NO: 10760 - DNA, 2300 bp, Homo sapien
ccactgcactccagcctgggtgagagaacgagagactccgtctcaaaaaaaaaaataaataaataaataaaacttaatccttttagccatctatgagatattattattcccattttataaagtaggaaactgaggtacaaattaatttgtccaggaccccacgagtttttagtggagagcttggagttagagtggggcaggggtaggagacagagttcacaaagtgaacatttaagagactttctgatgtggcaaatactatgaaggaaataaataggatgacaagaaagaaaggaactgttaggatggtttgagaagatgacaattaggctgaaattgcagggtgggaagacagcagtcatggtgagagctgtgcaagagctcgcgaggtgatgggcacatcaggtgctcagctgtgaggtgggagacaattttggcatgctcacgaacagaggatgcccgtgaggcaggtgcgtagtcagcaaaggacagagggctgggatgaagtggagaggtgcgtaggagacagacagtgcagagccgtctaaggagagcttaggagtggaaagatgctgaaaggctttacgcaggcagttagttttcatagccacttcctgatgttgtatattgctgcatgtggtctgtggctgaaagtttcccagccttgaggctgaacgtagccttctgtagaactccctgctctcttggtgtggcgcgccagcatactctagctatgagagtgctgatggctcttgggatttgggatggatcatgacctaaaaagggctcttttacactggaggaattgttctgtgaaatgttaagtcaaaaaattatttttaactaaaatattttataatttaatagaccaggtggttacagctattcaatttggtggaaaaacaatgccaagaacagatagttgcccagcaggagcagttccacaaccaaattcaagtaagttaccatttacattgattcctttttttatatacatatacatacgtacatatacacacacacacacacacatatatatatacacacacacatatatagaaatggagtctcactcttgttgcccaggttggagtgcagtggcttgatctcagctcactacaacctctgcctcctgggttcaagccattcttctacctcagcctcccgagtagctgagattacaggcacctgccaacacgcccagctaattttggtatttttagtagagacgggttttgccatgttcactaggctggtctcaaactcctgacctcaggtgatccacccacctcggcctcctgcccagcccttttttacttttattttcatttatttttttttgagatggagtctcactctgttgcccaggctggagtgcaatggcacggtcttggctcactgcaaactccgcctcccaggttcaagcaattctcctgctccagcctcctgagtagctgggaatacaggtgtgtgccaccatacctggctaatttttgtatttttagtaccaaccatgttggccaggctggtctgggactcctgacctcttgatctgcccgccttggcctcccaaagtgctgggattacaggcgtgagccaccacacccagcatccttttttatatttgtaagaaaaaacaatacgttatatcaatttttttttttttttttgagacaaggtctcactctgtcacccaggctggcgtgcagtgacatgattttagctgactgcaacctctgcctcctgggttcaagaaattctcctgcctcagactcctgagtagctggaattacagatgcgcaccaccgtgtctggctaatttttagtagagtcagagtttcaccgtgttggccaagctggtcttgagctcctgaccttgtgatctgcccacctcggcctcccaaagtgctgggattacaggcgtgagccactgtgcctggccaccagcctcaattttgtttataaactaaagataaagtatcacattatctttagaataatatctcatcatattttgaaacatgatattcttgtaacagtcataaaaatatgatgtttaatatactttcttacccaaatctataactttttatttccagcatatacaggaggagataaaaaatttagtcaaattacagactagtagtgcttccttagcttcctgtgaaggaaattcttcaaacaaacaagtatcttcggaaagtcaaatgggttttttttctctaagcagtgagagaaatgaatctgttatccattatcctgaatccacagaacctgaaatacagcaagaaatgtccacg

SEQ ID NO: 10761 - DNA, 2300 bp, Homo sapien
agaccacagactatatgatttcattgatatgaaatatcttgaatgggcaaattcatagacaaatggctgccaggagctggggaaggagagaatgtgagtgagtgcagctggtatggagtttctttttggggtgataaaaaattctggaattagatagtggtgatggctgcacaaccttgtgaactaaaaaccactgaattgtacacttgtaaaagactgaattttatggtatgtgaattatgtatctcaattaaaaatctacattaaggattatttgcaaaagtagcatcacctttttcaggtaatatttcagatttttatatgtttaataatcaaggttcttttttttagagacagcatcttgctatgttgcccaggctggtctacaactcctggcctcaagtgctcagcctcccgagcagctgggattatagcgcaaaccattttgccaggctttacaatgaaagttctagatataattctattatgtaacaattggaatacttgcatgccttgttcatttgtttaataaattctaccaagtatatatgtttgttgacttatacagagacaagaagaactgaactacttaatatttaatttgtattaaaaagagccaattaaactgttaacaaccatagcttccccattgtctggaagtacattttgaactatatatatggtcttttgtctctgtgcagctattcttagaaaataaaccactgggcacactggagcctgcctgcagctactgggagcatgtcccagctactctggaggctgaggtgggaggatcacttcagcccaggagttcaagactgcagtgagctatgatcctgccactgcactccagcttgggcaacagaccaagaccccatctcttaaaaaataaaaataaaaataaaaaaattatttgccaggccaactaaaatttcagtgaagctggatatataccatggcaaattggctgtaacaggtcaaacaagatgcctccttcctggggaattcatgcacttataaaagagcaagggagcaagaggaaaaaggagaaagaaagaaaacttcagctgcttacaaactgaaaagcttagagagtgcaacaggaatattatctagtattccgcttctgctagattcccactttctagggcctgcttttataaagcattacacaaaaacagggaccatttccttcagggacaggagtgaatgcaaagggtaaccggacctaactaaatggacttttccccagtggctcagcccatcacccacgacaaatggggcattgaaacagtcaaggactgccccttccaactggcaacagaaatacctggattccaatcaccatgctattacaccaggaaaacacaagctctccagggagatgaacctgcaaccccatctattatttcccctgctaaggtaatccggatccggatgcagatccagatggaaaaccactagaaattcaaagatgcttctccatttggggtggaggtgctggggggagggcagggaagtaagagggaaaaatccttaaacacccacaaatacaatgcaaaaaaaaatttttttaacttgatacagaatgaatataagagcagagcttttatatttcccagcaacaagatatgacgcttttggtgtccctaccccctagcaaaaaaagggagctggggaaaaggaacgattgatggttatgaaacatgaaagttaactgggcgctccgccttgacgggaggcttgggggagaggaagagatttcagatggggatgaggccagatcccgacattctgagctcacagtcagcccgcaatggctggtggcggctatcgggtcaaagtgggaaggagagggagaatctatgcagtcgcctaagctacggaaagcagggaggacggagaaaagccaccgctcctgcaactacaaccgcgattccaaaaggaaaccggggcaccttggcaaaaaatggggggaaaaattaaaaaaaccccacaaaccccccgcccctcaggaagagcgatctgcgattgggccgcgcgagtgtcactcaagggcgccgagtctagaaaaggcgcaccgcggccgggcagagctcccacacgccgaagggctccgagggggtcaggccaatcggcagccgtcaccccacaccccagcccatcaccacactcaaggggccgctaagacagtgtctcctaagtctcgtctcctgtccccagcggcctacagctccctgcaggctggtggccgcttacctggccgccgctcccgctgccgatgtcagggtcatgcaagc

SEQ ID NO: 10762 - DNA, 2300 bp, Homo sapien
ttgtttaataaattctaccaagtatatatgtttgttgacttatacagagacaagaagaactgaactacttaatatttaatttgtattaaaaagagccaattaaactgttaacaaccatagcttccccattgtctggaagtacattttgaactatatatatggtcttttgtctctgtgcagctattcttagaaaataaaccactgggcacactggagcctgcctgcagctactgggagcatgtcccagctactctggaggctgaggtgggaggatcacttcagcccaggagttcaagactgcagtgagctatgatcctgccactgcactccagcttgggcaacagaccaagaccccatctcttaaaaaataaaaataaaaataaaaaaattatttgccaggccaactaaaatttcagtgaagctggatatataccatggcaaattggctgtaacaggtcaaacaagatgcctccttcctggggaattcatgcacttataaaagagcaagggagcaagaggaaaaaggagaaagaaagaaaacttcagctgcttacaaactgaaaagcttagagagtgcaacaggaatattatctagtattccgcttctgctagattcccactttctagggcctgcttttataaagcattacacaaaaacagggaccatttccttcagggacaggagtgaatgcaaagggtaaccggacctaactaaatggacttttccccagtggctcagcccatcacccacgacaaatggggcattgaaacagtcaaggactgccccttccaactggcaacagaaatacctggattccaatcaccatgctattacaccaggaaaacacaagctctccagggagatgaacctgcaaccccatctattatttcccctgctaaggtaatccggatccggatgcagatccagatggaaaaccactagaaattcaaagatgcttctccatttggggtggaggtgctggggggagggcagggaagtaagagggaaaaatccttaaacacccacaaatacaatgcaaaaaaaaatttttttaacttgatacagaatgaatataagagcagagcttttatatttcccagcaacaagatatgacgcttttggtgtccctaccccctagcaaaaaaagggagctggggaaaaggaacgattgatggttatgaaacatgaaagttaactgggcgctccgccttgacgggaggcttgggggagaggaagagatttcagatggggatgaggccagatcccgacattctgagctcacagtcagcccgcaatggctggtggcggctatcgggtcaaagtgggaaggagagggagaatctatgcagtcgcctaagctacggaaagcagggaggacggagaaaagccaccgctcctgcaactacaaccgcgattccaaaaggaaaccggggcaccttggcaaaaaatggggggaaaaattaaaaaaaccccacaaaccccccgcccctcaggaagagcgatctgcgattgggccgcgcgagtgtcactcaagggcgccgagtctagaaaaggcgcaccgcggccgggcagagctcccacacgccgaagggctccgagggggtcaggccaatcggcagccgtcaccccacaccccagcccatcaccacactcaaggggccgctaagacagtgtctcctaagtctcgtctcctgtccccagcggcctacagctccctgcaggctggtggccgcttacctggccgccgctcccgctgccgatgtcagggtcatgcaagcggcctctcgcgaccgttacccgagggagcgcgcgcgcgcccggcgtctctccagtgattggctgcccggaaggaggcggagacagcctcgcatggcgcgcgcgtccacctcgccgttccccctcgcgcagctccaaccaaagagagacatccaaccccgggggagtgacaagggggcgggattgctgtgaaactctcttctctgattggctctctgggagccagccgctgccacgagggaaagaagcttcagtttctcgcatgcgcagtgagtaaacatgagcctctggtagataagagaaaccgcgatcggagtacggcgcgtgcgcagatcagggatcgcgattgcgaatcctccgctgaggtgatttggatatccctagaacgttgagggcacgagtcgggtcctgagaccaggtaagcatctgcggagaagccaggtaaccctacggctgccgacgactgtcaaaggctccggagagaggactgcgagccgggacgcctgggtttttcccgacttgc

SEQ ID NO: 10763 - DNA, 2300 bp, Homo sapien
tacctagagtgcgaacaaaatcatacatgttgccataaatgtaaagtacttagtggtcactaaatgggagcatgtcagatctctcaactacaaggctgaggaactttggaatgacacaccacatacactgttgtcttatgacacaaacccagtctgggaactgattatttcatcggcctttgttttagagcttagggtgaaaaggcatctacaacagtggcttgtaaattattttacttggtatggtccaatttaagaagtacttgataagccatgacattactgaaaacatgttatttggtgggatcataattctggtctgtgaaatcaggtactaaggagatcactgtgatgccaaaaatatagcctgacttcccagcaggttcacactgaaagataaaaccatcttcaatgaagtaagtcctggtttaaacataaaatatcttttggaattatgtaatataatttaaaaaatcatgaaagataggataacatcaaatttaccctttgaaaattgccaggcgtggtggctcatgcctgtaatcccagcactttgggtggccgaggcaggaggatgacctgaggtcaggaattcgagaccagcctggccaatatggcaaaaccccgtctctactaaaaatacaaaaaattagccggatgtggtggcgggcaccggtattcccggctactcgggaggctgaagcagaagaatcacttgaacccgggaggcagaggttaaagtgagccgagatcgcgccactgccctccagcctgggtgacagagagagaccttgtcccccctacccccctcccccacaaaaataaaaaaagtaaaaaaaaattggtaggtatacttaggaagctccaatgagatgtaacgcctcctggcagatctgttattccaagggcagatccatttcctgggttgtggaggcctaagtgatagtgccagggaagtccctttactgtgagccagaactcctggaggtaaatcgagtagctggaaagaccttaaaggttaactatgctgaagaatgtggcctgcacagtgcgcatgaaatgggctggggtcccacggggaggagagcgagttccctttggtccttcaaaagtagggctgggtggcttgcgcctgtgatcccagcactttgggaggccgaggaaggaggatcgcttgaggccaggagttcgagatcagcttgggcaacacagtgagacccccccaccccacgtctattaaaaaaaaaacgagtatctccgcaaaagcctagcaagggcagtgctgacctctactacgtgccaggcctgaaacagcacctgatgcgtgctcacagctccattccgctcagttttgtacatgaggatccttccgtttcgccttgggcctccgtggaaccgttatctccaggacggtagtctctcctctcccctgccctgagtgcctgaacagccccagggccgacccacagcacctagcgtaaaccaggtcccgagaaaactgagctcgggtgtcacggccggccccaccccaccgccagcgcggcctcaggtaaactggctgcgccactcggggtcgcaagtcgggaaaaacccaggcgtcccggctcgcagtcctctctccggagcctttgacagtcgtcggcagccgtagggttacctggcttctccgcagatgcttacctggtctcaggacccgactcgtgccctcaacgttctagggatatccaaatcacctcagcggaggattcgcaatcgcgatccctgatctgcgcacgcgccgtactccgatcgcggtttctcttatctaccagaggctcatgtttactcactgcgcatgcgagaaactgaagcttctttccctcgtggcagcggctggctcccagagagccaatcagagaagagagtttcacagcaatcccgcccccttgtcactcccccggggttggatgtctctctttggttggagctgcgcgagggggaacggcgaggtggacgcgcgcgccatgcgaggctgtctccgcctccttccgggcagccaatcactggagagacgccgggcgcgcgcgcgctccctcgggtaacggtcgcgagaggccgcttgcatgaccctgacatcggcagcgggagcggcggccaggtaagcggccaccagcctgcagggagctgtaggccgctggggacaggagacgagacttaggagacactgtcttagcggccccttgagtgtggtgatgggctggggtgtggggtgacggctgccgattggcctgaccccctcggagcccttcggcgtgtgggag

SEQ ID NO: 10764 - DNA, 2300 bp, Homo sapien
gcctcccgagtagctggattacaggcatgcgccaccacgcccggctaattttgtattttcagtagagacggggtttcaccatggttaggctggtcttgaactcccaatctcaggtgatccacactcctcggcctcccaaagtgctgagccactgcacccagcctcagtttgaagaattttttaatttccatcttgattttgtttttgacccactgctcattcaggagcaggttatttaatttgcatgtatttgcattttttgtttgtggggtttttttggtgttttgtttgttttgaaacggagttttgttcttgtgcccaggctggagtgcaaatggcacaatctcggctcactgcaacctccgcctcccaggttcaagcaattctcctgcctcagtctcccaagtagctgggattacaggcacctggcactacacccagctaatttatttgtatggttttgaaggttccttttggagttgatttccagttttattccactgtggtctgagagagtgcttgatataatttcaatttttttttttttttttttttttttttttttttttttttgagatggaatctcgctctgtcgcccaggctggagtgcagtggagcaatcttggctcactgcaagctccacctcccgggttcacgccattctcctgcctcagcctccccaggagctgggactacaggcacacaccaccacgcccggctaatttttgtatttttagtagagacagggttttactgtgttagccaggatggtctcaatctcccgaccttgtgatccacctgcctcggcctcccaaagtgctgggattacaggcgtgagccaccgctcacgcctaatttcaattttcttaaatttattgaggctcattttatggcctgtcatatgatctctcttggagaaagttccatgtactgttgaatagaatgtatattctgcagttgttggatgaaatgttctatatatatctgttaagtccatttgttccaaggtatagtttaaatccattctttgttgacttttcgttttgatgacctgtctagtgctgtcagtggagtactgaagtcccccactattattgtgctgctgtctatctcatttcttaggtctgttagtaattgttttataaatttggaagctccagtgttaggttcatatatgtttaggattgtgatattatcctgtgacaaggccttattaccattatataatgtccctctttgtctcttttaactgctgttgctttaaagtttttgtctgatacaagaatagctacccctgcttgtttatggtgtcatttgcatgacatgcctttttccacccctttaagtttacgtgagtctttatgtgttaggtgagtctcctgagggcagcagatggttgatgagttcttatccattctgcagttctgtatcttttaagtggagcatttaggccattcacattcaatgttagtattgaaatgaggtaccagctgggcacggtggctcatgcctgtaatcccagcactttgggaggccaaggtgggcggatcatgaggtcaggagatcaagaccatcctggctaacacagtgagacctcatctctactaaaaatacaaaaaattagccgggcgtggtagcgggcacctatagtcccagctacttgggaggctgaggcaggagaatggcatgaacctgggaggcggagcttgcagtgagccattatcatgtcactgcactccagcctgggcaacagagtgagactctgtctcaaaaaaaaaaagaaagaaatgtgaggtaccattgcattcattgtgctctttgttgcctgtgtactttaggggttttttggttttgctttttaacttgtatttttgttttataggtcctgtgtgatttatgctttaaagaggttctgttttgatgtgtttccaggatttgtttcaagatttagagctccttttagcagtttttgtagcagtggcttggtaatggtgaattctctcagcatttgtttgtctgaaaacaactatcttttcttcatatgtgatacttagttttgctggatacaaaattcttggctgataattgttttgtttgaggaggctgaacataggaccccaatcccttctagcttgtagtgtttctcctgagaaatctgctgttaatctgataggttttcctttataggttacctggtgcttctgtctcacagactcttaaaattctttctttcattttaactttgtccggaattggtgggttcttggtcttgctgacttcaagaatgaagccacggaccc

SEQ ID NO: 10765 - DNA, 2300 bp, Homo sapien
aaaacacacactggattgcgaagacttcgtatgataagagaatgtaaagtgtcttattaataattcctttcaattcattatatagtgaaatcacgctgttctggagctattgtattaaataaaacatgttaaaatcaatttcaccagtgttttttgactttctcaaatgtgactactgaaaaattgaaaattagctatgtggctggcattctatttccattggactgcgctgctctaaaggactgggcgcccgggaccagccacatgggtggcattaatttattcatggaataaggtttcactgagcattcttcgctagtgctggcctacagctgatctcaaggatgggggttaagctggggagggggtgtcgtcgcctgcgcctttggtcctaaaggaagaagcaggcctgggtgggcatccctaggtgggtgcctttgtcatcagatccggagatgatgcttgcacgcctgtgtctaattaaatctgcaaaccatgacgattaaaaacaacagaaaagggtgggcatcttatgtattttaacgagctttactacttcggcagaactccaagattaaaaaaaaaaaaaaccccaaaaaaccccacaaccttcaggttattcatctaatccaaatccaaaatacactggatggttacatttcaatcggatccaaggatgggctgggggtggggtcgaaggaggatctaaaattgtcccgtaaactccagggggtagaaactttgccaagttcaattcttgtatcctcagcgcttggaacagtgagtggcgcatagtaggtgcttcccttaaatactggagtgagtctacgcacgaaattgtgcgattcagggatgagttttccggggaggggggtgaggggtggagaaggcctctaagcttttgtcagtctcaaaggagtcttggatccccaaagggttaaaaaccacttcatacagacagagacatgaaatttatttgaaatcaatgtcaagcatcggttattctaatcctggggcttggccagacctgggcgtctggaatgatctacgtgcttaaatacaccactcgccaccattttctccaggtaattttccatccctgcccccaccatcaaggggaagaaagtgctcttcggattccggttcgccctggcctcccgcagccgccgcgggaccggcccccagcacacccccggggcgccgggcgcggggcagccgcccggacgcgcgcgggcctcaggcgccgccgggaccccagccccccaaactttggcaagttgcgggcgccgagcgcacccggaggcgcggggcgcggccgcaggcggagccgccccctgacgccgggccgccccctcccggccccggccgccccgccggctccgcggaaagtttgcggccgcccctgcgccgcacccggggcctgggtgagactgcggcggcggcagggcgcggacggccatatttgccggcgcggcccgagccgccgacaacaaaaagtgcgcgggcgctcggcgggcgctcggacgggcgcggggctgcagcgctaccgcccggcctcgccgccgccgccgccgccctcgcggcctggccccgccgcgcccggcgcgcccgccgcccggggggatgtcttacaaaccgaacttggccgcgcacatgcccgccgccgccctcaacgccggtgagtgagccgcgtgcgacgcgccccaagcgccgccaagttgggggtccgcgcgcccggccccggcccggggatgcccggggcgcccgcggaggccgggggcggggggctcagggtcccggcccggggcagcgctgccgccgccatgattcccgagcccgcgccgcgaaagttctctggtgcgccccgcacgccgagggcctcggctgggggtgcggggcgggcggcccggggtgacccccgcgccggcggctgcggatcgcagggagcgcggcgggcgagggcgagggcgggggaggcttgttctcggctcctttttcctccggcttctgggcggctcggcgagggcccctgccggcgggagtcgggagcggcccgggccgcgccgggagcggggcgcggggccccgccgccctggggagcggggtcgtgaagcagcccgggcggggggcgctgcgggcagggccaggacccgcgcgggcgggcgcggatggagggctgcggggctgcggggctgcggggctgccgggctgccgggggccctgaggtcgcggggccgccgggactgggaccaggatggggtcgccggcgggcagcgtactcggaggcccgggggcctcgg

SEQ ID NO: 10766 - DNA, 2300 bp, Homo sapien
gcgttagccactgtgctcggccaacagttttaaaatgatgccatggacttagagcgaggagtggggacaatggaaaaaatacaacgctattggctgacgcctgttatcccagtgctttgagatggaggtggaggcgggaggatcacttgagcccaatagttcaagactacagtgagctacgatcaagccactgcactccagcctgggtgacagagggagaccccggttcttaaataacaatatggaaatagatcggttcagagcactcatagaaaggaccgggcctgccactgagatctggattcttgccccgaagaaatggaggcctagtcaaacagccagtgggtgggggagtcagagtcagtacccggtgtgtccgtcgcaggagccctccgctagtagctgcagccctgcactgttcaatacggtgacccctagctatggtggctactgagcgctgaaacgtggctagtctgaattaaaatgcgttgtaagtataaaacacacactggattgcgaagacttcgtatgataagagaatgtaaagtgtcttattaataattcctttcaattcattatatagtgaaatcacgctgttctggagctattgtattaaataaaacatgttaaaatcaatttcaccagtgttttttgactttctcaaatgtgactactgaaaaattgaaaattagctatgtggctggcattctatttccattggactgcgctgctctaaaggactgggcgcccgggaccagccacatgggtggcattaatttattcatggaataaggtttcactgagcattcttcgctagtgctggcctacagctgatctcaaggatgggggttaagctggggagggggtgtcgtcgcctgcgcctttggtcctaaaggaagaagcaggcctgggtgggcatccctaggtgggtgcctttgtcatcagatccggagatgatgcttgcacgcctgtgtctaattaaatctgcaaaccatgacgattaaaaacaacagaaaagggtgggcatcttatgtattttaacgagctttactacttcggcagaactccaagattaaaaaaaaaaaaaaccccaaaaaaccccacaaccttcaggttattcatctaatccaaatccaaaatacactggatggttacatttcaatcggatccaaggatgggctgggggtggggtcgaaggaggatctaaaattgtcccgtaaactccagggggtagaaactttgccaagttcaattcttgtatcctcagcgcttggaacagtgagtggcgcatagtaggtgcttcccttaaatactggagtgagtctacgcacgaaattgtgcgattcagggatgagttttccggggaggggggtgaggggtggagaaggcctctaagcttttgtcagtctcaaaggagtcttggatccccaaagggttaaaaaccacttcatacagacagagacatgaaatttatttgaaatcaatgtcaagcatcggttattctaatcctggggcttggccagacctgggcgtctggaatgatctacgtgcttaaatacaccactcgccaccattttctccaggtaattttccatccctgcccccaccatcaaggggaagaaagtgctcttcggattccggttcgccctggcctcccgcagccgccgcgggaccggcccccagcacacccccggggcgccgggcgcggggcagccgcccggacgcgcgcgggcctcaggcgccgccgggaccccagccccccaaactttggcaagttgcgggcgccgagcgcacccggaggcgcggggcgcggccgcaggcggagccgccccctgacgccgggccgccccctcccggccccggccgccccgccggctccgcggaaagtttgcggccgcccctgcgccgcacccggggcctgggtgagactgcggcggcggcagggcgcggacggccatatttgccggcgcggcccgagccgccgacaacaaaaagtgcgcgggcgctcggcgggcgctcggacgggcgcggggctgcagcgctaccgcccggcctcgccgccgccgccgccgccctcgcggcctggccccgccgcgcccggcgcgcccgccgcccggggggatgtcttacaaaccgaacttggccgcgcacatgcccgccgccgccctcaacgccggtgagtgagccgcgtgcgacgcgccccaagcgccgccaagttgggggtccgcgcgcccggccccggcccggggatgcccggggcgcccgcggaggccgggggcggggggctcagggtcccggcc

SEQ ID NO: 10767 - DNA, 2300 bp, Homo sapien
gtggctcgatcttggctcactgcaacctccgcctcgtcggttcaagcaattctgcctcagcctctcgagtagctgggactacaggcacgcaccaccacgcccgcctactttttgtaattttagttaagatggggtttcactatgttggccaagctagtctggatctcctgacctcaggtgatccgcctgcctcgccctcccaaagtgctgggattacaggcgtgagctgaaattttttttttctgaggtggaatcttgctctgtcacccaggctggagtgcaagtggcaggatcttggctcactgcaacctcctcccggtttcaagcaattctcctgtctcagcctcccgagtagctgggattacaggcgcctgccaccacgccccgctaattttttctatttttagtagagacgggtttttgccatgttggccaggctagtctcgatctcccgacctcgtgatctgcccgcctcggcctcccaaagtgttggggttacaggcgttagccactgtgctcggccaacagttttaaaatgatgccatggacttagagcgaggagtggggacaatggaaaaaatacaacgctattggctgacgcctgttatcccagtgctttgagatggaggtggaggcgggaggatcacttgagcccaatagttcaagactacagtgagctacgatcaagccactgcactccagcctgggtgacagagggagaccccggttcttaaataacaatatggaaatagatcggttcagagcactcatagaaaggaccgggcctgccactgagatctggattcttgccccgaagaaatggaggcctagtcaaacagccagtgggtgggggagtcagagtcagtacccggtgtgtccgtcgcaggagccctccgctagtagctgcagccctgcactgttcaatacggtgacccctagctatggtggctactgagcgctgaaacgtggctagtctgaattaaaatgcgttgtaagtataaaacacacactggattgcgaagacttcgtatgataagagaatgtaaagtgtcttattaataattcctttcaattcattatatagtgaaatcacgctgttctggagctattgtattaaataaaacatgttaaaatcaatttcaccagtgttttttgactttctcaaatgtgactactgaaaaattgaaaattagctatgtggctggcattctatttccattggactgcgctgctctaaaggactgggcgcccgggaccagccacatgggtggcattaatttattcatggaataaggtttcactgagcattcttcgctagtgctggcctacagctgatctcaaggatgggggttaagctggggagggggtgtcgtcgcctgcgcctttggtcctaaaggaagaagcaggcctgggtgggcatccctaggtgggtgcctttgtcatcagatccggagatgatgcttgcacgcctgtgtctaattaaatctgcaaaccatgacgattaaaaacaacagaaaagggtgggcatcttatgtattttaacgagctttactacttcggcagaactccaagattaaaaaaaaaaaaaaccccaaaaaaccccacaaccttcaggttattcatctaatccaaatccaaaatacactggatggttacatttcaatcggatccaaggatgggctgggggtggggtcgaaggaggatctaaaattgtcccgtaaactccagggggtagaaactttgccaagttcaattcttgtatcctcagcgcttggaacagtgagtggcgcatagtaggtgcttcccttaaatactggagtgagtctacgcacgaaattgtgcgattcagggatgagttttccggggaggggggtgaggggtggagaaggcctctaagcttttgtcagtctcaaaggagtcttggatccccaaagggttaaaaaccacttcatacagacagagacatgaaatttatttgaaatcaatgtcaagcatcggttattctaatcctggggcttggccagacctgggcgtctggaatgatctacgtgcttaaatacaccactcgccaccattttctccaggtaattttccatccctgcccccaccatcaaggggaagaaagtgctcttcggattccggttcgccctggcctcccgcagccgccgcgggaccggcccccagcacacccccggggcgccgggcgcggggcagccgcccggacgcgcgcgggcctcaggcgccgccgggaccccagccccccaaactttggcaagttgcgggcgccgagcgcacccgga

SEQ ID NO: 10768 - DNA, 2300 bp, Homo sapien
tattcctccaacaagatagcattacactaaacacatgcatatgcttgggtatttgtgggaaatgctgtggaagaatcagactacatctcaatggccatttcatttattaggtagtcgtttaatttttgtgtgaacttcttgtccattacgcttaatattatgcctcatttggaatctgctgtgaagctgtacagtgtggtttcttctggacacaacttgataaattcttgttactaattacaggtttgatcattccggcaaattgtgtgtctcctcttgtaaatctcctatcaacttcagaccagtctcaacagcttgcggtccaacagaaacagctatggcaacagcatcaccctcagagcatcaccaacttgagcaacgcatgaagaacagacaggtttcaacatggatggatctgaaatgctgttgaagcatatcatttgcataaaaatcagggacagtttccaaagaattatatatttttttcagttgtgctctctagttagtttttttgggagtaaggacaaacctggaatagatagcaaaactgaaaatcagcagtgctgatggtggtacatatgtctttcctttagcttctcccctgataattcccatctgcttttacttcgggtgagcagagggggatgtgtgtgtgcgtgtgtgtcagtctgtttgtgagtgtgttaaaggctacagaccacagttggtttaaaatgcttggaacttcccaaactggctttactttatgtttatacagtgctcagggttaacgcagtacatccatgccattgctgtgggaggtatccccggatgcatgtgttttgagtctataaatatagaaaatatatattggtttctttttccaacttaataggtttattaaagcatgaaatgaaaggttgcatatcatgcattcaggttattttctaatttttgttctgacagtgcatgtctttggaagcatgctgaaacaagattaacacaggagtcgagtaacagagagaaacatttgttagatgtacagcattggttattgcatttttatagtgtttatacctgggtattgcttcaaaccctgcagacccctccttccccttctccctgccctgggtttctggtcaaggtaatgaatacatacatttttctgtgataaaactcttaaaagttaattttaatgtattaatagtattcctaatgtgtgctgcagaaatggctatgagcctcttaaatttacatttgcaacttaaaggtagttttagaaggaagtacaaattggctttcatcttgcaaacaatcgttttttacttcattatcttaatttgctttgtcactcataaaaaggaaaccatacctgagttgtagacaatgaggaaacacttgaggcttctgctgtgtgttcttttgttattgttgttattgttgttactcagtaacttgaatattgtttaatgtgttgtaagacgtagagtttatctcaagctgttaaaaatggtaatgtacaaatgtgaatagacacttatctatataatatgggtaagttttgtttcgcctataatagatgtttataaaaacaagtgaggggacagttggtctttttatcttttctttctttttctttcttttctttttttctttttttttttttttttttttttttttgcttccacaggttgcactattgaaaaatcgagattgtataaacctggtaaaaagctgcaagatgccaaaatcttgtagatgtcaaataaaaagttattatactaacaagaagtggactcttgtttaggccctcactggtgaccttcagaagtagtctgtgacggggactcagcagaatttgtgtgttgtctcagcattccaggtagccttatagtttggcttaaaacttatccctaaaatgtaagatggcattgagggaaagggtataatgatagtacttctgaatgttttttaagttgaattgtttgtaaacttcttgcagaattgggtgagatgtgtgttaaaactgacaaacctggctgaaagcttagggcgttcatcctcttgtgtctcctttagcctgagtttggttatgtcaagcttaccgtaagttttcttaggatttatttattcttggtgcctaaaagaataaattgaaagtactttctgttctttggcacattttgcccagcggatgcaacttctatcctcagtccagttcatatatctcaggcagtgatccattttgtatcagccagtttcccttgttagggccgctagacccggctggcagccaagagcagcactctccccaccttcag

SEQ ID NO: 10769 - DNA, 2300 bp, Homo sapien
gaccagcctgggcaacatggagaaaccccctctctaaaaaaattacaaaaaaaaattagccaggcacggtggtgcacgcctgtagttccagctgctcgggaagctgaggtgggaggatcccttgagcctgggaggcggaggttgcagtgaaccaagatgatgccattgcactccagcctgggcaacgtagtcagactctgtcgcaaaaatatatatatatatatatatatatatatagatagatagatagatagatagatagataggttacttgtttattataagtaatgacagtaatcttgcagctgggcgcagtggctcacacctgtaatctcagcactttgggaggccgagccgggtggatctccggaggttaggagtttgagaccagcctggccaacatggcgaaaccccgactctactaaaaatatgaaacttagcctgtagtcccagctactcaggagactgaggcaggagaattgcttgaacccgtgaggcagaggttgcagtgagctgagatcgcgcactgcgctccagcctgggtgacagagtgagactccgtctcaaaaaaaaagaaaagaatcttaacatgtataatgaagagagttaatacagtccccttaaccctccttccattctcaccttcttaggtcacagatgacagagtgaacaagggcagttctctccacattttctccatgtttatataaatatcaaggtgtttttttaaaatggcatgatactacttacaacatacttttctcacttagtggtacattgtagacatcccttgtaatttatgagtcagaattgatcctgttcttacagatgttcgacaaggactgataggcgttggcctgataaatgtagaagatcgctcgggaattcttactctcgataaaggtactactattagctttgtgtgggcatataactgttgctatagtattaaagtccattatgatatatgcttttgagctgaaggggaagcttcatgttcttaaaacattctgggtggttttggctgctgtggggtatgtgtaaaagatccatgcatagagaagcagttttcagcactggctgctgatatgatcagctctcaagcttttaaaaattactgaagtctgctgggcacggtggctcacgcctgtaatcccagcaccttgggaggctgaggtgggtagatcacaaggtcaggagtttgcaaccagcctggccaatatgatgaaaccccatctctactaaaaatacaaaaattagccgggcctggtggcgggtgcctgtagtcccagctactcgggaggctaaggcaagagaattacttgaacccgcgaggcagaggttgcagtgagccgagattgcaccactgcactccaacttcggcgacaatagagcaagactccgtctaaaaaaataaaaaaaaattggtcgggcgcggtggctcacgcctgtaatcccatcactttgggaggctgaggcaggcgtatcacaaggtcaggagtccaagaccatcatggccaagatggtggaaccctgtctctactaaaaatacaaaaattatccaggcatagtggcgggcgcctgtaatcccagctactcaggaggctgaggcaggagaactgcttgaatctggcagggggaggttgcagtgagccaagattgcatgactgcactccagcctgggcaacagcagagcaagactccgtctcaagaaacaaaacaaaacgaaaaattactgaagtcgggtggagctcagacatcggtagttttccaaagctcccagacattctaatagtgccactacagttgagaattcagtgttggagaactaactttcttatgtactgaattgtgttcatactttccataagtgaggctgaagatgcaaaaattcaatttgacaaacctcttttgagcgtgtcctgcagtggtgctaattgctagagagagaaatgggcagattacagccttgttgtgaggacagtgtaagagttaagaaggaagacttttagaagagaaagtgggacttgaactaagcctagatgaataaaaaatttttaattatcatttgcatgaaaacgtttatcttttgtcattacagattataacaacataggaaaattcttaaatagaattttaggcatggaggtgcatcagcagaatgcgttatttcagtattttgcggacacacttactgcagttgttcaaaatgccaaaaaaaatggaagatatgatatgggaatcttaggtaagtagggaaaatttcccccccacaatgtccccagggaaaatgtggagtg

SEQ ID NO: 10770 - DNA, 2300 bp, Homo sapien
cttgctctgtcgccaggctggagtgcagtggcatgatctcggctcactgcaacctctgccaacaggttcaagccattctcctgcctcagcctcctgagtagctgagattacaggcacatgccaccacacccagctaatttttgtatttttagtagacacggcgttgcaccatgttggccaggatggtctcgatctcctgacttcatgatctgcccgctttagcctcccaaagtgctggaattaacaggcatgagctaccgtgcccagccccaaatagcttttaaaattcaatttaattttaaagttgaaaaagtacctaggtaaataatctgtgaggattgattggttggggtgggaggtttggatgaaacaaaattggccatgaattcacagttgtttaaactgggtgatggatacatgtggctcatagcttagccttttttctttcgtgtatttggaaatgtcctttttttttttttcgagacggggtctcgtgctgtcacctgggctggagtgcaatggtgtgatcttggctcagtgcaacctccgccaccaggttcaaagggttctcctccctgaacctcccgagtagctgggattacaggtgcccgccaccatacctggctaatttttgtgttttcaatagagatggggtttcgccatgttgaccaggctggtcttgaaatcctggccgcatgtgatcctcccacctcaacctcccatagtgctgggattacagatgtgagccaaggcacccagatggagttagcatttttcactaggaagtccttttggtagattagcacatactgatatgtgttgttaacagttcatattgacataccagttagaggtgttcatcattactctcggctttcaacaaaagcagtaaagtcttaaccctacaccttcactccttttgacatcaggagtgtcagaaacaactccctggtctgggcacagtggctcatgcccgtaatcccagcactttgggaggctgaggtgtgaggattgcttgagcctaggaggtggaggctgtagtgagctgtgatggcaccactgcattccagactggtgagagagaccctgtctcagaaaaaaaaaaaaaagattccttgatttacttctaacttcttaaaattacaggttatggctaggcgcagtggctcacacctgtaatttcagcactttgggaggccaaggcaggtggatcatttaagctcaggagatcaagaccagcctgggcaacatggagaaaccccctctctaaaaaaattacaaaaaaaaattagccaggcacggtggtgcacgcctgtagttccagctgctcgggaagctgaggtgggaggatcccttgagcctgggaggcggaggttgcagtgaaccaagatgatgccattgcactccagcctgggcaacgtagtcagactctgtcgcaaaaatatatatatatatatatatatatatatagatagatagatagatagatagatagataggttacttgtttattataagtaatgacagtaatcttgcagctgggcgcagtggctcacacctgtaatctcagcactttgggaggccgagccgggtggatctccggaggttaggagtttgagaccagcctggccaacatggcgaaaccccgactctactaaaaatatgaaacttagcctgtagtcccagctactcaggagactgaggcaggagaattgcttgaacccgtgaggcagaggttgcagtgagctgagatcgcgcactgcgctccagcctgggtgacagagtgagactccgtctcaaaaaaaaagaaaagaatcttaacatgtataatgaagagagttaatacagtccccttaaccctccttccattctcaccttcttaggtcacagatgacagagtgaacaagggcagttctctccacattttctccatgtttatataaatatcaaggtgtttttttaaaatggcatgatactacttacaacatacttttctcacttagtggtacattgtagacatcccttgtaatttatgagtcagaattgatcctgttcttacagatgttcgacaaggactgataggcgttggcctgataaatgtagaagatcgctcgggaattcttactctcgataaaggtactactattagctttgtgtgggcatataactgttgctatagtattaaagtccattatgatatatgcttttgagctgaaggggaagcttcatgttcttaaaacattctgggtggttttggctgctgtggggtatgtgtaaaagatccatgcatagagaagcag

SEQ ID NO: 10771 - DNA, 2300 bp, Homo sapien
ttttacctacaccttgctggctggagaatgttcacacttagccgtaagggagactgggaaataaaactggaagtcttcattattgagaaagaaggagagaataggcagtctgctgaaggacttcatttaaggcactggcctgcttgttcttatgcaaaagtgactttatttttcttatatttgacacagaatattgctatcatctcagaagctgccagctcgggtatttcattacaagcagataggagagctaaaaatcaaaggcgaagagttcatatgactttagaattaccttggagcgctgatagagcaattcaacagttcggtaagttcctacaaactggatttcacttaatggatagctaggaatcattggggtaaatttgcgcataccaaaacctaggtttaggccgggcacagaggctcacgcctgtaattccaacatttcgggaggccactgtgggaggataacttgagtccgggagtttgagaccagcctggtcaacgcagtgagaccctttctccaccaaaagaaaagaaaaacagctgagagcagtggctcgtgcctgtaatcccagcactttgggaggctgaggtgggtgcatcacttgaggtaatagtttgagaccagcctggtcaacatggtgaaacccagcctctactaaaaatacaaaaattaactgggtgtgttggcacacacctgtaatcccagctacttagggtgctgagacgggagaattgcttgaacctgggaggcgcaggctgcagtgagctgagatcacgctattgcactccagcctgggcaacatagggagattccatctcaaaaaaaaaaaaaaaaagaagaagaaaagaaaaacttgctgggtgtggtggcgtgtgcctgtagtcccagctactcaggaggctgaggtaggaggattacttgagtccaggagttcaaggttgcagtgagatatgatttcaccactgcactccagcctgggtgacagagcgtgaccttgtctcaaaaaacaaaaacaggctgggcgcagcggctcacgcctgtaatcccagcactttggcaggctgaggtgggtggatcacctgaggtcgggagttcaagaccaggatgaccaacatggagaaaccctgtctgtactaaaaatacaaaattagccgggcgtggtggtgcatgcctgtaatcctggctactcaggaggcagaggtaggagaatcgcttgaacccgggaggcggaggttgcagtgagccaagatcacaccattgcactctacctttggcaacaagagcgaaactctaacaacaacaaaaaaatcctgtttaatgtcttatatcttatctcgaaatctcagatcttgcatttaaggagtgttatatatatactttatagtatatgatgcattgtggattcattttttgcttgtttacaagttgtaaaaaatatatatgtggtgggaatttgtggggttccaagaacagggttcctcaaggagtgtccttataaaacttaaggatgtattaggtccatatcagagaagctgctacttctatatgtgtttccaacctcagtagcttcaccaaaggcccatagctcctccctccatcttcatgttcttgtgaccaatgatttgaaaaacaattttgggaaaatccagagtaattgtgcatcagtaacatgtggttaagcaaaattggggtagcaatgctaatacttctgtcattgagcagttttatgtgtgttatggtaattttacattatctgtaatttttattgtttagtggtttcccaataccagtttagtgttaaatgctaggaatacatctcagaatattctctgtccagcgaacacaatcaatgatctttaaaacaaaatttcgttgcaggacgtactcatagatcaaaccaagttactgctcctgagtatgtctttctgatatctgaactggcaggagaacaaagatttgcatctattgttgctaaaagacttgagagtttggtgagttttggagttgtgtggctgtgtgtaaatgatgatctattgtacctgttttctggtaaaaggttacctgtgccttgattgaaatttttgtttttaacagggggcacttacacatggtgatagaagggcaacagaatctagagatctgagcaggttcaactttgataataaggtacatttcaattttcagtatctctgaaaacttgtgatagtgtatggtgtctttcgggaacacaaaaggaaagtagttactgtctaaaacaaaactgcctctcctatgcatttgctttaaaatcatg

SEQ ID NO: 10772 - DNA, 2300 bp, Homo sapien
ccaggctggagtgcagtggtaccatcttggctcactgcaacctctgcctcctgggttcaaggagctgggattacaggcatgcaccaccacgccctgctaatttttgtatttttagtagagatggggtttcaccatgttggccaggctggtctcaaactcctgagcttaagcaatgcacccacctaggcctcccaaagtgctgggattacaggtgtgagccatctcgcccagccctgttttggttttagaagttgacttctcgccgggcacagtggctcacgcctgtaatcccagctttttgggagttgaaacaggcggatcacctgaggtcaggagttcgagaccagcctggccaacatggcgaaaccccttctctactaaaaattaaaaacttagccaggactggcggcaggggcgccttataatcccagctataagggaggctgaggcattagaatcacttgaactcgggaggcagaggttgcagtgagccaagattatgccactgcactttagcctgggagacagagtagacactgtctggggaaaaaaaaaaaatatctggtcatggttgcatgtgcctgtagtcccaggtacttgggaggctgaggtgggaggatcacatgagccagggaagtcgaggctgcagtgagctatgattgtgccactgcactccagcctgggcaacagtgaggccctgtctccaaaaataaaaaggttttataaattgattttctattgattttctaagtattccatgtctataaacctgtaattattaggcctcttctcaaatctgatacacagtcaaattgtgactatgccagaggttctgcttttactctgttgtcctgaatatgttttgaaacttgtgcacttgaaggcagtcttgacttagtacttttgtatccaatttcttcttcagaataaatgtttataaccttattttttatgggagtccaaaaggttagtgctggtttgtgaattctgtttgttttttgacttaacctaaatacttttcctctgcacttttcatttgaattaattcatgaactaaatgtgatgtactggatcttaagaaacattgaatttgggctgactctcttgtttgtggcggagggtaggtgaagaaataactcgagaagccaaaaaagcacgaaaagtaggtggccttactggtagcagttctgacgacagtggaagtgaatctgatgcctctgataatgaagaaagtgactatgagagctctaaaaacatgagttctggagatgatgacgatttcaacccatttttagatgagtctaatgaggatgatgaaaatggtaagttcagtatattaaatatacacgaaagcatataatatttcagtatatttgaaaatgggatatgaaaccttttcttctgtacagtacaaatgatcacacagattataatctttgcttggtggaaagctccaggcttatctaccttctggaagtttgagcctcatatatgtgagaagataacctcaattttgtgcagttatttttaacttgaaaacatggatttgtaccccatggtgtatggatgaaccaatgtaggtggtgataagttatcagttaacaatataaaaaatttcatccaggcgcggtggctcatgcctgtaatcccagcaatttgggaggctaaggtgggtggatcacctgaggctgggagttcgagatcagcctgaccaacgtggaaaaaccccatctctactaaaaatacaaaattagccaggtgtggtggcacatacctgtaatcccagctactcaggaggctgaggcaggagaatcgcttgaacccaggaggtggagattgcagtaagctgagattgcgccattgcactccagcctgggctacaacagcgaaacattgtctcaaaaaaataaaatttcaaaggttgtttcctttgaagattctgtacttgttttaacaaatgatttgacatgtatctttccttaacactcagatccctggttaattagaaaagaccacaagaaaaacaaagagaaaaaaaagaagaaaagtatagatccagattctattcaaagtgccttattagcatcaggtcttggatcaaaacgacctagtttttcatctacaccagttatctcacctgctcctaacagtacaccaggtatccatacagaaacttcctttttgaaatactgttttaaacaaaaatatttaaactttgtactaacttttagcaaatgttctttatctagctaacagtaacaccaacagtaacagtagccttataacaagtcaggatgctg

SEQ ID NO: 10773 - DNA, 2300 bp, Homo sapien
ggtgggtggttcacctgaggtcaggagttcgagaccagcctggccaacattgtgaaaccctgtctctactaaatacaaaaattaaccaggtgtgttggtgggcgctacttgggagggtgaggcaggagcatcagcccgggaggcagtggttgcagtgagccgagaccgcgccattgtactccaccttgggcaacaagagcgaaactgcgtagtcatgctgatcgtactcttggctaatgccatttttgtaggacatcatgaaacactgacacttaattttatcacagtctgagaacaaatggactagctgaaaattagtatatttatgtaacatgaaattagttttctgagaagagtacagatttttcataagtatgtttgtatatgtaaattggttatttcagggaaattaatgagaaaagttaaaatttagaaagctctttttcccccctataaaatgggtaaaaatccatggcagcagaatagtttggcccctgagattatagttggaaaaacttccaaactaaaatctgtctacttgctttaaattggctttagccccccaccccggcaaactccatagaactcatcctttaggtcttctgggctcggtgtttattttttattttctcttggcctgactctaaccattcatcagctcatactttttctctgacgtgcttcatattctcgcttccattctgagtttgtatttaagctaaatgtgatggatttagctccctaagtatcttggattccatttccccttctttctctctgccccatgcagttataatacatctctctcctggtcagctatgtcagtttcccaagatgtcattctgctcctggtcttctgctccctcttagtttgtttccacattgctgttgagtaatccttctatttttttctatctttactgagttgagttgggggtcttactctgtaacccaggctggagtgcagttgtgcaatcacagctccctgcagtctccaactcctgggcttaagccatcctcccaagtagctgggactacaggcgtgcaccaccacacttggctaattaaaaaaatttttttgtagatacggggtctctaggcaggtcttgaactgctggcctcaagctaacctcttgcacctccactttggtgctgggattacagacttgagccacagtgcccagacttgtaatctttctaaatcacaaatctgccgtgtcaggtagtcctcaatcggaaaacttgttagtaatccctgtttcccacaagagcaagtgaactctccagcatggtgtacagggctgtaggtgataccttcacctcttgccgtttcctgcctgagccccatacttctgttctgagcttccatacccttgttgaattaactccagaggttttctttttctttttttttttttttgagatggagtctcgctctgtcacccaggctggagtgcagtggcacaatcttggctcactgcaacctccacctcttggttcaagtggtttttcctgcctcagcctccagagaagctgggattacaggcacccgccaccacatgtggctaatttttgtatttttagtagaggcaaggtttcaccattttggccgggctggtctcaaacttctgaacttaggtgatccacctggctttgcttcctggcgtgctgggattacaggcatctggcctccagccatagtttttaaagtgtgtcaaattctttcatacctctatgttttgaatgcatagtcgagaggatccttgtccacctgatgattccctgatgctctgctgcattgtcatctttataacatctctgcttccacaaagttcattatttccttctctgttcccgtagccttttgtagatgcatacttgtgctatgatttatgtacttctctatcctttctattttagagtgagcttgggatccaagactatttctcttttatcctctttgtctgagacatggcaggttcttcattaatactgaatgaatgggtctaatagagattgttggattgtttatatttagaggggagttaatatttgtcactttttgttttttatgttaatatttaatatttccctttaaagatggtggagccagggcaagatttactgcttgctgctttgagtgagagtggaattagtccgaatgacctctttgatattgatggtggagatgcagggcttgcaactccaatgcctaccccgtcagttcagcaggtaagagttttccaaagcctctctttcttagtgatttccgcttacagtatttttttttaagatagtct

SEQ ID NO: 10774 - DNA, 2300 bp, Homo sapien
aatcccagcactttgggaggctgaggcgggcatatcacctgaggtcaggagttcgagaccagcctggctaacatggtgaaacgccgtttctactaaaaatacaaaaaattagccgggcgtggtggtgggcacctgtaatcccagctactcaggaggctgaggcaggagaatcacttgaacccaggaggcggaggttgcagtgagctgagatcccgccattgcaacaaactagcttgggcaacaagagtgaaactatgtctcaaaaaaaaaaaaaattaaaaaaatagtttcgctttgttacccaggctggtgcagtggcacgattatagctcactgtagcctcaaacttctgggcaatcaagtgattctcctaccttagcctcctgagtagctgggactatatatcacacttggctaattaaaagttttttgttgggccgggcgcggtggctcacgcctgtaatcccagcactttgggaggccgagatgggtggatcacgaggtcaggagatcgagaccacggtgaaaccccgtctccactaaaaatacaaaaaaaaaaaaaaaaaagtcctagctactcgggaggctgaggcaggacaatggcgtgaacccaggaggcagaggttgcagtgagccgagatcgcgctactgcactccagcctgggcgaccgacagagcgagaccccgtctcaaaaagaaaaatgtttttttgtcgagatgaggttgcactttgttacccaagtctggtctcaaactcctggctgagatccccgtttcagcctcccaaagtgttgggattacaggcgtgagccaccacacctggcctgtgcctaaggttttttttgttttttgtttttgagtcggattctcgctctgtcgcccaggctgcagtgcaatggcacgatctcggctcactgcaacctccgtctcttgagttcaagcgattctcctgcctcagcctccagagtagctgggattacaggtgcccgccaccaagccccagctaaattttgtatttttagcagagatggggtttcaccatgttggccaggctggtctcgaactcctgacctcaggtggtccgcccacctcggcctcccgaagtgctgggattacaggcgtgagccactgcgcccggcctaaaatattttttatttttgtctttataggttttttttctatgtgtgtgagaggattaaatgaaataatgtaattagtaaagcgattagttagcactttaaaaatatttataaatgtatacatagatatataatacatatctatgtgtacaaacactgaagtttcctattctttctgtgcctactttttcctttctttccccgaatactttgtctctggaagagttcacactgtaacctccaactgttccagctacttggtttgctttcagcactaggcttgtaggatgcgcagccagtagggggcaagaatcacccaggcgtgcttattacccaagcaacggagtcaaacagcactttcagaatgactttacaaaagggttaccaacaaggtaatatgtttattgtgttaggtcgcttaataataacgaaaagatgaaaacaaggaagtgagaagcggtagggacagccctactcttcagtattcattaagtgggagccccggtgtgtcgggcttgcgtatgagcgtgaagacagacgtgggatggctgagctcacacgccttaggctctgattctagccgtggtcgcgccgagggctccgggttacttgcggtttcactgccaataaagtgctttgagcgagcctaacaagcaatgaatatgtaaacattttgtttctaggactaactaggtaatgaagagatcttccaagtgacagaaacgctgctaggtaacttcctgggccgtagctccccaccctaacaggttctgaaaatagctccaggcccttcctaaccggagtttgaaagcaggcgcggggcgcatgcgcgcggccctccggccgacctcccgatagccctggcacgcggaccttcttcccgacaggccgcggggaaaaaagggcggggaaacggaattaccgcgagctctccgtgagcgccggcggaaacagtagtcacgtgactctcctaggtggccttcgccttccccctcccccttcgcggaaacccggccccctcacccctcgcccaccccagagccgcggtaatggaccgtttgggttccggaattctcttggatccaacaactggtaccgggccgaggatagccggcggagtccgtttttggcggcgaagactggggggtggtcaagatgggg

SEQ ID NO: 10775 - DNA, 2300 bp, Homo sapien
cctgccaccacgcccggctaatttttttttttttgtatttttagtagagatggggtttcaccgtgttagccaggatggtctcgatcttctgacctggtgatccgcccacctcagcctcccaaagtgctgggattacaggtgtgagtcaccacacccagccttaaaattatcttttaaataatgccttgtttcttccctaaaagaatgcagggaaggagctgtgtctactttcccttcggatccttgggggatccaaaacagcggcaggcatagagctcaataaatgttgaaataatcaattttggagaaagcaaacacctctctctctatatatattttttgtttgtttgtttgtttgttttgagacagagtctcgctctggtgcccaggctggattgcagtgggacgatcttggctcactgcaacctctgcctcccgggttcaagcacttctccgcctcagcctcctgagtagtgagattacaggcacgcaccaccacgcctggctaatttttgtatttttagtagaaacggggttttcaccatgttggtcaggctggtcttgaattcctgacctcgtgatccacctgcctcggcctcccagagtgctgggattacaggtgagagccactgcacactgccacacttccacatatttatggaagctgtaaggcatgttggagattacggcaccagctccttcatttgacaggtagggaaatggaaggccagagagctgaactgatgtgccaagtgacacagtgactttgtgacaaaagtgtccttttctacctttcccagtgctttcacatatatcattttattttcctttcctattttcctggtgctttggaagagtctttgggcaatggttgggtctccaaaaccttttcaattaccaaagagacaggatggattagtgacctcgtcccacacccctgggaggggccccagggaagagcagtagtaactggacgccttccctgagtccaaagcagacactccaggacacctgattctctgggaacatactgactgagccccctctctcagaggggaacagcgaatacttgcttccctcgggataaggtagccatttagtgtttgaacagtggagagactgacccaggccctgcaattacattgctgggtgaccttgggcagcgcgtaagtgacccgcttcctctattgccccatctgtaaaatgggtgggtgtgaagcattaggatctttgcggtcctggaaggaccttccctactgacccagttagttggtaggagttgtgtctgtgggtttttttttttttctttttttgagacggagtctcgttctgtcgcccaggctggagtgcagcggcgtgatctcggctcactgcaagctctgtctcccgggttcacgccattgtcctgcctcggcctcccaggtagctgggactacaggcgcccgccaccacgcccggctcattttttttgtatttttagtagagacggggtttcaccgtgttagccaggatggtctcgatctcctgacctcgtaatccacccgcctcggcctcccaaagtgctgagattacaggcgtgagccaccgcgcccggccgggttttgaatactggaatattcaataaacctttttttttttttttttttttgagacagtgtttcgctcttgttgcccaggctggagtgcaatggcgcgatctcggctcaccgtaacctctgcctcccgagtagctgggattacatgctattctccggcctcagcctcccgagtagctgggattacatgcatgcgataccacgcccggctaattttgtatttttagtagagactgggtttctctatattggtcaggctggtctcgaaccacggacctcaggtgatccgcccgcctcagcctcccaaagtgctgggattacaggcatgagccaccgcgcccggccaaaacctttcaaacctgagaatgaatggatcaaactgctggagaggtcggtgtgctggagttgctaaactgctgggagactcaggtttcccagctcttaagggaagatcgaggggtcaaaggtcgggttccggtcaagcccacagagaaccggaagtcccagatccggtcggctcggagcccagggctccagccgggctactcacgctccggaggcggagcttcagcagcgggagggggaggaatctggggcctcccaatggcagctcgggtgtcttccatcgcagccattcaacgtctggcgacggtcaaatttaaacacccctcccacctcctccgccgggacctgtcgggaaagcgt

SEQ ID NO: 10776 - DNA, 2300 bp, Homo sapien
acagacttttctttttttttgggagacagagtctcactctgtcacccaggatagagtgcagtggcacaatcttggctcactgcaaactccacccccctgggttcaagtgactctcctgcctcagcctcccaagtagctgggattacaggcatgcgcaaccacgccaagctaatttttgtatttttagtagagacggggtttcgccatgttggccaggctggtctcaaactcctgatttcaggtgatttgccctcctctgcctcccaaggtgctgggattacaggtgtgagccactgcgcccagctggtgtatttgttatatacgtataaacttgcggagaaaggactgttttgaaacttacattgaatgatctgtatttacatcttctaggtactggagctgcagaattgagaggaataggtgctagacttgtaatgtgtcccctgcaattgggggctcaaatgcagagaaagctatgaccatgagtggggcgtggggtgtggctcggtatactagaatgtgaaatggataagatgatctatgtgggtgcttcctgctccaaaaccatgattctcatggcagttaagctgcaaaacttctctgccttgcagaaatagaagacgctttcaaatggctcaacctggttatcagagtgtcactttcgaatcctctttcaccctctgggtaatcttttggatattcaactgtagtaggctctgcagagggcataggcagagtacctagcccactggagttagtggttgggctggagaccctgccttgaaggatgctaaagcatgagctgatttgggagggattgtctgagcagtgacctgtcaccacctaatcctactcagtcttatccgttccaatgggagtcgagggaggctaggtgggaggatggctacaaacagccatttgcttatctgtggatgttggaaggtgctctggtggattatggaattcaaggttcttggtttttacccatgaggacactgaggcccagactggggaagtgacttggcgatggtcacaaaacacctctgggcagatgcagggaaataagtccagcccctgactcccaggccatgggccaggctgcaggagctggatgccttgaagtgtcttgtttgcatctatgactttgcacaaatacagtgaatctggctgtgggccctcaagccttaatggccacagagtagtggtgcagggcagtgagctatgctgaaacagccaccagagtgacgggaacctcgtctgcctatgggggcattttctcacggcgggataggagaacaaggtgacatgttaaacccttctgcaagaccatttgcttctcccaaactccatttcctcatctgtaaccaggaagggtagtggctgggagggcaaggccctggggtcagttggctggggctgaaaacccatctagttctgagaacttggccaagctcctcactttctccatctgttgaaaagagataataatggtgtctacctttgcagggctgctgtgaggtttcagtgagataacggcaagagactcgcccaggaaaccgatcattataacccctggctctgtctccccagggcttcctaccggtcaagtacagcccttctgggtttgacacctggccccatcacttcctagttctgtggcccgggacaaacccctgcacatcccttgagtcacagtgtcaccattgtaagctgggatgccgacaggacctgcccccgtgggcgtgcggggaggattcaatgcctgtgaaactctcggtgggcacagcgccgggcacacccgagggcctggcctggcgcgttcaccgctgctgatttcgtctggcacagaccgggttcccaaaatatccgcagagccagcggaaaaaggagccgggcgggctggcgggagggcgggcgggagcctgggctgtcatgacggtgtttcccaccccttcctccgcgagtggctgaggccgcgcgagagggggcgcgcccgagccgggattcgccgcgcccgcccgcccgccctccggagcggcctggcggcgccgcccctaccagccccctccccgggccgggcgccggacggtgggcggctgcgagcgggcgggagggctgcggaggacgcgccgcctgcgcctccttcccttcgtgcctcgccccgggcggcccggggctgccgcggtgcgcgggtgccgggccctgcctcgccggccatgggggaagggggcgccgtggggcgccgccggcccttccccggggcgccgcggcggcgctggtggcggcggcgagggcgcggg

SEQ ID NO: 10777 - DNA, 2300 bp, Homo sapien
ttgtatttttagtagagacagggtttcaccgtgttagccaggatggtctcggtctcctgacctcgtgatccgcccatctcggcctgacttttttattttataaaagtaaaataggccaggcagggtggcttacgcccgtaatcctagcactttgggaggcccaggtgggaggattgcccgagctcaggagttcgcgaccagcctgggcagcacagtgaaaccccatctctactaaaatacaaaaaattagccaggcggggcggcatgcgcctgtggtcccagctactggggaggctgaggtagaagaattgctttaaccagggaggcggaggttgcggtgagccgagatcatgccactgagctccagcctgggcaacagagcaagattctgtctctaaataaataaataaacaaataaataaaataaaataaaataaaataaaaagaaacgaccctctgaaaatagtgtgttttgttaatttgctttgcttttgttggttggtttaatctatgtacattctccattgagattctagtacctcagtgtggagaaaatggatacacctatcacaaggaaagctgccaatacattcctgggaaagacaagccccgttgctgagctttctgcctgagactatcacaaacctccagtgaaacctaaaataacttgagatttgttgtgcctttttttttgagacatgatcttactctgtcaccatggtcccactctgtcacaggcaccactctgtggtgagatcttggctcactgcagcctcaacatcccgggctcaagtggtcctcccacctcagcctcccgagtacctgccactacaggcatgaaccactgtgtccagctacttttgtttactttttgtagagacagggtctcactatgatgcccaagctagtctcaaattcctgggctcaagcaatcctcctgcgtcagcctcctgaagtgttgagattaaggcatgagccacagcgaatgactcaagtttctacgccactctgctaatattctcagtaatatggattccgcatatgtgtcgaatgctttgtgattttcagacaggggtttctctcttgttaattactcctccttctctcacccaagtagcaaggtgtctccaacaccagcaattcctccctagcgctgtggaagaaagaatgaaggggccgggcgcggtggctcacgcctgtaatcccagcactttgggaggccgaggcaggtggatcacgaggtcaggagatcgagaccatcctggcgaacatggtgaaaccccgtctctactaaaaatacaaaaaaattagccgggcgtggtggcgcgtgcctgtagtcccagctactcgggaggctgaggcaggagaatggcgtgaacctgggaggcggagcttgcagcaagccgagatcgcgccactgcactccagcctgggcgacacagggagactccgtctcaaaaaaaaaaagaaagaaagaaagaaagaaagaatgaaggattgcagtcacgtatgtgagtgcttcctaagtgcttgaggtgtcgcacacatgatctcataagctcatgttcctcgcagcaaccctgccacctgggtcccgctattgtccccattttacagaggaggagactgaggctcggagacgttaagtaacttgccaaggtgacagcgctggttacgtggaggagccgaggacccagcgaagtgagcagggcagacattctccattttattgagagtcacagcgaagtcggacgccccaggccctagtgacaatttgcctgggagttttccagatcctcaagcctcggggactctgtcgcgctgcccccagcagctgctttctgtttggccgcaggctccagaaaacaccctcaaagagacacccggatcttccatcacctacgatgcaaattctacggctggaaagcacgagggtggaaaggaaaaagttgcgttctttttaccccgctctggattgcacggtggaaactccgtctccacggaaacgcacctcctggcagcggtcgccaggggcggggctcagggcggctcctccccggggctgcaactgttcccaggctggggcgattgccgtcacccctgaacttccccgttcctcttctcggctgcctccttttccgttgtcccttcgcgccccaaaccacatcctggagcgcactctccagcgtggctggcagcggggacggtgcgccggggcgcaggcccaagagtcgcgtgcgcggccccttgcaccatccccccgggcccacccccgggccgcgctgattgggcaggtaggg

SEQ ID NO: 10778 - DNA, 2300 bp, Homo sapien
aagtgctggaattacaggtgtgagccactgcacccaggcttcttgtgtatttttttgtcccagttctagagtcagctatttctccaaggagcactggttactttcattggagaatgatatcagaaaccaagatccgggtgctaggttatgcttattgctaccagggtacacagacattttaatgtatgtgtaacataaaatttaccttttccactgtactttcatttatttatttatttatttttgagacggagtttgctctgtcgcccaggctggagtgcagtggcgtgatcttggctcactgcaacctccgcctcctgggttcaagtgattctcctgcctcagcttcctgagtagctgggattacaggcacgcgctatgacacctggctaatttttgtatttttagtagagatggggtttcaccatgttggcgtggctggtcttgaacttctggcctcaagtaatctgccttccttggtctcccaaagtgctgagattataggcgtaagccaacgtgcctggttcttttttttttttttttttttttttttgagatgcagtctcgctgtgtcgcctaggctggagtaccatggcgcaatctcggctcactgcaacctctgactcccaggttcaagctattctcctgcctcagcctcccaagtagctgggattacaggtgcccgccagcacacccagctaatttttgtatttttagtagagatgcggtttcactatgttggccaggctggtcttgatctcctcacctcgtgatcctcccaacttggcctcccagtgtgctgggattacaggccttagcctcctcgcccggccagtctgttttaactattaaataacattaggtagattcacattgttgtgaaaccatctgtactatctatttccagaacttcttcatcatctcaaattgaacctctgtatctgttaaacaatacctcgccatcttcctaacacccacagcagcccctgataaccactgctgtactttccaaccatgaatttgactatcctaggtccctcatataagtggaaccatacagtatttgtccttatgcttctttcacttagcatggttcatccatgaactacgttcattcatgatgttgtagcaattagaatttcatttctttttaaggagaaatagtattccattgcatgtactgtacataccacgtgtgtgtgtgtgtgtgtgtgtgtgtgtgtgtgtgtgtgtgtgtgtgtgtgtttaaaagcataggggtcagccaggtgtggtggctcacgcctgtaatcccagcactttgggaggccaaggcaggcagatcacttgagatcgggagttcaagaccagcctgaccaacatggagaaaccccatctctactaaaaatacaaaattagccgggcatggtggcacatgcctgtaatcccagctactcggaaggctgtcaggagaattgcttgaacctgggaggcggaggttgcggtcagccgagatcgtgccattgcactccaatatgggcaacaagagtgaaactctgtctcaaacaaaacaaaacaaaaacaaacaaacaaacaacaacataggggtcttgctctgttgcccaggctgacaggctgaacttgaactcctggcctcaagcctcacgactcagcctccctagtagctgaaactgcagatggcctccactgacagtggctaccatatattttcaaacataaaattttaagctatagatttttcttttttttgagacggactttcactcttgttgttcaggctggagtgcaatggcaccatctcagttcatcgaaacctctgcctcccgggttcaagtgattctcctgcctcagcctcctgagtggctgggattacaggcacatgacaccatgtccagctaattttgtatttttagtagagaaggggtttctccatgttgctcaggctggtctcgaactccgaacctcaggtgatccgcccgcctcggcctcccgaagtgctgggattacaggcgtgaggcatgccacctggcctttttttttttttttttttttataaagaaattggggccgggcgcgatggctcacgcctgtaatcccagcactttgggaggccgaggcgggcggatcacttgaggtcagaagttcgagaccagcctggccaacatggcaaaaccctgtctctactaaaaatacaaaaaatagccgggcgtggtggcgggcgccagtaatcccagctacgcgggaggctgaggcaggaaaatcacttgaacccgggaggcggaggttgcagtgagccgagt

SEQ ID NO: 10779 - DNA, 2300 bp, Homo sapien
ttttttttttgagatgcagtctcgctgtgtcgcctaggctggagtaccatggcgcaatctcggctcactgcaacctctgactcccaggttcaagctattctcctgcctcagcctcccaagtagctgggattacaggtgcccgccagcacacccagctaatttttgtatttttagtagagatgcggtttcactatgttggccaggctggtcttgatctcctcacctcgtgatcctcccaacttggcctcccagtgtgctgggattacaggccttagcctcctcgcccggccagtctgttttaactattaaataacattaggtagattcacattgttgtgaaaccatctgtactatctatttccagaacttcttcatcatctcaaattgaacctctgtatctgttaaacaatacctcgccatcttcctaacacccacagcagcccctgataaccactgctgtactttccaaccatgaatttgactatcctaggtccctcatataagtggaaccatacagtatttgtccttatgcttctttcacttagcatggttcatccatgaactacgttcattcatgatgttgtagcaattagaatttcatttctttttaaggagaaatagtattccattgcatgtactgtacataccacgtgtgtgtgtgtgtgtgtgtgtgtgtgtgtgtgtgtgtgtgtgtgtgtgtgtttaaaagcataggggtcagccaggtgtggtggctcacgcctgtaatcccagcactttgggaggccaaggcaggcagatcacttgagatcgggagttcaagaccagcctgaccaacatggagaaaccccatctctactaaaaatacaaaattagccgggcatggtggcacatgcctgtaatcccagctactcggaaggctgtcaggagaattgcttgaacctgggaggcggaggttgcggtcagccgagatcgtgccattgcactccaatatgggcaacaagagtgaaactctgtctcaaacaaaacaaaacaaaaacaaacaaacaaacaacaacataggggtcttgctctgttgcccaggctgacaggctgaacttgaactcctggcctcaagcctcacgactcagcctccctagtagctgaaactgcagatggcctccactgacagtggctaccatatattttcaaacataaaattttaagctatagatttttcttttttttgagacggactttcactcttgttgttcaggctggagtgcaatggcaccatctcagttcatcgaaacctctgcctcccgggttcaagtgattctcctgcctcagcctcctgagtggctgggattacaggcacatgacaccatgtccagctaattttgtatttttagtagagaaggggtttctccatgttgctcaggctggtctcgaactccgaacctcaggtgatccgcccgcctcggcctcccgaagtgctgggattacaggcgtgaggcatgccacctggcctttttttttttttttttttttataaagaaattggggccgggcgcgatggctcacgcctgtaatcccagcactttgggaggccgaggcgggcggatcacttgaggtcagaagttcgagaccagcctggccaacatggcaaaaccctgtctctactaaaaatacaaaaaatagccgggcgtggtggcgggcgccagtaatcccagctacgcgggaggctgaggcaggaaaatcacttgaacccgggaggcggaggttgcagtgagccgagttcgcaccactgcactccagcctgggcgacagagggagtctccgtctcaagaaaaaataataaataagaataaataaataataaagtaaaatgtcccaggtaactgcatattcgatagtctttctttcaacttagttgttgaattagcaatttttctcttaaaaaaatttttttttagcttattgtcttcggagatgataacaccctcgttgcgtgggagtaaaattttaaaggtaaaacaaacaggaaacgagcgtcggcggcgaatctgctgctaccaatgtaaaggtcaggccgaggccggcgcggagaatctgctgtcgcctgcagctgctcgcctgtctccgtcggaagggagcccaagctttgcagaggtgagtggaagcggcttggaaggagcgggccccacgccggagagaaggaagagggagtgcggcccagacgctgtgcccgcgcttgtgtggggcgccatgttgaaacctggcaaaggggacgacattctgggttgcgttgcggggagtggggacgagagctggattggaag

SEQ ID NO: 10780 - DNA, 2300 bp, Homo sapien
ctctgttgcccaggctgacaggctgaacttgaactcctggcctcaagcctcacgactcagcctccctagtagctgaaactgcagatggcctccactgacagtggctaccatatattttcaaacataaaattttaagctatagatttttcttttttttgagacggactttcactcttgttgttcaggctggagtgcaatggcaccatctcagttcatcgaaacctctgcctcccgggttcaagtgattctcctgcctcagcctcctgagtggctgggattacaggcacatgacaccatgtccagctaattttgtatttttagtagagaaggggtttctccatgttgctcaggctggtctcgaactccgaacctcaggtgatccgcccgcctcggcctcccgaagtgctgggattacaggcgtgaggcatgccacctggcctttttttttttttttttttttataaagaaattggggccgggcgcgatggctcacgcctgtaatcccagcactttgggaggccgaggcgggcggatcacttgaggtcagaagttcgagaccagcctggccaacatggcaaaaccctgtctctactaaaaatacaaaaaatagccgggcgtggtggcgggcgccagtaatcccagctacgcgggaggctgaggcaggaaaatcacttgaacccgggaggcggaggttgcagtgagccgagttcgcaccactgcactccagcctgggcgacagagggagtctccgtctcaagaaaaaataataaataagaataaataaataataaagtaaaatgtcccaggtaactgcatattcgatagtctttctttcaacttagttgttgaattagcaatttttctcttaaaaaaatttttttttagcttattgtcttcggagatgataacaccctcgttgcgtgggagtaaaattttaaaggtaaaacaaacaggaaacgagcgtcggcggcgaatctgctgctaccaatgtaaaggtcaggccgaggccggcgcggagaatctgctgtcgcctgcagctgctcgcctgtctccgtcggaagggagcccaagctttgcagaggtgagtggaagcggcttggaaggagcgggccccacgccggagagaaggaagagggagtgcggcccagacgctgtgcccgcgcttgtgtggggcgccatgttgaaacctggcaaaggggacgacattctgggttgcgttgcggggagtggggacgagagctggattggaaggatggcgccttactccctgcggcccccagagaaggagaggggcgggggagcggcctcgagggttggcggccaggctgcaggctggatgggaaggataggcttttccacagaaacttaggtgtttgcctccgaggcccactgcgcatgccctggagggctctgtgggttccgccttcagttttgcttttcacaggaggggcaaagtcttttttttttttttttcctttttgagacagtcttgctctgtcgcccgggctggagtgcagtggtgcgatctcggttcactgcaacctccgcctcctgggttcaagcgattccactgcctcagcttcccgagtagctgagactacaggcgcccgccaccacgccctgctaattttttgtattttactggagacggggtttcaccatgttagccaggatggtctcgatctcctgtcctcgtgatccacccgcctcggcctcccaaagtgctgggattacagccgtcagccaccgtgcccggccaggaggggcagagtcttaccccgaagacccaggaaggagaggcttcatttatttttttgtttttccccagagacagggagtcgcccaggctggagagcggtggcgcgatctcggctcactgcagcgtcgacatttcgggtcaagcagtcctcccgcctcagcctctcaagtatctgggaccacaggcgcgaccccacgcccggagaattgattattgattgattgattgaaacggggtctcactttgttgcccaggctggtctcgaatttctgggctcaagcgatcctccagcctcggcctctcaaagtgctggtattacaggcgtgagccagcgcgtgcctggccaaaaattttctaaatttgtataataatttataattgtaatgcatttttatagacaccatatgatctaatcttcacaaaaacctagtgaagtgacatttagctacatttcacaataagaatcctgaagctcaaaatttactgacctcaaataatccacccgccttggcctcccaaagtgctgggattacaggcatga

SEQ ID NO: 10781 - DNA, 2300 bp, Homo sapien
aaaatagccgggcgtggtggcgggcgccagtaatcccagctacgcgggaggctgaggcaggaaaatcacttgaacccgggaggcggaggttgcagtgagccgagttcgcaccactgcactccagcctgggcgacagagggagtctccgtctcaagaaaaaataataaataagaataaataaataataaagtaaaatgtcccaggtaactgcatattcgatagtctttctttcaacttagttgttgaattagcaatttttctcttaaaaaaatttttttttagcttattgtcttcggagatgataacaccctcgttgcgtgggagtaaaattttaaaggtaaaacaaacaggaaacgagcgtcggcggcgaatctgctgctaccaatgtaaaggtcaggccgaggccggcgcggagaatctgctgtcgcctgcagctgctcgcctgtctccgtcggaagggagcccaagctttgcagaggtgagtggaagcggcttggaaggagcgggccccacgccggagagaaggaagagggagtgcggcccagacgctgtgcccgcgcttgtgtggggcgccatgttgaaacctggcaaaggggacgacattctgggttgcgttgcggggagtggggacgagagctggattggaaggatggcgccttactccctgcggcccccagagaaggagaggggcgggggagcggcctcgagggttggcggccaggctgcaggctggatgggaaggataggcttttccacagaaacttaggtgtttgcctccgaggcccactgcgcatgccctggagggctctgtgggttccgccttcagttttgcttttcacaggaggggcaaagtcttttttttttttttttcctttttgagacagtcttgctctgtcgcccgggctggagtgcagtggtgcgatctcggttcactgcaacctccgcctcctgggttcaagcgattccactgcctcagcttcccgagtagctgagactacaggcgcccgccaccacgccctgctaattttttgtattttactggagacggggtttcaccatgttagccaggatggtctcgatctcctgtcctcgtgatccacccgcctcggcctcccaaagtgctgggattacagccgtcagccaccgtgcccggccaggaggggcagagtcttaccccgaagacccaggaaggagaggcttcatttatttttttgtttttccccagagacagggagtcgcccaggctggagagcggtggcgcgatctcggctcactgcagcgtcgacatttcgggtcaagcagtcctcccgcctcagcctctcaagtatctgggaccacaggcgcgaccccacgcccggagaattgattattgattgattgattgaaacggggtctcactttgttgcccaggctggtctcgaatttctgggctcaagcgatcctccagcctcggcctctcaaagtgctggtattacaggcgtgagccagcgcgtgcctggccaaaaattttctaaatttgtataataatttataattgtaatgcatttttatagacaccatatgatctaatcttcacaaaaacctagtgaagtgacatttagctacatttcacaataagaatcctgaagctcaaaatttactgacctcaaataatccacccgccttggcctcccaaagtgctgggattacaggcatgagccaccgcgccctggcccccaccattcatttcggctctcatcccctgttgatgagtaaaatgagaatgaggcccaggcgcggtggttcacgcctgtaatcccagcactttgggaggctgaggcaggcgggtcatctgacatcaggagtttgagaccagcttggccaacatggtgaaatcctgtctgtactaaaaatgcaaaaattagctgggcgtggtggtgtgtgtctgtaatcccagctactcgggaggctgaggcaggagaatcacttgaacctgggaggcagaggttgcagtgagccgagattggccattgcactccagcctgggtgacagagtgagactttgtctcgagtaaaaaaagagaatgtaaaaatcgaaagagattgttgtaggaaatctcaacctaatgctgccggggaggaagtgcacctagaaagattaatgagaaacaatgaaaccagctgttagtatctatagaagcatgcagatgagagagagaacaaaatccatgcttatccgtttgtaattctcctccattttaatttgaagaagtcttaaagttttgaacaggagctctgtgtacaataatatcagttttatt

SEQ ID NO: 10782 - DNA, 2300 bp, Homo sapien
gggccgcaagattcgggccaggcggggctgtgggcggcatctgctctgctcagccctgcagcttcctgcccgctaaagcaggggtgcctcctgcagctcaccccaaggaaagctcagagtcaatacttctgagaaactccttagctccccacatgagcctcttcctcatgtttgatggaacggggacggacctggggtgggtgcccaacttcagaatgtgtggtgacctctctgcagaatcaagtatggcactaaaggccaggcacagtggctcacgcctgtaatcccagcactttgggaggccaaggcaggtggatcatttgaggtcaggagtttgaggcctggccaacgtgatgaaaccccgtctctacgaaaaatacaaaaattaactaggcctggaggcgggcgcctgtagagtcccagctactcaggaggctgaggcaggagattcgcttgaacccaggagatggaggttgcagtgagctgagatcgcagcactgcactccagcctgggcgacagagcaagactatgtctcaaaaaaaaaagtatatatacacatatatgtgtgtatatatatatttttatatatatacatatatgtgtgtatatatatatttatatatatatacatatatgtgtgtatatatatatatttatatatatacatatatgtgtatatatatacacatatgtgtgtatatatatacacatatgtgtgtatatatattaatatatatatacacatatgtgtgtatatatattaatatatatacacacatatatatacatatatttatatatatatataaatttataaaaacatatatggcactgaaaaggactgtgggaaccaaggaaaaaggaaaagtttgatccaggtctggattctcttttccttggatttcctttgttgagatttgattagtaacaatgaaaacaaaagttctcatgattctaagcagtttctggagccaggcggcccaggtttgagtcctgaccctgaaacctccctgctatgtgactttgatcaagtcacgtgaccttcatgtgcctaagttgcacccccatgtaaaaatggaagaaatgaccatacctccctcataagcttgtcatgagggtaaaatcaatgaatctgtacagaccgcttagaatcttacctggttcgtagaaaacactcagcaagtattagctcttattactacgggttatcattatccagtccaacctactgattgaacagatgagaaaagtttagactgagagagggagagtgatttgttcaaggtcacacagcaagttagtggcagagtcagaagtgaacccagatcagctgaaatcagctccctgaaggaaggcttctgtctctctgggaccctttgacccagggctgctggagaccctgtggttaaggctggtggggagactgaaatcacgcgcaccatggattgatccgccgtggtgttccactgcccaagagcttacgattccagacagaggcctgccatgcattcctttgctcaccctttgtctcccttatctctgatggagtgcccactctgtccctgttctgggctttgccaggttggaggcagggcagggaggcacattctggggcttgcgtctccctgccgcggtgacttggacattagaaagttttctagcagcaaagtaagcctgggcctggaggaccccggaaccctatcccaatttccttcagcccaagaaggaggacttttttgtttgtttgtttgtttgtttgtttgttttgagacggagtctcactccgtcgaccaggctgtaatgcagtggcgcaatcttggctcactgcaacctccacctcccaggttcaagtgatcctcctgcctcagcctcccaagtagctacgactacaggtgtgtgccaccacgtccatctaatatttgtatttttaatagagacgggatttcaccatgttggccaggctggccttgaagttctgacctaaggtgatctgcccaccttggcctcccaaagtgttgggattacaggcgtgagccaccactcccagccttgccttttcatgtccgaattgtctgaatcatattccgttctatggccatactgcatgtcgtttgcccactcatctatggatggacctgtgagacgtcaccaccttttggctgttgtgaatcgtgctgctgtgaacatcgtgctcaagcttttgtgtggacctatgttttcagttctttgaggtgtgtacctaggagtggaattgctgggccatagggaaactatgttaaacttctgacacttctgcagg

SEQ ID NO: 10783 - DNA, 2300 bp, Homo sapien
ctaaaaagaattttaagacttgcaaagcccttgctatgggcaggctctgtcctgaacactttatatgtatttatattaactctttaaacctcatcacattctaatgggggtactattactatcccattttagaactgaggaaactgaagcacagagatgctgggtgatttgcccaagatcacacagcctgcaagtggtagggtttgaaaccaggctgtctagctccaaagtcctagcttctaggagtcttgaaattaattacaggtcaaagcattttcaggctcccagagtgacctcggaaatgctgctcaactcttgggagcctgagtttccttcctgcccctagggcatagggacccatgaggacgagcacagtcaaacatggcaatggtgctgttacctacctgtgggtctgccctcaggtaaagggttcagacccagctttggctattttactccaaaacacagagatccatcaaagtacacaataagggatggcctgcccctgaggttcagagaggccatctgtatttcctgaggctgaacagcaagctggagactgctcaggcaccctgatccctcaaggaaaggtgtttcctcccattctcagtctgaaggggctgccaagagcatccctggctgaggttagggcaggaaaccacatgtctttcacttccttttctccagaaacctcgtctgaactccaggcccagtggggaggccctgattcagagagactcctgatcacagggcagaggcttagccttaaagccaccccaaatcatccctttcccccaattcaaacagggtggggaggagacacgggggctgggactctctcaccactaatttgggacaaattgctcctcccactgtgaccctcggtttctttatctgtaaaatgaagatagtctctatagagtcctgtgaggattaaggataaaatcagaggagagaacacgggctaccacaggttcataagctaggggagtcccgggaagaaagttgcaaatatgaacccgaagactaggggtcacgaagctcagtggctggaggtcacattccctttgctctggggagactgggggggggggggatgaagaaagggtcctgggcctgatgtcacatcttcttggtaactcgggaggccaagaggcttatttcatgtctggaagagaataatatgtctaagcacttagcttatatggtcccatttaattcttctaaggtgggtcctattatgattaccatttgacaggtgaggaaataaagcacagagaggttaagtaacttacctaaagtcacacagctattaaacggtaaaggtgggattggaactccagagaacagctcttaatctctcgggtggtatctgccagccacccctggtcgggcaaaagaaggccagggcctccctccctccccacgtcgggtctcctctggtccggtccctgaacacacacacgtgcgcacccacagctgcccaatgcggaagagcccttgggtccccgcggtcccactgcccggacggacagaccgaggccgccgcccaccttctggtgcttgcgctccttctcgatgcggtccatcctctccaggcgcaggcggtccagctccaggcgcagctcgtccagctcgggcgcgacgtggtggcggctgaccagcacctccaggatctccaggacgcgcacgaccttgggcatgaggcgcgcgatggcctcgcagccgtgctggtcaatgacccgctcgaactcgtggcccacaagcgacgcgatgtcgtacacgtccatgacggtcagctcggccacgttcttctccagcgccgactcggccgccagcgccgacccccgctcctcctccatggccaccctcctggcctgtcccccgccccgcaaactcgtgcaactcccaaacttgccgctgtcgagggccgggccggccgggcccagcctgggccgcgggcgggcgcgctcagcgggcgctggggcgagggcgcagcgggcagcgggcggcgggcgcgggcgcgggcacgggcggcggcgcggggtgtgcgggcccggggtctgggcgcccggctcggcccggagctgctcccgagtgggcggcggcggcggcggcggcggcggcggcagcggggagggcgcgcgcgtgcgcaggcccgcggcgcctcccaagttgggatccgagttgcgctcaatggagccgggccgggcgcctcggggcggtgcgggcctgaggggcggcagagcgcggggccggagaggaagggcggcccgcggctcctccgggaaactttggcg

SEQ ID NO: 10784 - DNA, 2300 bp, Homo sapien
ctcactgcaacctctgcctcccgggttcaagtgatcctcctgcctcagcctcctgagtagctgggattacaggcgcctgccaccacgcctggctaatttttttttttttttgtatttttagtagagatgaggtttcaccatgttggccaggctgatcttgaactcctgacctcaactgatctgccccccttggcctcccaaagtgctgggattacaggcataagtcactgcaaccagacttttttttaaatagagacggggttttgccatgctgcccaggctggtctcgaaatcttgggctcaagtgatcctccagccctggcctcccaaagtgctaggattacaagcatgagccactgtggccaggagtatttatttttattttttatttttctgagacagagtttcgctctgtcgcccagtttggagcatagtggtgtgatctcaactcactgcaacctctgcctcccaggctcaagggatcttcccacctcagcctcccaaatacctgggactacaggctctcaccaccacgtctggctaatttttttattttacttttttttttttcttttttttttttgagacggagtttcgctcttgttgcccaagctggagtgcagtggcacgatcttggctcactgcaacctctgcctcccaggctcaaatgattctcgcgcctcagcctcttgagtagctgggattacaggcacatgccaccatgtctggctaatttttgtatttttagtagaggcgtggtttcaccatgttggccaggctggtctcgaactcctgagctctagaaattttcccacctcggcctcccaaagtgctgggattacaggcgtgagccaccccgcctggccttaatttttttttttttactatttatttatttatttattgtattatattattattttgagatggagtcttgctctgtcacccagcctgcagtgcagtggcgcgatttcggcttgctgcaacctccgcctcccgggtttaagcaactctctgcctcagcctcctgagtagctgggattacaggcatgcgccaccatgcccggctaatttttgtatttttagtagagacggggtttcaccaccttggctaggctggtcttgaactcctgacctcgtccacctcagtctcccaaagtgctgggattacaggcgtgagccaccgcgcccggccaacttttagatttttaatcaatacgtgccacgttggggtgcgctttatggctacaagggcattaagatttcttccctcaaggagccaagatctgacggtggaaacctacctgcaaccacacggtgaaaactcaggatgctaagagcaatcctgatggggcaagcaggggactgtgagtttgcaagggggtccttaactcctgcgtggggggcggggagggtggatggggttctgggttcaggaaacgttctcccgggagtgggagggggtctgatggacaagtggatttggccagcccaaatggacagggggccttgggacaagagaactcgtggtgctggaatgccaagcgggcttcgctctactgtgaagtggcgttcatgtcacaaggagccagtgatggatgtggctcggggaggcgcgccctggggctccggggatccagcattcctcgacacgtcggcccctctccgggcgcctctgcaagtccgcctggtggccgggtctgcgcggagtgtctgcgggccggggggggtccccgttctcttcctgggatgagccccagcccggggacctcctcgtgacccctccatccctctccaaggccggggccgctacccggagcagcgaatcgtcccgcgagaccagcgcccccggccccctctcccggggcggcctggacccctcccggcggccgggtggtgggaggagtcagcgccgggcgggggaggggcggccggggcacgggtgaggggcgccgcgggtccggcggctggagaggggggcccggagtgcaggccgcggagtcggcgcttgggggggtaccccggggcgcccccgggcggcggaaagcgggcgcgcccctggccaggccgggattggggcggggcgcgcggcctccctgtggggaagcgatcacccggcctcgcagccgccgccgccaaagtttcccggaggagccgcgggccgcccttcctctccggccccgcgctctgccgcccctcaggcccgcaccgccccgaggcgcccggcccggctccattgagcgcaactcggatcccaacttgggaggcgccgcgggcctgcgcacgcgcgcgccctcccc

SEQ ID NO: 10785 - DNA, 2300 bp, Homo sapien
tgaggtccttctgtggccctgtggcagggcctgaagaggacagcgtatgtaaatcaagtcttgtgccttcatgagtgaggcagagtagaaaataacagtaattcactaggaccgaatctgcattgtaaacagagaggaaggggctagtatttggcagaaggatgtcaaggaacattttagagataagaggtgacatttgggttctgagggatgagtaggagtgtgccagggtgcaaaggatgaaaagacagctctagcagctggtaagggctaaggggcatggagaaacagcaagactttggggaactggtagaattctaattctggaaaatttgaacaaggtaattttttgtgtgtggttaaggtattacatacatacagtaaaataaaatgcaatagttgctgggtgtggaggctcacgcctgttaatcccagtactttggaaggcagaggcgggtggatcatctgaaggtcaggagttcgagaccagcctgaccaacatggtgaaaacccgtctctactaaaaatacaaaaattacctgggtgtggtggcaggcgcccgtaatcccagctacttgggaggctaagggagaagaatagcttgaaacccggaggtggaggttgcagtgagctgagattgcactattgcgctccagcctgggtgacaagagtgaaaagctgtctcaaaataaaataaaaatgtaatagtctaattgatttttttaaaaaatgtagacatccacgtatctaccacctaggtaaagatactagagattccagcaacctgggaggatccctcgtgcccctttcaggtctatatgagcctccaccgttccccagtcccctggaaggagagggggtgggagaggcaacatgaaacctaaaaaccagtgggcttcgcgcctgtaatcccagctattgggttggctgaggcaggaggatcacttgcccaggagttggaggctgcagtgagctatgatcgcgccaccgcactccagcctgggcgacagatcaagaccccatctctaagcaaacaaacaaataaacacccctcaaaacccatggcttcaggcctggcgcggtagcttacttctgtaatctcagcactttgggaggccgaggagggcggatcacttgaggtcaggagttccagaccagactggccaacatggcgaaaccccgtctctactaaaaaataaaaaaaaaaaaaaattggccgggcgcggtggctcacacctgtaattccagcagcactttgggacgccgaggagggcggatcacgcggtcaagaattcaagaccagcctgaccaacatagtgaaaccccgtctctactaaaaatacaaaaaattatccgggcgtggtggcgggcgcctgtaatcccagctactcaggaggctgaggcaggagaatcgcttgagcccaggaggcggaggttgcagtgagccgagatcgcgccactgcactcctgggcgacagaaagagactccgtctcaaaaaacaaacaaacaaaaaacacaaaaattaaccaagcgtggtggctcacgcctgtaatcccagctactcgcgaggctgaggcacgagaatctctggaacccgggagacggaggttgcagtgagccgagatcgcgccactggactccagcctgggcgacagagcaagactccgtctcaaaaacgaaacaaaacaaaagaaaaaaaccttagtttcagcccgcacattccctcaactcctatcgctgcctgcaaatgtttcgccatcttcttggacaatcctaagagggcattgcagaggcttccggacactgtcgttttcctgggaagtccacaggaactttagcttggacgagaaaggactagggaaaaatttttggtccttcggagccgccgtccaggctcgggccgcgcagagtcgcttgtccctcggcggctgccgtgcctccctttacgtggcagctgcgggagcccgccaatccactgcgcccgcatcagcccccactggtggcgcaggcggaaggggcggagcttaggcggcggtggctgagaaggcagcggggcggcggcggcggcggcggcggcggctgtggaggccgcagtccgggtcctggcttcggcctcagccccaccatggtgacgcttgctgaactgctggtgcttctggccgctctcctggccacggtctcgggctatttcgttagcatcgacgcccatgctgaagagtgcttctttgagcgggtcacctcgggcaccaagatgggcctcatcttcgaggtggcggagggcggcttcctggacatcgac

SEQ ID NO: 10786 - DNA, 2300 bp, Homo sapien
agtgagtcgagatcgtgccactgcactccagcctgggcgacagagcgagacttggtccaaaaaaaaaaaaaaaaaagaaattcaccaagaatatgtaactttcacttagcttcacttcggtaagtgataataaccattttgggctgcaattctcccactttataaaataagagttgacttcatggctttctaaaacacctttaggtcctgacatttatgtcttatttatccttattaaacccctcagaaacagaaagctcaccttaaatgtggtctctaactggcctaatatcaccaacaaacatggaactgtgactgatagcaaaactcaagaaaaaagaaatctctttaaaataaagaatttctgcatccctggttgacatcttgattgcaacctcatgagatactccaagccagaaccacccagctaagcctctccataattcctggccacagaaaccatgaggtaataaacgtttgtggttttttaaaatataaacaagatgaatttttatcacatttcaaggttttccagattactgccaaacagtgaaggaattctgctttatctgagatgcctgaaggcttaggggaaaggactagcctggaaatgagaagacccaaactctcatcccagtctgctacaaatcagctgttaggctgtgatcaagtcagtcgctctttcaaagtgcatgtcacttgcataacttcgagactgtaatagttgatcgctaaattcttagctaagtgtaagagtctctcccttccgttatccccttatttttggatttcacttgtattgtgtaacttgtgcccagccctactgagtacactgtcaaatggaaactccttagacccaattaatcatgctagcaggtgaattaaaataaaaactagcaacacatcattcttttggtttacaaaacatgagtggagatttagggactgctggtttcttaaactcctgtcttctcctgatacttcactgcactgcttactcctaaaacgcatgacccaactccccatctctccttggcagaagagactaaacgaggtagctggaggcgtaaagagtagaaccttaaggttgcttctatgaaaaataaacacaacgcgaaagtatgcctagcactcaataggtttttaatcctcaatcgattttaatcaattttttggaaaagtttccgtgccacgttccagcattaatccgtaacacgaaagaaggcaggtgctaactggatagagacccgccaccagctaactgtgactgagaagcgcctttggggcccggactgacacgcggcgcctgattcacaaagctcagcgagaggttccaacaggaacccgtcgttcaaggagaaaacccaaagcaaccaagcatgccgaaggagcccccaagggatcccggaacccaggcaagtcgcgggaaaaggggccgttaggaggtcgccgtggccggggcggggcggggggtggcggcctgggcttctccaggactcggacagcgacttccaagcccactccccacacaggccccgcgccggtcccaggtgccaccaatccccgagtggccacgcgaccaagcctcagctgcgggcagctagcccgcacctccacgtcgatgtccaggaagccgccctccgccacctcgaagatgaggcccatcttggtgcccgaggtgacccgctcaaagaagcactcttcagcatgggcgtcgatgctaacgaaatagcccgagaccgtggccaggagagcggccagaagcaccagcagttcagcaagcgtcaccatggtggggctgaggccgaagccaggacccggactgcggcctccacagccgccgccgccgccgccgccgccgccccgctgccttctcagccaccgccgcctaagctccgccccttccgcctgcgccaccagtgggggctgatgcgggcgcagtggattggcgggctcccgcagctgccacgtaaagggaggcacggcagccgccgagggacaagcgactctgcgcggcccgagcctggacggcggctccgaaggaccaaaaatttttccctagtcctttctcgtccaagctaaagttcctgtggacttcccaggaaaacgacagtgtccggaagcctctgcaatgccctcttaggattgtccaagaagatggcgaaacatttgcaggcagcgataggagttgagggaatgtgcgggctgaaactaaggtttttttcttttgttttgtttcgtttttgagacggagtcttgctctgtcgcccaggctggagtccagtggcgcgatctcggct

SEQ ID NO: 10787 - DNA, 2300 bp, Homo sapien
tctctctctgtcacccagggtggagtgcggtggcgcgatcttggctcactgcagcctccgcctcccgggttcaagcaattctcctgcctcagcctcccaagtagctgggaatacaggcgcacgctgccacatctggctaatttttttttgtatttttagtagagacgggatttcaccgtctggtctcgaactcctgagctcaggcaatctgcccgccttggcctccaaaagtgctaggattacaggtgtgagccaccacgtctggcctttttttgtttgtttgtttgtttgtttgtttgttttttgagactgagtctcactctgtcgcccaggctggaatgcaatggtgcgatctaggattactgcagcctccacttctcaggttcaagcgatgcttgtagctcagcctccggagtagctgcaggcacctgccaccacacctggctaattttttgtatttttagtagacagggtttcactacgttggccaggctggtctcaaactccttaccttaggtgatccgcctgcctcagcctcccaaagtgctgggattacaggcatgagccaccgcacctagcccagataatttctttttctttttttttttgagactgagtctcgctttgtcacccacgctggagtgcagtggcgcaacctccacctccctggttcaagcgattcttctgcctcaggctcctgagtagctgggactacaggcatgcgccaccacgcctggctaatttctgtatttttagtagagacggggtttcaccatattggccaggctggtctcgaactcctgaccttgagatctgcccgctttggcctcccaaagtggtgagattacaggcgtgagccaccgtgccaggccaataatttctttatggccagttttttcacagaaaggtggagagagagtaatatttttaggttttatggctgactgtggagaaaagggattcctgtttctatgctccgtcatgggcaagagggattcttgagtttctatggctagcctcagagaatcagagatcagagagggagcagaaggtcagagagaaacttgcttctgaggctgcctctggggccttcattttggggtttcgttttcagagcctcaacaggagcaagccatgcacataggtggaggagataggccctcatagagggcacataatgagtggtcaataaaagtttgctgagtgaaggccgggcgcggtggctcacgcctgtaatcccagcactttgggaggccgaggcgggcggatcacgaggtcaggaaatcgagaccatcctggctaacacggtgaaaccccgtctctactaaaaatacaaaaaattagccgggcgtggtggagggcgcctgcagtcccaggtactcgggaggctgaggcaggagaagggcgtgaacccgggaggcggagcttgcagtgaaccgttatagcgcccagcctccagcctgggcaacagagcgagactccgtctcaaacaacaacaacaacaacaacaacaacaaaaacagctttctgagtgaagttgtatgtggacatgaatggcccaggcaaacagtgaacagaggaatgggacagtgttcttagttaggactctgaccctaacttccgggaaagtaaaccaacattcaggacgtaccggccatcggaccgcaacattcaggacgtaccggccatcagcgggtgcctgttttgcagggctgctaacccgggtccccgacacgtttctctgcccacggtagccagccccgctgtccttcggcctggacgcggtcctgtgctgccacctgcctccgaggggcagagaaagtgggagggccgggccagaatccctcccgccaaaactcctgcccggtgcggagaggcgcccggagcccagggcgctgtgcggagcgggtgtaactccccaggcctgccccgccgcctgcctccaccgtcccgcggacgcctttcctccctcccgcggcgtgggagccttcgccgcgctccggaactctgctgctccagcgaagttcccggccggccgctggagctgcgggaagcggaagtgctcgttgggggtgcacaaggcgcgttcgagcagcggcgaccgacgcggcgaaggagcgcgccatggagcatgtgacagagggctcctgggagtcgctgcctgtgccgctgcacccgcaggtgctgggcgcgctgcgggagctgggcttcccgtacatgacgccggtgcaggtatcggttccctggcgtgggggagtgaggctgggagaggggcaggcacccgctgcatcggacccaca

SEQ ID NO: 10788 - DNA, 2300 bp, Homo sapien
aagagatgatggtgacttggagtagggtggaaccagtggatactgagaagtcacatttgggatagctttaaggttgctaagggactggaagtggaggttaggaaagaaaagactacaggacctgaggtttttattctttttttttttttttttgagatggagtctcgctctgttgcccaggctggagtgcagtggcgcgatctcggctcactgcaacctccgcctcctgggttcaagcaattctctgcctgaacctcccaagtagctgagatcacaggtgcctgccaccatgcccggctaattttttgtatttttagtagatacggggtttcaccatctcggccaggttggtcttgaactcctgacctcctgatccacccgccttggcctcccaaagtgctgggattacaggctgagctaccgcacccggctgatttttattagtagctgagtgaatggtgttaccatttcccaagaatgactggcgtgcgtatcaggtttcagagggaaagtcaagagttcttttttttgttttttgtttgtttgtttgtttttaacttttttgagacggaatctttctctgttgcccaggttggagtgcaatgacacgatctcggctcactgcaacttctgcctcccgggttcaagctattctcccatctcagccttccaagtagctggggttacaggcatacaccaccacgcctggctaatttttgtgtttttagtagagacgggatttcgccatgttggccagactggtcttgaactcctgacctcaggtacgcccgccttggcctcccaaagtgctgggattacaggagtgagccactgcgcctgaccacaagagtcctgtttttaaacactgagctgggtacagtggcacccgcctgtagtaccatttgtttggaaggctgaggtgggaggatcccttgagcccaggagttcaagaccagcctgagcaacatagtgagacccgcatcttcgaaattaaaataaataatggccgggcacggtggctcacgcctgtaatcctagcacttttggagaccaaggtgggaggatcacttgagatcaggagttcaagaccagcctgggcaacatagggaggccctgtcatcacaaaaattttttttaaataaatgaagtcttgagtttgagatgcccataagattcccgggaatgtggagaatgtatttccagcaggcagggctggagatgaaaactgggagtgctatgtgccctgcctagggaatgtagtgcgagcaagacccaatctctggcctcagagctcattgtctagacctgtcatccactacacagtcatcagacatggctatcaagtgcttgaaatacactttgtccaaatcaaagtgtactctgagtatcaaataacacactagattttgaagacctagtatgaaaaaagaatggaaaatgctgatttttaaatattgactaaatgtgaagggacaatatttttgatatattgggttaaataaaatattaaaatttatttcacccatttctttttacttttcttactatggctattagaaaatttaaaattgtttatgtggttcacattttatttctattggacagcaatggcctgaagcagggtcctcactgttggcactattgacattttgtgctggaaaattttttgttatggggctgtcctgggcattgtaggatgtttaacaacatcactggaatctgtccatcagaggacatcacctcccaaccctggttgtattttatttatttatttatttattgaggcagggttttgctctgttacccgggctggagtgcagtggcacagtcacagctcacagtagcctcgacctccctgggcctaggtgatcctcttaccttagcctcctgagtagctgggactgcaggcatgcaccaccacacccacataattaaaaaaattttctttgtagagacagagtctccctgtgttgcctggctggtctggaattcctggccttaagggatctacccacctgggcctcccaaagtgctgtgattatagatgtgagccaccacgcctggcccaccctgggttttgacaaccaaaaatgtctccttacattgtcaaatgttccctcaggggttgagcagggggatagcaatcactgtgtagaggcagttagaataatattacacctgctgtgatttaagtgagctcaggccctggggaccagggctgaatcctggagggagcagcctccaggccaaggcctgaatctaattgaggttttttttgattgctaaaaccaggtttcttt

SEQ ID NO: 10789 - DNA, 2300 bp, Homo sapien
ttctcatttcctagtgggattttagtgtgcactgatgtgatggcccggggaattgatattcctgaagtcaactgggttttgcagtatgaccctcccagcaatgcaaggtatggtacgaggctgccacccactctctgttgaggaatttagcctaataaaggaggaatcccgaagaagataaacagataatgatgttcactgaaacattttatagcaagcctccagcgtgcttgggtctgcagtgaccccgtggattcctacagggcttgccagaacagttttgaaatggtttgaggccttgccgtgctccatgtagagcaaggttatagaaatttcagacaatgagagaaaacaaaaaacaacaacattatttgaggctgggcgcggtggctcacgcctgtaattccagcactttggggaggccgaggcaggtgaatcgtttgagcccaggaattcaccagcttgggcaacaggacaaaaccctgtctctacaaaaaatatatatacagattagccaggcgtgtgttcctgtagtcccagctacttgagaggctgaggcaggagaatcgcttgagcgcaggaggcagaggtggcaatggattgtgccacttcactccagcctgggcaacagtgtgagactctgtctcaaaacaaaaacccgttgttttaagtagcaaaaataggcaaatggatgaataacccattcatggtgaaatcgtgatactgtattggtagcaattaaaagtactttcaaatattatcagttcttgcagaaacacacaatagaatgtctaaatgaaaaaagcaatacataccaccacatgtgaaaattacaattactttcttcaaagtcagcatatattcctaatacatgcttccacgcataggaaaatgcctataaacccccaagtgttgatgattactcctgaggttattggtcattttcattttattctttgtatttttcattgtttcccagattttccactggggactatgtcccacctgtatgatcagagagaaagatacaagttttacttaagagttcacattaaatgtttcttacagaatcgtatctgtttgcagtgttggtttaattgccagttctatttctcacactagtaagtggccgagtccacactgagctgtggaggctagaggctccccagagcgttttagctgcagcagccatgtggctggagcctgagctctgttcagctgtcatcacctgggtacccatttccaccctgtgttctcacagtgccttcgtgcatcgctgcggtcgcacagctcgcattggccacgggggcagcgctctggtgttcctcctgcccatggaagagtcatacatcaatttccttgcaattaaccaaaaagtaagctgccgtccgttttcagatagaatgcctagtgacggggtagctggaaaagttctccagcatgtggtcagcaattgaaattacgaattgcaaactcactggggctgggctggtggtggcagtggggggccctggtggggttttttttttttttttttgagacggagtttcactcttgttgcccaggctggagtgcaatggcactatctcggttcaccgcaacctccacctcccgggttcaatggattctcctgcctcagcctcccaagtagctgggattacaggcatgcgccaccccagctaattttgtatttttagtagagatggggtttctccatgttggtcaggctggtcttgaactcccgacctcaggtgatccgcccacctcggcctcccaaagtgctgggatgacaggcgtgagccaccgtgcccggccaccctggtgggctttaaggctgtggaggcacctcggtcatggagtgaccaagtctcctgtgtggtagcatgccctgctgggacccaggcaagggttacttcttgtgaatagagacccagtgttgccatactttgctaccagattaggattgtcatgtgaaatctgatttttaaattttcttttaaaaatttaacatactttacagagcatgtgaaatatttgggttggagttgggcttcagacctcaacagttgaaaaggaattgtttcgcttttgtttttcttggttgtgatggggagccctggggatatgatgccagccagggaaggtgagaatgtggtatgtgtgtgtgtgtagtgccccctgcaggagatgaagccccagagaaacacagcggaccttctgccaaaactcaagtccatggccctggctgacagagctgtgtttgaaaagggcatgaaagcttttgtgtcatatgtccaagc

SEQ ID NO: 10790 - DNA, 2300 bp, Homo sapien
ggaagcggagcctgcagtgagccaagatggcaccactgcactccagcccgggtgacagagcgagactccgtctcaaaaaaaaaaaaaaaaattttgccaggcgtggtggtgcatgcctgtaatcccagctactcagaaggctgaggcaggagaatcgcttgaacttgagaggcagaggttgcagtgagccgagattgtgccattgcactccagcctgggagacaagagcaaaactctgtctcaaaaaaaacaaacggccgggcacagtggctcacacctgtaatcctagcactttgggaggccaaagcgggcagattgcctaagctcaggagttcgagaccagcctgggtaacatggtgaaaccctgtctctaaaatacaaaaaaattagccggacaaggtggtgcacacctataatcccagctactcaggaggccaaggcaggagaattgcttgaacccaggaggcggaggttgcagtgagccaagatctcgccactgcactccagcctgggtgacagagtgaggctccgtctctttaaaaaaaaaaaaaaagaaaagaaaaaaaagactatcctaagtcccagagtgttaacagatgactctctatatacctttatctctcttcaagaactccagcaacgtccggatggcagccactgctgaggccatgtcaggatcttctttcatctgagacttaaagtattcaattaactctggaaaaagggaaaaaagtgattcacctaattcatttagcagcctataaggcaagagagcttgttaatgactgttgactttaagaagcaaacaatttaaaaaatactttctttttagggtatttggtttcagggatgcaataaatgttgatgggaatagagaaaataccactttgctgtttgcaagagctcttttttattttgaaaaagctactggtggccgggcgcggtggctcacgcctgtaatcccagcactttgggagtccgaggcgggcggatcacgaggtcaggagatcgagaccatcccggctaaaacggtgaaaccccgtctctactaaaaatacaaaaaattagccgggcgtagtggcgggcgcctgtagtcccagctacttgggaggctgaggcaggagaatggcgtgaacccgggaggcggagcttgcagtgagccgagactgcgccactgcactccagcctgggtgacagagcgagactccgtctcaaaaaaaaaaaaaaaaaagctactggtgtgcaaggcctaaaaattaagcccgagtaaatgatgatgaaaagtcattctctcttcagcctctttggtcctaaaatctgagaggatcccagagtcaaccatcttgccaatttctcctgcacccctccagacagtctatgctaatacatgtctattcacatacacatatatgttacaaatattatacatggagttccacccactcccctttatttctttacatgaaaagtgtattagtttgcccttgtttttcacttaataaccatactagatgagcacatcaaatatgccttattcattctaattttaatgacagatccaacaaggcaggaaggagactggcactgggaaggagcgtatgtgtgggagggatgcctgcagatactgccagggcgcatccctgaaaacaagagcagcgcgagggatttagttgtgactctggaaacacaaccagcggagcagcctgaaattcaaaagaaatctcttcgggagctcagcctggatgtgagaggttggggggacccctgaacggcgctgctgtagcctagcagccctggcctgtcttgatttacccttgtcgtccatggcgtcctcctgctgcggagccccaggggacccgagccgcccgcgctgtctcgaacgggtccgccggccgcgccgcctgcgagccagtctgacagcgcgctgcacacctccgcaccccacttccggcgcacttccgtacccctcttccggcgcactccccgcactccacttccgcagattagggggctggcacgagtcacagcacctcgtgcgtcacttggcggcgccggacgttgggctgcgcaggatttgagacgctcccctgaccaccacttgctctgcgctgaggtgctgggacagccatggtttcagacggtgaggaccctgcagggcgggacttcgactccggggctcggctgtctcggtccggctacgactggccagatggaatgtgtcttttgggctggatagaatccgtttggtctttagaggagtagccaaggcattcagtcattcattcagtaaatagttttgg

SEQ ID NO: 10791 - DNA, 2300 bp, Homo sapien
cccagtcctgcccacttaagactgtggacttcttaaaaaatgatggaatttgctaatcctaggataaaataatgtgtgtaaatcagaactggtgtagtggctcacgcctgtaatcccaacactttgggaggtcgaggcaggaagattgcttcagcccaggagtttgagaccagcctgggcaaaacagtgagaccttatctctaccttttttttttttttttttttgcgacggagacttgctctgtcgcccaagctggagtgcagtggcacgatcttggctcactgcaacctctgcctcctgggttcaagcaattttcctgcctcagcctcctgagtagctgggattataggtgtgcgccaccttgtccggttaatttttttgtattttgagcagagacggggtttcaccatgttggccaggctggtctcgaactcccgacctcaagtgatccacccaccttggccttccaaaatgctgggattacaggcgtgagccactgtgcccagccactttttttcttttttaatagaaaaacaaaacaaaaaaatgtgtaaatcacacaacaaagcacctaggacagaagcacttaatacaactgtgtctgccagacagaaaaagcgttgcctgtaaagaaaggtgtgcatctatacacatgcaatgaccctgtgaatttccttctttagttcgctacctcatttgtagacaggagcaatgccaggcctgcctccctcacagggttgtggtatggtttcacatcaattaagagaggatggacaattattacagttcctgaaaggactcccctatctctattcttgctccccacagtccattttccacacaacagccacagtgatcttttaaaattgcaaaccagatcataacactttctggcttaaaactctacaatgtctttgtattgcacctaaaaataaaggccaacttctctatcacggccaataaggccctgcatgacctgaaactggctggttctctgatctcatccctctagcctccttttaaatcttcaagacatctgactctgtatgtggtagtttaatgtatgaatgagtctccccaccatcctctacccgcaagctctccatttctcccttctcagtgtaacttggtggctcaatctgccacagggcccatgcacttaaagtgcacttcccccagaacttcacataatcattcaagtcggtttcaatatcctgcacttttcctaggcccctatctaaaacagctcctcctcaatcctagtcacaatgtactattgtaactaggaccgtactgttacatcatcttcatagctcttttcatcctttgaaaaataatttattttttaattttttattgacgaggtcatgccctgtcggccatgctgggtgcagtactgccataatagctcactgaagcctcgaattcctgggctcaagtgattctcccgcctcagcctcccgcgtagctgggaccacagacacgcgctaccacgcccggctaatatttcattttttttgtagagatggggtctggctgtgttgcccaggcaggtctcgaactcccggcttcaagcgattctccctcctcggcctcccaaagtgctgggattacaggcctaatccaccggggtgcgacccggccgaaattatttttatttattgtcatctgtttcacccagtagactgtaacctccactaaggcccctgtctgtcacgatctctgctaaaatccagaaaataatgcctgtacacaggaggcgatccaaaactatttactgaatgaatgactgaatgccttggctactcctctaaagaccaaacggattctatccagcccaaaagacacattccatctggccagtcgtagccggaccgagacagccgagccccggagtcgaagtcccgccctgcagggtcctcaccgtctgaaaccatggctgtcccagcacctcagcgcagagcaagtggtggtcaggggagcgtctcaaatcctgcgcagcccaacgtccggcgccgccaagtgacgcacgaggtgctgtgactcgtgccagccccctaatctgcggaagtggagtgcggggagtgcgccggaagaggggtacggaagtgcgccggaagtggggtgcggaggtgtgcagcgcgctgtcagactggctcgcaggcggcgcggccggcggacccgttcgagacagcgcgggcggctcgggtcccctggggctccgcagcaggaggacgccatggacgacaagggtaaatcaagacaggccagggctgctaggctacagcagcgccgttca

SEQ ID NO: 10792 - DNA, 2300 bp, Homo sapien
cacctcaattagagtatagtctctttgaggggttggacccagtatccccaacacctaacactggtagtgtgaaagtttgttgaaggattaatgtgtttggggtggtgcgtgcatgtagtccttactactggggaggctgatgcaggaggatcacaagcccaggatttcaagaccagcctgggcaatttattgagacccccccatctcttaaaaaaaacccaaaaaacaaaaatccaaatgaatgattaatgtgttgtggtagcctgtttagtttagagaatagaattcctcttaacagtaaaatcttgacgtaggaattgcttttccctctgttttttaacttttttttttttttttgagacagagtcccactctgtcacccaggctggagtgcagtggcaagatctcagctcactgcaacctctgcctgccaggttcaagtgattctcctgcctcagcctcccgagtagctggaattacaggtgtgcaccaccatgcccggctaatattttgtatttttagtagggacggggttttgccatattggctaggctggtcttgaactcctgacctcagtgatctgcccacctcagcctcccaaagggctgggatgggcgcccagcctggtttttttaccttttaaaaagtgactcttaattacgattggccttgctgctacatgatttgatgagtacgggccaaattgacagctacgcctccctttaattttttgctcctgaaattctaccactgggattcctactactagttaaccagtgccttctgtccttgaccaggcattcagaatgcagtaggtggttttgtttgtttgtttgtttgtttgtttgtttccagacggggtctcattctgtctcccaggctggagtgcattggcaggaacatggctcactgtagcctcgacttcccggtctcaagcgatcctctctcctcaccctcctgagtagctgggactacaggcatgtgccaccatgcccggctatttttttttccccgagatgaagtcttgctctgttacccaggctggagtgcagtggtgcaatcttggctcactgcagcctccgcctcccgggttcaagtgattctcctgcctcagtctcccgagtagctgggattacaggtgcttgccaccaaacccagctaatttttttttttttttgtatttttagtagagatggggtggctcaacatgttggccgggctggtcttgaacttatgacctcaagtgatcccccctccttggccttccaaaatgctgggatcacaggcatgagccaccgcgcccggccctaatttttatatttttagtagagaaaaggttttgcgatattgcccaggctggtcttgggaacttctgagctcaagccatctgcctgtcttggcctcccaaagtgctaggactacaggcctgtgccaccacacctggccctcgttcagtagatatttattgagcagctgcaatgtgctaggcagtgtggtaggagtgaggataagcagtgaacaaaagagacaaaaattcctaccctcacagagtttacatttagtgcattggagatatagtggttcaggacgtagacaagaacttgctaagggcccactgtgctttaaagctttttttttttttttttttttgagacagagtcttgttctgtggcccaggctggagtgcagtggcgtgatctcggctcactgcaagctccgcctcctgggttcacgccattctcctggctcagcctcccgagtagctgggactacaggcgcccaccaccacgcccatctaattttttgtatttttagtagagacggggtttcaccgtgttagccaggatggtctcgatctcctgacctcgtgatctgcctgcctcggcctcccaaagtgctggggttacaggcgtgagccaccacgccctgcccagctttaaagctttaactgggtcttctgttaatctcataattataaggtgataaacatttaaggcatatagtggtgctctggatttaatttatgaattgggaatgttagctttgattcatttttatggagctaatgttttaaattttatttcttgttaatattttcagaagatgaattgaatcttctggttattgtagttgatgccaacccaatttggtggggaaagcaagcattaaaggaatctcaggtaagactgcttgaggaggcctttggagaattctggtttaactgagtgtttatattgcttttttaaaaaatggctttattaaagtataatttacatactgtaatattcagccactgtaca

SEQ ID NO: 10793 - DNA, 2300 bp, Homo sapien
ccccagcgtgcaagttagatgggagatgtgattctgttttcctttagctctgcgtagttctcatggcctgtttccctgctctgtgagtgaacctggtgctttgaaataaggatttttcttataacgttggcttctaaacccaagccaactactccatctggtgcttggcagaagaaacagtggtcgcttctaacactagtgtgaaaactggctgtgttagactcactgcaagatggtgcatagcctgcagctgatgtgtaaatgtgaccgcagatacagcaaagtttttgtgaataatttgggccatatttacttctcacattatgcactgacagaagagttgaattaccatgtaagacacagctcttctatgtcttttttttttttttttttggagacaggatcttgctctgtcacccaggctagagtgcagtggcactatcatgggtcactgtagcgtctgaccttctggacataagtgactggacctcctgcctcagtctcccaagtagctgggactacaggtgtgcaccaccacactcagctaatttttgtattttttgtagagatggggtctcactatgttgcccaggctggccttgctctcctgggctcaagcagtcctttcaccccagcctccccaagtgctgggactgcagggatgagccactacacctggctcttctatgtcttaatcaccacattacaatagaagtgactcttgctcaccaacatatttcatatggtagctgtcagattttcttggttcttagggctgcctgcttcctctggtgaggtgagagagcccatgggccaccaaacacatactcttactcccatcctcgctgcatattttttctcagaattggatgaaaagatgatattagtttggttaaaataccagtaaaaactatacctgtcaaagtttttttttttttttttaatcaaaggtatcctctacctgattatcttaaaagtcacaaggccatggctgggtgcggtggctcatgtctgtaatcccagcactttgggaggccgaggcgggcggatcacgagatcaggagatcaggaccatcctggctaacatggtgaaaccccgtttctactaaaaatacaaaaaaaattagccgggcatggtggcgggcacctgtagtcccagctactcgttaggctgaggcaggagaatgtcgtgaacccgggaggtggagcttgcagtgagccgaggtcgtgccactgcactgcagcctgggcgacagagcaagaccctgtctcaaaaaaaaaaaaaaaaaaaagtcacgaagtcacgaggccgggctcggtggctcacgcctgtaatcccagcacttcaggaagctgaggcagattacttgaggtcagtttgagaccagccatacatagcagccaacatagtgaaaccccatctctactaaaaatacaaaaaattagctggacgtggtggtacactcctgtaattccagctacttgggaggctgaggcacgagaatcacttgagcccgggaggtggaagttgcagtgagctgagactgcaccactgcactccagcctgggcgacacagcgagactgtgtctcaaaaaaaaaaagagtcatgaatcactgggagaatcttttcagggacctttgggccagatttttattactgggatagatatgtacctcaaataataaactagtagtgagttagaatttggtatgaacctgttgtggttgtcatttgagaaaggaaggcacgggcacccctctgcagcatttctgagattataacccaacgccctctgtatttccccacacttttcagaaaacactggaatcagtaaaacattctgtggtgatagacaaatgttggccagtttgcctattttatacattttttctttgtttttatacgctttttctaattttatcttacacattttttttaaaaaatgaaatttaccgtggaatcttgtgagtcccacattgttgtaattttgtttgttgcctctgctgaatttcattctgatcatgagtgagcctgggcggtgaggcctggtgtaaccaggttttttcccctgctgtttcagccgattcttatatcctggaaagaatggcagacttggagacttcttcggagaccctggcaaccctcctgaatttaatccctctgggagtaaagatggaaaatacgaacttttaacctcagcaaatgaagttattgttgaagagattaaagatctaatgaccaaaagtaacaacttttaaacattgttattttgcaaatagtgttgattttggaggtcct

SEQ ID NO: 10794 - DNA, 2300 bp, Homo sapien
tcatgttacaactgtagtgacccacagtttttcagggagtataagaaaaagataacacccagtgtcaggcccttataaagcctcaactttcagaatcctttcacaatgttagatttgctgatcaatgaatatataactgaacattaagagtaataatggggctgggtacggtggcccatacctgtaatcccagcacttttagaggccaaggcaggaggatcacttgagcccaggagtttgagaccagcctgggccacatggtgaaaccccgtctctataaaaaatacaaaaattagccgggtgtggtggtgtattgccagttacttgggaggctgaggtgggaggatcagctgagcccagaagtttgaggatgcagtgagctatgattgtgccactgcaccattccagcctgggtgacagagtgagaccctgtctcaaaaagaaaaaaaaaaaagactaataatggcaaacatttacttggcatttaccgtcagtcagccacaatgctgaacaccatgattgtctcagctaaaggatacaccacctctctgatagttaacaagtaactgatcattaactgagtgcttactgtatgccagccattggtttaacctcattagatatgttacctcatttcatcctcacacaatccccaaggaaggattattatcatcccttttttatagatgaggaagctgaaacttagagaggttgacttgcccaaagtcacttaacagctgagaatatctgtggagggaaggcgaaatcccatgccaggcagcctgacctcagaccctgcactctcagtccccaagccgtgacaatatttgaaatgttctgaggctactgatataagaaaaaacaatttttttccagacagaattttgattctttcacatctgtcctattgctgggcaaaacctcttgtgtgttctgtgattggatctgctttcagagtgctgagagctctgtgcaggggagaaaatccttcaaaaacctaggagaatgataataaaagcaatagtgataataaatgataatgataagaattataaaaatataaattttataaaattataacatataagtataaaatttacaaaatatatacttatataaaagataaatatatataagataaaatataaatacatatatattttataagataaataaataaataaatatatttttgagacggagtctggctctgtcgcccaggtttgagtgcagtggtgcaatcgcggctcactgcaacctccgcctcccagattcatacaattctcctgcctcagcctcctgagtagctgggataataggcgcctgccaccacgcctggctaattttttgtatttttagtagagacggggtttcaccatgttgatcaggctggtctcagactcctgacattgtgatccgcccgcctcggcctcccaaattgctgggattacaggcatgagccgccagacccggcctatatgtattttatatatatcaagtatgtatatctgatatatatatataaaacaaagtatatctattttgtaaatatatatttattttataaaaatataaaatataaataatacatcataaacgatagtaaagataataaacacagcgcggcagccccatcccctttttctactcacccctaaaacaaatccgtataaaaatcaagtttattaaggagcaagtcccaccctttttatttagaagccagtgtctataggatcgctcttggctattgttggattaattccagggtaggggaaaactccagtttttgagccggacacgcactcctgcttttcaggacctttttaattttgatgttttcaacttttaggcccaggggtccatgtacaggttgctatataggtaaattgcgtgtcacgggggttgggtgcacagattgtttcgtcacccaggtactaagtggagcaccggataggtagtttttcagccctcactctccccaccagagtcaagcagcaaaaatgctaggccttgtgggcggggccggggtgcccgctcttgccactggtccaatcacagcgcggcgttcctcctggccggccgccgattggtggttgccatagctccgggcgttcgcttgcaagatggcggcggcggggcagtggctgctgcgttttcgtgtctgagtccttcctgggttctaatgagggcgcggttctgctgtgcccggcccgcgaggtctaaggcatgggcttccagcctccggccgctcttcttttgaggcttttccttctgcagggcatcctgaggcttctgtgggg

SEQ ID NO: 10795 - DNA, 2300 bp, Homo sapien
ggtttcgccatgctggccaggctggtctcgaactcttgacctcaggtgatctgcccacctcggcctccccaagtgctgggtgtctctttctgatgtgttgtacttctcaaatttattcattggctcatcaaatgttagtggagttcctacgccgtagtagggaactagatagcgggcccctgccctggcggaactgaccctctggtctttcatctcacaaacattttaccaagtgcatgctccatggcaagctatgagccaggtgctggagatatagaaatgaaaggaacagatctcattctgggtactgtgatggcatagaggaggcagctaatgctgacttggtgggaccagggcaggcttcctcaaggaagcagtgaccgtgccatgttagggagctggagatagggagggcaggggcagggcacttggggaaggccacgcaagcagagagaacctcccagtaacagagtcaggctcaaagagggtctttaatttatgaacatattcttgtatttgcagaaactcctttaaataacggatcaacccctagaattgtgaatgtggaagaacattatattttcaaatggaataataataccatcagtgaaataaatgttaaaatttttagggcagagattaatgcccaccagaaaggtaactttgatgagggtagcaagcatgctttcactgaaaagtatttttttttcctcttttcaagattctcataattataacccataaaactaagttggacttgtttcttatgtgcatttatgatttaattaacgagagtacactttgtatgacaaaatgcaattttaaggtaaacactatggagaataatttcttttcctagtgaaatggtgcacattatattttattttgttttatttctagggataatgacacagagatttgtagtaaaatttttaagctataatagtggtaatgaagaagaattatctggaaatccaggtaagatgagtatatgccagtcattgatcttacaaacatactttagttcaacactcccagccatcaggatggttataagtaactctctccaatttagtttctgactctgacctttttctttattttctctttttctttttttgagacggagtcttgctctgttgcctagtctggagtgcagtggcgcaatctcggctcactgcaacctgcacctcctgggttcaagagattttcttgcctcagcctcctgagtagctgggattacaggtgcacaccaccatgcctggctttttttttttttttttaatcacacaacacaggaagttttattcatctgctacttctccaaagagaggcttgcagggttgctcactttaatataatttttatatttttagtagagataggctgttgttcaccgtgttggccaggctggtcttgaattcctgacctcaagtgatcccctggccttagcctcccaaagtgttgtgattacaggcatgagccactgccccagcctctttattctctgttgtggcactgtattcattttttttttttttgagacggagtttaactcttgtcacccaggctggagtgcaatggcacgatttgggctcactgcaacctccaccttccaggttcaagcaattctcctgcctcagcctcccaagtagctgggattacaggtgcccaccaacaccctcagcaaatttttgtacttttagtagagatgaggttttgccatattggccatactggtctcgaactcctgacctcaggtgatccacccacctcggcctcccaaagtgctaggattacaggcgtgagccactacgcctggccgacatggtattctttttgtgataacaatgtattttttttttttacatagtctgttgtacatagtaacaagttgctgtaaatgtgaagcattctttctctttagctactgttttttttgagacccgaagttgccatctttctctcaagggtattttcgaaagcttcgcctatgtgttttctttccttgtgcatgactcttgtattatttgcagagttagggcttgctatgctggaggaaacaggctcacgttcctttgttgtgtttgtctaggttaccaacttggcaagcctgtccgagctctaaatatcaacaggatgaataatgtcacgactttacatctttggcaatcgggtaatccggtttggtcattatgattagccctttggcaaattggtgttagaagtattaccatattttgaatctaatcaagcaatcaattattttaaagcctagttggtttatttagcagagaggt

SEQ ID NO: 10796 - DNA, 2300 bp, Homo sapien
cctgagtccactttcaaatagggggatgagctagtcactgcagaggtcctaagtttctgcatgatggaaataccgtgaatttcagcatctgtactgtggtggtgttgggccttcacccgacccctctagggctgactcaggaatctgggtcagtactggactgacggagctggggtctgagtcaattattgtctgaacttcagcctttgaattcaccttcacagttcttactgtatctttttgttgttgttgtttcttttgaaacagagtgtcactctgttgcccaggctagagtccagggatgccatttcagctcactgcaagctccacctcccaggttcaagcgattctcttgcctcagcctcccgagtagctgggactacaggtgcccaccaccacgcctagctaatttttatatttttttagtagagacggggttttgccatgttggccaggctggtctcaaactcctgacctcaagtgatccacctgcctcagcctcccaaagtgcagggattacaggagtgagccagggcacccagcctagtgtaactagctttggatttcaggtatttatggaaaataaatttaaaacttccaaatgacaggtaatttagcttgattttgtgggctttgtgaggacgccttttgtacttaaaagaaggaaaaaactcagtttggcagaatggggtctggagtgtctatggttttaacttttttaagtttatacatttatgtatgcattcatgaactatttattgagtggctactatgtgctggggcttggagataccacagtggcagaaacaatgtccccaccttggtggagcttccattctagcagggaagactggcactaacacacagacaagataatttcagatggtggcaggtgcagtgaaggaaatagaacaaggatgtgactccagggacagtctcaaggaaggggatatgtaagcagagactcgactgggacagcggtgaggttgcggcctggggcggggggccactgcttcccggtcagtgtggggaacacacactgggtgctgtgtgattccatcgacaggacaagcctggaggtggcaaatttagcgagacaaaattgtcctgtggtggccaggccgggcgggaaggggagactgcaactgagcaggaggagtcttgcgaggtcggtgggaaatgtttgaaaactggattgggatgctggctgcacactccaacttcacgaagaagcctaggatccctccgggcggcggatcacgcctgtaatcctagcgctttgggaggccaaggcgggaggattgcttgagttcaggagttcgagaccagcctggccaacatgatgaaaccccttctctataaacattttaaaaacaaattagccgggtgtgatggcgcgcgtctgtaatcccagctcctccagaggctgaggtgggaggatcgcttgagctcaggaggtcaaggttgcagcgagccgagctcgtgctactgcactcctccctgggccacagagggaaaccctatccataaaaaaccagcagcagggccgggcgcagtggttcacgcctgtaatcccagcactgcggaggccgaggcaggcggatcacctgagctctggagttttgagaccagcctggccaacatggtgaaaccccgtctctattaaaaatacaaaaaaattagctggacgcgggtggcgcgcgtctgtagtcacagcaactggggagtctgaggctggagaatcgcttgaacctgggagacggaggttgcagtgagccgagatcgcgctactgcactccagcctgtgggactgcgtgagattccgtttctctctctctctctctcacacacacacacacacacacacgcagcagcacagggtcgtgcactaggaacgggtgagcttcgcggcgtgcacactcggcgagactcctccaggaaagccggggagccgcgcgggatttagctctgcgtccagtccggcggagcgccagctgcagtggtcgtacccgccgggttcgcgctggttggccctgccgccacgtcgtgcggcgacaacctcgggcgtccattggtcggccggcggggggggcgggacgcgggggcggaaccggaaccggcagtggcttgggggcgggacctcgcggactgctgtggcggcagctggagcggcggccgcggtggcagaaccgggggcggccgctgcagtctggagccccatagtgcggggccgcggccaggccacaggaagagctcgaggcccgggccgcaccggctgagtgtgcgggcccgcgcggctc

SEQ ID NO: 10797 - DNA, 2300 bp, Homo sapien
attctcctgcctcagcctcccgagtagctgggactagagagaggcacccgccaccacacctggctaattttttgtatttttagtagagatgggttttcaccatgttagccaggatggtctcgatctcctgacctcgcgattcacccgcctcggcttcccaaagtgctgggattacaggtgtgagccaccgtgcccggcctaatttttttcttttaattgtagagatggggtctccctatgttgccccggctgttctcgaactcctgggctcaagagattttcccgccttggcctctcaaagtgctggattacaggcataagctaccatgcccagcttttcaaatccatgaatttataatgatctttaaaagtcctgatgggtcatttctggaggatgataggggaccactgtactatttcaaaaattgggcaaataaagaggagtcaagcatttatgttgccttccccatatgaaatgtacgggatcatctagcagtagctgtgagaggcgtctttatatcagcatctcagctaataaacagacattttagaacatttcaattttggaacccccacttgattaatggacctgggggtgggggagagagagagagagagaaacaaaaccaaaaccaagaatttgattcctgatggaagatacaccctggtcaagtctctggtcccagctgccaatttgcaggaaatacacatcacagaggaacttcaactgcacagtgagtgtgtagtcagcaaaatttggattgggcagctctacaaatccaacattctgggttcttcagtatgttgcaggaaatacatatagattcaaagagtcataaaaagatgtatcaaaattttaagaaatatagacaaaactaaaaaacaaaaacaaaactcagccaaccaaccaaccaacttaatcaacccacaggcatttatagatcactttttatgtgggctgggggctaagttgtttcgtaattgtattcaggtgacttcataaatgcatgcttctctctctagctacattttgaagaaactatgtcctcaagaacttaattttcaagaacaagatggtcctgagctgatggtttaacacagtttcttacctccctgtgccagtttcccctccctccctccctcctttctctctctctctctctctctctctctttctttctgagacagggtcttgctctatcgcccaggttggagtgcagtggtgcgatctcggctccctgcaaccgccgcctcctggttcaagcaattctcatgcctcagcctcccgagtagcttggaccacaggtgtgcaccaccacacccagctgatttttgtatttttagtagagatggggtttcaccatgttggccaggctggtctcgaactcctgacctcaagtgatccaccagcctcggcctcccaaagtgctgggattacaggcatgagccaccgcagccagctccctgtgccacagtttgtaacttctcagttactggtggtatacagaaataacagcactgtttttggggcagttgtgtcaggcctggttaaaattgatgcccttggatcactttaagtcaaatgtaatctctctgtctttaggtctgtgctccggtttgagtggttttcactttgcatatttgtatctcaatataaaagaatattcaggctgggtgcagtggctcacgcctgtaatcccagcactttgggaggccgggggtggatcatgaggtcaggagatcgagactagcctggccaacatggtgaatccccatctctactaaaaatacaaaaattagctgggtgtgctggtgtgtgcctgtaatcccagccacttgggaggctgaggcaggagaatcgcttgcactggtgaggtggaggttgcagtgagccaagtgcacagcactccagcctggtgacagagtgagactctgtctcaaaaaaaaaaaaaaaaaaaagaatattcaaaaccagaggcaatttgaataaagaatattcaaaaccagaggcaatttgaatacatgaattattgaaaatgacttcatatgatgtatttcataaaattggcatttcaggtttttttgccagcattgtccttcaatcagcacaggacgagtacaaccgtgggagtcacatctggagaagtctctaattcctctgagcatgaatcagacctgccgcccatgcctggggaggcagtagaatatcacagtattcaattaatacgggatgaatttttaatgaacgtgcagaaatttgcaagtaatattcaaagaaccatgcagcaacttgaaggtaa

SEQ ID NO: 10798 - DNA, 2300 bp, Homo sapien
gtcattgaggtgagagaaaagatgaacaaaagatggattagagccagtgcatagcagtggcttttatatgaggatattttgtgcttagaacttttatatgaggatattttgtgcttagaaacaaatgatcctctttcatacttttttgtcttgatttattttgaggacaagagtgcatgatcaaaggaattgatctgaatttttattttagtgaatgattttcatttccaagattcctaattgcttctttttcatatatctctgtttttctttgatactgtcctgttcttgttgcaaggatgcttttgcctccttgatgacactgaaaattagaaacatacttattttacattccttttcgatttctctacactttttaaaaaaatgtctgttgactctctcttgtggtggtggattttcctctgtgtgattttgatttttttttctagctcatctcacatgtagtttttttcttgtgtttgcttcactttgtcatctgtttttgcagcctctttaacctgaggcctgtcacactgggaagtagcaaggtcttatagtaggtggtttggggctttcttccttttgggcaatacttatccagacctctgtgagcaacccaggctcactgcaccatttttgtgcagttgcctttttttcctccccagaccacaggcaagcaccttgtttttggccacaatccaagccttgggtgggatgaagccaggcctggttcactggccaactgtgtgatcaggcctccatcatgcctgggcttcctttccttgcttttttgtttgtttgttttgtctatgactttgtgttagtggaagctcttatgtgggatatagcactgttttttaatttgtgagtaaaaaacaatttttttttagatggagtcttgctctgtcacccaggctggagtgcagtggtgccatctcggctcattgcaacctctgccagccggattcaagtgattctcctgcctcagcctcccgagtggctgggattacaggcatgtgccactatgcctggctagtttttgtatttttagtagagatagggtttcaccatgttggccaggctggtcttgaactcctgacctcaagtgacctgcccacctcgggctcccaaagtgttgtgattataggcatgagccactgtgttcagtcaaaaaaaattttctattgaggtaaaatttaaataacataaaactagtgattgtaaagtgcacaattcagtgacatttagtacattcacagtgttgtgcaaccaccacctctaattccagattttcatcaaaccaaaagacaagccagtaccccttaagcagtcattccctaccatctcctcccccagcacctggcaacctccagtctgttttctgtgtcaatggatttacctattttggataattcatataagcggaatgacacaatatatgatcctttacgtctggcttttgtcacttagcgtgatgttttccaggttcttccatgttgtagcatgtgtcagtgcttccgtcctttttatggcccaataatattaaatcatgtggattgatcacatgttgtttttctatccattggctgatagacatttgggttgtttccaccttttggctattgtgaacagtgctgccgtcagcattcatgtacaactacttgagtccctgttttcaattcttttgggtcaatacctaggagcggaattgctgggcacatggtacttggctcactttttgagtgtctggcatggcctgtccttcgctgttgtgggtcacaggcttcaccctcttctcataactagaagttttcctacctgtgctgggctgcatggagagctttcttttgcttttgagtgtggccgttagttatgctttccccagcattcccattcatttggagtggaggggagctggccatgcagatgctcactctgtcaccttgcctggaaggtcctcccacctgagttgatttggttctgtctcatgtcaggatggggctttgccatccacttttggaggtatctgataacccctgctgacactgaccttttgtacatttacagatttggatgttggttcagagaaaatggatgtatcttgaaagtatttttattggtggagatataagatcacaacttccggaagaggcaaaaaagtttgacaacatcgataaagtatttaaaagggcaagtgactcgcttctattttagtaatgaaagaagggcagcgatttgagatatttgtacctttttatttgcacattgtattttctccattagtagcttctctctcattt

SEQ ID NO: 10799 - DNA, 2300 bp, Homo sapien
catattgcattagggcccatctcaatgacctcatttcaacttgattatctctgtaaagacaatttccaaataaagtcacaatctgagctactttggggacttcagtatatctttttcagggcgacatgcaacttcaaccgtaatacataggcagtgtgtacatgagtctggttctcagaataggagcctagggtggggacgtcaatttcagagtcactgacatgtggtgggacccgagtgaaccatccagggagagcccagcactgagttcaggtggaagaggaacgagcagagactgagagggcaggcggagcacggggagcgagagactgagagggcaggcagagccccgggaggaagagactgagagggcaggcagagcacagggagcaagttcctctttgtcttttgggagtcttgggctccctgccaagggagggatccctctcccttgttgaatatccccaagaccatccccggctccgtgacttgctaggaggactcgcaggactcagcatgtggtcctgctcatggctgtgagtcattacagcaaaaggacacagagcaacatcagcagagggaaaaagtgcatgggggaccctagggaagaccagtctcaagtctcagagtcctctctccggggagccacacaggacatgcttaatcccccaacattgagttgtggcaactcgtgtgaagtactgcccaccaggggagctagttggagactcagtgctccgggatttccttggggctgctcatgtaggcacctctacctggcatgtgccaaaatcccggatgcccggagggagagcgggtagtcagcatagaatacgttgcatacccaagcagtgtgggcacaatgttaggctgttcttgcattgctataaagaaataccttagactggttttttataaagaaaagaggttcatgtggctcacagtgccgcaagctgtacaggaagcatggtgctgatttctggggaggcctcaggaaacttacagtcatggcagaaggtgaagggggagcaggcgcgtcccatggccagagtgggagcaaggttgggggaggggccacacactttcaaacaaccagatctcacgagaactcactcgcgctcacaagaacagcactaagaggatggtgctaaaccatccatgagagatctgcccccatcatccagtcacctcccaccgggccccacctgtaacactggggatcacaattcaacctgagatttggtgcggacgcagatccaaaccacatcccatattgggccactcttatcagtgaatcggggaggaagctcttaaggaaactaagttcccaggtgcctttcagaggtgagcagccgtggcctgccacgttaactcttccctgcacaggagaacgtcagagatggcataaaatgtattgcataatttgaaacggcgtagatataggaaaaaagaagtccacgtagccagggtttctcgactgcgtgccgttgacatttggggctgggctgttctttgttgtggtggggctctcctgggcactgtgggaggttcagcagcatccctggccttgacctattagatgccagtagcaacctcccttgcaacaagcagaaatatctccagacatggcccagtgtttcctgggggcaaatcccagctgagaatccctgcttcggagttacaggcaagtgaggcctcctcatgctctgcatgctccctgtgatgctcacggtcatcctcccaggcgagctggcggcatctaggatccccgtttgacagacaggagctggaggctctaagggcttgccacgaggtggcagggagcctcgggtctcaggtcaggcccacacgctgctctctggactcagcacctgctgatctttccacaccttccatcactcagtcagcacttagagcggtcatgaccctgggactcagagagatcaccagcatgtcttccttttccaggaattgtacctgcgcttttttctgaagaggagaaagagtctatcctgagtcagattggacaggaagctctgaagcaaggcatggggccggccaaggagtctgtgtggcagtacttcgtgaacaaaagtgcaaataacctgcacattgtcctgggcatgtcgccagtgggggacaccctgaggacctggtgcagaaacttcccaggtacccgcggtggagcctgtgaacccatttcccctgctttggcagagtgtgtggctgagggtctgtccacacctctccaggttcccccagcaaagcaaaacaagacacggccattaggtggaaatgtg

SEQ ID NO: 10800 - DNA, 2300 bp, Homo sapien
aattacaaattttgacttaaacaatttttttttccaggaacacatgtcttctgttaaaaagcaaaaaagaagaacgctggtattttgcatccattaataaagagtctgttgatggagtgtgtgtcctctgcaatagaggttggcaaccccctagccagcatccaaatctggcccactgcctgcttttgtaaataaagttttattggaacagggccatatccatttgtatacatattgtctatggttgcttttgcactacaatggcggagttgagtggttatgacagagaccatctagcttccaaagccaaaaatatttactatctggccctttgtagaaagtttgccaacacctcttctagactctaatggacacaaatgccatggagtcaggcaaacaacctgccttcagtggagagggctgcccctgctgtactgcccctcactggcttttcctcttcccaggttggtgtgattttacctcctgtagacatggccatttccgttacatacaggagcatgtcactacagactggggcatgacctaggaactgagctcatctctcttgaacttagatattcatggacattaggtgcaaagaggggtaaatgcagccatacagttcgagtgtttcatttatcttacgtttaagcacagtgtgcataagaaactcagttttttaaaaatgaattttaagaaatcaatactcatctgatgtttccctccagggctgtttgagaggcacaagctactcttttcttttaatatgaccatcaagatagaacaagcagaagggagagtccctcaagaagaactagatttctttttaaaaggtaatgaatttgcctagcttcattcctcccatctccttgcccacatgatacatgtatataagtttgtctgttgaaacaaacaataacaaaaattctccttaaaacttggcttccaacagcactgcatttttcactattccagttgatcattccagcctcagaaatggctctggttgaaatcggagcagccagcctctgtctcggggccatcctgaggctggaagctggatgctgcactgagcgcctggttggtgtcactggcggtgacgagggcaagcctgggccacttcctgtttccagtctccttcttgaaaagtggacttttcccaaaagtgggagaagtcgaagcagagttgcttgctttgtgttagtggtacaatggctgcttgcttctcttctgttgtgattaggaaacatttccctggagaaaagcaaaagaaaaaagccctgcgcttggttgtctgaccaaggatgggaagatatcattcttttatcagaaatgttttcagacaactttgggcaacttcctgatgatgttgagaataatcagactgtctggcaggaggtgagcccacgttccctttctcctcctctccttccccacatgtcaacaatctccaaacctcaactgtggcccaaccccttaagagaagacactcctttgagtaacccattcagtgtgtaactgatgccctgtaactccctgattggaattctcctttggctaattcagctagttgtatgggagatccaaccatctacctgtccgtccgtccatccatccatccacctacccacccacccatccatccatttacccaccgacccattcatctacccatctgcccacccacccatctactcatccatccatccatccatccatgcacccactcatccatccacctacacacccgtccatccaagaaatagttgttgggcatctgccatgtaccatgtcccttgatgggcactggggactcagtgaataagactcagttgctcctttctcaatgtcatagcctttgggggtagagaatgacagatctgaccaggtggccttcagttagtacacctatggattctcgtccctttccagtggcttttgccaccttcacacataaatggggacctatgtcatttctgagttgacgcacaatgaatattctttgcttttcccagtggtatgacctggattcactggagcagtttcccgtccccttgggttacgataacaacatcacccctttccagaagttgcttattttgcgctgtttccgtgtggatcgggtctatcgggccgtgactgactatgtgactgtaacaatgggagagaagtaagtgtgtcgttttgttgatttgccactttccgtggggtggaatctctagcgtcctcccaccttggactcaaagaaagcagaggctgaccagctcccgagacagctgtcgccaccctgctgtacaata

SEQ ID NO: 10801 - DNA, 2300 bp, Homo sapien
cactcagggacggacagaactgtgtgaagcccgccgtgccccaccccgcgctgtccatgcactgtgagcaccactgggaaatctcagccacaccttttctgtttaatcccatgcatgccaaacacttttcacacctaccgacccattctccttctgcttctcttgccctcttcttcacaccaaaatatgatcgtgtccctgccgcagaatatgtatttcctaattgctgtggccaaacgcctgtgtgccgaatcgcttgcttctgatcccgctccgtgtaacctaagtgcgctgcaggcaaagcccaggccacggctgcgtcactactgatgttcacgatgccacacagtcacacacctaattcattctcaagtcggagcaacacataccaaccttgaccttatcctcaagctccagggcagcctggccgagcagcccctgctccctcctggagacccttgtcacctcccgagctcctcctggagacccctgtcacctcctgaccaacctttcccagggcggcaccgatcaccgagcagccgtgcgtgtatctcaaggaactaaataagatgacgctactcctcatagcaccacaacctgaatgtgtgttcatatttttttgttagttttatccaaaatgtttaagatcccaacaaactttattttctaaacctgccttccttctgttttgtgtcttttattaaacaaacacctgaaggagggctaggagactgcaggagggagagcaatcacaggtcccagaagcgactccggcctcctcccggcccagagctagtccttagaatgtgctgcgctcctgagcttctgtgggaagctgcttttgcctctgatggcccctgcccactgtgctgcccgtgctagcccctctcctccctcatggagtgaagccacccctcacctccaggtggccagccagggctccaggccagcctcatggtgcacagagggaaggggtgcccagtgaccactggtcctggaggttctgtgtccttacctgaccccacacagacccaggcaggctgggggtagaagctcatgcaggaactaaacactaagctcaacaacttcacagtcgccgtagcaggtcagagccaaagaagctagggccagagagttctggaagggggagaagtggctccaggtgactggtcacttctgctctgtgcccgacatcatcagcccttcttgccaaaaaggagcatctgctgaaacagacctggatcatcgaaaacacacctttggaaattacattaggattctcacttgtgccaatgctatgtatgccaggcacttttgcctaatcaagtgttttctctgagaaggaaaagaaaactccacacatcttaaaatactctccaatatttactttttgattatataaattccttttaaaaagtagtattaaaaacaaaaccattcaggttaatttgtatggaaagagatttaagtggctgatttcaaatgaaaaatcagtgtcagtccccctcctgcctcttgagaggccccaagaaatgacagcagacccgatcactctgacaaccccaggctccgaattcattaagcagttttcttcacccaaaggttaatcagaattcagggtgaggcatactccttgcagcacccagtgagaaatgtgcctcgtggtaaagagatcagcttcaaaaaccaagccgactcccatggcgttccttctcatggaggtggtgtagacgggggtccggaaagtattctgcaagggaaaggcaggtgagatgcccccacggagagagggtgcagagggataaaggcagaggtgcagtgtaagtcttgacaggcaggggcccctgtgcaagactgcacctgagaacacgcacaaggctggggctgctcagggccaccctccgccagcttcacggggacctggcttcacactgacaccctggttaaaagtgggtcctggcccaggcagagcagaagacatctgctgtccacaccagcgggaaccactttatgactcaggcaatgtctgcagcattttgcaagaagggagggagtctccccttggttagtctagaccacaggatcacagcttgagcctgacacctctggaaggaccggcatccacacacacatacagccgcgccttttccaggaagcagctatccgtagcttttatcacggctccaagactctccccagcccataaagcttaggcacccctgttttaaaaagtaggactgttggaaaccacctcagccataactacagtcagaagaggaagggccctggtgtcagagagg

SEQ ID NO: 10802 - DNA, 2300 bp, Homo sapien
aaggttcaccacctccccatcagattagttagatacagagtatccacacaaaggttctccaaggccccaccagagtagctagatacagagtgtcgattggtgcattcacaaaccctgagctagacacagggtgctgattggtgtgtttacaaaccttgagctagatacagagtgccaattggtgtatttacaatccctgagctagacataaaggttccccacgtccccaccagactcaggagcccggctggcttcacccagtggatcccacaccggggctgcaggtggagctgcctgccagtcccgcgccgtacgtttgcactcctcagcccttgggtggtcgatgggattgggcaccatggagcagggagcggcactggtcggggaggctcgggcagcacaggagcccatggagtgggtgggaggctcaggcatggcaggctgcaggtcccgagccctgccctgcgggaaggcagctaaggcctggtgagaaattgagtgcagcgctggtgggctggcactgctaggggacccagtacaccctctgcagctgctggcctgggtgctaagcccctcattgcccggggccggcagggctggcagggccggcccgctggctgctctgagtgcggggcccgccaagcccacgcccacccagaactccagctggcctgcaagcgccgccgcacgcagccccggttctgcttgcgcctctccctccacacctccctgcaagctgagggagcgggctccggccttggccagcccagaaaggggctcccacagtgcagcggtgggctgaagggctcctcaagtgccgccaaagtgggagcccaggcagaggaggtgctgagagcaagcgagggctgtgaggactgccagcaggctgtcacttctcagaagcacctaaataggaagcccatggaaacaaaagcttttcaaccctgaagcccttacattcctctggcaccacagctgcactcaacagactggcaccaggcccattcgtgggcctccagggtgccaggcactgtgctagggcttagggtgcagcagtgaacaatctggagtctgtgcgaggaggcgggaaacagacccacacttacagaccctcacagagacacaaagactagaactggggacagggtggtaatgcacccgagtctgggggccagggcttccgggaggaagtaaacttgtactgagacctaaaggataagtagacagtggagacccaggagaggtgggtgggagagaggcctaagaagagtgttctgggcagaggaggagccatgagagggcaccagggtgggagaagcacagcccagcagggcacccggaggaaagctcgtgccacctggagccctgggggtaggagaagggccagcgagggtggcggggccagttgcagggccgggcagaccagtctgattctcagagcagtgggaaccattggaggtttttaagtagtctcaatttaaaaacaagatcactctgctgccacgtggagagcagaatggagcaggtaggagaggacagagggaggctttctggcagggatttgggtgagggtgaggacggcctcagcagcggagacggggagagttgaacggatctgagagctgctttcaaagcaggatgccagcaagatcatcatggactggaaatggatggcgggggatgccagcgtcaaggccacccccaggttgtgcagctggggacagtgcttgtgaggggtaggacactaggcctagggcagctctcctgtcatccaagacccactaaattctggatcacatttaaatggttctttctctttgacagcaagccactaacatatgggctctgcttcttccatcagccaacagaatcctggatttgagtctgtcctttgaaagcatctctgctagagttcccacttccaaacccctttcagctcttcgggattcagcctccaggtgaggtgctggaattgatgccagagtgaacgactccggattgctgagtggaaggaaaacgtaggcaccgctactgacagctctcaggcgctcctgggattttccttcctttgacgctgaggctgttccgctttcaagcgttctgctttgtgagggaagggcaaggtcagaaggtgctcaccctttccacagcaagcacgcggcacacgtgtgccacacgctgaacctgccttggttgtagctggctcctttgttaaggtcagcgccccccaagaccacgtgctgtgcagacagtgttgggatctcgggaactgtggggttccacttagaaactagtgtctg

SEQ ID NO: 10803 - DNA, 2300 bp, Homo sapien
ttaaagagttaataaaaatatctaatttcaaaaaaaccctatttgttagaccgatgtatttaaaatgtgtcacagtaaaaatctcacacaaataattgtcctgtactttagatcttaaatgtacctaaactaaatttactgagtaattataatacgcagaggagtaacaaaactattttaagatttttcagtggtgtgtatggatatgtacgcatacccgtatatataatcacgagttttaaagccttcttccaagcatatttcacataagatgaacagttagccaaaagaattacatacatttcaaaacatctttggaggtaaaagccactttaaacgttagcatctttttccttacaatgcaatagcgagaaaatgcatgggaattcttgatgagcaaaaaaaaaaaaaaagaaaagtcgttttatcaataccaatgctctttaaataaatttcaaacgtaaaagttttaaaatggcaatcctagttttaatactcttacaggtttctggaactgcgtaatatgttaaagtattacagcgtggtagcttgcattttgttataaaaccgactactgcaacctaagctacagagcgcggttatattttctctctggcagcctaattttccttagtggactagatcgtactgctaaataccaaaacttgaaatgaaacaatacaggtcagcatgaaaacctaagttagagaaactcactcgccgtagcagacggcagcccagtagccaagcctggagctctgctgcgtttgtgcattctgctccgtttcacgaatcacaggcaaatcgttactcagagtaaactaaagccgcatcaaagcttcaggaaggggctggcaaggtagtgtacttacggaaaggctaccaggacgggaggcgatacaacttgtcagggagggtctctaaggttccccgggtggtaacaagcatttaaaaaggcgatgtggattcagacggcctcctccccacagcatcccagacaaagccgggctaggccccggggcgctcctggtgcacctgcaatgcggatccctcgccctgcgatcccaccccggggcagacaggagcgccccgggaccggcctctcctcccccttggcactggggtgggcgcgcgccgcggccggtccgcaccctggactggagcccgggccggggagccccctccccagaaagggccggcagaccccgcgggggcgggcgcgggggtcgccgagcctcagggaccctctttccccgactccgccgtctcccgagttgccttcgcccggggccacccctgcccctgggggagctaacgtggctcccaagccccggaggtggggcaggaggaccccgtcccccgtctcccggcggggagggtttttaaagtcttcgccacgaactcccgtccctgcccggcccctccgcccctgcccggcccctccgcccccgccggcgctgccaggtgagcggggccggactcgacacaccccgggccccgcctcacctgcgggcgccgccgtcgcgttccttcaggcggctgccctcttaggctcggtcctcccggcgggcggcggtgggggcccgtggcccatgggctgggcggggcgcggcgggcggggctgcctgggctcgggcgctgcccgggccgggccgccgagggaggtcagtgggcaccgcccgcccggcgcatctcgcccgctcccaccccagcgctagccgcggtgcaccctgggagcggggccggcggcgaggcctggccgcgctgacccggcgggctaggcgccggcgcggcggcgggcctgtgtctgccgggctgggcgggggcggcgggccgatattcacttggcgaggcggggctacgcccccttccgcccggctgtggcggggcaggggcgaaggccgaggggaagggagggtcgggcccgcgggacgcaggcgcacagctcaggtgcggccgcactgcggttgccctgggtaacgcggcccgagggaggggggggcgcggggaggagcgagggaggcgagcgggagcgcgcgcgccgggcgctggggtgggggatggccgggcccgaccgggccggggctggggggcgggggcggaggcgggcggtgggggcgcgggccgggtggccgcgcatgcgtgcggcccccgctcccccggggcttccccggcctcgtgcgtgcgcacgcgcgctgtcccccggaggcgtctgggtgtgcggagcgcgcgcgcgcgcggctcggaggcgcacctgtgaggtgtccctgaggagagggaggtgggtgcgcggcgcccgc

SEQ ID NO: 10804 - DNA, 2300 bp, Homo sapien
accgaaatttcatctcatcagagaaccaccaccagcaaaaaagctgttttaaagttaaaacttaaactgctatcaatttgggaaatggctaaaccatgatatactgaaactatggaacatggtgcagcagttgttaaaaaatgacttgaagcattacatgctaacattgaaagttacggtgcaacagtccttgttaaagcagtcaaaaatgatgttaagtgcacacacgtaaaagtactccaaaagatctagaaggataaacaccacacacataatagtcggcatccctgaagacagaggttgatagtcaaagacaaaatgccatctctgtgatatgctgtttttacaaagaaaatgtactactctgctaatttagaattaatttttaaatttttaattaacctgcgggttgaacaaggtcaatttcctgctctaaaaaactatgcgtctatgaaggaaataggagccctctctaaataagaagccaaaatgcctaaaaaccgttccagcctgtgaaaacaataaactgtaaatatcagaaaacgttccttgaagaaggcaatagctcagaaatcttttttcggtatctggtctcctttgttgcaataagacagcccgtaagcaatctagcaaccagaacagttcagttcggagcaggctcccggggagatttagttgttagagttcggcaagaaaggtttcacaaaggagctgagttctgggggaaatgagaggtgatgtggcggagagatggatccggacgggaaaatgtctgggagggggtatacggagttcatgagaagccggggacagtgagaaaactgcagtcgagtcctggaaggggtgagaacgcctgcggaggcgggagtcagagggaagtggacagcgccggcagccggtttacctgggtgagaatccggcccttgttgtggtcaaacaatggaggcgtccggcggcagcagccttctgcgctgggtgcgcgaggggttcctcatcacctgagcgggatgctcgcctcctctgccggacgcagggcgccctgaaaaacacacagcaccccatgcagccggctcctccgcagccgcccggctccccggtcccctggcgcggccatgaccgcctctcccgggacccgcctggaagggctccaagacgcggctccacgggcgacgagggcggcagcgctcccccttccctcggctccaacaacaatggagcctggctcgggagtccggctcccgaggggcctcgcccggcctcgccctgcccgctgcccagccctcgctcgcaccggccgccatctgcgccccccggccccgctcccccgcactgcgggcccgcggccgaccgcccgaggcccgaggggcggcttctcagcccgggacccgccaggctgcgcggagccgctctgaccttccccgccatcccgaggcccatcctccgggatgggttgtttttcttttctttaagccactccacctccttcccacccccagcccgctccctggcccccggcccccgcctccctccgggaaagaaagaaagactgcagcccggccgccgagaactcactccaagtgaggggagtcagcgccccaggccgcgggcgccgcgcacccacctccctctcctcagggacacctcacaggtgcgcctccgagccgcgcgcgcgcgcgctccgcacacccagacgcctccgggggacagcgcgcgtgcgcacgcacgaggccggggaagccccgggggagcgggggccgcacgcatgcgcggccacccggcccgcgcccccaccgcccgcctccgcccccgccccccagccccggcccggtcgggcccggccatcccccaccccagcgcccggcgcgcgcgctcccgctcgcctccctcgctcctccccgcgcccccccctccctcgggccgcgttacccagggcaaccgcagtgcggccgcacctgagctgtgcgcctgcgtcccgcgggcccgaccctcccttcccctcggccttcgcccctgccccgccacagccgggcggaagggggcgtagccccgcctcgccaagtgaatatcggcccgccgcccccgcccagcccggcagacacaggcccgccgccgcgccggcgcctagcccgccgggtcagcgcggccaggcctcgccgccggccccgctcccagggtgcaccgcggctagcgctggggtgggagcgggcgagatgcgccgggcgggcggtgcccactgacctccctcggcggcccggcccgggcagcgcccgagcccaggcagccccgcccgccgcgccccg

SEQ ID NO: 10805 - DNA, 2300 bp, Homo sapien
acagccttgggatctctggatttgttcatgtgttttgtaatatgttaaaatgagaatgataaaaaaaattcttaagtttcaacttacttatgattataaagttattctacttcatgtacattgagagtggaaataaagatatcccaggcctccctgccccttaggggtttgggtaaacttgactcaaaactccattaattccatggcctgtagcagcttttagctaccctgaagatttctgcatattctgcatattccttggagcttgttctcaggggcaccctcttctggctcctatatttatgtgtggtacttacgtgttgccccatttcaccctggatacagcactcagcccttccaccagtttccataagaaatccaccatgccaaacacccctaactttagggaaagactttgtggtcacgaagttttcctacacaagagctcagaacttcagaccatcctactccactggttccctggtcctctctcccactccaagtctaccctttgttttcttacctccaactaccccaggagattcaagttctctctcttaccatgtggagcaattcagccctctccaggtcctaccccaattttagatgtccaaacccaccacagagctcagcaaaacaaaaaggaatccaaataacatgacctttcttccttaataggcaactgggaataggaattcgttatagcactaaatgctaggcactttacgtttatttacttctcccaacatttccatgaattagatattttcaaaaccattttaaagatgagaaacttgaggtttagaaaaattaagaaaatgaatatggttagaggaagtgctctatcatcttcatttttcctctcttcctctctaatccatagatcttaactcagctttgctatttatatatggctcttgccctgtagtagtatcaacctttctcatcttttcctagattttaccactgagtatattttccatctgcttctgatatttgctttccattcacctagtttttcaaatttctgagaatatcagtacattacaaagactgagaaataattcaaaaattttaagaacagagccaagagctagaaggtcccttggaaggaatcatgtccatgctcacacaacacaaagtaatccctcttcaatttctgagatggcctgacgagctgtgcccacattctcacgcagtagactatctcaatgttggactctgatgcaaagagttcttcctatctgcaagaggcaatctgccgtttattcatgcttccaagttagaaaccatgcagtcattctggacttatcttggctcacactctaaatcctagcagattcaccaagagtgaatcccatcacagatgacctacccttgcccccaccccccacccccatcagaagggctagtttgggttgctcccatcccaatggtggaattgcaatgcagacttgtctctcaaagctggtagacgccacagccagtcagactgttgactgcggcacagaacgtgggccccctctgcttcagctgacagcacttcacgccttcccaggcatgggctgcagtcagcaggggccagggcagggcttggaggaactgccaaggggcaccaggaagatcacagaaagcaccaaaatggatcacccaaggaaaaggaattagctgccaacattttaagattaaactgtgtgtgaaaatcgaggttggtgttttcttagaagagctgtgggcctgtattcgccgtgaacacagagccacagccgagctgaggcagtcctctcagtggactgtgctctctccagatggattattcctgacttgagtcatttattacctgtgtggctgtgacctcagaccaaggtgtcctcacaccttagtgtgcccgagaaaggcccattcgaggcttgttgtccagatgtgagtatcaacagcaccccctcccttcactctcaagtgctcagtttggacaataaattacatggtcaccctgggcttaatgtgcaagccaattctccaccacacacccatacccatactcccacacacgaccactgaattcacacaactacatgtcaagcacagaaccctgttataaagcgattttattaaattgatttggacatactgtaggtcaaataatattttctgaagataacaattatggactttaaagctcgacataaaattagtagcttcaaaagggttagtcatattccccagcaacagcatgataaaataattcaactatgtagaaatatagaactctaggactagctggaaactcggaaatcatt

SEQ ID NO: 10806 - DNA, 2300 bp, Homo sapien
ctcctttttttttttttttttttttttttttcaatataacaacttgtttatccccaaacctgctaaatcaacaaatgatgttttggcattatggattcaggcagacacagtcaccaatttatgtgacatcacagtttctagtcagacaaaataactggaaagcaatctggatggtgtgccacatttagaagatctcaaaacatttgctttgcacagattcgccgagtgagaggcatgcagagggggcagtgctcacacttttcatctgctgtgcacgggcgccatttccacgagtgtcacgcactattgtgttatccagaaaggtatatgtgtttcactttaagcattctacaacttgggagcaagagaattgtgaacccctaaaaagctgaaaaacgataaagaaagtggtgtagaaaggtgggtgtattgaaggggatttcttgaaggtaactctagactcaccctataccacccgctactcaccctataccacccgctacccactattgcaggggtcggccaactttttctatacaaggcaagattgcaaatagtttagtctctgcagactatgcgttctctgttgcaaaaggaaaacataatagtcatagtatctggggctatcgtctagcacaaagctctttaccaatgcatcagctggggtttgtggagtttaagccttgtcagggagcaggatatccccaagatgtcaaaatatctccccagagcttcctgataaatcacaaagggaaagctaccttgagcacgaagaaatgaggtggataccacctccacccagtgatcatccctagcatgaccaacagtgggacaagctgacgggatgtgcctcctgaagttgatggcgcaacatggaccctgaaaaattcctgcaaaattgtttatcctacatcgaatcctgagacagcaatcagacaaatccagatcatgggatgctctacaactggcccaaactcgttaaaactagccatgtcaggaaaggcaaaataggcttggggtctgttagggtcgaagaattaaagagatgttactacacagaactgggatttcaccctgctggccagggaagacatggctgtgccacagtctcacagactcaagcagaagacacaagactcctgggtcagagacaaaggatgttattactcacaataatcacagaagccagggggtcagcatgttcttgagccagttccccagctctggtttccacagggccactagaaggggcccaggtgacccttgcacatgcagctgtttgcacgacaggggagaaatccagagtgtagggaacccgaatctttcacagtgggtaataagcctgcctgaacttttctccagagggaaccattatttttattacagtggacaggaagcatgcctatcctttgatttgaagagagacgctatctctacctttcaaaactgttctccctacaaacgttattgaaatgatagcccagaatgaagggcggccaaggcctctgtttgcaagatgggaataaacacgggagactcatgaagaattgtctcctaatagtgacaacgaaatgcaatgtgtgtgatcgcttctctgccttttggctaagatcaagtgaaatgcaacgtgtgtttgagccctgggttgagaaagaaaacagctttaaaggacattgttgggaaaattggggacattttgatatggaatataggttatataattgtatcaacgttaaattccctcagtatgatcgcggtattgtggttccatatcatctttcttcttaggaggtgccgttgaagagttttggggcaaaggggcatgatgtttaccaccaatttttacatagtttagcaaaacacaaaacaaaataaacagtacacacacacatacgagagagagagagagagagagagagagagagagagagagatccgatatgtcaacacccaacaaacccaaatggtacttgggttttcattacattattcttgcaaaaattcagggggacccagcttcccccaagaacacacagctggctcttggccaagcctggccgggagcgaccttcttctgactttacggagtgtgttttcactacactcagtctctgattttatccctgccctggcttaattaagtgctctgaagacataaataggttttttgtttactcaagcttgggagaagctggcagaaaaggccttttcagctaaaagctccttacagccggaaggtgtgaagcggcaagtttccagccgggaagaagcctctcagccgtaggcgtctttgcccggag

SEQ ID NO: 10807 - DNA, 2300 bp, Homo sapien
aggtcagaggtcatggtcactggggccatcagtgtgggctgctctctggggctttgacctttgtagtgcactcatgttctgcctgctgtctggtgtgcacatatctctgacggttatccacacagggcagcctgtttcaggggaaacttccagaacccaggtgggcatagtcatgaaggcactcttgataagcgggcttctagatcaagatgaatggcacaagggggccaggattagtagagtggggcaagggactttcaggacatcgcccaaacacagaaatcaccacaaatggtatttcgctgcaatgttttaaaagtcaaaatggatgcaaacagttcaagatgaacaaaacatcaacattttatcttattttgagacagagtcttgctctgttgcccaggctggagtgcagtggcatgacctcagctcactgcaacctccacctcctgagttcaagcaattctcctgcctcagcctcctgagtagttgggattacaggcgcccgccaccacgcccggctaatttttttgttatttttagtagagacagaatttcaccatgttggccaggctggtcttaaactcctgacctcaggggatccacccgcctcagcttcccaaagtgctgggattacaggcgtgagccaccgcaccaggcctcaaaatatcaacatttcaaataaagacagaggaaccctgcaattctgagactccaccttgcccgcatcctgccctgccctgggtagctattgtggccaaggggtcattagtccctgagataagaagaaattagttcttgccgaagactttctccagggaagcagaagactactgggtctgggtgggtgagcatttgggaaatgtgaatttccatgtgtctgtgttccagaaagaatgccccctccccccaccgctttcgtcctagtcagtgacagtagttcagccagtcattctggtcaagtggcccaagggctgaagagggcctggcttgcctaagaattgaagcaaatggaatccgtagtcccattgtttttttcccagaatgttccaaatattcaaacctctggttagttgggtctgtttgggcagcagacttccagcgttctttcctgggcgacatggaaatgggctgtaaattcacctggtgacaggtgcatgcctgtcaccctgtgggctctcaggaagcggccccaccctctgtcagtgtccggcatgcaccttactcctgctgctgcagggcctgcgccctgctgttccctccacatggtgcgctaattctcactgcttggctattcagatcttatctttgaaaatcgcctcctccaagaagccttccctgaacactccaaagccttaagttgtccctttgactattcttggttgcagcacctcattaagttccttcccttagactcacagccttagcttcctggtgcattgacaggctccctcatcagactgggccctccacagggcaggggcctgctgtcttacgcctgcccgttctgaggtccggccaaggctgggtgcggaatgggagcctgagaacatcttcaaagtgctgccctcagtttgggggtgtccaaagagcggattctgacacccggcttcccgcccctgatcttgggctttctgctgtaagctgaatggaagtgagtgtgtctgggcacactttcacccctcctggagtctacctctgttctcttcgccctattagcctctcccacattcctgcttttcaaagcagtccgtggacacccccagctgccccgcttgcagaatggaaggatggatcctcaggagtggggtggggggcgtctgtgtggctgggcgctggaaatgcagacatcctttgccaggcatctgataagaaaacagtaaggaagggaaacacgtgttcttctctcttgggaggaaggaaaagaagggaaagaccggcaggacccttgttcatgagcgaggacctgcctggaaaaaatgcaggaacagccagatgccgggggattcccggaagtgctgctcatcgcccccgccgcccccacccacaggttccacccaatgctttccacccttaaggcccaaagagctggccctgggtgtgcgggtaaccgagacgccagtactagggctgtggtggccctcctccccatcgattgtaagttacagagaaaaagaaaactctaaaataaagtttctcaagctgcttttattgggacttcaaatgagatggagaaaacctccaagagcaccacgaaataggatgatgatgattactcgtatgtcttgggatgacttggg

SEQ ID NO: 10808 - DNA, 2300 bp, Homo sapien
gggaaatgtgaatttccatgtgtctgtgttccagaaagaatgccccctccccccaccgctttcgtcctagtcagtgacagtagttcagccagtcattctggtcaagtggcccaagggctgaagagggcctggcttgcctaagaattgaagcaaatggaatccgtagtcccattgtttttttcccagaatgttccaaatattcaaacctctggttagttgggtctgtttgggcagcagacttccagcgttctttcctgggcgacatggaaatgggctgtaaattcacctggtgacaggtgcatgcctgtcaccctgtgggctctcaggaagcggccccaccctctgtcagtgtccggcatgcaccttactcctgctgctgcagggcctgcgccctgctgttccctccacatggtgcgctaattctcactgcttggctattcagatcttatctttgaaaatcgcctcctccaagaagccttccctgaacactccaaagccttaagttgtccctttgactattcttggttgcagcacctcattaagttccttcccttagactcacagccttagcttcctggtgcattgacaggctccctcatcagactgggccctccacagggcaggggcctgctgtcttacgcctgcccgttctgaggtccggccaaggctgggtgcggaatgggagcctgagaacatcttcaaagtgctgccctcagtttgggggtgtccaaagagcggattctgacacccggcttcccgcccctgatcttgggctttctgctgtaagctgaatggaagtgagtgtgtctgggcacactttcacccctcctggagtctacctctgttctcttcgccctattagcctctcccacattcctgcttttcaaagcagtccgtggacacccccagctgccccgcttgcagaatggaaggatggatcctcaggagtggggtggggggcgtctgtgtggctgggcgctggaaatgcagacatcctttgccaggcatctgataagaaaacagtaaggaagggaaacacgtgttcttctctcttgggaggaaggaaaagaagggaaagaccggcaggacccttgttcatgagcgaggacctgcctggaaaaaatgcaggaacagccagatgccgggggattcccggaagtgctgctcatcgcccccgccgcccccacccacaggttccacccaatgctttccacccttaaggcccaaagagctggccctgggtgtgcgggtaaccgagacgccagtactagggctgtggtggccctcctccccatcgattgtaagttacagagaaaaagaaaactctaaaataaagtttctcaagctgcttttattgggacttcaaatgagatggagaaaacctccaagagcaccacgaaataggatgatgatgattactcgtatgtcttgggatgacttggggaccccacaaggcaccctcggtgcgccagtgtggtgcttgttccgggagtgggggacacacgcgcctcgtgggactccagctgctggctgggcgcgcagtgcccaggagcgggagggcctcggcggaggcgccgggccggggctgttgcccaccgcgcaggccggggcggggagaggaagggggaggaggaggcgcctagaaaaggaggcgcgggccggggaggtgcggagagggccgggcggcaacgtgcgcctcggggctgggccggcctgcgggatcgcagcgcagcgcagaggcgaggctgggcccggcgggcgggagccgcggagggcggagggcggagggcggcggcgctggcaggagcgcggcccacggcggcgagcaggctgcaggcccgcggggatccggggcgcggggggcgccgggcctgatcgccgcctctcgcggtgcccgcaggtccccgggcgcgcagctctcgccccgccgccgcctgccccgggccccggagcgcggtggagaagcccccggaggagcggggggcccgcgccccgcgccccccagacatggtgggccacctgcatctgcagggcatggaggacagcctgaaggagcagggccgggagggcttgctggacagccccgactccgggctgccccccagccccagccccagcccgcccttctactccctggcgcccggcatcctcgacgcgcgcgcggggggcgccggcgcctcctcggagcccccgggacccagcgaggccagagcggtaaggaggcgctctctctcccaaacgggggaccgcgtgggcgggtgggtgagggctgcccccagagacgcgcgccactgcagcag

SEQ ID NO: 10809 - DNA, 2300 bp, Homo sapien
tctgtcgcccaggctggagtgcagtggtacgatctctgcttactgcaacctccacctcctgggttcaagtgattctcctgcctcagcctcccaagtagctgcagttacaggcacgtgcaaccacacccggctaatttttatatttttagtagaaatgcggtttcaccacgttggccaggctggtctcaaacttctgacctcaagtgatctgcctgcctcagcctcccaaagtgccgggattacaggcgtgcgccaccgcactcagcctccaggacctatttagaggcaacttactcctccaaaatgaattttcattcaaaaaagtacttgtgccccaacttgccgcttggatgcctgaagtcatacctcccctaatcattatttcaattatgaaaaatggcatcgtttcccaaaagcagtggcgactttgtcacccctgactcagacccagcaggtgcatgaagcactaatccctggctgtggggagcagggttccgcacacaggctctgtgggatatgcccgtgacagccgattcaaaaatataatggagaaaacgagtgcctgcccactgcccgctcatgaatgaggctctgggaggtagagttagcgagagatgggggtgcccccatggaaacgcagggctccgggaaggccacgtgggtggagcagccggctcctgttccagccccagccctgtgcaggggcagctgtgccccagcttctcactcacagagctgggaacagcagctttctctgttctcaacgcccaccctggccgccccctggcatccttccccttgctctctcactcctcacgtggcttttttagctcttcgggtatcctgagcaggcccagctccctcatgtgccccctccctgaagacctcctagccctgcctcagcttccttgccgttctctcctggtacctcattgactacctccacacagttaccaggctctgtagagcttgggatatctgttaatgtgatcgtagtctgttttctgaattagatggtaagatgcttgcatccgttttatgaccgctgtattcacagtgtctagaacagtgcctggcacctagtagctgcttaatcagaagttttggaatgatgcaaggaatgaatgaacgaatgagtgggatgggtcaaaccatgacgcacagagtctggcaggttacagtcaggagggcagtttcactctgggagcagcaggggatgtggatttatcccagggcaatggggactcatcgagggtggtggaggaagagggcagctcccatgactgcctgaccgccttctctcctcccccaggtccacctccacctcctcacccgttcgcccggctgccacattcccacctgccacccactgcccactgggcggcaccctcgatggggtctaccctaccctcatggagcccgtcttgctgcccaaggaggccccccgggtcgcccggccagagcggccccgagcagacaccggccatgccttcctcgccaagcccccagcccgctccgggctggagcccgcctcctcccccagcaagggctcggagccccggcccctagtgcctcctgtctctggccacgccaccatcgcccgcacccctgcgaagaacctcgcacctcaccacgccagcccggacccgccggcgccacctgcctcggcctcggacccgcaccgggaaaagactcaaagtaaacccttttccatccaggaactggaactccgttctctgggtaagaccaccctgacagcggccaccttcatagacgcgattatcatgcgtcaaattgctcacgataaaggggcgcgagaaggaggtgcgctggccaacggctcccctcgcgatggtaagacttccggcccgcacccaccccgtctcgtggtccaaagatattttcagatctctgctttttactttggcccccgttttttttgttgttggttttggtattttgttttgaagcccatccgtcctcgccggtttgcacgcgctgacgactactccggccgcgcctgcccctctggtttgggggcgctcatcatttgcacatcattttaccatggttttttttttttggatttttgcttttttttctttaatgaatggatctgtgattctgacttcgactgcgcccccatctccctctttgcgcctgtgtccagggagcagggatggggctgcgggagggctcgggcctacgcccccacctgccggctgcctggatgctgtcggactgggggaagtggaggcaggcggtgcaaggagaagctgaggcggggcagggacctgcgc

SEQ ID NO: 10810 - DNA, 2300 bp, Homo sapien
gtggtaggtagatcgggttaggtaggtagatgggtgggtaagaggatagatggctgggttaactgggtggatggatggatgggtgggtgggtggttgggttaagtaggtaggtaggtgggaggaaggatagatggccagattagccatgtggatggatggatgggtgggtggctgagttaggtaggtaggtgggtgggtgagagtatagacgctggcttagctgggtgggtggatgggtgggtggtagggttagggaggtaggtgggtgggtgagagtatagatggctgggttagctgggtgggtgggtggatgggtgggtggtagggttaggtggatgatggaatggatggttggatgagtaattgtggggatgagtggatggaggccccagtggatggacgatgagttgggcggtgggatgagtagatggggaggttgtttggtttgagaatagaatctgtggagagggagagactgaatggggactgtgaggaaagactttcccggtcccccacatttagcaaggccagcaaggaaaagaggtgtccctcttgcctggacaaagtcccaagtttctctgagatgggagaggcccctgagtgccctctggtgacacacactccagagactgtgggcagagctgcttcaccaggggggtggggtcacacctcaacacccttccctgcccggaacctttttttttttttttttttgatggagttgtactctgtcgcccaggctggagtgcagtggtacgatctctgcttactgcaacctccacctcctgggttcaagtgattctcctgcctcagcctcccaagtagctgcagttacaggcacgtgcaaccacacccggctaatttttatatttttagtagaaatgcggtttcaccacgttggccaggctggtctcaaacttctgacctcaagtgatctgcctgcctcagcctcccaaagtgccgggattacaggcgtgcgccaccgcactcagcctccaggacctatttagaggcaacttactcctccaaaatgaattttcattcaaaaaagtacttgtgccccaacttgccgcttggatgcctgaagtcatacctcccctaatcattatttcaattatgaaaaatggcatcgtttcccaaaagcagtggcgactttgtcacccctgactcagacccagcaggtgcatgaagcactaatccctggctgtggggagcagggttccgcacacaggctctgtgggatatgcccgtgacagccgattcaaaaatataatggagaaaacgagtgcctgcccactgcccgctcatgaatgaggctctgggaggtagagttagcgagagatgggggtgcccccatggaaacgcagggctccgggaaggccacgtgggtggagcagccggctcctgttccagccccagccctgtgcaggggcagctgtgccccagcttctcactcacagagctgggaacagcagctttctctgttctcaacgcccaccctggccgccccctggcatccttccccttgctctctcactcctcacgtggcttttttagctcttcgggtatcctgagcaggcccagctccctcatgtgccccctccctgaagacctcctagccctgcctcagcttccttgccgttctctcctggtacctcattgactacctccacacagttaccaggctctgtagagcttgggatatctgttaatgtgatcgtagtctgttttctgaattagatggtaagatgcttgcatccgttttatgaccgctgtattcacagtgtctagaacagtgcctggcacctagtagctgcttaatcagaagttttggaatgatgcaaggaatgaatgaacgaatgagtgggatgggtcaaaccatgacgcacagagtctggcaggttacagtcaggagggcagtttcactctgggagcagcaggggatgtggatttatcccagggcaatggggactcatcgagggtggtggaggaagagggcagctcccatgactgcctgaccgccttctctcctcccccaggtccacctccacctcctcacccgttcgcccggctgccacattcccacctgccacccactgcccactgggcggcaccctcgatggggtctaccctaccctcatggagcccgtcttgctgcccaaggaggccccccgggtcgcccggccagagcggccccgagcagacaccggccatgccttcctcgccaagcccccagcccgctccgggctggagcccgcctcctcccccagcaagggctcggagccccggcccctagtgc

SEQ ID NO: 10811 - DNA, 2300 bp, Homo sapien
ctctctgcctgccatgtccccgccttccagatctttacttagtgggtttctttccatccctcaggtctttgtttacatattacatccttggggaggcttctaaccagaccccctatctccagttcatatcacatgctgtgacattttaaaattgtcttccggccaggcatggtggctcacacctgtaatcccagcagtttgggaggtcaaggcaggcagatcacctgaggtcaggagttcaagaccagcctggtcaacatggtgaaaccctgtctctactaaaaatacaaaaaaataaccgggtgtggtggtacgcacctgtattcccagctactcgggaggctgaggcaggagaatcacttgagcctgggaggcagaggttacagtgaacggagatcgtgccattgcactccagcctgggcaacaagagtgaaactcttatctcaaaaaaaaaaaaaaatgaaagaaaattttcttctgagcgtgtttcactctgtaattctcatttgtttgctagtttatcacctgtctctcgcattgaatgtcagcttgtgagggctgggatttctgtttcgttcactggggtgaccccagttctcacaacaatgcttgccacgtagtagaggctgcatcaatattttttaattgattgagtgagtgaatggatgaaagaatgaattttttaaaaactataacacaaaagcaaatgagtcagtgagcaaaaagtgaactaaggcaatgaagaaatgaaggagtgaatgaagagacctggtccttgggatcccgaggtccctatcctcaaacaactccccgtaaatgccagccccagaggcccgatgcatccaccttgcccgtccacaggcagcctttcgtccagcaaggcatcccaggaccgaaagctgacgtcgacgcctcgtgagatcgccaagtccccgcacagcaccgtgcccgagcaccacccacaccccatctcgccctatgagcacctgcttcggggcgtgagtggcgtggacctgtatcgcagccacatccccctggccttcgaccccacctccataccccgcggcatccctctggacgcaggtgattgccctggggctcccagaaccctgcagtggtgctgaacagggccacggacctcatcagtgttcgctcagggactccttaggcatcaactgtcaggttcccctggatggcgaaactgaggcctcgggattggaagacccaacagtgtaatcatgagcttaggttggagcagaatttctcttagtagtttgcaggacatgtggggttaaacatttcagtggttttcttttccggcaggacttatcagtgcctttagcaatgcaaaggtatagaatgaggacttgagtatatgcatttttcaaatagacatgatctgaaagtcttttttaaaagttgccgggcacggtggctcacacctgtaatcccagcactttgggaggccgaggcaggcggatcacaaggtcaggagatagagaccatcctggctaacacggtgaaaccccgtccctactaaaaatacaaaaactagccgggtgtggtggcgggcgcctgtagtcccagctactcgggaggctgaggcaggagaatggcgtgaacccgggaggcggagcttgcagtgagccaagatcgcgccactgcactccagcctgggcgacagagcgagactccttctctaaaaataaaagaaattaaaaaaaaagaaataaaaaaagttgcatccctttggagtgttaatctgcattgggatgtcctatgtttgggacaactttgatgcaaaaagcatccttcgtagaagtcaccctcttgtgtcctggcgtgatgttttcctgctgtccgacgctcagttctggtttgtgctttgggcagccacacatgtaggtgggagaagctgtccgggtgcagaagtagggggcatccagacaggtggagcgacaccatcaggcctaggtatggctggcctcacatgagctcccctctgccccgcagccgctgcctactacctgccccgacacctggcccccaaccccacctacccgcacctgtacccaccctacctcatccgcggctaccccgacacggcggcgctggagaaccggcagaccatcatcaatgactacatcacctcgcagcagatgcaccacaacgcggccaccgccatggcccagcgagctgatatgctgaggggcctctcgccccgcgagtcctcgctggcactcaactacgctgcgggtccccgaggtgagtgggtgggcagaccacctccgctgggtttg

SEQ ID NO: 10812 - DNA, 2300 bp, Homo sapien
aggagccagacacaaaaggccacaaactgtaggattccattcattggaaacgcccagaacaggccaatccacagagacagagagtgcattagtggctgccaggggctggtagggctggggcggggccctgggagggactgctaatgggtatgggatttccatctggggtgagaaaaagttctggaactaggcagtggtgagggttgcacaccaatgcagatgtacttcatgccactgagatgttcactttccagtggttagaatgctgagcttcgtgccatgtgtatcatctcaaaattaaataaaaggcggcgggaatcacacaatttcaataaagcttcttttgcagcctataatgaaatacatgccagaaaccaccaagtggacattaaagacagagaaacaacaatgtggcctctctgggggctgacagcagccccaggccctaccagctggatacagtgcccaggccctaccagctggatacagtgcccaggccccgctggcatgcctctcactcaccacacacagagcctgacctgcagcggcaggcaggccctccttcctgaatggtgcgagggtctctctgggtccaggttcacctcagcctggggggcggagggcagactgcccccggaggagctctgagggcgaggggcagggtcccggggtgagggcgggggctgtgggggtcttctcagggctgtggggaccctcagcaccccccacaactacagtggaggacggggccgggcccaggagccccgtgatccaggctgttctcagatacacctgcccttatgtgccaagagcgtttgctataaagggcctttgttccctccataagtcacgacctggagctttctgcacaaagaaaccgcacgtcacagacagcctcgactccagcagggccacgggaccaagcacgggacagggacggggagtgggggcctgggcctgctcccagccccacacaccagctccggaacccgtggcactccttggcctctgcttcctggctccttgcccacaaacagggacatgggcggggacaggagcaggccccacctcttagataaccgagagtgagcgtgccgtgggagccaggtgctgccccggcctcagcagtgctgccagtgatgcgccagctccgacagcccctgccccaggccaggcacggccgagggagggaggagattcgctcccactcagcccaccatgggccctcacacagggttatctgattccgcacagccaacctagacgaccctcccactcaacagacgggcaaaccgaggcccagaggcaggtcactgtgctgggaagtaaagatcttggccaggagacagcacagctgagaggggatccggcttaggaggcactggaccccagcccccacggtgctgcacatcacaaggccatctgctcgggatggcttctgctgccagcaccaatgcctgctggctccctgccgtgtgagccactcccacgactgtccccaacggcctgggtgtccccatccactccagaacccgtcacccagattggggtgctcaaacctgagacaggtttccaaagccccagcacacttgagcccaggataggacctttggggctctaagggctggatgaacgccctgcaggtctccctgaccccaggactctaccgagatggccgccggcaagctctgactgtcccgagatacccaggtgtgctgccactgctctgtccccaaggcccagaggtgctggccacagaggtcacccagaagccactcgctgactacatgcacagcacaagctgtgtctctctgagctgcgccctcaagtcacaaagacaagcctgacagcgcagctgcacagacccattttctggaaggtaaaactgaggctccagggtgacaaacctgagaacagcccagaaccagaacctcaccagaggcctcaccacagcccctggctcaaggccaaatgtgtcaacaccctccccagcacgtgagcttcaggcgccctggatgcaaaccaacaaggcttaaagccgccacacacccctcacctttcttggctgtttccatttcttcttctgtccagcgagaactctcattcagctccatggaggctgaaaagaagatgccaggttattggcaggagccgggagaggaggcactttgccttctgcccttttctctcctttgagccagggagggagtagaccaggccttgacggtgtcaccgcacggctctgaaccccgtgggaaggccacatttcagacgcccctccccagccagtacccaccgtg

SEQ ID NO: 10813 - DNA, 2300 bp, Homo sapien
atttactggccatgccggagcagacattagcctgattcgttggtccatgggtgaggccccagggggtcatggagcccccaccagcctaggtgcaggggctgatgggcagatgctctgggaaggaggctccgtggctgctgctcccatcgggagggacgccacagcccaggtggggacttcttggcacagacgtagctgaatgtggtctcaggagacaccaagcccgtgtgattcaaaagccccggccctgcccagactctggccctgggctgttgccagggacatctgacccggggagacggcatccatgccgggcagcccaggggccaaggctctctccccagccagccacatcactcctccctccccgggtccctacctctgcccacatcgggcaaatgtggacagaaaggatactgtgtaggaacaagccaaaaaaaccctccctgccccagcttccacctccaaaagaggcttcacctgccggctgtttaaacgttacgtttgagggttcgaggtcaggagagggagaacaggttgatcccaggatgccgggcacctgttggggaatcagcagcaacctgggggccggggggtctgttccaggtcgggcaactctgccccttcctggctcctcttacagaacatggtggcaagggattcctggggaaaagaggcagatgcaggcccgaggctctgccctggacctggcagcagcctcagggagcccacggttgcctgcagcagtcagacacttgctctgtttttctgccccatcctaaatgaaaagaggctggagagagcgttgtgtgcgggtcaggcacctgttcctggcaggaaggaaaggcaagagaagggagtctctctcacctccccgatccctcctcttccatctgcttggagttcttgctccctggtttgaaacattgccgtgactgtgcccctggtacacattaaaaggctttggggtttatttttatttcgcttggctcagagggatggaaagatggtctggtttggcagctgcctgcagggaggaccttggggtgtccaagaaaatcagtgtgtgctttaaaagaaatcaggcgggatgacaggaaatcgggaggcggtgccaggaggagctcacactccctcctctatctcggtgaggggaggggcggtaggcccagagtggctgggacaggtcggggaggcagatgacaggaagaggcccaagtaaggaggctggcttggctcccagcctctctgatctgctctgtaaaatgggcttgttctgtccccctggggtgctggcatgcgagggagaccaggcccaggcagcagagcagccacctccacgcaggcctggggccttcctgggctctggggaatcaggggcatccccccacctccccgttttacagactcggagaccgaggcttagagaggtggcctgagctctgtcgggggcagggcagggctggggcatcaggggtgtgtccccagcttcccagatgctcaggcacccctgccgaggctcaccagggcacctctctcaacccagatcacatctgcccctcttaaatatccgggccagatgcggatgtaagcatggtgaggattctctcatttcaacctcccagccctcagctgaggcacaggcatgctgaatacccccattgtcaaggcgaaggagtcggcacagagaggttaagaccctcatccaagctcacacagccactgtgtggaaagggcaggaattgaagccagcacttctgacaccaatgcttcctgcccctcaccccgactccgcctccccaggcccctagggcggcaagaccccaggccgtgcctctccccatctcatgccagtggggcctggcttcccggttgtttatgacctcttctgggtggactccacgggttttcctcctcctcccccagctcaggctgagcccaggtgcagagattcacctgttcacggttttcttccctccccactcccctctgccctcccccggggtctgacagcagcagcaacaacagcagcagcagcagcagcagcagcagcagcagcagcccatgccccgcagcagccaggaggagaaagatgagaaggagaaggaaaaggaggcggagaaggaggaggagaagccggaggtggagaacgacaaggaagacctcctcaagtaaggcagcctgctgtcccctgcagggcccggccgctgacccaacccgggtggcacacggttctgggggaccctttgtagagacgggtggggtgcccaccaattgcctgtgagcaggggggagggctt

SEQ ID NO: 10814 - DNA, 2300 bp, Homo sapien
gcctggcgtgtttgaggaactccagggtggcctgggaggctgtacgtgagcggttgagagggctgctgcagggagatgaggtcagggaggtgacggggctggatcacgccggacctgcagcccatggcaaggattttggctttttcctgcttgagacaggagccatggatggtttggagcacaggggggaacacacagggggatgcagtcgtctgcctttataagagccctctggctgctgcttggaagataaactgaagggagtagagggaggcaggagcagggagacccaggaggaggctactgcaaagttactggagagcaatgacgagctcaggccgggggttgcctcaggtgtgggcagaaggctggaattgagatattttagggcagaggtgtcaggatttgctgatggactggaagtacgcaggagagcagggaggtggccagggtggagtccctgagtgccaacaagaacacagctgcatccgccgggggaggttcctgagtgggctctcaggcgcatgtggtctgttggctaggagttcattaactgacctccactttcctgtgacaacttggtgaggcggggactgccccagtggcagggaggccaagccagccaacgaccacacagacaccccagcccctccctcccctggccccagaggcagccctgtgggtatctggcaggtgtgcaggtgtcggggccacagccactcagagcaggaggggaagcccagccatcccagccccaggacggcacccccacctcctgccagcccaagcccaccccagggatatcccaggttccacgcaggtatcctctctccccgagagaaggccgagtctggcccaggtggcctggccccgcagccagaccaccacccatgccggctcacgggtgccaaatagttcccacgcatggggcccacagccgagccctctacccacatgaccaggtgacaccctgcccacaaggtcccagatcagtgaggaagaaatggggatcagagaggcacaaaggcagcacagctgtggaggtgggggtggtggaaatcgcacctgggtcacctgagggcagatggacggagggccctgggataagtgagtgtgcccaggtgaggcctgggcccacctgcaatgccaggcagccccccatggagatgcagacgagcctgaagttgtctggctcccctgcccaaagtgcatccgtggtccctcaggcctgggtggctgcagactcaacccacgctagcccagtgccacacggtggcccaaggagcagccagactgggcagtagaaggcggctttgtcattctaggggtccaggccatgtcctaaccaagcaccgcccctttagtgctgagccaactctgtctcatctcactttgcgggactctggagtctcccctccctgacccttaagaatccagaagcctcaggtgcctggcagagccctgagctgtccacctcgcgggccggggttcaaggcccagggggctgcctgctgtgcagggctcgaggcaggggtcactgagccccctgttccaagcaagcatggaaccaaacaacccaccctcgaggaagctctcagaatgtgctgaaagctgcccaccgaccacaggacggtcctgacccccatcgaatggcagctctctgctccacggcaccccaggccctcccatcccagctctcccctccctcacgccagctaccccgtgaccacaagcctattcctgccccagggcctttgcacttgctgctctgcccacctggaacaccttccccacttcttcccacactctggcacctccagagacccagcgcctgccctcttcctgccacccagctctgtgcacccggtgcttggcccacctccaagcctttgcccgagctgccccctccctgcacccctacccaccacctcccacccagcccaaccagcagcagaacctcaagcgggagaggagctcccagctgggggcccaggcttaccttggtgaggtcttcagatcccgcaggctggcccgtggccagcaggggtgacggtcgcagcagggggtcaggcagcagctctagccgagggcgcttgctttcaatgaactccatctctgacttccccagctcgggcaggtatgagtgggactctggccgcaggtggagctcctgggacctgcaggaggtgaggcatccaacgtcacataggagattgcggctctgagaactcccgaggccccgaccaccctctgcgccgagcatctactgcgcgccgtgctctgtatgatcctgccaggaa

SEQ ID NO: 10815 - DNA, 2300 bp, Homo sapien
tcggccgctctcaggcaccgcttcctggtggtgtttgcatggggccagtttggcctgggtgtcatggtcccgcctggtcttggcgacggtctgggcgggaagatggtgctggatctttgggctaaaaatatgcccgtgccttcctgtgcctcagtttccctacctataaaagaaggcgtaagagtagcagaatcccacctttggctttggggcaggtctacggaaaccccccaggggtgtttcctggggaaggctagagggccagctgttcacaggagacatctggcttccaggggcctccgcagccactatgctcatcccctcgtggccagtctgggccccctgccagtccagtggccacgggcccctgtcacaggcaaatctggtcttagtcctgaaaccctcctgtgactccttgtggctgaattaccacgtggatagcggagacaagccaggcttgcccagttcaagtcccagctcagccactagctgttgaccttgggcaagtcacctaccctctctgggccagcctcctgctctgtctgtgtgtggcggctcaggggcatacctgcctatgccgcggtggtgtgaggccagctggtgaaccaggggacccgcttagcacagtgctgggcacacagtccgagctgctgggctcggtgtgtgtggccactgttattgttattaatattattactctcaagatgctcctgagagtaaaaaggatgacaatgttattgctggagttgaaggccaggcccagagtccatctgaccacttcccctccactcctattagctccctgacctcatcgtcaaactctccccgcctcgcccctgcgccccggccacaccagccttctctctgctttgacaacacacccgcgtggtccagcctccagaccttcacatctgccatgcttctgccaggggtgccttcctcacatctgcacccccagacccttgtcatcatgtgggctgctgtccagggacacattcttaggcccaactcttggctgctaggggcagggaagtgaatctggagaccctggtggagcctcctctgcctcctgggagctccagcagcttcctctggcgcctcatctctgctttccagagcacttggagaagcagagctcagcctgccccttctacggatggaaagttgacacccagagaagctcagacttgtctctgagtcacacagctaattgcagccaaggttcagactcctggctgactaccaagccatcattgttggcctgtgtgtgtgtgtgtgtgtgtgtgtgtgtgtgtgtgtgtgtgtattatttggccacgtcttcttttctaggcctgtcaccgagatgaccccagatcagaatgccagtgtgagggggtcacgctttcttttcctaggattaaaaggaggacagaaatatttgcaagggagagcctgctcctctggccatctggccctcgggacagaggacgggggagggatgggccgaggcctgggttcggaaccaggccggagccaaggcgccagagctacgctcaggttggaggtgcaggtgcggctcgaagctggacagtccgggctgggaggaagcgggttaaagtgggagaagcggggctggagctctctttcgcctgccagcgagcgaagagccgagctataaaaaggcctcacagtgtttcagctcccgagtgtcggctggaagcccgccagggttaccatggcgatgaggaattattacttactgccaaggctgggagaaaaagctcgtacttttggcttccaaacaagaggagtggacttatgtaattccctgtgtttataggcccagagtggcagaggcgagaacggatcgctggaggcccgacgtctcgttcacggcccagccgtggggtcaggcggccccgcacttgtcgccggtgggccttggcctgcccgggtttggggggcatcgggctgggagcctggggggcctggcctggccctgcagggcctccagggccgggatgggagtcgtagtctcgcgggaaggtgaggccgccctctggggccgcccctctgcgggtgtcatcctggaggaaggatgggtctgatgttggctgtggtgtgcctcctggaagccggcagcacagcctgtgtgtgtggactctgctggcccgctggctggcactttttttctttttctttttttttcttgtgagagagttacttcaagttgtgtttggagctgacgtgagcgaggttggtcatgtgctcgggtaagagaagtcgccgggcttggagtgggcagggaggtgcagtgt

SEQ ID NO: 10816 - DNA, 2300 bp, Homo sapien
ctcagtcttgccatctgtgacatggtcgggccagaggccattggcgcttgagttgataaggcttccagtgagggatttctaggtgacgcttgggacattacaaagctgacagaccccctgctttccccgctcctaagcctgcagggagccctcgagggcagaagctgggagacccctgaagacaccccaaatgtccctcctccagcttcaaatagagctgaatctcatggaaatgcaaattcccagagggttttcaggtgacagaggagggctgccaggcggcctggggctggcagaggagctcccccgcccccgcttccctctccaagacccttggtgggggaggtgggggatcaggccttccttctgcggctccagctttttgcctgtggattcggaccgactggctgggcagaactggagctggtcgggccaaaacaaggaggtggggggggggcactgacctatgacccctcctgtttcagtctgcaaactgctcccctccacacccacttcccttttgccagacattgtcagccccagaggctcccgccagccccccaaaagctcataattaaaagcccgagggggcagagaaggacctggctgcaggggagcccggcaaacccagcatcctggcggaggcgggaggcccgccggcctctggaaaccacgcggctgcctccccaccgcagccattccccgctctccctgggggttctcagatgttgccagatggcagaactgaatctgctgagacgtcactccaaaaaaggaaagttgaactgaaaaaaaaaaaaaaaattcaaactctccaacatcttaggagaaagcagaagaggagggagggagggaggctccaggcccagggctcccagtgccctctgctgttcaaagagatctgccctggttggagagggcaaacctggagggggtgggaggagggggtaaatgaggacactgggttgtcagggcggccaggggggccaggttcctgctggagcggagagtgtctgcctgtgcgtgggggagcgagcacatgtgtgccgtctgtgactgcgtgcttgtgcaggccgggcgtgtgtggctcccagggtcacgctttgggatgtgtgtgtctgtgtgtgtgtgtggggggggcgggggggacacaggctcgttgcattgtctccgcatttgtgtccctgaatgtccccaagtgggacttcactcaacacattcgtgagtccctactgcgatagggcagtgaacaaaatagaaatctctgccctcaggaaactggcattctagcgtctgtgtcctccggggtgctgtgaactcgcgtgggtgtcccagtatttgtctgtgtgagatctgacatctccggtccgtggtgggtggtgagtctgcagtgtgttcgcccgggctgggtctcgggtctggggaggcccagcgtgttcctgcctggagagggctctgcgctactgtctgctcccgtccccaagtgccccactgggcgtgctcctaaaaggccctgtgtagggccctccctgcgcgccccctccccatccagcggccactccagagttataatttaatagctgaaacgcgattccagtgaggtactggggctggagaggaggaggagggcccccgggcccgcaggagaagagggaggggaaggctgggaggcgcttcccccctccttcctcctcggggagctgccaaaaagaaactcggcgtcgcgcccaagtgtgtgcgtgcgtgtctgtgtgtgtggcggcgtgcgcgcgcgagtggggacgcgcagggcctggagagaaggcgcgggccctttaaggagccagagggggccgggccggggcgcgtcgctgcgggcggggagccgggagcagggaggccgagccaccgcctcccgggctcgcgccccgccccctcctccccctcccgccgccgccgccgccgccgccgccgccaccgccgccgcggccgccggggagcgcggagccgcgggcaggccgggccgcaccggagccccgcgtccgccggcgccccgcccgagccctgcgcccgcgccctgcgctccgcgatgcgcgccaacttgcgggccggggacccagggccggcgccctaggaggcggcggcgggaggatcgcgtcccgacccgaggccgggcctgctgcgcgcccccagcccgatcggcaccgccacttgcctgagcgccccggcggcccgagcgcgccccaagcccgggcgccaccgctgccacctccgcgaggtgagttggggccgagggtccccgcgaagggcggggggaggcg

SEQ ID NO: 10817 - DNA, 2300 bp, Homo sapien
gatgtgggagtcaggagggcctctcagaggaggggctctatgagctggggagcagctggcaaagagcacagcaggttcaaaggccggaggtgcgaaggagcctgctgtgttggaggaagagggagcaggccagtggggttgggagaagtgactggagggggtgaaaggggacaggcatgtgggggccttgcaggacacctggaggagttcagatttggttttcaattccatggagggttctgagcagggaagagccatgatctgactcagtattttttttttttttttttgagacagagtctttctctgtcgcccaggctggagtgcagtggcatggtatcagctcactgcaacctccgcctcccgagttcaagcaattctcttttttttttttttttgagacggagtcttgctctgttgcccaggcgggggagtgcagtggcgcaatctccgctcactgcaagctccgcctccctggttcatgccattctcctgcctcagcctcccgcgtagctgggactacaggcgcccgccaccacgcccggctaatttttttgtatttttagtagatacggggtttcaccgtgttagccagcatggtctcaatctcctgacctcgtgatccgcccacctcggcctcccaaagtgctgggattacaggcgtgagccaccgcgcccagcctcaagcaattttcttgcctcagccttctgagtagctgggattacacgtgcgtgccactacactcggctaatttttgtatttttcgtaaagatggtgtttcaccatgttgggcaggctggtcttgaacccctgacctcaggtgatccacctgccttggcctcccaaagggctgggattacaggtgtgagccaccacgcccagcctgactcagtcttgaagagctctctggctgctgtctggagaagggagtgtcgggggccaggctggaagcggggaggcagagaagatggtgatttgagccaggtgggggtagttttctaaatggaaagaagggaacatattcgagttttttttcagggagagtcaacaagataggtcagtggactggggtgcgagggaaggagaggaatcaagggtggttcctcaaggtttgaggagtttggtagatggtggagccattttccgagacgagaagatcgggggagggaggttgagagcagatggagtgtgggccttaactctggtcctaaaatcaagcgaggacaactcaacaacaagagtcagacaaccccattaaaacacggaccaagcacctgcaaagaagacatgcaggcagccaggcgcggtggctcacgcctgtaatcccagcactttgggaggccaaggtgggcggatcacaaggtcaggagttcgaggccagcctggccaagatggcgaaaccccgtctctactaaaaatacaaaaattagccgggtgtggtggcaggcgcctgtatgtaatcccagctactcaggaggctgaggcaggagaatcgtttgaacctgggaggtagaggttgcagtgagccaagactgtactccagcctgggcaacagagcaagactctgtcttaaaaaaaaaaaaaatgcagatagccaacggggacatggaagtgtgctcagcgacactcgctcatcgttagggaaatgagaatcagtgagacacactcatacccattaggatggtcacttgagaaaacagaaaatctcaaatattggtgaggatgcggagaaatcggggcccatgtgtgccgttggggtgagggtgcggagaaatcggggcccatgtgtgccgttggggtgagggtgcggagaaatcggggcccatgtgtgccgttggggtgagggtgcggagaaatcggggcccatgtgtgccgttggggtgagggtgcggagaaatcggggcccatgtgtgccgttggggtgagggtgcggagaaatcggggcccatgtgtgccgttggggtgagggtgcggagaaatcggggcccatgtgtgccgttggggtgagggtgcggagaaatcggggcccatgtgtgccgttggggtgagggtgcggagaaatcggggcccatgtgtgccgttggggtgagggtgcggagaaatcggggcccatgtgtgccgttgggaatgtaggatggtgcagctgctgtgtggaggcccccccaaaatttaacatagaattaccatatggtggggcaaccccacttctgggtatcaaagaaatggaagtgggaacttgaagaggaatctggccaccgcgttcattgcagcgctgttcacgatggcccaacggtgggag

SEQ ID NO: 10818 - DNA, 2300 bp, Homo sapien
gacctccctcaggagttgggccctgccccttggggcactggaccatattcggcctccttagaggaaggcagtgccaggcaaagctgtctaacgagaacatagcaggtgctctgtaaatattggttcaggcgaagacatgttgcttaaggatggccctgcgagaaggctgctttcttctggagttaaataagaggtttagaaagcctccctcggagcactcaaggactgagcctgccttacccacgtgctggggacaccaccctcctgtccctgtgtaacccaggagtctcttctcagtaacttcattcagaaaatgaggggactggccagcacttcagggaccagaaggcaggccaggtggggtgtggtggaggacttcaggggggcgtggagggcttcagggatacactcacccatctaagggcaactgccacttagtgccagcccacttctctcccttttttcttttttctttttcccccagggtcttgctgtcacccaggctggagtgcggtggtaagatcagggctcactgcagccttgaactctgggactcaagggatccttctgcctcagcctcctgagtagctggggcgacaagcgcatgccactgtggctggttaatcttttcattttctgtagagactggtctcactatgttgcccaggctggtctccaactagtggcctcaagtgatccctcacctggaccttccaaagtgctgggattacagttgtgggccaccatgcaccgggcctgttctgttttcttggagcacttgcctgcaattatccttcattcatttgctcacgtgctcatcattggtttccctcttcattagaaagtggggacttggtttgggttaactaagcttccctgtgcatcagttttcatttctttctttctttttctttttcttttctttttttttttttttgagatggagtttcgctcttgttgcccaggctggagtgcaatggcgctatctcggctcgccacaacctccgcctcccgggttcaagcgattctcctgcctcagcctcccgagtagctgagattacaggcatgcgccactacgcctggctaattttgtattgttagtagagacggggtttcgccatgttggtcaggctggtctccaactcccgacctcaggtgatccatgaagtccacccgcctcggcctcccaaagtgctgggattacaggcgtgagccacctcccagttttcttattgtaaaatggagccattgtgtgcaaagcactcaggacaggggccagcacctagaaggctcctcagtcattcattctagaatatttactgtgagcaggcattccctgccaggccacgttctagagctcaggacgcgtgggggggggggcccgcctcacgggttggcatcccagttggagcacatggtcagaatgcaaggacgcaaatgaacgtgaacctgccagggggtgctcagtcatagggtgatggtggcaccagcgttacgaaggatagggccaggcggatacctgggagaacagaattgcctgtgcagggtgtatggaggccctggggctggagcctgcggggcttcttccagggacagtgaggctggagatggactgcggagatgagggtctagaaggtggtggcggggcatgtggaccgttgtaagggctctggggttcctgggtgggctggcgaagtcctactcacagtgaccaaccatgatgatggtcccgatagaggaggagagggaggaggagggaaaaggaagggtgaggggctcagaggggagagctgggaggaggggagacataggtgggggaaggggtaggagaaaggggaagggagcaagagggtgaggggcaccaggccccatagacgttttggctcagcggccacgaggcctcctcagctcccgccccaaaacggaagcgaggccgtgggggcagcggcagcatggcggggcttgtcttggcggccatggccccgccccctgcccgtccgatcagcgccccgccccgtccccgccccgaccccgccccgggcccgctcaggccccgcccctgccgccggaatcctgaagcccaaggctgcccgggggcggtccggcggcgccggcgatggggcataaaaccactggccacctgccgggctgctcctgcgtgcgctgccgtcccggatccaccgtgcctctgcggcctgcgtgcccggagtccccgcctgtgtcgtctctgtcgccgtccccgtctcctgccaggcgcggagccctgcgagccgcgggtgggccccaggcgcgcagacatg

SEQ ID NO: 10819 - DNA, 2300 bp, Homo sapien
ctcgctccatggcagctggcctctctgatgctgtggacggtatccctgggcctcagtgggccctgggcagagcgggtgggtgttggagacaaggggccagtggcaagagctgcagttttctgggcaggaaggaaaatgttggtccagtaggaaaacaggcaaaacagatggggactagctggacatggagctgtttggttatgctgaagcatgaaacttcggctttcattttaaaagcctgtgtttggcagggcatggtggctcatgcttgtaatcccagcattttgggtggccgaggtaggcggatcacgaggtcaggtgtttgagaccagcctggccaacatggtgaaaccccgtctctactaataatacaaaagttagccagatatggtggcgggcgcctgtaatccaagctacttgggagactgaggcaggagaatcgcttgaacccggggggtggaggttgcagtgagcaagattgcgccattgcgctccagcctggtgacagagtgagactccgtctcaaaaaaaaaaaaaaaaaagagcctgtgttcttcaggcccatgcacggtgagaggtcaggtggttctcttgagttagaaagtgaacctcaaaaactcatctccgattccaacatagcagagcccttaaacactgggcccgggagcaaaagcccaaagaaaaggggagaaggctgggtgcagtggctcatgcctgtaatcccagcactttgggaggacgaggcaggtggatcccttcagccaaggaatttgaaaccagcctgggcaacacagtgagaccctcatctctacaaaaaaaatacaaaaactagccaggcatggtggcaggtgcctgtagtcccagctattctggaggctggtgtgggaggattgcctgagcccaggagtttgaggctgcagtgagccaagtttgcgccactgcactccagcctgggcgacagagagaccctgtctcaaaaaaaaaaaatttaaaaaatttaaaaaaagggaggcgagaaattcggactgtggaccttttgttcgcttttacatactttcttgaaagctgctgccacgattgtgatgctctcacattccacggttcagttcctccgacgcacaacgttcactcctacctcagggcctttgcgtgtgccgtgccctccgcctggaatgctctctctgggtcttcccatggttggctcttcattcagttctctgttagatgtcacctttccagagagcccacaccctccctcgctctctctcaaaccgctgggttttgtttcttgccagtattgaacattatctgaagctgttttgatgccttattcctggacttgctttggtgtctgtctgcagcctctggagtgcacctctaggaaagaaaccccttttcatgagctgtagtgcccagtcctggtgcactgagggcactccgtgaatactcactgaaggacaaagtcaataaaactgttgattgtggctgctggctacttgccagccgggtttatatctgtagccattgagactgcttttggctgaaagtcctagaaagcacccaagaggtttaacaataaagatatttattatttccatataaggggaagtcctgagatagggcagctttggggttctcgatttcatttttttttttttttttttgagatggggtctcactctgtcgcccaggctgcagtgcaatggcgtgatcttggctcatggcaacctccacctcccaggttcaagcgattctcctgtctcagcctcccgagtaactgggattacacgtatgtgccaccatgcccggctaatttttgtatttttagtagagacggggtttagccatgttggctagactggtctcgaactcctgaccttgggtgatccacctgccttgacctcccaaagtgctaagattacaggtgtgagacactgtgcccaggctttttatttttaaaatagaggcagggtctcactatattggccagactggacttgaactactggcctcaagcaatatttccaccttggcctcccaaagtgctgggattacatgcatgagccacggggcctggcgttctcaatttctttttaaattttatttatttatatttttattttaaaaatacagacagggtcttactatgttggctaggttggtcttgagctactggcctcaagcaatccttccgcctcggcctcccaaagcgctgggattacctgcgtgagccactgcgcccagctggctctcagtttcaatgtcaaggggatccctgaaaagccaggttctctgcatct

SEQ ID NO: 10820 - DNA, 2300 bp, Homo sapien
gtttcaacacacaccaacccctgtgcccgacccagaccctgggaaaccgctgagggcggggtacaagcgctggcccccagggagttctaatcactggccaaagtcggggtgcacagcccaactccttctcacccgtcaatgccacttcagataccacttcttcagcaagcctttcctgacttcctccaatggggttaggtccctcattcatgcattcattcattcattccacaaaccatcatgccccttgtatgcaccgggccctgtgctggtgctggggattcagcaccctcgtggtgtttctctacagaaacatggaggaaacaagtggtgaaaaatcaggacagatgatgccagggtgtgatgaatatagaacaggacgacgacataaagagcattcgttaattagagacagggtatcactctgttggccagactggagtgcagtggtacaatcgtggttcactgcagccttgaactcccaggctgaagcaatcctcccgcctcagcctccggagcagctggaactacagacacacctatcacgcccagttaatcttttctttcttttttttttttttgagacagagtcccactctgtcgcccaggctggagtgcagtggtgcaacctcggctcactgcaacctctgcctcccgtgttcaggtgattctcttgcctcagcctcccgagtagctgggattacaggtgcacaccgcacctggctaatttctgtatttttaggagagatggggtttcaccatattggccaggagggtctcgaactcctgaacttaagtgatcggcccacctcagcctcctaaagtgctgggattacaggtgtgagccactgtgccagagaagagggttactttagatgggctggttgaggaaggcctctttgaggaggtgatgttggagctgcccctcaaaaaagcctccgtggagcccttttaaacaagaggagcatttgaagcggggctcagagcctgtgctgaggtcctgcggtgggcacaggctgaccccataagaagaacctgaaggaagccagggtggctgcatcccagagagcggagagggaggcagaggagggcagcccggggaggacctggagtttatgcaacaggaaaccaacagagttcaagcaggaagtaacacaatcccactcgctttgaaaaaggtccactctgtgcccctggaatgcgccctcaccgaggtggattcctctccctgaaagcgtttttctcaggtgtcacggcagactcattggtgtgagaagaatctctttgtcccactggtgtgtgatctttatgagaaggtgattaacgtgcccccttgcccataggaagtgctcagtcggcacagtctgacagagctgggtgtggtggcgggtgcctgttgtctcagctactagggaggatcacctgagcccaggagtttgaggctgcagtgagctgtgatcaccccactgcgctccagcctgggtgacagagcaaaaccttgctctgaaaagaagtttgacaaatgaccctgtgagtgtgtatccagtggtcctccttggcactgcccatccctgcccaaacaggagcctcagctaccaccagatgtgtccagaaagatatttctgcccattgttttccaaaggatatttttgtttttgtttttgttttgtctttttttttttttttttttttttttgaggctgagtcttgctctgtctcccaggctggagtgcagtggtgtgatctcggctcactgggttcaagtgattctcctgcctcagcctccgaagtagctgggattacaggtgcccaccaccatgcctggctaatttttgtattttaattagagatgggtttcaccatgttgtccaggctggtctcgaactcctgacctcaagtgatccacctgcctcggcctcccaaagtgctaggattacaggcatgaaccaccacgcctggccccctccaccttttttttttttttgagacagagtttcacgctgctacccaggctgggcggcagtggcgtgatcatgactcattgcagccttaacctccggggctcaagcgatcctcctgagtcagcctctggagtagctgggactacagatgcgtttgccaccacacctagctaatttttgtattttgtagagatggggtttcgccaagtggcccaagctggtcttgaactcctgagctcaagcaatcctcctgcctcggcctcccagtgttgggattacaggcgtgagctactgcgcccagcccaaagaatatttttggaaccagcttctctgtgggct

SEQ ID NO: 10821 - DNA, 2300 bp, Homo sapien
gaacaatgcacagatcttggattttcataaatacacagaaacatgggttaccatagaaaatatatagcaggttcattttgctttgatgcatattttaagtctgccgtttaaataatgtaatgttcataacttaaaacaagaatgcagccttttcctaatggcaaaatatttttcagttggtagcctctttttctcttttttttgaagcttttaagggtagaaatcaaaatagcctccctacctccaatacatttgtagaaacagggactatttgtagaagagtccagaaggaacagtggctgggaaattgagggcatgagggagacttttcactgtacactttaaaaagacacatttaaaaaatctcaccatgttcgtatattttaaaacatttaaaaaatatactgaagaaatgacacgtagggatcacaaaataggttgtggtaaaaatttaaaaagctggctggtgatgcttttctccccacttcttttaccaaaatagaattgccctgtagaattacatttcatatttgacaccctaccctgcactgaaataaggttgggattctattcctgtcttttaaaatctccggtttaaatgggtccgattattgaatggatcctgcttacaataatcgtacccattgaaaccagagaaatttccatgcctccctgttggcatcaagtaggacctttccatacctggccctcagaatgtacaggaaggtggaagaacagtctagaaggatgtcgttcgctcagccttgcgttccagctaaaataaaactgtgtggggtttccgcctcttttttccaaatttaacctggacacccagctcctctgcagtgtctcccctggaaagttctcgagcgttccccagctttagggccacgcccgccctgagatctgccgagtcattgtccttgtcccgcggccccgggagccccccgcgaccggcctgggaggctcagggaggttgaagggggctgagcaaaggaagccccgtcattacctcaaatgtgacccaaaaataaagacccgtccatctcgcagggtgggccagggcgggtcaggagggaggggagggagaccccgactctgcagaaggcgctcgctgcgtgccccacgtccgccgaacgcggggttcgcgacccgaggggaccgcgggggctgaggggaggggccgcggagccgcggctaaggaacgcgggccgcccacccgctcccggtgcagcggcctccgcgccgggttttggcgcctcccgcgggcgcccccctcctcacggcgagcgctgccacgtcagacgaagggcgcagcgagcgtcctgatccttccgcccggacgctcaggacagcggcccgctgctcataagactcggccttagaaccccagtatcagcagaaggacattttaggacgggacttgggtgactctagggcactggttttctttccagagagcggaacaggcgaggaaaagtagtcccttctcggcgattctgcggagggatctccgtggggcggtgaacgccgatgattatataaggacgcgccgggtgtggcacagctagttccgtcgcagccgggatttgggtcgcagttcttgtttgtggatcgctgtgatcgtcacttggtgagtagcgggctgctgggctggccggggctttcgtggccgccgggccgctcggtgggacggaggcgtgtggagagaccgccaagggctgtagtctgggtccgcgagcaaggttgccctgaactgggggttggggggagcgcagcaaaatggcggctgttcccgagtcttgaatggaagacgcttgtgaggcgggctgtgaggtcgttgaaacaaggtggggggcatggtgggcggcaagaacccaaggtcttgaggccttcgctaatgcgggaaagctcttattcgggtgagatgggctggggcaccatctggggaccctgacgtgaagtttgtcactgactggagaactcggtttgtcgtctgttgcgggggcggcagttatggcggtgccgttgggcagtgcacccgtacctttgggagcgcgcgccctcgtcgtgtcgtgacgtcacccgttctgttggcttataatgcagggtggggccacctgccggtaggtgtgcggtaggcttttctccgtcgcaggacgcagggttcgggcctagggtaggctctcctgaatcgacaggcgccggacctctggtgaggggagggataagtgaggcgtcagtttctctggtcggttttatgtacctatcttcttaagtagctgaagctccggttttga

SEQ ID NO: 10822 - DNA, 2300 bp, Homo sapien
agtagcatcccctaacctcccctgagttgtgacaaccaagaatatctccagatattgccaaatgtcccctgaaagagcaaatcactccttgttgagaaccattgttgtagagaaacatcagacacctgcgttttgggaggccattttcttccctgtcacctcagtgactttggagaaaggtttatttctgtttgcttcaataaccatttaagtcagggaatgctgggatgttttcaataatttttttctgctagagacaacattggtttctctttgcagctaacctttggcccattacccaccctaccctcatcccctcttcttcctttttcctcctcctgtcctcctctcccgcccctgcctctgcagttagggctgttttttctctgtaccttttggactctgaaaaaagctatgtcacaaagctggtgactcagcctttaaacaacatgaatcacaaggcttgcagcagagtaacagccaaaagcaaccagggcgtggttgaaagccaggcctggtcacctcagaaagaatctcagctttttaatcccttcaaaactccttcccgaaatgtaggggaaaaacaaaaaacaaaaactttgcagaaatgtgtattggaaatcactggggtatcctgccaatcctggaaaatgacacttttattattcgttttaatttcccagtaacacatgaattcattctctttaaaatgttaaaaattggagatgtcaaagtctgttttgaacaatgcacagatcttggattttcataaatacacagaaacatgggttaccatagaaaatatatagcaggttcattttgctttgatgcatattttaagtctgccgtttaaataatgtaatgttcataacttaaaacaagaatgcagccttttcctaatggcaaaatatttttcagttggtagcctctttttctcttttttttgaagcttttaagggtagaaatcaaaatagcctccctacctccaatacatttgtagaaacagggactatttgtagaagagtccagaaggaacagtggctgggaaattgagggcatgagggagacttttcactgtacactttaaaaagacacatttaaaaaatctcaccatgttcgtatattttaaaacatttaaaaaatatactgaagaaatgacacgtagggatcacaaaataggttgtggtaaaaatttaaaaagctggctggtgatgcttttctccccacttcttttaccaaaatagaattgccctgtagaattacatttcatatttgacaccctaccctgcactgaaataaggttgggattctattcctgtcttttaaaatctccggtttaaatgggtccgattattgaatggatcctgcttacaataatcgtacccattgaaaccagagaaatttccatgcctccctgttggcatcaagtaggacctttccatacctggccctcagaatgtacaggaaggtggaagaacagtctagaaggatgtcgttcgctcagccttgcgttccagctaaaataaaactgtgtggggtttccgcctcttttttccaaatttaacctggacacccagctcctctgcagtgtctcccctggaaagttctcgagcgttccccagctttagggccacgcccgccctgagatctgccgagtcattgtccttgtcccgcggccccgggagccccccgcgaccggcctgggaggctcagggaggttgaagggggctgagcaaaggaagccccgtcattacctcaaatgtgacccaaaaataaagacccgtccatctcgcagggtgggccagggcgggtcaggagggaggggagggagaccccgactctgcagaaggcgctcgctgcgtgccccacgtccgccgaacgcggggttcgcgacccgaggggaccgcgggggctgaggggaggggccgcggagccgcggctaaggaacgcgggccgcccacccgctcccggtgcagcggcctccgcgccgggttttggcgcctcccgcgggcgcccccctcctcacggcgagcgctgccacgtcagacgaagggcgcagcgagcgtcctgatccttccgcccggacgctcaggacagcggcccgctgctcataagactcggccttagaaccccagtatcagcagaaggacattttaggacgggacttgggtgactctagggcactggttttctttccagagagcggaacaggcgaggaaaagtagtcccttctcggcgattctgcggagggatctccgtggggcggtgaacgccgatgattatataaggacgcgccgggt

SEQ ID NO: 10823 - DNA, 2300 bp, Homo sapien
attttagtagtggatcctaactgttctgctattcctttaatagcatctttaagtatagttaataaattgttgttgatagtaataaatattgtttatccaatttacattcttattaattgttatttgtgggagaagggatttgaacctcacagctctctgatttctagctttgaatttatctgatatacctcgtggaacgtcagttgtatctaaataaacatgggggtcaaaggacctacgagaggcttctcttgttttacgatgtcatgtttttttgtttgtttgtttttctggttgatgaaatgccagggtaaaagggatagctaactgaactagagcacaagtaccgctccaattatttggcaaagtgtccagtaaaggttctccaaaataccaccatacacccactcggggatgaataagggctgactgatgggtcagctcttggaagtgcctgacctcactgcattctgttaagtttctttctttctttctttctttttttttttcctctttttgagagggagtctagcactgtcgcccagtctggagtgcagtggcgcgatctcagctcactacaagctccacctcccaggttcacgccattctcctggctcagcctccctagtagctgggactacaggcgcccgccaccacgcccggctaatttttttgtatttttagtagagccggggtttcaccgtgttagccaggatggtctcgatctcgtgacctcgtgatgcgcctgcctcggcctcccaaagtgctgggattacaggcgtgagtcaccgcgcccggccgtttccttgacttttaaaagaaaaattaggttggtgtcctggaacatggacaatggctatttcttccggtaattgaagattattaagaacatgaacaactagtgtttcatgagcaagttccttacctttactgttaaatagttctcgctcagcctaaatttttccaaatgtatgagatactctgaaagcatatttagagtcagtatagatagttcctacctggttctgtaaatattttagggcctaagtgcgaataacttgcaagcttgagcagaccaattatttggtaatcttcctgattttactttttttaaggtctctttatcaattacagcatatccattatgttgtgtcctttcaatcatttaggaggagccagggtggtctcaaactcctgagctcaagcaatccccgcgccttagcctcccaaagtgttacgattacaggtgtgagccacctcacccagcctaatatctttattatagaaataattttttaaatcactaagaaaaattcaaaaatatcaatagatcacaatcaacaggcaatgaatttacagaagaggaaaaatgattcattaataaaacttacagaaaagcttggctcttagaagtatttaaataaatggaagtaaaacacaagttactactttcaacccatgatgttgtgaaagttgtcagaatcaaaatgaagtcatggatgttaagtaagtaaataaataaataaataaaccctgacaaatagaaccagggaaggccatgaagagagggttcccgtgcttgcaggcctgataaaagactctagaaaaaccacaaccttgcacaaacgccttcgcgaccttacacaaaaaagactactgcaaggacatccgccaagcagctgcctgtccagcctcagactacggtcacctctgttattgatctttgcagccaaccataattatgtcagaacaattatgtaatcctcctcctttttttcctgtaaaaacatttgtcttcctgccgggcgcggtgtctcacgcctgtaatcccagcactataggaggccgaggcgggaggatcacgaggtcaggagttcgagaccagcctggccaacatggtgaagccccgtctcaactaaacatacaaacattagctgggcatggtggcgggcgcctgtagtcccagctactagggaggctgaggcaggagaattgcttgaacccaggaggcggaggttacagtgagccaagattgcaccactgcactaccagcctgggtgacagggagagactccatctcaaaacaaacaaacaaacaaatgttgccttctttctgcctccgctaccgccatggcgcccatgaaaaagcttgtggtaaaggagggctaaaaaaaaggaagcaggttccaaagttcactcttgatcgcacccaccccgtagaagatggaatcatggatgctgccaactttgagcagtttttccaagaaaggatcaaaatgaacggaaaagctgggaacttt

SEQ ID NO: 10824 - DNA, 2300 bp, Homo sapien
ctggctcccaccttctagatcgcgtgggctggccgctccccgccatcgaggtggattttccagaggggattgaccgctacaagcactttgcccggttcctgctggaagggcaggtaggtggcacagcggctccagaccctcatctcgggtaccgtgggcagcagcagcccgggcctcaccccttcctgtggtctctcatcaggtcttccgcaagctggcctcataccggagctgtctgctgtccagccccggcaccatgctgaagacgtgggccaggtactgccttcggtgggagcctcgcagtgggcaggaggggtccgaggcctgaatgacctccccggggctgccaggacaaagcaccacacacagggaggcttaaaacatcagaagtctgtgctcaggtctgaaggctctgcagagccacggtctgtgcagcggctctcggggagggtccgtcttgcctctgtcggcctcctgggcttgtggccacatcactccagtctctgcctccatcttcacgtggccatctctctgtgtgtctttagtctccctccctgtgttctccttataaggacaccagtcattgtattcagggcccaccctactccaggatgacctctccttaactcatgacatttgcagtgaccctctttccatataaggtcacacgctgatgttctgggtggacatgaatatgggataggggagacactgggcagctcccacagagccgccaggtgtcagtgggaggcatcctgccctcctggccctggggacttcctcccagctaagcagacccctgccccatcccgcccaccacctctgcttcagggctcacccttgccctctgcctcctgcttctgctctcctcctgcctgtggtccagacccacagacacctcccccttcctggggctggtggggcctatggtgcaggggcttggggcactggaggcaggcctgaaggtgcaggcaggtgccagggactcgagatggggcgtggggcacagcacccgctgctgggctgtcaggagccgtgtcagtcactcagctcacgttttccagtgtggccctgtcccaggcatgttctcggggctgggatacagacacgatctctgtcccacagcagcgttgctcggccccagagggacagagcaggacatgagtgaggcctcggtgggcagggggtggagtgcgactgggctggtcggggagagcctcactgggcagattcaaaggagccagggctgcagctgggcacaaatctggaggaaggttctagatgagacaagttgcatgcacagagcagccttggtgggcaaggaatgtggaccagaggcagccagggtggatgggaggaggtgggatctagagccttctgtcccgggatgattaggggaaggggaccctttgccttctcttttattttattattattatttattttttagaaggcctgtctagagaattatgtttttttgcttttgagttttgtttgtttgcttgtttgtttgagacagagttttgttcttgttgcccaggctggagtgcaatggcgtgatcttggctcactgcagcctctgcctcctgggttcaagtgattctcctgcctcagcctcctgagtagctgggattacaggtgaccgccaccatgcccggcaaatatttttggatttttagtagagctagggtttcaccatgttagccaggctggtctcgaactcctggcctcaggtgatccacctgcctcagcttcccaaagtgctgggattacaggcgtgagccaccacgctcagccagtttgtttgtttttgagacaagttcttgccctgttgcccaggctggagtgcagtggtgcagtcatggttcactgcagcctccaactcccaggctcaagggatcctcctacttcagccccctgagtaactggggctacaggtgcatgtcaccatgcccagccagctcttcaccctcctgggtggggctggtggggtggtgatgcctgccctgctttcgggcccccagcagcagccggtctgtgccctggctgcctgccaccaacgtgcattcctgccccacaggctgcagccccgtacggagagccttctgcgagccctggttgcagagaaggctgactgccatgaagccttgctggctgcttggaagaaaaaccccaaatgtgagtttgaccagggccagggggtgggagtagacaggatggggtcactgaggcaggggctttgtgctttgtgcacggtcagccctggcttggcagaaggatctggccccacggctgctggc

SEQ ID NO: 10825 - DNA, 2300 bp, Homo sapien
aatttgagaccagcctggccaacatggtgaaaccctgtctctactaaaaatcaaaaagcgggcatggtgatggacacctgtaatcccagctattcgtcagaatcccttgggggagaataatagggttctctggagaaacagaaagtggtgtcagtttcagttggggtctgaaggcccaagaaccaggagcatcgagggcagggaagacccagctcacgcagtcagcagagcccgaagtcacacctcctctgcctacttgggccctcagtggatcagatgtggcccacacccacattgggggagggcagtagctttatgccagtcaccaattcaaagaaacacccagaaataaggcttaattagctatctgggcatccctttgcccagtcaagtggacacataattaaccattacatgtaaggtcttgaaaaccaggtgtcttggcctctgcccagatctcctggtcccagcatctctaagactcccacgtgatgctagtgtcaaggctctgtagcgtggtgactgagagctcaggtatggttcgaatctctctctgccattctgagctgtgtgaccttaggcaagtgactgtaccactctgagcttcattttctccatctggaaaatggggatgatgataatgataataattggattgttggtagaattaaatgagttaacacaagcaaagtgctttgagccgtgcctgacacatatgttaagtgttagtattattttcaggtttggaagccactggcatcattcatttattcagtccacccttggcagctatttaagcagtttgcagagttttttattacctaaaaatggtgcagtggccgggcacggtggctcatgcctgtaatcccagcactttgggaggccgagacgggcggatcacgaagtcaggagatcgagaccattctggctaacacggtgaaactctgtctctactaaacaaaaaatgcaaaaacttagccgggcctggtggtgggcacctgtagtcccagctactcgggaggctgagtcaggagaatggtgtgaacccggaaggcggaacttgcagtgaaccgagatcacaccacaccactgcactgggcgacagagcgagactctgtctcaaaaaaaagaaaaaaaaaagaacaacagtgcagcggtggctgccaatggtgaattttgagctggaccttaataccttaattacattcatcagtgaccccacaaggcctctgagcctgtcccgatgaataaaggagttccccccgctgaggccctgagcgcagccgaggccccagcccagacagtatgtatgtgtgtttgcagaccagcggccagtgacgaggagctcaccaggctgaagagcaagcgggcccgggtggcccagatgaagaggacctgggcagggcagggggcttctctgaagctcggcgacctcatggtgctgctgggtttgtgccctgcccgttggagggtggcgggagggtcacccaggtctgggatgggtcagagagagagcatgccccctcttcgttccccaggcgccgtgggagcctgtgagtatgccagctgcacaccccagttttgcgaagccaacgggctgcggtacaaagccatgatggagatccggcgcctgcggggccagctgaccaccgcaggtacggccccgtgccggcacgccgctgcacccggcgggcaacctgacctgggcacttgaaatgtttaaaaaagtgatccatagagtccacgtttgcaaacttgctacgcaccaaaatgtatttataaccctaaatcaatacttggggagcttttccaggaacaagggaatgtgcacatgagcagggcactaacagattcgagctgccagcctgcaccctcccccaccaggtcgtcgctcggtttcaccttttccctggcgataccccctgccattttccatcaccgctgtggcctggacccctcttccctcccacatgtcccccagacccttctcatgcagaaggatgaggccttgccctggactctacctcagctcagcagcacaaatacttcctgccaccaacacccagggaagcttgagaggaaggaaatgtcctccaacatatggcaagaggacgatgcgtagagagggcagcgtggacactgggtctcttctgggcaggccacgttcttgcacccaaggctagtggagaatttgccttccatttaagcagatcccaaggtttgatgccagaattgatggctctcttccggccgatccttctcccagcgccaggtgcatggtggtggccctgtcaccatgc

SEQ ID NO: 10826 - DNA, 2300 bp, Homo sapien
aaaaaagccagcttgctgtgtctgttgatggaagaacaccatgcaccagtagaattgcaatttgaccgccgattttaaagactccaggtgttaatgatgctgaaattttattacagtctcacttcccttcttaagagagggtcgtgatggcaaatgcataatacactcgtttcctttcccagcgagcagagatgctacagaagctgagtgaagtccaggcttccgaagctgagatgagactcttttataccacttccaagctaggcactgggaaccgcatgtatcacaccaaagagtgagttggccagtcctttgctaaccctgccctccctccagggccccctagggagggcgcacaggttatggggtcctctgggggtggaacatttgagaaaatacctttatggtggcctgagtggctgaaaattcattgtcatcctaaatgcctctagtgggtaaaggccacagatgctgctgaaccttctgcgacacacaggacagcaaagtttctcgctccagtgatgtcggtgttttcctgtggtgtagagtcccttgttacagctcttccagcttttgtgcagctgattaggccagaaattgccattaggtggtcaagggctggatttggcccatcagcgggtttggtttggtttgtgtcgtgtttttttttgttttttttttttgagacagagtcttgctttgtcacccaggctggagtgcaatggcgtgatctcagcttaccgcaacctccacctcccaggttcaagcgattctcctgcctcagcctcccaagtagctgggattacaggcatgcaccaccaagcccggctaattttgtatttttagtagagacggggtttctccatgttggtcaggctggtctcgaactcccaaccttgggtgatctgcccgcctcggcctcccaaagtgctgggattacaggcgtgagccaccgcgcccgactggtttgtgtcgttttttaaggcatgagtgctgtttgccaatatgttagcttcctggcgctgccataacaaattactgcaaacagcggtggcttagaacaaccaagccagaagggtgccgtggctcatacctgtaatcctagcactttgggaggccgaggcgggtggatcacctgaggtcaggagtttgagactagcatggccaacatggtgaaaccctgtctccactaaaaatacaaaaattagctgggcatggtggctcatgcctgtggtctcagctactctggcggctgaggtgggaggatcacctgagcctgggaggttgaagctacagtgagccgtgattgcaccactgcactccgtcctgggcgacaaggtgaattcatgttcccacctagtctcgactagttggacgatccggccacaccagcagtgtccccaccaagctgctgacccttaaatggcctgtgtgcccctcccacccagtcccaccccactctgtggtctcctcagcctgtgctgctcatttacatgaggcctgactggtgcctgtgagcactgtcagttagtgactgtttatcgagtgcagagactgtcccaggctctctgctaggccctggggatagagcagtgcacagaaataaagtcctttctcttaaggagcttcccagtgtcatggcgggagatgtaatcgtgggaagtcatcaggcgagtgcatctgtgtcccacgctgggaagcactgagcagaaaatgaagcagggaagagcgaggtggagggagaagggtgagatgtggggtctgtgtgtggtcagggagtctccctgacagctagtgcttaagcagaggcttaagtggagtgagaggaggtatctgcaggaagggcatttcagggagtggaacagcaggtgcaaagtccctgaggcagaaaggggtatggccttggagtcctgacctctgggattgaggtggggcctctgtgcctgaagtctctgctatctcaacaggaaggctgacgaggtggtagccccgggccaggagaagatcagtagcctcagcggtgcccaccggaagcgtcgccgctggccctcagctgaggaggaggaggaggaggaggaggagtcggaatcggagctggaggaggagtcggagctggacgaggacccagctgctgagccggctgaggctggtgtggggaccaccgtggcacctctgccgccagctccagcacccagcagtcagcccgtgccggctgggatgactgttcctcctcctccagctgcagccccaccactgcccagggccctggctaagcccgccgtcttcatccccgtgaaccg

SEQ ID NO: 10827 - DNA, 2300 bp, Homo sapien
aggctggtctcaaactcctgacctcaggtgatccgcctgccttggcctcccaaagtgctggaattacaggcgtgagccaccacgcccagcttttgttcaactttatatttgtgagatccatccatgctgttatgtatctgccttcttcttgctgtctagaatggtctataccttctggaaggtaattcactgatatattatattttagaaggaaatataggcaagtgtactactacctacttaacattttttaaacgtttcttaaacttttaatttatttaaataaacatatttaaagaagaaactttagatcactatcatcctgagcaacaaaatccataaaaacacagatttgagcctgggtgcagtggctcaggcccgtaatctcatcattttgagaggccaaggtgggccgatcacttgatgtcaggagtttgagaccatcctggccaacatggtgagaccccatctctactaaaaatacaaaaattagatgggcatcttggtgggtgcctgtaatcccagctacttggaaggctgagacaggagaatcgcttgaacccgagaggtggaggttgcagtgagccgagactgctccactacactccagcctgggcgtcagagggagagttctgtctcaaaaaaacaaaaacaagcaaacaaacaaaaaaccccatagatttgatacgctaattatgatttttttaaacgtcattcattaaggccttcacagtggcttatgcctgtaattccggcactttgggaggccgagacaaacggatcccttgagcccagaattttgagaccagtctaagcaacatagggagacaccatctctacaaaaaaatagaaaaattagcccgtcgtggtggtgtgtgcctgtagtcataactactcaggaggctgaggtgggaggacaggtcaaggctgcagcgagtggtgattgcaccactgcactctggcctggcccacagggcgagatctcatctcttaaaaaaaaaaaaaaaaaagtcgggcgcggtggctcatgcctgtaatcccagcactttgggaggcccaggcaggcagatcacgaggtcaggagtttgagaccagcctggccaacatggtgaaactccgtctctactaaaatacaaaaactagctgggggtggtggcgggcacctgtagtcccagctactcggaaggctgaggcaggagaatcgtttaaacccgggaggcagaggttgcagtgagccgagattgctccactacactccagcctgggcaacaaagccagaccttgtctcaataataataataatgcattgtttcccagtgtgttacaatgtgatgcggtaatgggaatttaaagttatgtaatagacaactttatttttttttttttgagacagagtctagctctgttgcccaggctgaagtgcagtggtgcagtctcggctcactgcaacgtccacctcccgggttcaatcaattctctgcctcagcctcccaagtagctgggattacagacgcctgccaccaggcctagctaaattttttttgtatttttggtagagacgggggtttcaccatcttggccaggctggtcttgaaatcctgacctcgtgatccgcccgcctcggcctccaaaagtgctgggattacaggcgtgagccaccgcgcccgtagaggcctccttttagatcttccatctatccctgtgatggaaatatttggtgcctttttaaaagtacacgactaatacgtttcttgtaggaatatcagaaaatacagatgcgcaaaccagggttggggggaagaagtttggagtactgggggcggggtatattttaaaaggtggcaaaacacttccactcccaagaagccaaattagtatcagtagatataattcatatttaaacccagactaccccaagcgagaacagcccaggacttaaactccggcctccgctgggacctcaggccccgcctacttctctaaatagtcccgccccctgcccggcccggctccgcctctcctcttcgctgggtttctcttgcaaccccgcccctcagcggcaaagtcagttacagttctcgcgataacacaacccggaagtctcacggccggagttggtggtctgggaacccacgtgggctgggtttcggattgctctgctggtccggccgctggagcgcccaccctggcctagtcgccatggggaagctgcgccggcgctacaacatcaaggggcgccagcaggcgggccccggaccctcgaagggcccccccgagccgccccccgtgcagctggaact

SEQ ID NO: 10828 - DNA, 2300 bp, Homo sapien
ggggacaaagggaggcttcgtgggggaactggtaatgtttcgtttcttgatttgggtgctggttaccttgggtattcagtttgtgaaaattcataaaaatttatatgattgtgtatttttctgtatgttataccttaattaaaaagtttattattattattattattatcattttttatagagataggtttcactatgttggccaggctggcctcgaactcctgtgttcaagcaatcctcctgccttggcctcccaaaacaagcttgtgccactacacctggcgtaaaaaaaggtttttgttttgttttgttttgtttttgggacggagtttcactcttgttgcccaggctggagtgcagtggcttagtctcggctcactgcaacctccgcctcccaggtttaggcggttgtcctgcctcagcctcccgagtagctgggatcacaagcaggcaccaccataactggctcattttggatttttttttttttttttttttttttttgagacggagtctcgctctgtcgcccaggctggagtgcagtggcacgatctcggctcactgcaacttccgcctcccgggttcacgccattcttctgcctcaggctctgagtagctgggactacggcgcccgccgccacgcccggctattgtatttttagtagagacggggtttcactgtgttagccaggatggtctcgatctcctgacctcgtgatccgcccgcctcggcctcccaaattgctgaccttgtgatccgcccgcctcggcctcccaaagtgctgggattacaggcgtgagccacggcgcctggcctcattttgtatttttagtagagacggagggatttctccatgttggtcaagctggtctcgaactcccgacctcaggtcacccgcctcagcctcccaaagtgctggaatcacaggcgttaaccaccgcacccgacctacaaaaaagtttttaaaaagataaacaatacaggaaaaaatgtgcaaaggatatgaataggtaattcacagagaagtaattcaaatggccaataaatctatgaaaatcttactaggaatccagaaaatgtaaattcaaaaataagagcattttgtattctttggattggcaaaaattgagttttattttcttggttgtctaaaaaaaatgttggttagacttgatttgtttgatttaggatgcaaacagggtccttgcattgcatgggttattatggctcttaagtctttaaaaccaattatcctcctcttcgctcaccttttataccaattatttattgaacaaactgggtcgtttgtttggtagaatgccccacatgctggagttggttggttgcttctgctgcttctaagttttccttatctgccatatttcctgtaaactgtaggtttgatctagaggccccatcaggttcatgctcaacttgtcttggcaagaatccatcgcaggtggcgctggtacttcctggcactaagatcgattggcgggaccgggacttcgcggcttagcccctccattttcaagttccccgccaaaccctcccctcttggttgtacccatttctgatgatcatcgcgtgaatccatcattctattgaggggtgccaaataattttcggattctctcattcatcctcatgtattagctggactttgtaaaagaaagtccctccccaactattttggggctctgaaatacagttcattcaggaagggcaggaggatgcctgatgctttcttgttatttaaaattttcaggatgaatgagctgatgcccacgagggcgaattttggggtaccattataatacattcagggagattacatatatgtctatttcatgtttttcaatcagttgcagtcactttcctggttgaagctgttgcaagttttacaggcacgggttgcttttccacggataagttaaaaaagagaatttttttttaaatgatgagaagccgcaccgggtcggggcaggcttccgggaggcgggcgcggggccccggggccgggtcgcgttggtcccgcgccgggggcggggcgcggcgtgggctgggccgtgcgcctttgcgcgcggggcggggcaggtggcgcagcagcggcggcggcggctgtgggtaaaggcgcggcgcgcggcccccgagcgcgccaaccttgccctagccggagcccgctgcggcccagcgcacggccctcaccccgcatcgcgaccccgcgccccgccggccgagcatgggcgcgcgcgcctcaggcgggcccctggcccgggccgggctcctgctgctgctg

SEQ ID NO: 10829 - DNA, 2300 bp, Homo sapien
gaggctgaggaggtggatcacttgaggacactagttcaagaccagcctggccaacatggtgaaacctcatctctactaaaaatacaaaaatcagctgggtgtggtggcatgtgcctataatcccagctacttgggagactgaggcaggagaattgcttgaacctgggatgcagaggttgcaacgagccaagattgtgccactgcactccaacctcaaaaacacaaacaaaaaaaccaaaaaacctgagactaggtaatgcataaataaaagaggtttaattgactcacagttctgcgtggctcaggaaacttataatcatggcagaaggcaaaggagaagcaagcaccttcttcacaaggcagcaggagagaaagagagagcaaagggggcagctgccaaacacttaaaccatcagatctcatgaaacccccccccctccactgtcacaagaacagcatggggaaaccacccccatgatccaatcaccccccacgaggttccttcctccacacgtgaggattataattcaagatgagatttgtgtgggagcacagagccagtccatatcagggtctcactatgttgcccaggctaaaggtgaaagatgtatatgatttgaagagaaaccagtatatggagaggtttttaaaactcaacatggcaggtcgtcttaaagggcttccctggctgggcatggtggctcatgcctgtaatcccagcactttgggaggccgaggcaggtggatcacctgaggtcaggagttcgagaccagcctgattaacatggagaaaccccgtctctactaaagatacaaaattagccgggtgtggtggcgcatgcctgtaatcccagctaccccggaggctgagacaggagaattgcttgaacccaggaggcggaggttgtggtgagccgagatcacaccattgcactccagcctgggcaacagagcaagactccatctcaaaaaaaagaggcttccctgtgtgtcctcatggagcaaagtgtgactattcacagaggaacttccttgagttcctttggttgttgcaaaggccttttaagccccacaggccagctcaactatccaattctagcttgttaagaaacccctggcccctgcgtaacgagccctgttcctcttttctgtcccgcagtctccaacctgtcccagtatttcagcccagcctcggtgtccagcagcccggcccgcgcgctcctgctggtcggcgtcgtcctcctggcctactggttcttgtccctgaccctgggcttcactttcagcgtcctgcacgtggtgttcggccgcttcttctggatcgtgcgggtcgtcctgttttccatgtcctgcgtgtacatcctgcacaagtacgagggcgagccggagaacgcggtgctgccgctgtgcttcgtggtggccgtctacttcatgaccgggcccatgggcttctactggcgaagcagtcccagcggccccagcaaccccagcaaccccagcgtggaggagaagctggagcacctggagaagcaggtcagactgctcaacatccgtctcaaccgggtgctcgagagcctggaccgctccaaggacaagtgaaggtcagccggccgggcgggtccacagttaccagcacgctgtctcagaaaacgaaaacggaggaaaaaaaccccaaaccccaaacaatcttaataaacacgactgagcaagaaagtggcgctgtgtagggctatttccacccacccggcagctcttaggacacattcccagaagagcggaaagatcattgacgtggaactacacacgaagtgtaattagtgggggaaaaaatattttttaaacaaaggatataaccatatttagttgtacagtaagagaaatttatctgtgcatagagcataaagttaattttttcaagcatttaaatacatcttttgtaaggttttttaataaaggcagattgagtcaagtttattaaaactttacatggaggggaagaatatgctaatttgacatttgagaaaagtttaaatgcgagcgtttgttttcacagcttagggattggtgggtgaggtctgtgtgcgttattttcatgttcccaaactgtgagctttatttcatgttatttttggtggatgttgacttagttcatgaatgttgtcacttctaaatgtggacagttgggctgcaggatgcaactcaacctcttttggatcctagagacccctgccaagcccccatcagtcctatttttaaatgaagacatcgccatttctagaagacctgagattttcttccct

SEQ ID NO: 10830 - DNA, 2300 bp, Homo sapien
taggaaagtagaggaataaaaagatggctactccatagacagagcaccctgaggggtgctggttgcccattctcatggttatttcttgatgatatgctaaacaaggggtggactattcatgcctcccctttttagaccatatagagtaacttcctgacattgccatggcatttgtaaactgtcatggtgctgatgggagtgtagtagtgaagtcaagcagaggtcactctcatcaccaccttggttttggtaggatttagccggcttttttactgcagcgtgttttatcagcaaggtgtttatgacttgtattttgtgccgacctcctgtctcatcctgtgacttagaatgccttcactgtctgggaatggagcctagtagatctcagcctcattttacccagcccccactcaagatggagttgctctggttcaaatgcctctgacattaagaccagctggctgttaaccttaactttagccaagacaaaccccaattcagttacttacctagggatgggtcttaggctgtagactgctctctaccattctagaagcaggaaaaaagacctcatcttccctgttggaagcgagctcaaactccataaaggagttacctgccttccattgtcatggaagcaggaaaccttgccttccttgttggaagcaagtaaaactgcaaagaaaagagttgtacagcaaaataaactttagatctccaccaaattttgggagatcagggaggctctggagggggtgctctcagacctgggctcactcttgtaatcccagcactttgggaggccgaggcgggtggatcacctgaggtcaggacttcaagaccagcctggccaacatggtgaaatcccgtctctacaaaaatgcaaaaatgagccgggctcggtagctcacgcctgtaattccagcactttgggaggctgaggcgggcggatcacctgaggccgggagttggagaccagcctgaccaacatggaaaaaccctgtctgtactaaaaatacaaaattagccaggcgtggtggcacatgcctgtaatcccaggtactcgagaggctgaggcaggagaattgctttaacctgggagatggaggttgccgtgtgccgagatctcgcaattgcactccagcctgggtaacaagagcgaaacttcgtctcaaaaaaacaaaacaaacaacaacaacaacaaaaaaaaaaacacgaaaaattagctgggcatgatggcgtgtgcctgtaatcccagctactcaggaggctgaggcaggagaatcgcttgaacctgggaagcagaggttacagtgagctgagattgggacattgcactccagcctgggcgactgagtgagactcaaaaaaaaaaaaaaagctaaggcggggagggggccttccaggtcataggtagataagggacaaatggctgcattcttttgagttttcaattagcctctgcaaaggaggcaatcaggtgtgcatttaactcagcagaggggtgactttgaatagaatggaggcaggttagccctaagcagttcccagcttttcttttccctttagcttagtagtggggccccaagatttattttcctttcacaaatgtgtattttgatacccattggcatactatgtatattattgtattatactatgacattatcttgtgtatgtacacgatgtacttatttgttaatcgtctcccgtcttcctcacacctgtacccctcctctcctgttgacagagaacaagaattttgttttgttcgctgctgtatccgcaaagctcccaaagtcctccgaatgccgcaggctctcagtaaagacctgcaggaagaaatagcgaatgaatgatgtacacgtgtaggaaacagcgggctcggacgcctggcttctccggctgccctaacgccctccagctccaggtgaggtcggggagctggggccaaggctcgtgagcgcccctcacccccacgccccccggccgcgggcgctggagccggcggctgcgagcactcctttgagcggcgctgcactcagcggagggttacaggcgggagggcggggcctggaagggggcggggattcgaggcggggcctgcggggcggggcctgggccaagcggcccgcaggaggcggcggcggccgttcagtcccttgttccccgccgccgccgtcgctgacccagcccgccaggcgctcctgaccgtcgcttcctccggtcccaggtccccggccctcgcctcagccccggcccctggtccccagccctcgtcgcagccccggccgcccgcc

SEQ ID NO: 10831 - DNA, 2300 bp, Homo sapien
attagctggtcgtggtggtgcatgcctgtggtcccacctactcaggaggctgaggtgggaggattggttgagcccaggaggttgaggctgcagtgagctgtgactgcgccactgcactccagcctgggcaatagagccagaccctgtctcaaaaaaaaaggtttaattatgttaaaatacatatatcataaactattatgtaaccatcttaactattttaaactgtacacttcagtgatgttaagtacatttacattgttgtagtttttttttttttttttttttgaggtggagtcttgctctattgcccaggctggagtgcagtggggccatcttagtatactgcaacctccacctcccaggttctagcagttctcctgcctcagcctcctgagtaactgggattacagtcatgcaccaccacgcctggctaatttttgtatttttagtagagacagggttttgccatgttgcccaggctggcctcaaactcccaaccttgggtgatccacccgcctcagcctctcaaagtgctgggattacaggcattagccaccatgcctggccacattgtcatagttttttttttttttttttgagatggattcttgctcttttgccaggctagagtgcagtggtgtgatctcggctcactgcaaccttcaactccctggttcaagtgattctcctgcctcaccctcccgagtagctgggattacaggcatgcgccaccacgcccagccaatttttgtatttttagtagagatggggtttcaccatgttggccaggatggtctcaacctcctgacctcatgatctgcccgcctcagctttccaaagtgctgggattacaggcatgagccaccgtgcccggcattagttttttaaactatttagaagtttcgttctttatttttctttgagaccgagtctcgcttttgtcacccaggctggagtgcatctcggctcactgcaacctccacctcctgggttcaggtgattctcttgcctcagcctcctgagtagctgggattacaggcgcccgccaccacgcccggctaatttttgcatttttagtagagatggggtttcaccatgttggccaggctggtcttaaactcctgacctcaggtgatccgcctgccttggcctgccaaagtgctgggattacaggcgtgagccactgtgcccagctggagttttttttttttttttgagatggagtctcgttctgtcccccaggctggagtgcagtggcgtgatcttggctcactgcaagctccgcctcctgggttcacaccattctcctgcctcagcctccccagcagctgggactacaggcgcacgctggcatgcctggctaatttttgtatttttagtagagatggagtttcaccgtgttagccaggatggtctcgagctcctgaccttgtgacccgcctgcctcggcctcccaaagtgctgggattacaggcgtgagccactgcgcctggctggagttttgttatttttttaacctgcagcttagaaaaaacttttcaattccttacactgtaaatcaataaatatcgggaaaaagggagtcctgccattcaaagtcgaatttattgtctccttggggcaaaccattttgaaatgttgatcttttgggactttgacaataaaaatcaaggttccagcactccaaggaaggaagcaaaggctgaagcccccaaaagttgtaggcaaggggcaggtggtcctggagcttgctctcctggtttccatgcgtctgggcagagcctgacgtgttgggtgtcgtctttgtctttaggatctctcactgagtaggtgtttaatgagtatttgtggaacacatatgttactggggatggttgttttccgttggcattaatccctactttcagtttctagcttttaggccagttcagagttcagtccataaaatgatttaaaaatgctctgggccaatgagtgagctggcttcctgggaagaagaaccacttttgctgatttgtgacatagtctcatgttttgctgatctgtagcgtagtctcatgtgtgtgcgtcttggtttgttgtcattctctataggttgtggacacatcgaaaggaatcgcagatgtccccgagtggttcaaaggcagtcggctcaactatgcagaaaacctcctgcggcacaaagagaatgacagagttgccctttacattgcaagtaagtcctgatggcgagacctgggatttcctccgtggaagttctagatggtgcatgcatgcggtgccacatatttggagagata

SEQ ID NO: 10832 - DNA, 2300 bp, Homo sapien
tgcacctcgctctgatgaggccttgttcatggcccttcgtctcgtgactgccttctgccctactgtacaggtcctttcctctggaatgtgtagagtgatctggttaattgatcatagtctctgtggccatgaggattccctgcctctgttgtcatgaaagccagcctgctaggagatggagggcctgaggacctctgccccttataggcttgaatatggctcttgacagtactgcttgtgttcttcattccctctcctctctatccatccaaccaaccatccaccagtccacctgtctgtgcagccatccatcaacccatccatctgtccatccatctatccatccttctctccacctacccatccatccgtcatccatctatccatcccttcatctatcctccacccatcatctacccatccatccatccatcttccatttatcatccctcaccatcatttatccatccatccatccatcctgtctatacattcttctctccatctacccatttacccattatccatctatccatccatttatctatcctccacccatcatctacccattcatccatgcatcctccattcatcatccctcatagatcatccatccaactatccatccatccatctgtctatacattcttctctccacctacccatccatccctcatccatctatccatccactcatctatcctccacccattatctacccattgatccatccatcttccatttatcatccatcaccatcatccatccatctatccatccatcctgtctatacattcttctctccatctacccatttacccattatccatctatccatccatttattatgcttccacccatcatctacccattcatccatccatcttccatttatcatccctcatccatcatttatcctaccatccatccatccaactgtctatacattcttctctccacctacccatttatccgtcatccatctattcatccattcatttatcctccacccatcatctacccattcatccatcttccattcatcatcctcatccaccatccatccaactatccatccaactgtctatacattcttctctctacctacccattcacccatcttccatctctccatccactcatctatccttcactcattatccattcatccatccatcttccattcatcatccctcatacatcatccatccgtctatacattcttctctctgcctacccattcacccatcatccatctctccatccatttatctatcctccatctgtcatccgtccattcattcatccatccatcctccattcatcattcctcatccatcatccatccatccatccatctgccagccggcaaatatatgaggacccttgatgtgcagggcatggtaaaaggcatttggtaaagcaaagaacaagacaggcaaagtcccagccctcatgtgagaaccagatactagacggccagttacacaggtgattattcatttgcagttatgctaagtttggtgaaggagaaatacagtgtgctttgcaggtaactagttgggggacctgagttcaccgggttgggggcaagacagccttggagaaggctgctctgaggaagtttcatttgagtgaagagctgcaggatgagcgcacactgagtggagactgctggtgtgcgtggaggagtgttcagcagatcagacagctgtgcaaaggcaggaggtgattaggacaactgaggagtcggaagaaggctgctgtgaccagatcccagggagggatggggagcagagggaggagagcccacggggtcattgtcatcagagcatggagaatggattgcagggggatggtggggagttgacaggctggcagcaggcgattcatctgggcgggggctggtggtcaggatcctcaggcagttcaaggccagcccccttcccactctgaccttggctctcagagaaaccttttggacatctgctacctcccatacaccctgaacccaaggcttcttcctatgttttctccacaggttatttacccaacagtgagcacgctgtcgaggcgatgctggctgcggcaagcattggtgccatctggagctccacgtccccggacttcggtgtgaatgtgagtcagggtctgtgacagagggggcaccccttgccctgtgagcatcctgggcaggggctgcatgggctgaattcccaggggagccggacagcagcgtgagcccagcgggaggaggtggcgttgcagctgcctctatggggaaagaagccagaaggact

SEQ ID NO: 10833 - DNA, 2300 bp, Homo sapien
agaacatagacctttcaaagattccaaacaggtaatgtaccgcattctgacccacaggtccgtgtggacccactggagctcctgcggggaagtaggcctctggatcttctacttggggtcactcagagaattttagaagtggaggaggttttagttaaaagcatcattttgtagataagacacctgaggccccagagtgaatcccccaaggccacatagtgaatgagtggcggaagagagacagtcccaggcaccctcactcttccaatctggtgtcccttatgtagggggctctgatggggccaagcccaccttcctagattggccacagaaattttgcattggaaatcatgtttacatgtatgtgcacatggtgcatgcactgcacacgcatgcacacgacaaggcacacatatctacacgtgtacacatgcatgtgcatttacacacgtgcatacgtgcacaggtgcacatgcatgtgtacatgtgtatgtatggctatgcatacataaacactcgtatatgtatttttcaccttttaggacatgcgtgtgttccccattgctgatgacatcttccttggcttttctgacatttgtagaagaataagccacatgttttgtgtacccaataggattgtaagaatcttcatttttggccaggcatggtggctcacgcctgtaatcccagcactttgggaggccgaggcaggcggatcacgaggtcaggagatcgagaccatcctggctaacacggtgaaaccctgtctctactagaaatacaaaaaattagccaggtgtggtggcgggcacctgtagtcccagctactcgggaggctgaggcaggagaatggcgtgaatccgggaggaggagcttgcagtgagccaagatagcgccactgcactccagcctgggcaaaaaagcgaaactccgtctcaaaaaaaaaaaaaaaaaaaaaaaaaaaaaaaagaatcttcattttgaatagagattaaggaaatggattatggattatggtttagtcaaagctgaattcttcccaaagttcttggagttataccttcctttaatttttcttgaaacagttgtggggagagggttctgagctcaggcgtttacccccacggggtaagctttcccttgagccttgggtcggggccactggagggcaccttgtacgtggctccttgaggcctggtgaggaggggctatgtaaacatggcagggtgtcttcataccagccacggggaccagaggtggaagagaggaggagatggcggagccctttttgttccagcaagtggtagtcggtgcatggcttgttaccgtctgtcagggtgttctcaggggcaccacaaggtacaaatcatgtgtcctgtcctccgggagttgcaatctagttggagaggtgagacccacctgcagggaggttgagctgtgaccactaggagtgggagggacaggatgtgcccaggggttgacagcagggcctgggtgcttccctgtaggatctggggaggtggcatctgggggtggctttgaggtatgagcagggtctggggacagctgtgtgtgcagggcatattctggagcctggagggtgctgcaggcaaagtggtggcttggcgagggccatggtctccagatccgacttgtcaggttcagctctcagctgtgtgaccctgtgccagtaacctctctgagccttgtgtctccatctgtaaaatggagatgaggtggtacctgtattaggtcgttcttgccttgctataaagaaatacctgagactgggtaatttataagaaaagaggtttaattggcttatggttctgcaggctgtgcgagaggcatggtgccagcatctgcttctggggaggctgtatggagcttgtgatcatggcggaagggaagtggagcgggcactttacatgggaaagcaggagtggagggggtcggggggcggggtgccacacacttttcaatgaccagctcttgtgtgaactcagagtgagaacccactcatcaccaaggagatggtccctgccattcacgaggaatccacccttgtgatgcaaacacctcccaccaggccccacctgcagattggaggttacatttcaacacgagatgagggtggggacaaacatccacactcttatcagcaccttcctctcaggctggctgggaggattaaataagctgctgctctgcaaagcgtgcacagtcagctctcagtgatcctgcctgtcattgtgcggccgcggtgggctctgtcgcctgaagcacctgagtcagggtgg

SEQ ID NO: 10834 - DNA, 2300 bp, Homo sapien
tgaaagggagcgtgggagtgcgtatgtgcatgagtgtatgtgcacctacatgtgtaagtgcaagtgagtgcatggatgtgtgtgcatgtataggtgtcgggtgtgtgtgcatgtgcatgcagctgtgagtgctgtacatgtggatgcatgtgtgccttgtgtatgtgtgcatgtacctgtgtacacgcgtacatgtgcaagtgttcacagcatggtggctggttccgtgccgtaatcacgggccctgggttggccagagcgctgaggctgattgaggtgtggtcgtgctgtcgcagggctccctctggatgtggccatcgccccgcctgagagagcctcctgcgccgtttggcgaggcaggtgtgacttggcaccctggcaggggctgcgggtgaggggctttcggaagaatgcaggctttaaaccactacactggtcgccaccagcagtgagagggagcgggtgctgggcggggcaggacacttcagctcagttctgtccacctcctggaaactgaatgttgtgtaacagttgaaagcagtcatggcaaaccctgttttgtggcaagaggcatgcggggcaggcacagtcctcgtgatgctgtctcagtgcctctgattaaaacccacatctgttagtaaatgaggggtgagatctctgttgattaccagcatgtcagctctcagccttattgacacattcgatcaaagagcatttattttgtaggcacagacaagataatttgaaaagatgaattttcttcttcacaggggtgtgtttctgggttctagtgaggggactattctggacagaattagggccaggaccccggggactttgtccagtttgctagtagtggggcaggtgtggacgttgtctgggttgcccagttttgcccgtctctgaatggggccattgtctaagatggttctagagggcaggggcctcgtgggcgagcaggcttgtccttctaaggaagtgcatgggttgggtagcactttgtcgggatctgcaccccgtgtgtgctggactacgtgctctgagccaagctccctggggggtcctgggggccacacagcagcgaccaggggccagcacgctctgtcctcatggggctggcactgggagggggaaggtaaggaaaagacagaggccaacctcaggctctgaggagtgctgtcagagacctggggtcagggagtcctcgagagtcctcgagaggtcttggcatttgggctgaggccgaaaggttcaggaactacttttgcaggactggggacgtgtacttcaggcagagggaaccacgaggagatgggcctaagatccatgtgttgtggaagctgggaggggcctcctgtggaccgagtgtgaagggctgatgcggggctgggggcaggagcaggggtcagaggggcggggacttttggagctgcttggagggtgagtttttccccgagtggaatggaacagcagtggacactgaatcaggagaacactgatctggttcatgttattaaaagggcagtgtaggccaggcgtggtggttcacgcctgtaattccagcactttgggaggctgaggtgggtggattaccatgtcaggagttcgagaccagcctggccaacatggcgaaaccccgtctctactaaaaatacaaaaaatacaaaaattagccaggtgtggtggtgcaggcctgtaatcccagctacttgggaggctgaggcaggaggatcacttgaaccctggaggcagatgttgcagtgagctgagatcaccccactgtactccagcctgagtgacacagagagactccatctcaaaaaaaaaaaaaaaaaaggcagtgtagcgcctgagtgaagagagcattgccagggctggggtaggggcagaagctgagagactcaggttgctggagcccacaggcgcagtggcgaccctggaggggctgcctgtgggctgatccacacttccctccgaacagggctctgggcagtctcgggcaccgggtcccaacggtttagggacctgagactgtctcatgctttggtgcagcgacccctacagtacttgctagaaataagacgtggcatgagtgcccgcaggtgggctcccgtgcttccaagagctgaatggtgttgcatttcctaaccgtcttacctgcaccctggagatagatgggggactttgccgtttcttcagacaagcaggactgtgactcacaggccggagagcatcacctctgagtgctggcggagcttcaccaagatcagggtttgcagagtcttgcctgcacttagacg

SEQ ID NO: 10835 - DNA, 2300 bp, Homo sapien
cttgctagaaataagacgtggcatgagtgcccgcaggtgggctcccgtgcttccaagagctgaatggtgttgcatttcctaaccgtcttacctgcaccctggagatagatgggggactttgccgtttcttcagacaagcaggactgtgactcacaggccggagagcatcacctctgagtgctggcggagcttcaccaagatcagggtttgcagagtcttgcctgcacttagacgcactttagacccacagagagccttcgagttttctgggggtgggcagtggggggattgcacaaaacccgtgtgttgtttgggcgtggctgttgattggagagctttgtacctgtagctggaggtggtcactgctgctcagggccgggtgatcaccattagagtcatgaggtctccatcctctgttagtgatacttgcaaaggaagtgacaccttagtccttggctatgatgttgaagtagttaatcaaactctgagtttatgaaagaagcatgggggatggtgggaggagctagtctccctcccccaaaactccagccatctctagggtacagtggtggctttgttggtggcagggtgtgtctggggaagtaagagaacgaaggtgtgggaggtggaaggaccatggtaacccgcctccttgcgtggagggagacccaccctgccattgccttagccacgcccagcccagccagccctgaattccgggatgttctgtgccatgttgcctcgtggcttcagacagcgaatgctatgacggtcttccgtgggatgagtctctccaccgaatgtgcaggactgaggttctactgcccagagtgacccagaagagtctgaatctcacagcctcctctaggccccgaagagaataacgttctttagttgggccgactgagtttacatgtgaagggccgcctggctggaggaaaagctgaggaaggaaatagcatattagacagggctgcccttgaaagcgcagtgaggtatattcagcagcgtgtgttgttctgtgagcacaaatgcatagaacggtggattctgaatgttcaagaagagctggacttttctaagtttcataaaaatgtgatcttgtttaagaaaaggggatgggtggagagtttcaagtatggcacatgttttcacaaataaagaattctcccagcactttgggaggccaaagcaggaggagcacttgagcccaggagttcaagaccagcctggcaacatagcaagaccctgtctctcagctgggcatggtggcatacaccagtagctctagctacttgggaggctgaggtgggaaaatcacttgggcccaggagttggagactgcagtgagctgtgattgcacgactgcattccagcttggggcaacagaaggagaccctgtctaaaataataataataataattctgtagccttctcttcattggtgaatgaatgtgtgaggatagaatttgaggggacttgatttttatggcctcctttggtcccccaagatacaatactctgcagttgggaagataatgggttcgggtgagcgactgttttatgtgacgcctcgtggtaaagggagctggccctgcgtgctgaaatcagtgtaaagagcagtcaggtgcacctgtgaggaagtcaggtgccgtgactcagactcgagtaaacatgaagtatgagttcaacccagaaaactgctctctcttgggttttgcaaacttgtcagaaataaatcactaactttagaaagctttggtgcaagagccttgaagagtttctggtgttttctttcccgcctgcaccctagcatcactgtcctggtaactggggccaagtggctgtcagtgctggaagagaaggccatgaagccgggtgagtgtgcctcttcagtactcattccctgtactgccaatcaaggaaattaaatccatcctatttcctgcttgcgagtgaggcttcaggcactgggtttagttttaatcttttggtgactctgcaccccagtggaaacccacagtctccagatgctccacacgatcctgtccactggctccccactgaaagcccagagctacgagtatgtctacaggtgcatcaagagcagcatcctcctgggctccatctcaggtatggccccggtggggacagtccttccagccatccccgccggccccataagtatgcacacctctgcccagtgcttggattcatcccaaggacacagtccgctgggcagccaatacgcacagtcccttctcatgatctgaggcagtgatgttccacgaagtcactg

SEQ ID NO: 10836 - DNA, 2300 bp, Homo sapien
ctgagtagctaggaccacaggtgcatgccaccacgctcagttatgtttttttattttttgtagagacggggttccaccatgttgcccaggctgttcttgaactcctaacctcaagtgattctcccaccttggcctcccaaaatgatgggattacaggcatgagccaccgtgcctggcctgggtcacttttattttatttttacatatttgtagttctgatttttctccttgtgatttaaaaacatactctcaaagcacctctttaagaggtgctatttatacaaaattagctgggcatggtggcacatgcctgtaatcccagctactagggaggctgaggcaggagaatcacttgaacctgggaggtggaagttgcagtgagctgagatcgtgccattgcactccagcctgggcaacaagagtgaaactccgtctaaaaaaaaaaaggtgccatttgcccgaagcctgaggccgacccctcagccttcctccccaccgttggttcctcggcctgaggtggggggtctgagccattcccaccagcagagtgagcagcaggaaggaggtcaggagccctgctcaaccttgatggtggcagaaacgaacgtgactcactcattttcgtgggacacatcagtcagtgacatgaaatggcagagaagacatcacattttattctctgcctgaaggaagaaataaaatcacactccacaatcttgcagctgggaactttttgttttgtttgtttgtttgttttgacagaatcttgctctgtcgcccaggctggagtgcagtggcacaatcttggctcactgcaacctccgcctcctgggttcaagcgattcttgtgcctcagcctcctgagtagctgggattacaggcacatgccaccacgcctggctaatttttttgtatttttagtagagatggggtctcaccatgtcacctaggcttgtctcgaactcctgagctcaggcaatctgcccaccttggcctcccaaagtgctaggattatagacgtcagccacctcgcccagccacatttctgtttttccaaccattaagtccacataaaccatggcactcgagccttcccatgtgatgggtctgtctaggcagtgcctgccaggtatgtatcacaggcaaagcttccattttctgcgatcctgagtcttgaatttcagcatgaccacaggaggtcatttacttagcggatcctctggcaggaaggctcggctaaaacgtcaatcaccagatgtggggggttcattctaatttccatatcacctctcccactgctccctgaagagaagccccacctgtctgggatgttgcagtgtttgtctgggagagtagatatttgtcctcttggcaccttctcctttgttgctcactaatttaacacaatttgtcttgggcttctaaattttgagtctccctttgccattgcttgcaggaggcaccgacatcatctcctgcttcatgggccacaatttttctcttcctgtgtataaaggggagattcaggcccggaacctgggcatggccgtggaagcgtggaacgaggaaggtgatggctccaccaactgtttctttctgtgattaggcgtgagttgggagtgtgggagcgttcggatgtgtaactttgcttggacatagttctccaaaacagccctcggaggggaggcccctgtcacttgcagtgtgatgtcctttccctccagcttggtttaacacccgccgggcttctggtccctagcctctgagaggtcagggtcgagctggaggacaggtggagagatgtgtgctcgggaacagtgggcaggtgggtggtcattgccctgcatctgaaccctggtgctggatacacaggcagcagccagctctgagcttctgagaacctggtcattgaagggatagtctcccgctatgctgggcctggcagctagaaatccagctgtgctaggaggggtgagcagggctcagtgcacctgctctgcagagcaatgtgggaggagtcagtgaagctgaagatgcatacgtgccctgtgatctgggaatgccactcccagaagacttacttgtgatccatgcaagaatgtttgtagcgccccatgatttgtaatggaaaacaaaattgggaacaatagaaatgtccatctttgagaggaagaaactctgtgatcacatgtggagaatgcccaagtggtgaatacgaatgaaccagagtgagacctagtagcccgaacgagcccagatgtcatgctgagtgagcacaggaagatgcgggacacatagaa

SEQ ID NO: 10837 - DNA, 2300 bp, Homo sapien
gggatttctctgctgtttcctcctctgggatgctgcattttaagcgccacggtcaggtgccatttcttcttgcactggttggaaaacaggactccagtggtggaggttcattttagggcaaaagaaaaaaaagtctctgtctgcccttggcctgctttgctgaccctggttcctggtgggctgtcttcactttgaaaaagcttgttgggtctttgctgtctgtgttttcccatttgaaagaaacatgctaagaaacacacatacatgtatgtactcatgtgtacatgtttatgtatatgtgctgtgtgttttaattaacaaaataatacatggttgtaacaaattaaaagaaagcagaaacataaatggtgaaaaacaaaaactttcgcctttgggttctatagacacacaaacataaatatatacatttacatatacatatgtagaattttaaaactttaccaaataggatcaaatatgacacatttgatttttgttttttttacactttatttgtttttttatccttaatgtcatattgtggccatcttttcaagtatgtttatgtagctctaccgcattttaagaaatagtttcatattattccactgtaaatgtttagtttcctgttgatcaacctattgaatatggattaaaataataattgtgggtgaatattgacagcacatttctgtgtgccagcattgttctatgtgctttattttattttgttttttcttgagacagggttttgttctgtcgcccagattggagtgcagtggtgcaatcccagctcactgcaatctccgcctcttgggttcaagatcctcctgcctcagcctcccaagtagttgggactacaggcacatgccaccatgcctggataatttttgtgttttttttttttttttgtagagacagggtctcactgttttgctcaggctggttttgaactcttggggtcaagtgacccacctgccttggcttcccaacgtgctgggattacaggtgtgagccaccacacctggcggtgctttgtacttattaactcgttaatccttgcggcaacccagtaaggtagaattcatgtttgtcctactttatgtgaggacatttgtggcacagagaggctaagtaacttggtgaaggttgctcagttaggaagtggcaaagccaggattcaaatccagccatccggctcagcacatatgttcttaagtttgtttgtttgcaattctaaatgatggtgtggtgaacatccttgtagatagataagcctgtgtgcattctcattggtatttcggaaggagagagttctagaagtaggaaagctgagcggtagcttcactctcttttcaataacaatagtagagatgtcatcatgtccacgtagattgtacttatagaagtgatagagagcagcataaatatcaaagtaataaggcactaacgtgtcacatacaatggtgcaatgcctgattggtagacttggtaggtacgcaaccttttatctgtggggtagatgaacaacgatgaccatgatcttttgagtttatgatttcgcacaagcagcagaagcaatgttttccctttagaaagataactgttcacccccaagactattggatcagtggtaaatggggttcctccccactctgtgctgtctttttgggaagatcctgaagaccatactttatataattacagggctttcactgtgatgagacctgggggagaaacagtggccagtgggcggtttgttggggaggtgggtggagactgcactgcatttatttcattacatctcagaacacggttttattcttttgctttcctttcttgtgcagtgacagagagtcgagggattgtggatagcctgcagaagttttcctcgctccctgcttacctccccacgaacttgcacatctccaatgcagaggagtcctttttccttaaagaagccaaccaagacctcacaaggaactccagtctgcaggcccgggtggagccattcttcatctaccgagccaggacaccccctattatcaatgccagctatggcccattttcagtggagaagataatcccccaggagctcctgttgacatctacagcctttggaaacatggacaaatttcccttcaactggaaattgaaatcccacatccttgacagctccatctactccaacagacccaaagtgcagaccttgttttatgtcactggcatgggctgggatgacagtgaccttacggaagatctaccctgtgtcaagatgtttgctttccctgaggccaggg

SEQ ID NO: 10838 - DNA, 2300 bp, Homo sapien
tgaaagttataaatcttcagcaagtgagcctccttccacaagttaatggaaggatggagagatcagatgttatagatcacccacaaaatatgcatattatcacttcaaaccagcttaatgtgctgtctttctccaatgataaaacaaactagtttaagatctgaagacatgacaaaagctgtaagagtcccacactataatagtctgttctcacactgctaataaagacacacctgagactgggtaatttataaaggaaagagttttaattgacacacagttcagcatgcctgggaaggcctcaggaaacttacaataatggtggaaggggaagcaaacaaatccttcttcacatggtggcaggaaggagaagtaacaagcaaaaagggaaaaaagccctttataaaaccatcagatcttgtgagaactcacttactatcacaagaatagcagcatgagagtaactgccccaatgattccattgcctcccactgagtccctccaatgacatgtggggattatgggaactacaattcaagttgagatttggttggggacacagccaaaccatatcacacagacaactgaactttgggagacttggcccaagatatgccattgattcaaacctcataagaagttaaatcaccattaataaataaattccattaatccataaatacattttgagtctgttgtggtgccaggtgtgccagagacacatagataattaagacctgatttatgaccttgaatgggtcacgtttataaatcctcctgtaaacatgggtaaaatgtaaaagtaaaatgggggcacatgagtgttactattggagagacggggaagactttatggagaaggtgatgtttgagccgtgtcttgaggggtgcacaggaggcagacaagaatgatgagggcatttcagacagagaagaacataagagcaagaattataaaagcaaggtgaatgtaaggaatgatgatctctttgagtagagggaagggggagtttgagtgttaggtgcatgttggtgggagtatgggagcggggcttgaggttagaaagacagatggagatttgaagaccatcaaaactctgctaaggtatgtggaccaaatttatggatctcagtggcagatataagacatgcatgtggtaagacactgctccctagcatgtggtcatagtagacatcattaatcaatcccagcactccttcatgctggagcccagattccttctcaagcagaactcccttgagtaacaactatgacttgatttgcattggccagcaagatgaacctatttcttacctctggtagagtctgtggggaaccagcaaaagtttttaataaggaatggagagcatgatgttaatgaggacaagatatggacctcgaagggtgacatactttcctacctttcctctggcatcatgctatacatatcaggatgacgtgatcataaaatgacaggccttgagacaaatatttcccaaagacacgctctatttgtctagaaaagtactttaaaactatatataacttagatgccaatattgtatcactaagaatctagatttcccatttctcttgaagaatcaggatctctctgaacatagtccttgcattcccacatggcagcagtgggctcagctgaggtccctttcagcagggcttggggtgtcctccctgcagtcccatgtcctgtcattcacagcagacccaccttcctcatttaggtcacctccctgttctcaacagggatttagttgttgagttaactcccaccagacctccttaaagttccatcccaggccaattgtgctgaaaaatatggcttaattacatgtttaaactgaattctattacagatatgttagatgagattacctgcattagataagttacactggaatagtatgttagatgtgattatcttaatttattgctaatgtaaatcaaaggttcccacaaagcagagtcttttaaagtaagaatcacaataagtcaccatgggagccaggtctgaggccacacagaagtagaactttcatagccaggtttccaaccaacctttcctgtgctggaaaggactcacagtcaagaaaggtgtagatcctgcagactgcgtggaggccatgctttcacatcaagccttcctcggtgacttgctcagcctgactgtgttcttatttgctgggtctctctctggaaatctccactttgagtgtgagtttaggtgtccagccttctctgggtagcactgaacagatctgaagctctgccatgtcttttc

SEQ ID NO: 10839 - DNA, 2300 bp, Homo sapien
gcctcccgggttcaagtgattctcctgcctcagcctcctaagtagcaggactacaggcacacgccatcacgcctggctgatttgtgtatttttagtagagacagggtgtcaccacgttggccaggatggtctcgatctcctgatctcatgatccacccgcctcggcctcccaaagtgctgggattacaggcatgagccaccgcactgggcctaaaatatgttttttaaggaaacaaacaaaaagcaagtcagtgtgatgaggtggtaaatataggacaaaaaatcatgaaggtgtttctcaaatgagaaaattagaaaaaaactgtatctcacctttccccctaccttacacatgggcgagtggcaaatgtttattgaacaattgcacatgtaagcaccctgccaggtcgtctttacatccccaaccacgttacaaggtggatgtgatgatccctgttggtgaggacacgggagctcagggaagccagcccaaggctacagagccagcattgcacagtcagatatcagtgagggagaaggaaaagaaaaatcatttgggaaaaagtcagactgcagaagcagtcggcctgaatagtcacagcaacaggcagaaataaaacaacctgggaaaacactcaggctgtacctggacagataaacaagcaatgtccagcccagaatctctttgttctttgtaattagtgagctcccaggaaaaatttcctccccttttcaggcatatacatgatgagaacttgcacaagggggagggagcttacctaaaacaaacccacagttatacaaacaagagaagctgtactttgtgcttgcctagagacatacccacggccgcataagagaaggggagttgcacagacacctttactgataagaaaagttacccaaataattacagggaggagagcagtttcttgtaaaaagcttttgaggctgggtgcagtggctcatgcctgtaatcccagcacttcgggaggccaaggcggacagatcacctgaggtcaggagttcaagaccagcctggccaacatcgtgaaacccagtctctactaaaaatacaaaaattagccgggtgtggtggcacgtacctgtaatcccaactactcgggaggctgagggaggagattggcttgaaccggggagatgaaggtggcagtgagccgagatgacgccactgcactctagcctgggagacagagcaagactccatgtcaaaaaaaaaaaaaaaaaaaaagcttttgaattcagctgtaaactggcagtccacttgcactcccctctccactgcagagagttttcttctttcacttattaaatttttgctccaaccccaagtttgtgtccaagttccttaattttcttggatttaggacacagaacccaggatactagttcagacaatgaggaactgctaggttaaggtgcattggtgagactgcaacatcaggacctgggttttcctgaaggttggagggagagaaaagccagttccctggcttaatctctgtggttggccaccacccacttaagtttcaagccacataggatcaaatccacagagacgacgttcaggaatagaagcctgagctcaaccacagcagtgtggtgataggaatgagagagtggggagatgccacaatatccagttatatgtagaaaaaggctattgtgtcagcagattttatagaaagggctggaatgaacaggctgccacacactgtctctgcaggaacaagattcgcaaggatacaaacaaatgcatttataggaactcactaggcaacagcaataccattgcattgataggtgtgcagacatgtttgtgcagggagtagagagagaagatgggtagccaaggagagagagagaacagcaaatcccagtgtttctttcagcacaacctctcaggaactcataattaatgcattaattctcacacccctgtttctggacttttgtgtgtttcctcacacttcctttgatctcattttccaaaggataaatgaagtctaatggagataaagcactgacatttacagagggttagagactaatgatattaatgacattcttgtggtttgtccaacattatttttgtgcagatttcaattcatgctgcactcatcctgggggcaaaagttaaaggttttctaaaaagctacttagtgaatgtcttagttaatggaaaagaaaataagtcaatccttttttttctaaccttgaagttgcaaagattgacaatgaactctgtaatggtgcattctcctcttgtgtggtttttg

SEQ ID NO: 10840 - DNA, 2300 bp, Homo sapien
taaattggtggaggggagtgcagttcagctcatcacagtgacttactcaacctagactgtgcccaaaagttcatgtctttttcaatcaagatatacaaagatgtttttctgaataaaaaccctgcaaacttatgagatgaatgttgcctttccccataaaacttagaggtaagacagatatgttatcttcaaaacattaatcctcccaaaattgtaagcatcccttctaatttgattttaatttgattctagatgtaggcaaaacacacttccgtaaacattaagcagtaaaaaagcacaatgcattttaaaggactgggttttcacactggatagaggtggcatggaatcccagcccatcatcaccacagggactttgagcgcgttgcttagccaggttgagctgccttcttttctcctgtcaactgggtattgttaaggtaagaagcttctcatctcaaccaggcttccagttaaggtgaagaaaataaaagctcactctcctcctcttctcccactaataagaaaaaaattccggccggtcgcggtggctcacgcctgtaatcccagcactttggggggccgaggtgggcggatcacgaggtcaggagatagagaccatcctggctaacacggtgaaaccccgtctctactaaaatatacaaaaaaatagccgggcgtggcggcgggcgcctgtggtcccagctaccggggaggctgaggcaggagaatggcgggaacccgggaggcggagcttgcagtgatcgcgtcactgcactccagcctgggggacagggcgagactccgtctcaaaaaaaaaaaaaaaaaaaaagaacaaaaactcctggacataaaacagaaagcaacccacagaaggctctgaaatgtggagattagaaggtgtagcggctagggacctcagaattccagggaagaggaaggatgctgtttacttttgcatcctaaacaccctggccctccaacctaggaccaccaaggagcacaaagacaaaaagctccaagaaaatgttgttctaggtagacagccgactgggaggagggaggcgctgcagattgatctcttttaactgtaaccactcctctaacagttaaggagcgccgcttcctcacaggagcagctgggccgatgcccctccccacctgagtcctccaccaaggggcgtggggggctgggcccagtcaaccagcctttcccagaattaggcaaagaatagaaggaggtggtgccccgccccccgccaccccaccagatactgatcccaagggggctgaggggtgggaccttgtccagccaccaagctctacactaagccccccagtaaagggggcaggctccaccctttcctaaacagcacttcctgtagcccaggagattgtggggtccaaccctggcccctggccccaggggcaccaagagaaagccagcaaagtgatggggacccgcctgggcagagtctgacagccagccctgcccagccctgagcaaaagttgcaaagagagggtttccccacaaagcccctcctacaggagctgccgcctgcagcccgtgaattggaggtctcaggaggacaactagcctctcccagcagagcaaatgccccacagagagggtaccttcccctaccgcgccctgcccccggggagcctagtgaggacccctggccagttttaagaaaaaggccacactggcgtggggcccctccccttcttactgtgggagaggtctctccgttggccacgcccatttctggtaaacgtcacaaagaagtgtgcccctcctcctccctagaagcctgtggggccgagatgcccggacctgcccggcccgaactaggcaaagtccagcgaataggtgaagaggtggtgcctcctcctctcacagggctctgcccctaggagtccaggaaacgggggtgtcttgtccgctgatggttcccgctaataggcaaacaccaggaacgtgcagcccctcccctccgcctcgcgctctttctgggaggagcctgggggggggagggtcctgcccacgggccccgccctgcactaggcggaagcccccaaagtatcagcgccgcttcgtggagcctggcgactgctttgggaagtcctgctggcaggcactctgcccctgggggtgtgcaaagagttgtccagttaccttgatcttctcacagcctcctccccagggcaccaggagagaccaggattggaggacggtaaagaacacacttcccagaggattcttggaggtagagtcaacaggaaggggtggtgagac

SEQ ID NO: 10841 - DNA, 2300 bp, Homo sapien
accaatagtgttctagatgagagccaaatcaagaacacaatcacatttaaaatagccacaaaaaatgaagtacctaggtatttatctaaccaaggaggtgaaagatctctgcaagaagaactacaaaatactcttgaaagaaagcagacatgacacaaataaatggaaaaatatactcatggattggaaaaatcaacatcatttaaatggacatacttcccaaagcaatttacagattcaatgctatttctatcaaaatatcaatgccatttttcatagaattagaaaaaactgttttaaaattcacatggaactgaaaaacccagaatagcgaaagcatcctaaacaaaagtaacaaagctgtaagcatcaaatcacccaatttcagactatactataaggctaaaataaccaaaacagcatggtacaggtacaaaaatagacacgtaggccaatggaacaaaataaataacccagaaataaagtggaatgcctacagccatttgaccttcaaccaagtcaaaaaaaataagcaatgaggaaaggactccttattcaataaatagtgctaggataattggctaggcatatgcagaaaaataaaactggacccatacctttcaccatatacaaaaattaactcaagatatactaaatatttaaatgtaagacctcaaactataaaaatcctagaagaaaacctaggaaatacccttctgcacatcggctttgataaagacactttgttacttaacatatttatttgggagaggcggtcttcaagaaagttaagacaatccttcagggaggtaaagaaatgaaaattaagagggctgttggaatctgtgttattttcttaccattgtagctttgtccataagtggtagtgctatttcaattgcaaattaaatccaaacagcagtttggaagatgtaattaggaaagaatgaataaaggatatgaatagaaatgatcattttctgctagctgtctgtccacttgacaatagaagtagaagagagactttcttttgtttaatgagtgtgctgtgtaatctgaatgtttcctttgctttatactcctgtggtgttcttagcttactctgatttatatttcttccagttcctagagccaggaataccttctgagcattcatattctctgagtgatatacatcagtgaaaagccattaaattatcaaatcccctccatatttagggaacaacatgacttaatcagaggcgttatctctcctctttgcctctattggtgcattttttttttttagctaaaaatgcattgcaggttttcatttctgatattcctttgtatgtcccttaattcctaatataagtagatttatattcaattatttgccaagttttagaaaatatttagaaaaaaacagaggacacatttttatctttgacaatatctttaaactcagatcttccttaaaacaagtcattttgtggacaattcaagagcagaaaagttaaaagaaataaaaagtccctgaaataaacaacctcactattcaccaggagctgtgctcagtggaaaattgcagtgttctatttatgtcgtaggtaaaagaatgtgtaccggagttcaaaccatgattccgttcctcaccctttgtgttaatcacaggataaatgacttaacctctctgtgcatcccaactatatcccataaagagtttcccatctataaaatgggattcataatagtagttaactcaaggtggcattgtgaggattaaacaagttaaaacatatgaatcactgacaacagtgcctggcacattagcacatagtaagtgcccgatcagtataaagcatcattgatattacatgcaaaggtgatgctatggtttggatgtttgtctacccaaacctcacgttgaaatttgatcccaatgtggaggtatggtctagcgggatgtgtttgggtcatgggggtggatacttcatgaatagattaatgccatgtccgtggggatttgggggtgagtgagttctcactctattagtttccataagagctggttgttaaaaaggagcccgggaaaagttcttgcggaggagccaagatggccgaataggaacagctccggtctacagctcccagcgtgagcgacgcagaagacggtgatttctgcatttccatctgaggtaccgggttcatctcactagggagtgccagacagtgggcgcaggccagtgtgtgtgcgcaccgtgcgcgagccgaagcagggcgaggcattgcctcacctgggaagcgcaaggggtcaggga

SEQ ID NO: 10842 - DNA, 2300 bp, Homo sapien
acaatcacctgctttatagcagtcactgtcttgcaccgggatataacacggtacaaactaggtgcgatctttgcgattattaggtttattggtagcagttgttgctgttacatctcactgctctcattgcaaatgttgatggtggcttttacgtctgtgaaaataaaaagcatgaccttttgatagttgtttgctgtatggaagcctattttactatgtttgcatgcaaacttctatctgaccttaagctaatgggagcttgtaaagaggtggaatcgaatgtaaagtttgaaaagacaagaaaagagaaaaggaaagggaagggatggggaggggagagaaagagaggggagggagtcggaagagaggggagggaggggaggagaggggaggcaagaaggaaggggaggggagggaaagggaagagaggggagggaggggataggggagggacgggaggagaggggaggggaagggaagagaggggaggggaagagaggggagggagggaaagagaggggaggggaggggaagagagggaagaggaggggaggggaagagagggaagggaggggagaaacaacaaccatatgtctttatttcctgttagctccatttctggcctttggtctctttctcggaaagcaggcctcagtggcctcagtttcttcccagaacctgcaatgccccaccaaggtgacaagaagtgcaaggtagttagctctccttcagtgcttatgagttgaaggtgataacatctgaagaccggttgtcacatttgaatttttctttttatttcaggagtcggttttcactgccaaccaaagaggtgacccccgcaaagcaaccatgttgggacagtccatttgctgcgttttgattatttgctaagagcaaataccttttctgtttgggttttgcttttagaaaaaaaatgtggcagatggtggtggctttccccgtcattgaaagaagaaaggtagtaactctactggtgcactcctctgagttgtgctaacaaagaagaatgctgaaagaaaagggaaatgaacaccattttcaggcagcttctccaagtttttttgacagtgttataattttcctttagcgactgttgaagcaaatatctgtatttatgttcagattaaaccgagagagcaaagactgctaaagccagtaatttctgggctgcaaatgcaggatagctccagtgaatttcagattcttaaaggtttttgctgtagcgaattcatgacacaaagcatttggagggaaacctattagagaagaaacacatcctaaatgagaattactgaggacgggaggctcttgtcatttattggattagttatagcactttacacaagcctgtaatatttgttctgctgctgtggtgtgactggtaaaatgaaaaggtatgtcaagggagtgcttgactgacgttcttatttcttccgtcttcttatattgctgggaggattctaccactgcagggctagaaattaatatcacactcatttgataggaagagcaaaagcaaggttatgagtcagagacattttggtcccagaacaataactctattgattgagtcaaatatgtttaactccaacagcaagaccttccatctgcgtgaaataatcatgtccgttaattgtaaacaggagcatctttgaaagctgagctagaggcggagcaactggtaaaccagatgtcccaaatttctaggtttgtacattgtaattgttctagacttgtgtgtggatattggtaaaatgacatagtcagatatctcacagattttgtgagatatgtccaaagttcccaagttaatttattactaaagttagaatttcacttactgtgagattggaatgccagccagctactgaaccttatgtgtgcctaggggccattttgagacaatttgctgaatattaaaagtacaaccaataatgtttctctccacatccacaatagcgcttagaggaagcatctgggattgagccatctcacatctgtctaatcacattcattcaaatgtgatgggcccaactggcctacgtacatggctgcatatcaccatgggtggaaattaaatcagaatttggctcaggagagagatgaagagaaaatgcacgtagataattggctcagataacattctgtttctggaagtcacaaagagtggaaattggaatatgtaaattaaagaaaaacaggtaagaattcacatgaaccccaaccacacaccctgtgtatgttctcattctcattctctctatggtgcctgtgagcag

SEQ ID NO: 10843 - DNA, 2300 bp, Homo sapien
cctgagcacagtcatttgaggtgtctttaaacagaaaatttcaatgttatctcagttgggacacactttttcaaaagcacgatcggttgccaagaataacaggacttcatattgcagagtgaattcagaggatcaaactccaggagccttcggatgtctgattattggatcatcctgtctggctgcataagatgcatccacgatatttacttggtgcccacaatattccaggattgtcctagttgcttatacgtatttgttctgattttattggtgtgtaaaggagcccttgccatcttttctttttttttctttctttctttttttttttttttgagacggagtcttgctctgtcacccaggctggagtgcagtggcgcaatgtcggctcactgaaagctccgcctcccgggttcacgccattctcctgcctcagcctcccgagtagctgggactacaggtgcacgccaccacgcctggctaattttttatatttttagtagagacggggtttcaccgtgttagccaggatggtctagatctcccgaccttgtgatccgcccgcctcggcccttgccatctttctacttgaaaatgagattgaaagttgtttcagctcagatctgaactaaacactttttatgaaccaaaagttcccacccgcggggcttaagagttgcattagtgccaaataattgacttaattatttttagcttaatgaaaaatgtctcattttctacttgattgattgattctgtatccttttaaaaatttttttggtatgacacaactgtctgaactatgtctagctctgtttatattctgacttggaggaattctgggagccaaatcatagctaaacgtgtgaatcttcactaatcgaaatgggtggaattttctgtaaagatgcaaactggcttgactgtgtccagttattgctcctgaatcctaactgcagtgaatggagggaggggcagtgtactacgcgagagggtgggtcctgaaaactagacatccctgggtgctagccctgtgttgaacctctttctcgtgcagatttggacaaatatttattctgcactttagtttccttatctgtaaaatgaatatgataagaattatgtttacttacaatataaacctcttcaatgagtagaagcagtgagagacatagtataagtaatcaatacacgctaaatgtctcagaagtcatcttagaacattagtagaatgtattttttatagtttgattttaaattcacaaatagtaactgtatatatttatagaacaaaatgtgatgttttgatacctgtatacatggcggaatgatccaattaggcaacttagtatatcatcacctcaaatatgtatcatttctttgttatatgaacattacgtgtttttggactaagtgaaacagagactgtttggaaagccatagaaagtagccaccctctttttatcctcacaccaaagaaaagctgaccacttgctaaccagcccacttatttcaccttaaagtaaattgaatctggaaccctggatcattctatgaaattttccaaaaagctagtcagaggccgggcaccgtgggtcacacctgtaatcccagcactttgggaggctgaggcacgcggatcacctgaggtcaggagttcgagaccagcctggccaacatggtgaaaccctgtctctactaaaaatacaaaaatgagccaggcttggtggcgggtgcctgtaatcccagctactcaggaggctgaggcagaatagcttggtcccgggaggcagaggttgcagtgagctgagatcccgtcattgcactccagcctgggtgacgagagtgaaactccatctcaaaataataataataataataataataataattaaaatctagtgagaaagcaaagtaaactcaaggaagtcctggctttgcgattttgttttgttattcctaagcactgcctcacctgctctagcgtgggagctgagtcgtcaaggggaaagacaatgaaattgctctaagttatcatctctccaggcattgttctgtaataactgtcactgttaacagaagaggcctccctcctgcagtgggaataccaggggtgggcactgtcaagagacccagctttgacttcaaatgccacccagagggacaactgctcactttcagagcaggagcaggaggccagaggagagtgtgagtctaacatctgcacagtgagaagtccaggagaagcaaaaatgagatccaggctggagcggctgtgccagagtaactgttccagcggg

SEQ ID NO: 10844 - DNA, 2300 bp, Homo sapien
ctccagaaattctctccatggagaactttcatgattaagtttctaaacaagcttcactgcagatgttctgggtatctctggattcatttgttccacgtgttttctgggatgtgctaatttgtgagaaaacactctcctccctaccttctcttagctacatggtgtatataacccatgcctttggaagaatcaattttatactttgtgaaggcttcaagacaggatattggtgaaaaatgaggcagcagagggggtggaggggatgtattagtctcttctcatgctgctaataaagacatactcaagactgggtaatttataaagaaaaagaggataatggactcacagttccacatggctggaaaggcctcagaatcatggcagaaggtgaaaggcatgtcttacatggcagcaagcaggagaaagcgtgtgcaggggaactcctctttataaaactatatagatctcatgagacttattcactatcacaaaaacaggggagtttctgggccagagtgaacgcttttatctacctcaaccttttactttaataatacacacaggagatgggagaaattgagtactgtcactcaacttaactgttttcagcttcttaaatttttgcccaggtttctctccttaattccttcagttccaaaatagatgaggaccaaagacaatatttacagctaagctgctcaggtgcctcagtgaaaagaaagaaaactctcttacctctgcccacaggggcagcctatttgtgggtataaagtctgggctgtctaagaaatgtgaacggaaaatatcctgggccctttcaagctgggaactgcttaaggcaaacctgcctcccattctactcaaagtcacccctctgctcacagagatagatgcgtatctgattgcctcctttggaaaaacttatcagaaacccaaaataatgcaaccatttgtctctcacctacctgtgacctgaaagctctcagtgtgggagggggaagcttgctttgagttgtctctgtctttctggatggatctaatgtacttcttacatatattgattgacatctcatgtctccctagaatgtgtaaagccaagctgtaccccaaccaccttgggcacatgtcatcaggacttcctgaggctatcagcagcgtgtcttcaaccttggcaaaataaactttgtaaattaactgagacctgtctcagattttctgggttcacagaaattttatacaaaaggaaaaaagaagtttcctttagtaaaaatccttgttaaaacatctcccattgcatcttaagattgtatattttccttcctattatgttggtgaaactttttgatggcccacatccaattgagagacaggactagctggatttcctaggccgactaagaatccctaagcctagctgggaaggtgaccacttccacctttaaacatggggcttgcaacttagctcacacctgaccaatcagagagtaaagagagttcactaaaatgctaattaggcaaaaacaggaggtagagaaatagccaatcatctattgcgtgggagcacagcgggagggacaatgatcgggatataaaccaggcattcgagctggcaacggcaaccccatttgggttccctccctttgtatgggagctctgttttcactctattaaatcttggaactgcactcttctggtctgtgtttgttatggctggagctgggcttttgctcgccgtccaccactgctgctggccgctgttgcagacccgccgctgacttccatccctccagatccagcagggtgtctgctgtactcctgatcaagtgaggcacccattgcccctctccatcgggctaaaggcttgccattgctcctgcacagttaagtgcctgggttcgtcctaattgagctaaacactaattactgggttccatggttctcttccatgacccactgcttctaatagagctataacactcaccacatggcccaagattccattccttggaatctgtgaggccaagaactccaggtcagagaacacaaggcttgccaccatcttggaagccacccaccatcttggaagccactgccatcttggaagcagccaccaccatcttgggagctctgggagcaaggacccctgtaacacattcatccttgaatgacaaaatgtctggtccagcatggtattataacataaacatggtgggtgcattttcttttccttgaattccttcaccatttacccacattttcattctagcattctcgaatggagcataatcaaagtgaatgtc

SEQ ID NO: 10845 - DNA, 2300 bp, Homo sapien
attaggggaataatcatgatattttctaagaaaacaagtagggatatcttagaattgggatgccacccatttatgtactaaatatacattggtgctggtgggtgtgtgattttggatggtgacgagagtacagttaggtcgggtagggcataagtcaagtccatcaccatatcagatccagctggtctcaaccagctttgccccctaccttgtttgttggggtcttatcagcccaggcttgtctttgttcttgtcactaattctaacagctcctttcctgcagttatgtgaaattgctgcttcatattttccctcttctcctgtgaccacccagcattccgatttaatgggtgtttctttaattagggggtagaacaatcattaggtgctccagaaaaagagaattatatggtttggctgtgtcccacccaaatctcactttgaattgtaattatccccacatgtcaagggtggggccaggtggacataattgaatcatggaggtagtttcccccacactgttttcatggtagtgaataagtctcatgagatctgatggttttataaacgggagttcccctgcacgtgcactcttgcctgcaaccatgtaagacatgcctttgctcctccttgccttttgccatgattatgaggcctccccagccatgtggaactttgagttcattaaacatctttgctttacaaatttcccagcttcagaaatgtctgtattagcagtgtgcgatcagactaatacagaggggatttcagggactccccatgaatgccccctttctcccttaattgggtttgcctggaagagtcatgggcctgtcaccctgactggggttttggctgtttttgctccgtattttgggttttcagttatcctgggtttctttgtgtagttcttgtttcagctgttgtttgggtctttccaccctgtgactacccagtgctattcctgtcccaccttggcctggctgagatgttaccacagctgccttctccccactgcaggcaaatggaactaacttagaatggcgagttaatgggttcagcacaccaacatggcacatgtatacatatataacctgcacgttgtgcacatgtaccctaaaacttaaagtataataaaaaaaatagctcttaaggaaaaaaaaaagtgagctggtgtcaagctcctcctgggactagaactctccaatacgctgtatcaggggcacactcccaggatgagtgggttgtccaagcccacccctcctctcctagtcctgttgagggttatcttcctgtgcccaattttggagacaaaaattgattcttcattgctagcatctatctctttcattgtcatttaatcacaggagtttttccttattctatttcttttgaaattctttcctggctcaggacgccctggggtgctccactgaaggagactactgtgacaccttgcgagcaagcaggcttcctttctgaggttgcaccgagccagccctaggtgtgtgtgtgggggggactgggccctgcctccagggtgggcagacgcagagggtgctgccctggggtttggggagggaagaggctggtgtctgaatgctgttcattcactgcaggcagggtcaggagagcggtcaggctctgactcccaccccctgcagatcaggccagaactgaaatcatctggttgggccctggtagaggcaacttccatgaaagaagagagagcgcgctgggtgcaaatcagcgggaaaggctgggggaagacggaaagtttggatttctcctgccccatggtgcaaagcccaaaccaaaccaactaaaaacctgccgttgcgggaacaattctgcggggaaaagggggcacttccacctaaatagttagcacaggcttatcgtgttaaaaactcaatgaggcaataagggtaaactgagcgattaccctttcttcagtgatgagtttctggtgtgtttccgcatgtttgagtgttttcccctacacatttataaacacaggtacacgtccgtttatacaaacacttgtgtatcccttgttcacacggtcgtgcacgctgctctttttcctctccgtgtatccggaagatggttccgaatcaactggataggatttttaatttccgaaggcacgagctcccctggcatccgcaaatgtgacccgcaatttagagaggaagaggagcgcagaccctacctgtccggagtaacggtcaggagagaggtggggaagggctgggcccctctcggtgtcccgggttcccggcagaagtctccagggc

SEQ ID NO: 10846 - DNA, 2300 bp, Homo sapien
cctgtgtgacaaacatcttaatggcatttcgctgagatgcttcaggtattgggctttggaaaaggggtggctaaatagaactaaagaccttgtggcactcagcgcccagtggtgcacgaaatatccagttaatgccctcagtgatagccattcgttttttaccaagggtagtagaagacgaaatgggttcatgctaccatgagttggtttggatactcacagaaagaatggtcccttcaggcattattcaacttccacagctcctgctcactctcagccactgtgctgtgtctctgccaccatgacacggaacagctttcaccaagtgagtgaagtccattactaaattcgatggttgcttctgactggttagttccctcgaggcctcagtaacatttgacattaatactgatgccctttgtaaagctctctatggctgtgttctcactctttgatcacaggatctgtttatccttacattgttgaaaaccaccccaccaaaaaaaccattttgcttataaacattgatatttattagaaattaaaatggagaaatttcatgatgttgtttctccagtttgttgcaatatcacctttccggtagcctccggaaatctccattctgcattcatgtgctcatgagaatgaaatcaacaaataacaccttagtatccatatagagatattttggcttgtgtggacctcctacaagggtcatgggagccccgagagtttgtggacctcactttgagaatcactgttctacataattcctgtggctgtttttaacaccatgggcttctgtcttcctcctaccttcctggctcctgcttcttgttaggtttccaagggaaggtgagggttaaagacacacatagagcgagagggcggctcaacagcaaatgcaggtatttatgtccaggtaaacctgccgaggtggaggaccagcttaatgccagtgcccaccactgcttacaggctgggatacttgtaggtatggcagggaggggtctgggcagtatggcgtgctgccagggaagatgttgagaagacgttcccacaatgaggcagttggggccttgttcccacagaatgtaataatgatgttccttggactttttctcagcagaatgtgttaaagtcaggcggttgggcaggcaggttctcatggcccgaaccctcgtggaatgtttcactttgaccaaggtctgcatattggcagggagcttacaaaatggtgcattttggattaacaggtctcagtcttgggctcctcgttgtctgacagatcctaaatcttggcccctgctgttccaggttctcttctcatcatgcatgttctctgggtaatttcattcactcctaaggcttaaaacatcatctctctgctgaaggcttctaaatctctttccctagctcggagcccttttctgagattcagatccatgtgtagtttgatctggtgggcactggtacttttgtattccacaggtatctttggcaactatctacttctttctatcttcagggctattctttcagggtcattctagcagtccctagcagagtttactgtccttgtccccgcctgcttttggtccattctccatcattgtagagagatatatttaatcaaatcttctcattcatgattaggtcatgtcagtgcctttccattagtctttggataaaggctaagcattttaaaatgcttaatggctttttgtgatatgactcttacctaaaactctccagcttgtgttttgcagtttgtcccttctcttgaacttcatctttcagtcacactgaactttcaggctctcctaatggctatgtgttctcatcctctgggcatttacctctgctgttccaggaaatggtcttcaacatcttcagatacctagaaggtttgcccctcagtgggaagaaagcttccaactcccagcggttccagcagaagtcctggggctggagagctgttcctgagttgcctgtgatcacataccacacctgatggcatcactgtatccaggctccaggtgcatagaatgttgtgaggtcatgactgccagcattatgaccagtcttggaactaggattggggtggggttcatcccacccagaccacagagactgaaaataagaaaggggtgaggcctaagggacaatcaggatgtttttcagagagaagtgtggatgctggacaggaagaaccacagataccagatacgggtactgttgtaactctgttctccatgaaaagtaatttgcttttgcttgatactaatctttttgccctc

SEQ ID NO: 10847 - DNA, 2300 bp, Homo sapien
tatgtctgattttttcattgctactgagcttattactgaggacccagtgtcataaagtatttctattagatcattcatggcactgggttcagacagtctaatcttacaatgctaaaaaaaaaagagtcaattccaacagtaacttttttctccagaataattgcttaaatatctggtacactctgagggcactcttggtttctcttttttaacaagattactgagttgaataagtcagattatgttattatttcactattttgtttgggtttgggaatgaacaattgttaatttttttctgcttagcattcctttgcccttcctgtcctaacagtatctaagaatgctatggaaaaacaccacctgtcccctaccttccagctttgtacttcagaaaaactgacccttttttaggcctcggtagggggcctcctggcataggctgggctactcaatatagtctccccctaggccacagtgatagggttagtgacgacacatgacccactagagacaatgacatgctgcatggcttattccttcttctactgtgacttgtggaaaaggaaccctaaccagttcttgatggactgaacaacatttaggagatggtgttcttgtcaccttgtggagcttaagcaaaaagccacaccatggaaagcaggactgagaaatgaatgaaaaagcatgttggtgccattggttgcacctgaatccatctgagcctgaagccagtctactcctagtgactgcatgttttatagaattcttttaaaagaatccttactgatatacataatggccaaagaagaggaagatcagtctcaattagtgagaagtccaaagcaaatggactctgtggatggtcccatcaaaatgaagtcaaaggttaagggcacatttaagttgtctcatggtgtgtttttggtgggtggatagactataaaatcccacttagcacagagaaaacaaactgaacctcagaggacttacgtggtttctctcagtacctacagtgggctcatgcaggcctggggctccagctcaggtgtctcagcttctcagggcatcagctgcctcctattcaggtagtgacagagctactaggattgctcagtgaacatccatataccagctcctagattcaacagttaatattttacaatgtttgctcatcacgtatctatccatctggtccactgtccaccctttaatccatcttatttcatgttttaattggaggtcatcttacttgatgcacagatttttattcatttggcaaatatgtaagacctccctctaggcacttgggatgaaacagtgagctaaataccaaaacgtttcctctcaggaggctggacattttggggggattgatgattgatagaagagtaacaaaacgtatacataggacatttttaggcggcaataaatgtttttaaggaaacagaataggatgaaatgactgaatctctaagacacattccagctaggaaaacaaaaaacattctaggtattttaacagagggatttaatacagggattatttacccaggtgtagaaaagctaaaaaaaagcttaatatttcttgagaaaagaacgcagaggttaagagttgcaagaaactgttaccactcctatggttggagggacagagggaagaggtgatactgctagtgcgcaagtacggggactgtttggtggaagttagaaccatagtcgtagctgtcctggatgatgttgctggaggatatgagaagacggtaaggggagctctcaaggagttggaaccacataggagacaaagccattagcagaaaatgctgcaagaagcaggaagaaaaacacatactcgagttcttccttcttcttctcctccaaccttgcaccagtgcctccaaattggctgaacctgctgaaagccggtgggagagagcctgggaaatgtatttcggaggcatacacaacagaggaaggtgtctgggggcccaggacaaaccggcagttgacagcgtagtggcttttcagaaacaagtcttgtcagaaatgtgactttttctggggaaaattggactagaagcgagaacaagaactgttttctgggaattccctctatgggaaagtcatggtggtatcgactgtagattggcagatgacagagggcctctttgagggggtgccagatggctgaggatgcctgaccaggggctgacatctctgcacacatcctggtggagaggtttccaggctgagcaaggagccagtaacagccatgaagacagcacagaggaagctgtgtc

SEQ ID NO: 10848 - DNA, 2300 bp, Homo sapien
ggttgctggttggctgggctctcaggggtggtcaagaggttccctttattctgaaccccctgtagggcgtgctagtcttcaatggagaagttgcagctgggatcagagaccctcctggcaattgcatgattcacatctcagcaataacatcttgatgcataaagaagaacactgtacttacaatccccggaggcagaggagtagacacacaattacatggcaggggcttagttcatgattaggatggcaaagatcaggcccgggatgggctggctgtataacgctaaatcaaagagggctcagatttatgaaaccaataaataaatgaggccccagacatctgtctggagttgcttggggaaattcattgatttcagaaaaaggtatatattaatagtttaaaaacataagaataaaaatcacagagttcatatcttcagcctgaatatttcttcctacttcaagattcctccatccaactaccaatacctgtctccagttagatatctactatgcatctttaaattaatatgtctgaaactaaactcctgtgtgccaccaccacaatctgcatgaacgaacagatgaatgaatgaatgaatgaatgaatgaatgaatgaatgacttaccatgaccatcagaatcaaggcaccttggtataatatctctttccttccttacagctgaaaatttagctcttgtctttgaagattcacttctgcctctctctagccctgaattggtctctctagcaacatgtgtctcccctctgaattcctgtatggatttcagactaatggcagccaaaccagtgcctgcacccttccagattgtttcttctaatttagtcctctgctggtggtctccatgcactctcctttgcatattcatctgcaggtcatcttcacacattcttatcagcctaggagtcttctgtgcagtggtctcttcctgccacatctcccctctccccaggagattagaatggcaaagccacactctatgggatctcaagaacccaagtgtgagatttgctttcagtatttagcagaattggtgtttctggggcggcaatctcctcctggagatgtgttaatcatttacagaatagcctggactagtgtatgggccctgcccttagagccaatgccacatttatttttattttgcgagatctgcactgacatgaaaaccgaaaattctattgacgtttcctgttcaacctaaaagctaaatccagttcatcactgaaatcccacaatgccctgagacaaatagtgctttaaaatatgtggtgatttttaggtcaggtgcggtgtaatcccacacctgtaatcccagcactttgggaggccgaggcgggtggatcacgaggtcaggaggttgagatcagcctgatcaatatggtgaaaccccatctctactaaaaatacaaacattagccagcgcctgtaatcccagctactcaggaggctgaggcagaagaatggcacgaacccgggaggcggaggctgcaatgagccaaggtcgcgccattgcattccaacctgggcaacagaacgagactccgtctctaagaaaaaaaaaaaaaaaaagtggtgatttttttaaaaaggagtggttcattcagttaaatgggaagagttgtaatgagggactaagtggctaagttggctggacttcctgggtcaatagggacttccctaaggggactttcccctaagccaaaatgagtcatagctgaaagctaagggatggaaacttcaaccaatcaaaggggactttcccctaagacaaactgactcatagctgcaagctaagtggttgaaacttgaaccagtcatatagggagtttaagctctagcttcagcctgatgtttttaaccaactaggcccgccaacccacaagcagatagaaaataagctgattctataggacagaaaaaggaagagggcaggggtcataaggggatgtaagcataagatacccaagccagaaacagcaacccttccaggtccccttcccccacgtggaagctttcctttcactttcgctttaataaatcttgccgcagcacactctctaatcgagctgtaacactcgccactgccgtccacggcttcattccttgaagccgtgagaccacgaacccttcgattgagaagaaccttcggtcggaagaagacttctcgtctcagtaacaataacaagaaaaacagcctagactagacgcacatcaggaagacaggtagtaacaaaatattttgttgtttgtacttttagtgttgtctctaagaca

SEQ ID NO: 10849 - DNA, 2300 bp, Homo sapien
ctacagagagaaagcacaaaagatttttagaaaaggtgatactgttggcacaggaggtgggggaaaaatccagttttccaacttagtgatcatctgttgctagttatctttccttctcccagatctggttatcggtggatcactgtgtcctctgaaggctctcccagagctgtactggagattgcagggatataaggaccacttcataaaagctcacttttttttttttttgagatggagtctcgctcagccgccctggctggagtacagtggtgcgatctcagctcactgcaacctctgcctctcaggttcaagtgattgtcctgtctcggcctcccaagtagctgggattacaggcacccgccatcatgcccaactaagttttgtattttttttttagcagagacagggtttcactgtgttggccaggctggtcttgaactcctgacctcgggtgatccacccgccttggcctcccagagtgctaggattacaggcgtgagccactgtgcctggccaaaagctcacctttaattcagctctatctaacttgtttctccggtgcatttgcttttctcaaggcattgagctttctccagtggccggagctgctaattagttattgcaagcttctttccttaggggagataaaaaggttttgatcaaatcaaagtgcttctaattctgattcatttcccttgttcttgtttcttaagtccccagcttagaagggggttggttgatgcttccttttacttcaagctgtttcttctctaatgttaaatggtaaatccatacctgatgtgtctgttattgataaagttcagatggcatttcaagtttctgcagaagctttctcactttctgtgtgagcattttctaaatggaaagattcttccttccataggatgctttcaatttgagttctaagaaatttatttattagatttttctttttctttttttttttttttttttggtttactatctgtcttctagtttttttcctctaggagaaagtgcttactttaaaagcacagataggtttctcaaaagggtctttgcctaatggataatgcggtcttccttttataatccactctttatattgaatttcagatttccaccttctacattattttctattggctggtagatatgtgatattcagaaaggtttccatcagacacttaaactaaatctatcatttaggatttgtgttctgtattcattagaattccaataatttccttctttctattcaagtccttctccctttctttccagccttcaatttcttgtaaaagaaattttcaatgtttttaaagatcagaaagtgttttcttatgttgtgaattattcttctgccaggctcgtaagctgttttcactcaagtgacttagaatggccaggcttcatcttacagaaaccatatctaactttgaaaatgacccatatacacacttcaccatggagagagggggctcccttttggcttattttcaacaaggcctcttttatcattacacaaagagatagacctattcagattagtattaactgatgacaaacccagtgtatctaactcactcaaagagctggcctgtcttgaaggaagctcaaggatttcctgggtttatgatctagttaaacgtgttaagaattttacaatatttttcactttgtcagatagccttttgattacttgctttgtccatgttaaattatgtattttttaaagactgttaagaaggattacttaccatcatctccccaggaacctagaggacctgtgtatcccctgagccttcagacacccccattgctaaggcagagctgggactaaaggcttgtggccatcagcagacctagcgcagtagccaaggccctgcacgcctgcctttggtggccagacaccagcttagacacaagactacactggaccctggggaatgtggagcttggaatgcaaacaagcacctggcaaccaggacaggctaccagggactagagaaccaggaggcttcattgggtaacaaagttcttcccaagcattctcttgcattccacccggggaacaagacagcaccgggtttcacactggcaaggcaggaggctgtgtgctgccagaacgaccagcagggggcgcaaaggccacgccaggcacctgctggcctcagagaaaacagaaagggaaccaggaagcccactcctgctgtcctttctctgcaaggaaatgtgccagggcactgcagcccagacagtcggcagtagaggacccatgaaggtcattatcactg

SEQ ID NO: 10850 - DNA, 2300 bp, Homo sapien
caccctgccctctaacaaaggagacacagttataccctattatcaagatttttattgtatttactcttcttgtttcagtccctttctttacccttgaagccttaaagtaaatctgtgacacctgcattgcttaaggatttcctttaggtgattaaatgagatcagggtggtgtctattatgacacaaacaaaacaaaacagtactatgatgggaggtacaggaacccagagatggagggagaggcaggggtaagaacaagagcaggcatcttccttcctcccaggcacagaagcaaagggaggctgtggtgctgacatccccactgtgtaaggagggggagggctggagccctgtgtttggacacagaagagaaagagaatctgagggataccagaggcagggcatctggtttacccacaacatcggttaaataaacatcatactgattttaccattaaaactgggtcccaaaagagtcatttattggaaactgtttatctgtttacaacgcctgtgtgtatgtcctcgaaaataatgtgttttccttaaaaacctgagtgaagaatgtccccaaatgtaccatcctgtatctacatggcctgattagaggccttaagttccaggtgtcctttaattccactgctctgcgttttgctctcatgaccaaagagaactgtcaccgtaagcctatcactatgtattttctgagatgatatgaaggaggaatactttcaatagtaaaaactaagagagggacgtaataccattggttcagtgtcatcttacacatcttctgaaatatctagaggagaacaaacaagtataaataaaaagactccttttccccacttacccattggctagtaaaacccaatgatttgtagcaccatgcatttttcccttcctagtggcctaggaaagatgctcaacaattttcattatatttgaatgttgatgtcaacttgtccctaggaatgaagggccttcaagcagttaggcaaaatactgtcgcacaagattctgtcctgcttctgggttgcaggaaccacctgaattgccatctaacccctggggcaagtccaacaaggaactggctacctgaaggaggtgccccaggcaaaacacagatgaggataacaaagttccacggggaggaacctacctggagaacaacgagaagagtcctgcttcagctgtgccaaagaatgggttctttttcttatggcagccacatgcagccacagcggtggtgttgaaatgggaaaggttcccccgtcccccttgcagggcgtgcgatggggtgtgctcgcctcttcagtgccccgttggtcatacctctagtggggcatagagatgggcaggttgtggggctccaaccccatggcagtgtctaagggtggatgtttacagctgaagccccagagggcgtgtgttccagggtgcgctcttagttcacggtctatagctcagttagaccctctaccttgtcataaggccagagggctttctgtatcccgggttcttgccttggtgtaccggaagaatcggatcacacgtgggcttggagaatgactgcaaaatcgtattgagtggaagtaactctccaccgacaggagagtcagaaaggagatggttttcccccggagttgggcagctccagaagggagatggctttcccctggagttgggccgctgggtgcccgggctgtcctcctactgcccaggacaaactccacctcgtcccaccggtcgatggcctgccggggagcccgcgggcgagccggcgtctgtaggtgtgttcttctgctgacatgctctccgtgaccagccgcttctgtcttcttccactgatgcgttcctctcgccctccagcagcttctgtctctgccttgctagggtcgtgggtgtttataggcccaggctgggggcgtggcgggccagggtgctcttggaaaagcaggagtgcctgtcctcgcctaggtccctggggctagaggcctagtcacggactctgccctttctaccccgcgctttccttcccggcttccgtatcatttaaagggaccgtgctcttcctttcccagcactccggcttgagtgttaaatggccagcaggaattatccactagagaagcggaagggagagaatggaaatggccgcatgcagctcctctccctcagacagctcggggctcagcggaatgagcacagtctgcaggacaagtgcggaggacttcagtcccctctactgtatattggctttaggactcaagttgtccctgaaatagaggaaggtgtt

SEQ ID NO: 10851 - DNA, 2300 bp, Homo sapien
cacttctaccatttcagtcaattaaagatgcaatattaagatattctctgcacctcacagaaaaccagagcacgaaggcctttaatttcccaggattggcccatgttacagaaaggaatcctaacagatttgaacatcttctgttgtaccatactagggtgcttggaaaatatgttgttttctgtctctctccaggcatacacgtaagagagcacttcacaaaattattgactgagaagtggtcatgtgtcttgttttggccaattaaatgtgagcagaaatcatgtgggtcacttccaggtgtaagatattagaggcctgcatgcttcatcttactcgtttgtctctctttgccatgacagccaacaatcttccggaaaggcaatgcctagtaagtctggctcagaggtcaggacaagcaatgtcattgtggagcagcctcctgaggttaatgagaagcctgaaaatcctaagtaatctccaaaaaccttctagaattaatgcgtgaatttagcaaggtctcagaatacaaggttaacccccaaatctaccaaatttctatatcttaccagtgtataattagaaactcaaattaaaacacacacacaccccactgctatgtagaatagctcccctaaagtgaaatacattgatatagatttaacaagacatgtaaaggttggtatgttggaaattacaaatgctgataacagaatcagtgactacctacataaaatgagaactaattcatgtcaacatagtaaagatgttacttttccccaaatggatctttaaatttaatgcaatactacttaaaatcccaccaggatttttatagttatagatatgctaattctataatatatatggaaaacaaaatgaattagaagaccaaaacaatgtcgaaaatcaaaaaagtagttggaagaagccatacccaattttaagacttactattaattgatagtaatcaagacattggtgcactaaggaagagatggctactcccaggacccagactgtgatctctaaatgctattgaccagtaaagagaaccagagccccaaaaggaaatggctgattccaaatattggtctgaaaaggtacaaaatgaacctgtatatcttgttatgattgaaagcaaggacattgtcaactattaatgcaatttagtcaaaaaagatacagggatctgaccatccctttatacaggccatccctctggataaagaagtgaccatctgaggattaaaaaaaaaagatactggcaatgctttgtaacacacaaaacatagccaacacgagtaacgttttgagcttactagattaccatgttaccattttgactttcagaactgtaatattggccaggcgcgatggctcacacctgtaatcccagcactttgagaggccaaggcggacagatcacttgaggtcaggagttcaagaccagcctggccaacatggtgaaaccccgtctctacaaaaatacaaaaattagccaggtatgatggcaggtgtctgtaatcccagctactcgggaggctgaggtgggagaattgcttgaatctgggaggcggaggtttcagtgaaccgagatcgtgccattgcactccagtttgggtaacagagtgagactctatatcaagaaaaaaaaaaaagaactgtcatataataaatttatattgtttttagccactacatttgttacaacttattagggtaacgttaagaaacttttctattttccgtagaggccccggagctccttagctttgggataaactggtgcttaccccaactgtggggtcagagcgtggaagtgagagaagggaaagaccatcatggtctgctgtggtcagggaaggcttcctggaggaggagaaagtggaggaagcagctgagcctggagggatggggtcactacctttaaagcatctgtcagccatggggatctgatggtttttttattttttattttttatttttattattattattatttttttacaaacccttgtgtggagatctgactttcaatagatcgcagcgagggagctgctctgctacgtacgaaaccccgacccagaagcaagtcgtctacgaatggtttagcgccaggttccccacgaacgtgcgttgcgtgacgggcgagagggcggccgcctttccggccgcgccccgtttcccaggacaaagggcactccgcaccggaccctggtcccagcgcggggcggggcggcccgccggcggggaccggctatccgaggtatccgaggccatccgaggccaaccgagcc

SEQ ID NO: 10852 - DNA, 2300 bp, Homo sapien
aattttggctttccctgtggaagaactctgtgtgtgactatgtttttatatttgaaaacgaggaaagaaatctctttcatctgatgatgaattttgtttcttacatgggccttcagcaaagttcaaaaactgtgagatgtccttcatggagcaactgctggaatgcgcttcatagcagctgttaagataaataattcactgttaataggttccaggggcattcctgaaactgcccaccaagttgggtaatggcataatggcgcaaagcaaagagaaaatatgattatttattcccattcacccttgctggttataataaaaaagagactcaggctctatttcctaatcttgtgtgtgtgtatgtgtgtgtgtgtgtgtgtgtgtgtgtgtttagatggagtctcactctgtcactctggctaaagttcagtggcatgatctcggctcagtgcaacctctgcctcccggggtcaagtgatgctcatgcctcagcctcccgagtagctgggattacaggcgcctgccaccacacccagctaattttttatttttagtagagacaggttttcaccatgttggccaggctggtcttgaactcctgacctcacgtgatctgccacctaacctggctctatttcctaatctataagtcaatcatgactgatgtacagaggaacaatatatctttgcagccttaattctttggtagaagatagtaccattttggttttacaagaaatctatccttctgtactcaaggttcatttcatttttaaaaattggcatctctactgtctaaatcacccaatctgaggctcagtcatgccatttaagatccacagccgattatggagtggggcagagagaaagtaggaagaaaacacattagatgcaggtttctaactgacccacagccacagataaatgtatttgttaatattttgaaagagttatacttgcatgcacctatcagaaataagaatctttttaatggaagcatttaaagtataatacattgtacatttttttttccatttgtcaataaattaagatggctgagcatgtgggcttggactgggtctctcccagcctctgagagatgatgccaaaccccatctctggatgtctctccccttccttcttccaccctatcccacattgggctgcataattcaacaggggcctccactgacattatctcacaacagagttattgcaagaccactcatttattatagggcaactctttgctgcctgtcacttcccttaggtttcaacgtcagtcaatgcaggcaccatacctgctttcctgagtgcctcctgctatgtagcaagggtctaaccctcaccatatatttgaaagtaaatttgtgaggtcaaacataattacatttgcctggcatggtggctcacacctgtaatcccagccctttgggaggccgagccaggcggatcacttgaggtcaggagttcaagaccagcctggccaacgtggtgaaaccccatctctactaaaaatacaaaaaattagtcaggcatggtggcgggtgcctgtaatcccagctacttgggaggctgaggcaggagaatcgcttgaatccaggaggctgaggttgcagtgagctgagactgtgccactgcactcctgcctagataacagagtgagatcctgtctcaaaccaaacaaacaacaaacaaaattctccaggtgtggtggtgggtgcctgtagtcccagctcttcaggaggctgaggtgagtggattgcttgagccgggagaaggagtttacagtgagcctagatcacaccgctgcactccagcctgggtgacagagggagactccgtctcaaaaaacaaaaccaaacaaaaaaagataattggaagctttgacatggttgtatcttagaatatgtgcaaataaaaatgcaaataaaaaatgtgtaccaactcactgaggcattttgttgaggtgatgtatcattttcctcattgccagcaggtgacacaagaagagtttaaaacaacagcggcttttaattgcttacagagctttctcaattaaaagtctagtgttgtgactgcttaaaaaatcagatcccattggctgaggagccaatggggcgaagctaccatctgtgggattatgactgaacgcctcttaagtcagaatcccgcccaggcggaacgatacggcagccccgcggcgcctcggttggcctcggtcggcctcggatggcctcggtcggcctcggtcggcctcggtcggcctcggtcggcctcggatggcctcggtcggcctc

SEQ ID NO: 10853 - DNA, 2300 bp, Homo sapien
agaatatcagcatttgtgaactcaaaagtatctgagacagatctcaatcaatttagaaagtttattttgccaaagttagggatgctcccagtgcctaaggttggcgaggtacggcttgcttttatgctttttagggaggcataatacatcaatcaatacctagaagatgtacattggttagatctggaaaggcagggcaatggcaactcgaagtcaagggaggggggccaagttataggtagatttaaaatgttctaattggcaattgtttgaaagagtagagacggggtttcaccatattgcccaggctggtctgttggccaggctggtctcgaactcctgatctcatgatctgcccgcctcggcctcccaaagtgctgggattacaggcgtgaaccaccgcgcccagccatgttcatccgtctggtcccaccctgccctccctcgcctgccctggccatcctaaagacctaaaaccataaaaaaagaaaacctaggcaataccattcaggacataggcatgggcaaagacttcatatctaaaacaccaaaagcaatggcaacctgaaatcaacagaaaggaatgtctggttactatgataaggaatagaggagtcaaagatttgtcatgaagatgaagcctgcaggtatcaagcttcgaaaataatagattataaatgtttcttatcagacttaaggtttgtgttgatgttaatgctggtcagcttttcctgaattccaaaagggaggagggtatcacaaggcatgtctgacctgcttccctatggcctgaaccaactttgggatgcccttggctgaggagaggggtccattcagatgatttcagggccttaggattttatttttggcttgcacttttttttttttttttttttttgagacagagtcttgctctgttgccaagctggagtgcagtggtgcgatctgggctcactgcaacctctgcctcctgggttcaagtgtttctcctgcctcagcctcctgagtagctgggaccacggccacatgccaccacgtgtatttttaatagagacggggtttcaccatgttggccatattctttctgaagcttgctacctgcaggcttcatctgtatgataaatctttggactctctactccttatcatagtaacccagacattcctttctgttgatttcaggtcttcagcattaacatctccatctcttgaactagtgatctgcccacctcggactcccaaagtgctgggattataggtgtgagccaccgcgctgggccttggcttgcagttttgatctcaggattggtatgactttggagaagacagaggacacaattgttaaagagtccagaatctgggagaataaaataattttcagagactggaacctcaacctagtctggcaggtggaagaaggataaaaagttctactcttagtttaagaaagttttcattaatttcaaaatatgcagcataacagcaacatctgtgtgaaaaaatcttggcatctttataaatagtaagagccaatgaatcaaatgaagaggtcgccatgaggctgatgtgatcttcgtcagcattagtcagagcatggtcccagcacaggcaacgctgctgtacttcatgccaaatctggtccagaagggttgtgtgtgtgtgtttgactttttaaaatttgaatccatttccagcatgcaaacattgttaatttcacatctggattccgagctcctcttgaaacaccatgtggtcaggttgtcctgcgcccatactcctgccggtcatcatcatctggagtggaccagttgtctacagaggctctccactccccaccactccaactcactgtaatctccaccactccctctcgccttccacactgagggtgaggggctcttgtcatttcttgtcacatttgtgctactggctttctgacagtagatttcagagtgatgtgagatatttcttttacactggtctccatcaaaaatgagcaacagatgatagccctcactctgtcactccaacagagaattctttctaggtcataaacagaacaatgggaagtcagattgtgttctgctgaagagtgtccatgggctgaaggcttttgaaatcaaatcacagtagaattgcctgaaggaagtgagagtgtatagcctgatgccgagaagaaaaagcctgggggtaacatacagagtgagaactgacagctctttttaagtctttcaagggccatcatgtggaagatggagtaggtttgtgctttttatatttcaacaggggaagttaaaaag

SEQ ID NO: 10854 - DNA, 2300 bp, Homo sapien
gaccacatcactgcactccagcctgggtgacagagtgaggcccgggctcagaaaaaccaaaaccaaaaacaaaaaaccctctgaactgaacctaccagtttatggtttcaggggcttctgctccaggtgggaagatcttggctgtggctctctcgatttacctgtgtctccagattttggaattgcagtttgcttggaaatctcagctctcagatgggtctaagaatagtgactgattttcagttttcctagctttgctttgttgtaaggataggagtcatgatttccaagctctttacatgttggaactgaaacagaagtccccttccattatgttttgaaagatgttttgaaagatgggctttaacatccaaatgtaacctgaagttgattcaaggagcagctgctttatggtgcagggaatcccggatcccctatgtacagagcacggtctgaggcatcacatttcaggaaaacgtggaaagtggcaagtgaagggatgggaggggcggagggaggggcccgttcagcagctgcttgaagactctgcttctttccctcttgactggggcaaacgaagctgccagaatcacgtcattcctaagatgacttccctgctgcttcacttcaggatgatgatgtgggctagttctgtcaactgaaagatcctagctggagcaattaccatgctttcagcagcaggcagttggaaactctgactcagggtcatttaaataatgggagaattctctttttttccacacatgaagagctgttaagatctagggaagactacaaagttggttgattgaggagctaatcaatgtcattacggatccaggttttttccatctgctctcctgcctgtagcaaagtttccaatcaaattctagttcccctactccttccttgaaagatgatttctaaaacaaacagagctatggcttttcttattctctctctctctctctctctctctctctcacacacacacacacacacacacacacacacagagagagagagagagagagagagagagatgcacctacaacctcactgcagttatacactgtaggttgacccaagcaggatgaaggcaactgactccatcctcagctcaaggaatagggctttaattgtatatgaattgtcattgccaaggcaaatgctcttggtgcaagaatgaacccatgacctagggtgacccaagcaggatgaaaacaagggctaagaaggcaaccaagcaaacactgatggtgtttcttaataactggtgtgttcttgagaagcacctaggtgaactggtgtcaacctaggtcatgggttcatacttgccccaatagcatttgccttgggaatgagaagtcatatacagttaaagcactattccttgacctgaggataaagtcagtttttcctaaagcctctaaggagtacacctgaataaaatcagagctgtattaggaagaaaagggattccgatgcggggcaggcacctaaccgtgcccactagagtttgcaagcctggcccactggctggtccccagaaggtgctcagtagttagaaggtaaaagaatgagtccatttctcaaaaccccattcccattcccatcactttcccctgctgtggtctgcccactctgtagtccatcattctggggccacggtcactgggctgtctactcatgttcccctgatggtccactatgaagagaccccccagccgcctcatcaagctacaggaagactcattcatggtacaggagaggaggcagaaggtggacatattccccatactactgaaaacacatccagatcttagcccctactgcagtttccatggcccaacgtctagattagagaaatgccacatttccagaatgatttccagaaaggagtggattctttcctgtgatggttaatgctgagtgtcaacttgattggattgaaggatgtaaagtattgttcctgggtgtgtctgtgaggggtgttgccaaaggagattaacatctgagtcagtggaccgggaaaggcagacccaccctcaatgtgggtgggcaccgtctaatcagctgccagtgtggctagaataaagcagacagaagaatgtggatagactagacttgctgagtcctctggcctccatctttctcccatgctggatgcttcctgtccttgaacgtgggactccaagttcttcagctttgggattcttggacctttgaccacagactgaaggctgcacagtcagcttccctgctgttgaggttttggggactcggactggcttcctggc

SEQ ID NO: 10855 - DNA, 2300 bp, Homo sapien
gtgcctgcagtcacagagcaaggagcagtggcttgtgaggttccatttccacatacaactctgtgagctagaaacagaaagagcaaggtgcagagagaatgcattgatatccacgtgggacgggcaagagaggtttccatcccaacttctgtcctccggaatgacgtaacaatgacctttggtgtttttttgctcagtcattgccaatttccctgaatcaaagttttggaaagaggtccataaaggctttttacttctaaaatagcttgtgaaagaacagactttgctgggggaatcagtgacatgtccaagcttacgatgatgcaaatgtagtcatctgaattgaatcagagagtcatcaccaaaggaaattggccctttttgtggtcaggatcatatttctaataatatcagttatgttttacccattttccgtggaaacagcacacaataacagatagtctataggaagctgtcctgcagtgaccttcatggcaggggagtttttaaaggctgagagtaattgtccaaagcagtacaacagatttggaggagacctggtgaaagagcccaagtcttaaggatgctagaacactcaaatcaattctctctgctgcaagcaaatgtaaccggattgctgcaggggttcgactatgattttccagagtcttagcatcctggatgctacaagcaaagtgaggacaaacatgcaactgacacagcaggggaggtgagaagggggcttcattccatattgtttttatataactcaatccttaggttctctttatacacaccaagcatattttaaactttccctggcttactttccagttaaagtcattgttagttttagagtaatctcattggaaaatcaaagatctagagtcatcaccaactattctgggtcattcactagtaaaattctaactcttttaaaacaaatttgtcagaaattctttattatgttggttgtactaaataaaattcactatgagtaaaatctcctcaactttctctgtaggtgcttcattcactcactaattcatccatgcatccatccatccatgcatccatccatccatccatccatccatccatccatctatacttacacaaatccatccatccatccatccacccacccacccacccattcattcaaccattcttctatccacccatccatccacgtacccacccatctatccatccatccacctacccacctatccatccatccttctatccatgcatgtatccacccatcaatccacgtacccacccacccatccacgccccatccacctacctacctacctatccatccatccatccacccatccatccaccctttcatttattcattcacaagcacctaccatgtgccgggctttggtctaagacctggggatcccatggtgaatgtgagtcacttccctgccctcatcatggtcacatgcaatgaaggattcagacaatatgcaagaaaacaaataaacaaacacaatttttaggttatgataaaatgctatgaagataataaatgggtaatttgatgaagggagactggaatgggagtgacggagccacctgagacagcgagtcagggaaggctccccagatgaagacatgggggtgctgtcctctaagcagggaaggtgcaaagcagacaggccaagaacaggagctgcaggcacaggatccagcaagggaaagtcctgaggcaagaataagcttggttagtttcagaaacaaaatggacatgggtagatggtatgtgtatttgctgcctgaacacatttcaaaaagtttataggtcaggtttgaagcatttaaattaaaaaataatcaatgaatatacacagcatttgaagatgtttttgtgtgtgttatttttatttctagttaagttttatctgatcaatgtaaggaatgcacgaagattcactgatgccacagggagatcaatttacatcacaaaagcagttagacattgctacatctgttattttgccaggaattcccccaagtacaacttttgctagacggtctttcctgaaaccatctgaaatcatgagtcagtatgtgccagctgtatttaagaccaaaggcttaatgtatccacatctggggtaggagtcagatgtaaaacaagcccaacattgccttggaagttctatagggtaagtaaatgctaacattcactttcttgcctcagtggctgtggctctcacctctactactataactagaagcttaatattcactttcattctttgaaaaggtgacagtgtttc

SEQ ID NO: 10856 - DNA, 2300 bp, Homo sapien
ttctcctgcctcagcctcccaagtagctgggactacaggcgcccgccaccgtgcccagctaattttttgtattttcagtagagatggggtttcaccgtgttagccaggatggtctcaatctcctgacctcgtgatccccccgcctcggcctcccagagtgctaggattacaggcgtgagccacagtgcccggccgatacatggttcttaatatgtaacaggcattgttatctagcatttgacggtgctcatttcagacaaagaaaatgaggctcagagaaattaagtaactttcttaaatcacagagccactaagtaatgaagtgtgaattcaaaccccagcagccgagccccagccctgcttttaagtaccacaacacatagctcacttgtgacacttgcagatagccaaaagctttattctattggaaacatatcctactgccctctagaataaaattattggaaatatgtgatatatctttaaaaggaaactaactaatgtaactctttggagcctgggggagcctgtgctgttctcattaagcatggttattagtgagttgatttcaaagtttattaaatgagtaagtgtgggaaacaaattaggaaagaaactattcagaggaataaaaatgacagaaacacaagttttaaagttataatgtcctcatgttacaaagcatgcgtctgtgtgctgatacaggcccatatatattgaattcctacagactgatggttttgcaagcacattagatctcttttggaaagaataaacacacatatttgataaagaagtttggtagtaggaaaatagattgggctgttgagtgcaggtgattgtcatgttctgtggtataaagataaccagctatggagtaaagggctggatttgattgctgtctctactatttgtaagctctttgaccttgtgcaagttaactccttgtatctttcattttcttatctgcaagactgggaaaatagcaatatgtgcttgccaagttgtgagggaggattaaatgcattagtcttcatgtatttcttaagacatggtactagatcaggggttcaccagctcttttctgtaaaaggtgagactttgaaatattttcaacattgttggctaccaggacagaactgcagccactgagttactgaattcttttcttttcatgggaaaatagccatacaaaatgcagaaatgaacgggcacagttgtgttaacaatgaatcttcatttacaaaaacaagcagtggggcagatttgacctcaggattgtggtttgctgactgcttcacaagataaatgtgggttatatcatcaaaggatttcgatgagaagttagtggcatactatacgagaagtgtgtggtacagtatcttgcctgtgaaaggtgttcagcgaatgatagttatgatgataaggcagatattttatatgtaacctagaaaattacatacggctttcagatcttcagaccctctgttcttccttcttaattttcatcaaggaaggttaagaagtaaggttaacttagctaagaagcaactacgtgcaggaataaaggtaaggaaaatgacagaatttggttacagttccaagattcctagttcaaaatagaataggaagaaaggctgattttctcctgatgtggccttccctgaccttgcagtatctccgcagaaggctgtagactctttctcctttagaaaacattaaaggtgactaccttacattagtaacaggtgtattaatgggggtgctgatggcaggcagggaacaggctgaatgacatgaattcttcccttcataaatgggcatctttccatgaaaacacaatatcatttgttgaatgtcaagtagactagaatttcagacctggaaacatttgccttgaagcatcaaaataattgaatactgtaatggctcagcacctggcttaaagttataataccaggatttacattattcttagccacaggcatattttccaccagcttttaacaacccaccacctccttttccccttccctcccacacaataactgggatgacttgtctagatcttaggcaacaattctcttagcacatcagctcctggaaacaaatgcacttaaccagaaaaacagggacatcaaccagcaaagatgcatcctcatttaatagagcttgaaattactataatctgtaaagtacagcgagaagaagaagtttcacctgcctgcacatctgtcgttgactctccatctgacttggagggactctgagggaccaacctgagcctgagaagaggcaag

SEQ ID NO: 10857 - DNA, 2300 bp, Homo sapien
gtttgctgcacctagcaacccgtcatctaagttttaagccccgcgtacgttaggtatttgtcctaatgctctctcgccccttcctccccacccctccctcctgacaaggcctggtgtgaaccaacccaaatgcccatcaatggtagactgaataaagaaaatgtgacatatatacaccacggaatactatgcacccgtaaaaaagaatgagttcatgtcctttgcagggacatggaagaagctggaagccatcattctcagcaaactaccgcgggagcagaaaaccaaacaccacatgttctcactcagaagtgggagttgaacaatgagaacacatggacacagggaggggaacaacattcttttcctttatcttatatttgtatgttgagaagctaagaatgattctaatttaggcagttcaagcagtgtttttgaatcaattctactctactttatgttggatgtctccacaatggaagatattagaggaatattggagaatagggtgatgaggcaataggggttgctatgagccattgaagacaggctagggcatgaccctttttgttcctgaaatcactctgggtgctatagcaactcatcccctgatggagacattatctgcacaatctcactgcatctgcctcgtctcatctccgaagaccacagcggctgagagcagaaagatcaccagcaggtcacccctcattccacgctgaagtcccctccagcacaaccacaccgcctggtcatccagcccatgacctctcagaggatgcacaaagggagggcccaataacttttatttacttatttttatttattattattattatttgagacagagttttattcttgttgcccaggctggagtgcaatgacatgatttcagctctgcaaacttcgcatcctggcttcaaattatctcctgcctcagcctcccgagtagctgggattacaggtgcccaccaccacacctggctaatgttttgtatttttttttagtagagacagggttttaccatgttggccagtctggtctcaaactcctgacctcagatgatccacctgcctcagcctcccaaagtgctgggattgcaggcgtgaggcactgcactcagcccccaataactttttaaggctctaagaaaatgtcttttttaaaattaattaattaatttatttatttatttttgagatggagtcttgctctgtcacccaggctggagtgcagtagtgagaactcggctcactgcaagctctgcctcccgggttcacgccattctcctgcctcagcttctcgagtaactgggactacaggagcccgccaccatgcctggctacttttttttgtatttttaatagagacggggtttcaccacattagccacgatggtctcgatcccctgacctcgtgatccgcccacctcggcctcccaaagtgctgggattacaggcgtgagccactgcgcccggccgaaaacttcttttttttaatgaaggaattacaaaacgggctttgaagtaatgtagaatacacttatatatttacaagttgacatggggacacactcccacagagtgcacagtgacgtgagtgtagtaacttaatgtggtaagattacatgacccctgcacgtgatgaagtctggccatgagccctgtgggaggaaattttgataaatgtcttccttcaatcatttcactgtctgcgtcctggttctgaacttcaaaagttgcatgtgaagtctcttgcgaatatgagactcgggccacatagccgatcgcactcacccatcatccaagatgtctgcctgggctctgatctgctctgttcttgctttcctccagggacgggtggctcagtacctcacagaagcaagtcctgcctttggaaaggaagttctttactattttgatatgaaatatgcctgcttagttctcagagcaagagtgtcaagagtacacagcccaagaggcccggtggaagctgcagccttcttaccttcttatgttggagatgggaagccccagaatgtcccttccacagcgttctgtggtcggcaagtcaccaagccagcctggattccaggaagcagaaagggagttcccttccgcctccctaatgccatggaatggggaagggtacaactctaggatcagacccaaagggaactgttgtgaatcttgattttgtgacttcttggctattggatttgggccaattatttgtcatctctgtaccttaatttactcatctatgaaagaaggactaaaaatacttatcataggagaag

SEQ ID NO: 10858 - DNA, 2300 bp, Homo sapien
ggctggatgccaaggctcaccagaaccctggcccccctacaaactcagcgtgatgccttccatgctcttccttcttgtttccaccaatagcggttctattgatcaacagctctacaaagctcggccaacttccccttctctgaccttctctagccaatactggcaaaagttttctgtaaggatttggataagaaatattttaggttttgcaggctctacattgactgatgcaattactcaaccatgttcttataacacgaaagcaaccacaggaaaatgtaaacaaatatccaaggctgtgctccagtaaagtgttactcacaaaaataggcagctggctgcatttggttcacaggacacagtttgctgtctcctgccctaaggaaacaaacaaacaaattaaaaaaaaaaactgttggagacttgtgatgtcatatttgaccaccagctgtcttaggcaaggatctgtaaagagcattggactcggaaacaggagatgctacattttatgttaactctgccctagccagatatgtggttgtgggcaagccatctttcctttattggctttaattttatcatctaaaaaatgaaaaagtttggaccaacggtagttcccaaaatacatatatctcaaatgcatggaattggtcagaattcttagttgcagacaaagagtccctttagctaagtagcccctctgagcagaagagatgtcattaaaggatactaggcaattcacataatctctaggagaaccactgaattgaatgtatttactacacagccagggacagggcagccagtgataacacagacgacaaaggtccaacctctgcagaggactgttgtggtggaaacaccactgtcacccctcggcatgatgatgtgagggcctggatgccaggggcaccccacagctgccccaggagaaccagggccactgtgctcaccagaaaaccccaactgccttcctggctgctgctctagaacccacttcttcctctacgtcccaaatgagtgggtccgactggagcaaactgcttcaatcctgcatctagcagcaaggggttctgagaatgtagtttaggcctctcagcccctatagcagaggaggacaagcagagggggttgaaggtgctattgagtgagtggcctacagcagtggtccctgacctttttggcaccagggaccagtttcatggaagacaatttttccacagatggcggtggtgggggaaggatggttttgggatgattcaagtacattacatttattgtgcagcttatttctattattattacattgtaatgataatgaataatgaatgttgaataataatgaactaattacataagtcaccgtaatgtagaatcagtgggagccctgagtttgttttcctgcaactagactgtcccttctgggagtgatgggagacagtgacagatcatcaggcgttagattttcataaggcgcacacaacctcgatcccttacatgcgcagttcacaatacagttcatgcccctatgagaatctaatgctgccactgacctgacaggaggtggagctcaggtgataatgtgagctatggggagtagctataaatagagatggagctttgctcacttacccgccactcacctcctgctgtgcagccctattcctaacagcccatggactggtaccggttcatggcccaggggttggggaccccagcctatagcatctgccacacctacagaactgaacagaggccattcaggtgcatactgcaggtgtgagataaactagtttagctcatcatctgcagagctggtaataatcattccaaggcctcatcaacacagacacaggttactgctcattgttgaatattcttggcccatatccttaacttgtgggtgcttctctgtcccagatgccagtcctcactttgtaggtggttccatgccccaggatcccccaccaaaaccctggagccatccctgagatgtgtttctttgtctttatcttctgcgtactattatgaggagagaagggtcctttgaacaaagttggcttaaagccagtttcttttctctcttccaggagcagcagtttattcaatgaggttgtgcagatgaactttgaaatagccagtttcagcagcctttcagggactcagcccatcacgtggcaggtggagtacccacggaaggggaccacagacatcgccgtgtccgagatctttgtcagccagaaggacctggtgggcatcgttcccttggctatggtgagtcctgagttaccttggatgct

SEQ ID NO: 10859 - DNA, 2300 bp, Homo sapien
acataccatatctttttttttcttttgagacagggcctctgtcgcttaggcaggagtgcagtggtgccatcacagctcactgccacctcctccccagttcaagggatcctcccacctcagtctcgcaggtagctgggactgtaggcgcacaccaccgcacctggctgatgtttgtaattttttgtagagatgggggtctgtctgtgttcccaggctgctctcaaactcctagacccaagcggtctgcctgccctggcttcccaaagtgctgggattccagacctgagccaccatgcccaaccgtaattggttgttttggccccattgagaatgtgttattcagtagagcagattgttctatggatccagaaactagatctattattagaataagaattttctaactctttcataacctgtgacttaagaatgagacagtagaagtttttaagacagcaagagagtctttttatgagatccagtatcagcctctcataagtttgttaaaaataaatttatgaaatgaaactcactagaaatgtctctgtctagtacagggttcatttgcacagtatcttatttagacgtaaaaatccaggtgggcagagaaggcttctggtgtgtctgcccccaaatgacctgttcccaccgcttgggctccattgaagtagcctcgtgaactccataagcctagatgttgcgttattacctcagtgcttttgtttgagtccaggaagtcagtgatttttgagccttttggaaatcccacccttatcagaatttctccgattccattgatagcctgtctaatctaaaaatagcatgtggttttatctttagtctataatttcctctttgcttcaagtttactgagatctctgattctcaggagaccagatacaattggtgtgggtggtgacttggcctcactgaacaaatgtctctctttggggcctaagcatatttgtggggtgcctcatggtacttgcatgtagctcagtaaggcatggagctttataacattggttctaaaacttacctgtgagtagaagtcacctgggaagttgcttgaaatgcagattcctgggcctgggccccagagaccgtgattcagtaggtctggagcgtgggtcctgtgactgtgtttgttttttgtttgtttgtttgtttgagatggagtttcactcttgtcaaccaggtacagtggcacagtctcggttcactgcaacctccatgtcctggattcaagcgattctcctgcctcagcctcccaagtagctgggattacaggtgcccaccaccatgcctggctaatttttgtatttttagtagagacggtgtttcaccatgttggccaggctggtctcgaactccatacctcaagtgatccacacgcctcagcctcccaaagtgctaggattataggcgtgagccaccatgcccagcggactctgtttttaaagagcattccaggtaattccaaggcaagtggttcaggtacttagaaaattctacagcagaatatacttggaaaaactctctagcatttgttggaatttagtgtaattaagtgaaacctacctagcaactgtagtaattaaaagcgtggggtgtgctttttgttgagatccgtgaatgtttctgtaaacacaattttgattgtgttgcgcttcttaaaggttgtgatgacaacggtaattttaaccacttgaccgtatatggttttcatccttgaagactgtcatatattttcaagtgtctttcctccctgttattttaggttaaagatcgaggtccggaagccactaggagattttttaattggttttattggagcattaacctgggagcgatcctgtcgttaggtggcattgcctatattcagcagaacgtcagctttgtcactggttatgcgatccccactgtctgcgtcggccttgcttttgtggtcttcctctgtggccagagcgttttcatcaccaagcctcctgatggcagtgccttcaccgacatgttcaagatactgacgtattcctgctgttcccagaagcgaagtggagagcgccagagtaatgggtaagcacttagttctcatcttgggctgtttgaaaggactttatcgatctctttattaacatcctagcttcggtttgttgtgtgcttattgtgtgctgggcctgggctgagtggtttacatgtcttctctcctttaacactgcatttccccaaggaggcgggtgcggtcttattatcccatcttaaagacaggccagtggcctgattccagagctcatgcttta

SEQ ID NO: 10860 - DNA, 2300 bp, Homo sapien
gtgatatttgagctgacagctggaaatgacaagcatcaacagacaggtggcaaaggtccaattcgggcattcaattattctctccttagacattgattaaatatatattgcctgctgtgtggcagcactgtgctgaccatcagtctatctgtcggacatttaaaaaagttttttaaaaagagaatgcatgcaacttcaagacttactggcaggattacttctccagatgacctactggcaagccaacttcccagctactggctccaccctcatcttagctggagggaatgatgaaggaagaggaggtggtcttacactaattgaatcattgcagcagctgtggatcacgattcctttctttcttgcctttttttttttttttttttgagacagggtctcactatgtcacccaggctggagtgcagtgatgccctcactgctgaatgcagcctctacctcccgggctcaagcaatcctcttgcctcagcctcccaaagtgctgagattataggcgtgagccatcatcccaggccggggtctcaatttcttttttttttgtctttttttttttttttgagacgaagtctcactctgtcaccaggccggaatgcagtggcacaatctcggctcactgcaacctctgcctccctggttcaagcgattctcctgcctcagcctcctgagtagctgggactacaggcgcctgccaccacgcccagctaatttttgtatttttagtagagacggggtttcaccatgttggccaggatggtatcgatctcttgacctcgtgatccgtccgcctcggcctcccaaagtgctgggattgtagacgtgagccaccatcccaggccggggtctcaatttctgaagccatgctgagggccatttttgggcggcactctttcactccactatgtgccaggcgctgtcccagaggcagggggcacagtgaggaacaaaacacaagagaatcctgccatcaggaagcttacacctgttaacacatgcaggttggggagataaacgaataaattaaaaaatgtaacaggtaataaggagaaaagagtaacatgatggaatgggatactcgggccttggacaggctagtgaaaaaaatgtttctctgaagtcaacacttcggtggaaggttgaaggatgagaagccagccatgcaaccatagatggtgtaggggcagtctctgggaaagcctgaaacaggctggagcttgccttgttctaagccagtgagtctcaatgggggcgtatttgcccccaggagtccttcggcaaagtctagaagacattttcggttgttaacctgaggtgctagggggtggaactggcccctagtggatagcagaggccaaagctgctgctgaacatcgtgcaacgcacaggacagtcccgtcgctcaaagtgccaacgatgcacgggttgagaaaccgggtcctctccaggactgaagcccagggcagggagcacgggggcagcctgagcaaacccgcctggagagcagccgccgtctcagtgtgagttttggctgcctactgggccccaccgaagcccgaagagggccaggctccggcttctttgtttaaactcccttagtccgactgcctgcagtggctcatgcacgtaattccaacactatgggaggctgagacgtgaggaacgcttgatgccaggagttcgagaccaacctgagcaacaaagcgagaccccatttcaaaaaactgtttaaaaattagccacaggcagcggcgagcgcctgcggtcccagctacccgggaggctgaggtgggagggccgcttgatcctgggaagctgaggctgcagtgaggcgtaaccgcatgactgcgctccagcctgggcgagagagggaaaccctgtctcaaaaaggcaaacaaaggctctcggccgccaagctgcggaatcccaagctccccaagacacgcagtgatccagaataccggccacctcctcgcctagtgcccggggcggggccggaagttccggcgagtggggcgttgagcagcggcgagcccgcccaatagggacatctcaggcccggcagtctcgcgagaagggcggcggccctgggttctgggacaggtgacccggcggcggggcgaggcagctggcggcgtcgcatggagggctctgggggcggtgcgggcgagcgggcgccgctgctgggcgcgcggcgggcggcggcggccgcggcggcggctggggcgttcgcgggccggcgcgcggcgtgcggggccgtgctgctgacggagctgctggagcgcgcc

SEQ ID NO: 10861 - DNA, 2300 bp, Homo sapien
ggctggtctcgaactcccgcctcagcctcccaaagtgctgagattacaggcgtgagccacggcacacagctttcaggtatttctggtttttttgtttgtttgtttgtttgtttgtttttgagatgaggtctcgttttgtcgcacagtctggaatgcagtggtgtgatctcggctcactgcagcctccgcctcccaggtacaagtgattctcctgcctcagcctcccaagtagctgggattacaggcgtgcaccaccacacccagctaatttagtatttttagtagagacaggattttttttttttttttttttttgagacggagtctcactctgtcgcccaggctggactgcagtggcgcgatctcggctcactgcaagctctgcctcccaggttcacaccattctcctgcctcagcctccggagcaggtgggactacaggcacccgccaccacgcccagctcattttttgtatttttagtagagatggggtttcgccgtgttagccaggatgatctctatctcctgacctcgtgatccgcccatctcagcctcccaaagtgctgggactacaggcacccaccaccacgtctggctattttttaaatattttagtacagacggggtttcaccatgttagccaggatgtctcaatctcctgacctcgtgatccatccacctcggcctcccagagtgcttggattacaggcgtgagccactgtgtccggccacttttttgttttctaaaatggaagtagttcttcaccgctgggcatggcctccttcttctccacactgacctttccctccctcaaggcttcctggggctgcaaagcaaagaaccacgaacttctctgtggcctaagccacggaagctctggaagacagatgtctgggctcccggtgtcacagagtggcccttcctccggctccggaggacagacgtccgggctcacggtgtcacagagtggcccttcctccggctccggaggacagacgtccgggctcacggtgtcacaagtggcccttcctccggctccagaggacagacgtccggctcacggtgtcacagagtggcccttcctccggctctggaggacagacgtccgggctcacggtgtcacaagtggcccttcctccggctccggaggacagacgtccggctcacggtgtcacagagtggcccttcctccggctctggaggacagacgtccgggctcgcggtgtcacagaggggcccttcctccggctctggaggacagacgtccgggctcgcggtgtcacagaggggcccttcctccggctctggaggacagacgtccgggctcgcggtgtcacagagtggcccttcctccggctctggaggacagacgtccgggctcgcggtgtcagcagagggtcccttcctccggctctggaggacagacgtccgggctcgcggtgtcacagaggggcccttcctccggctctggaggacagacgtccgagctcgcggtgtcagcagagtggcccttcctccgcctctggaggacagacgtccgagctcgcggtgtcagcagagtggcccttcctccgcctctggaggacagacgtccgggctcgcggtgtcagcagagtggcccttcctccgcctctggaggacagacgtccgggctcgcggtgtcagcagagtggcccttcctccggctctggaggacagacgtccgggctcgcggtgtcagcagagtggcccttcctccggctctggaggacagacgtccgggctcgcggtgtcacagaggggcccttcctccggctctggaggacagacgtccgggctcgcggtgtcacagaggggcccttcctccggctctggaggacagacgtccgggctcgcggtgtcagcagaggggcccttcctccggctctggaggacagacgtccgggctcgcggtgtcagcagagtggcccttcctccggctctggaggacacacgtccgggctcgtggtgtcacagagtggcccttcctctgcctctggaggacagacgtccgggatcgcggtgtcacagagtggcccttcctccgcctctggaggacagacgtccgggatcccggtgtcagcagagtggcccttcctccggctctggaggacagacgtccgggctcgcggtgtcacagaggggcccttcctccggctctggaggacagacgtccgggctcacggtgtcagcagaggggcccttcctccggctctggaggacagacgtccgggatcgcggtgtcagcagagtggcccttcctccggctctggaggacagac

SEQ ID NO: 10862 - DNA, 2300 bp, Homo sapien
gcccacaaggctgccagttcaactctccttagggaggttcctttctgggctcatgctgaagtcgcctttgtaaaatcagaaatgtatctgttcacatttagcttttaatatcccatgggcaaggtgaaataggggaagatcatgggcaagtgcccccctctacttctgtataccacaccagacactgcgttttattgcctcttcttggtgtgtagcaaatatatcaggagtccactcaaaacttatttatttatttaacactgagtcttgctttactgcctaggctggagcgcagtggcatgatcgcggctcactgcaacctccgcctcctgggttcaaatgattctcatgcctcagcctcccaagtacctaggactacaggcttgtaccaccatgcccatctatttttctatttttggtagagacggggttttgccatgttggccagactggtcttgaactcctggcctcaagtgatccacccacctcggcctcccaaagtgctggaattataggagtcagccgccgtgcccggggtcaaaactctttttctaaaatgtcgttagaagggggttgtgacagctctgtgcaacttgtcccctttcctgtttgcttatgtaattctgttggaaagtattaagttgtttagcagaatgataatattttcagatcgcttttgtcctttaaaaaggatgtggcctgcctgcctggtgcctgggaagctgaaataccaggaagaagagcaaaatcctgggtgtttttttgagagtgagaggaggacaggattttgattgttctacaatgatatacaactcttccctactccatgccacactgagaggcagagtggtggacgtacctgggagaagcctgcggagccgaatgtgccctccaggatggacttttatatcttgataagcctgggggtcaccatgctgcgtagggaggccggagacctgccactgacggtggttatcccatgtcatggctttcttcattcccactttacctttttgaggctggaaggtatttaggggatgacagaaaatcaagtttgaaggtcaatggaaatattgggcacccactagaatgtcccacatctgtaaatacatgtgcatctttgtaaacacttaacagctgttttggggagtgcttgtttaaatccacagatggcattttgccagaggcctccttcagttccctatttctctcactcaaggtatcctagtttggagatccagaccaggtgcagcccatgtaccctgatgaaccccaggttcccctctccaacatctttctcacccgacaggtgcggccctgaaatgggtttctactgtctcctcacacagtccccatgttcccctcctcgggttagttttagggtagtctagcctgggaaggaatttgggactgatcatgccacgttccctggaatgggactagaaaggaatcctgggcttcgtgcggaccaaggccccactcaggttgtcatggaaaatgaggctgagagcccctctctgcagcaccctgtgggacggaacccgaggtctctgctggtcccggtgggcacagacctgcagccaacccggtgttccgtgaagccctgatttcccaatgaagcccatggaagccatcactggtttccatgggagcggaccatggccacccctgctcctgttccctgtgggaaaggaccaaggccgcccctggtcctggtcactgtgggaagggactgtggtcaccgctggtcctggtccccttgggagggactgtggtcaccgctggtcctggtccccgtgagaatggtctgtggtcaccgctgcctgttccctgtggaagggaacgtggtcactgctggtcctagtcctcttgggagggactgtggtcaccgctggtcctggtccccgtgtgagggactgtggtcaccgatggtcctggtccccgtggaagggactgtggtcaccgctggtcctggtccaggtggaaacagaccgcggctaccctggtgatggaccccacggggcacacccgcgccaccccgcacccagggctcgcgccgcccgaggcccccggttcctgtccccctccccgcctggcgccggaacctgcgagctggggcgcggcctcggggaggggcgggcgggacagacccagccgccccggctcccccgccgtccgcgtctgcgccggccccggggcctggtcggcggcggcggggccggtcgatggcccgggcggcggcggcggcatgcggctcctgttcctggcggtgctgcggccacacaccggcaacgcggtca

SEQ ID NO: 10863 - DNA, 2300 bp, Homo sapien
ttaaccctgagtttacatttgtgaaaaattcatggttctgcatattaaactacagtgcagataactacagctttcccctctagtttgatgggaaatttacaagttgtgaatgacacagagcagtttttttgagacagtctcactctgtcacccaggctgaagtgcagtggcacaatcatagttcactgaagccttgacctcctgggctcaagcaatacccccacctcatcctcctgagtagctgggactacaggtgtgcaccaccacacctggctaattttttttttttttttatttgtagagatggagtttcaccatgttgcccaggctggtctggaactcatggactcaagtgatcctcctgcctcagcctcccaaagtgctagcattacaggtgtgagccactatacccgtccagaacacaggacaattctttgtcacaagagcctgtcctggacattgcagggcatttagtacttctgacttctgaccatgaaatgcaagaatatgccttgatccttgcaaaaaataatcactcctgaaaatgtgccagacacttacatggtgtggggacagttatgtccctactgagatctgtggctctaaatagaatattctatccctgaacgtccttacatcacacacagaccttccacccatcttagtccacagagggcagtgagccatcacatcgtggccactggcttctccatgttcaccgtgtggcacctagaaaacttcctgaaagttttattttcctcctgattttggcaggtggggccgagagaggctgcctgctttattttctgacctggtttcttggttgcattcctgggtttgggaagatgactcagatctcaaagtcctgggtagtagacgacatacttgcagacgatgtccctggtcctgtttagcttgtggctgggctgtaatgttcagcaggagggagatgactcggctcaggtgaatcctccccaaaggctgtggctggctcaggtgccagggaatgtaatgagccacttggttcattcagactcttctatctcctctgccaattctggggaagcactccctggctcttatatagacacactcagatgcatgcggtatttcccaaacttcagcagtgctcaatctacatgcagaattactgccatacccacacatcgtcttgagttctcaatattttgattaattgtttgaagactttattatgaaaaatgttaaccaaagagaaagataaattgtacagtgcctactcatatacccaatgcctcgcttccgtaagtgacattctgctgtgtttgctctatcgcatatctgtccacttcccagctctctattcatcttcttttctgattcatttccaaggaagttgcaaacatctgtttacccctcgatgctctagactgcatgctattaactagacttcaataatcaatttcttgttttatgtaaaaaacacaactttgtactattaccagagatggaaaactactatcaccgaacatgaacacaattaagtccttttaaatagggatggaaaaagcacaatagcgttagaagacaccaataggatgtgttcagagcttctgcgggaggaagagaccccaggcccgaatggccgtgtgagtttttccttctagataaaggtgaggcattgctaggctctggatctggatgtcctgggttaacattgttccagctccttcactctctggctgtgtgaccttggacaagtcacttaacctctctgtgccttggttgtctcctctgcaaaatggggatggtgatcatggtaccaacttcattgggtggtctgaagagtaaatgagttaatatagataaactccttagacttttgcctgcatgtagcaaacatccaattcatgcagtcaccctctgatatggtttggctgtgtccacaccatatctcaacttgaattgtatctcccaggattcctgcatgttgtgggagggacccagtgggaggtaacggaatcacgggggctggtctttcctgtgctagtctcgtgatagtgaataaatctcacgagatctgatgggtttatccggtgtttctgcttttgcttcctcctcatttttctcttgctgccaccacgtgagaagtgcctttcgcctcccgccatgattctgaggcctccctagccatggggacctgtaagtccaatgaaacctctttttgttccccgttttgggtatgtctttatcagcagcgtgaaaacggactaatacaccctctccctaccagcgggtgtagtctgatgaggtctatgcgg

SEQ ID NO: 10864 - DNA, 2300 bp, Homo sapien
cttttctgattcatttccaaggaagttgcaaacatctgtttacccctcgatgctctagactgcatgctattaactagacttcaataatcaatttcttgttttatgtaaaaaacacaactttgtactattaccagagatggaaaactactatcaccgaacatgaacacaattaagtccttttaaatagggatggaaaaagcacaatagcgttagaagacaccaataggatgtgttcagagcttctgcgggaggaagagaccccaggcccgaatggccgtgtgagtttttccttctagataaaggtgaggcattgctaggctctggatctggatgtcctgggttaacattgttccagctccttcactctctggctgtgtgaccttggacaagtcacttaacctctctgtgccttggttgtctcctctgcaaaatggggatggtgatcatggtaccaacttcattgggtggtctgaagagtaaatgagttaatatagataaactccttagacttttgcctgcatgtagcaaacatccaattcatgcagtcaccctctgatatggtttggctgtgtccacaccatatctcaacttgaattgtatctcccaggattcctgcatgttgtgggagggacccagtgggaggtaacggaatcacgggggctggtctttcctgtgctagtctcgtgatagtgaataaatctcacgagatctgatgggtttatccggtgtttctgcttttgcttcctcctcatttttctcttgctgccaccacgtgagaagtgcctttcgcctcccgccatgattctgaggcctccctagccatggggacctgtaagtccaatgaaacctctttttgttccccgttttgggtatgtctttatcagcagcgtgaaaacggactaatacaccctctccctaccagcgggtgtagtctgatgaggtctatgcggcagcgttgggtggcagccatggaggaatgctgttgaaatgtcccttctgtcctcaggggccttcagaagccacctggtcagtgtccgagcatggccaaggtgcagggtggctgctgggactccatgcaaggctcctctatgggcaacctctgcggcagcatttcctgcttggctgcccaaggattcccagtgcttcctgcagtcaggcacttcctgcccggttctccctccttcccatcctcctttcccagggaccagacctgcatcgcatcctgaagctcagcctgcctactccttctccatcttttctttatccttcacaactgcagtcctcaattaatctctggtgcacttaactctgtctgcttcctgaagatgctcatagattctgaggattccccatgtgctgtgatgtgagagttaggggcgagggaggaaaacagccagctccactacctgtctaccctccctcccgaccattgagaaagttccctgttagagattcattcctttggaccatgaagccttttgattcctattaaccttgagtgagtcacgcttaagccttttaaaaaattttctgagtttttgtttgtgaaatataacatatataccaatgaacatgagatatataaatgcgttgtatgaataattagaaagcaaactatattccagcaagcgaaaacataacacactgccccagaagcacccacaatccacgagtaagcacctccctccccctgaggtgcataagtaaggagaggaggggcagaggagctgccaggggaaggaccaaggatgtgctctataggtcagccccctggctctgcctctccttgttggcagagatcagcctgagggccgcgccgcacaccacaggcccatgaccctccatcggagtcaccgggcgctggctgaacaagcaccttcagtgagctctggattacaacacagctatgaaaagaagccagccggtgctctccctacccatatggagagattgccaggcagattccaaagtggaaaagtcagaggcaatacaggagggcctgtgtgcccagctcccactgtgaaaaccaacccagctgatggggattcttctctattgctttgtaggtcgtcgctgccctcagcctccagatgcagcccccctgccaccttcaggacccctggctctcccctggactcagtagcgaaagggtttatgtgctcggagggagaccttcaggaatctgtgcatagaatgccatagtgcagaggaaagtaagactatgcagttgtatttgacttaaaacctccggaaagataaatagggaagcaacaaaacctacagggaacaggggaggaaga

SEQ ID NO: 10865 - DNA, 2300 bp, Homo sapien
gtgggaatgcaaattagttcagccactatggaaagcagtttggtgattcctcaaagagctaaaaacagaactaccattcaatccagcaatcctattattgggtacatacccaaaggaatataaatcattctaccataaagatacatgcacgcgaatgttcattgctacactattcacaatagcaaagacatgaaattaacctaaatggccatcagtgctagactggataaagaaaatgtggtacatatacaccatggaatactatgcagccataaaagagaatgagatcatgtcctttgcagggacatggatggagctagaggccattatcctaactaatacaggaatagaaaaccaaatactccatgttcttgcttacaagtgggagatcaacaaggagaacacatggatactaggaggagaataacacacactggggtctatggaaggctggagggtgggaaggggagaggatcagagaaaaatacctcttgagtactgtgcttattacctgggtgatgaaactatctgtaatcaaagccctgtgacacgcaggtgacctattaatatataacaaacctgtacgtgtacccccaaacctgaaataaaagttaaaaacacacaaaaagaaaaaaacaaacaaaaaaccccccactactgttgtgataagaatagagcagcaaacaaagtggacccaaacagcaccgccctcacggagcttaagttccaaggaggacagtcagaagatgaatacagcaccgccctcatggagtttagattccaatgaggacagtcagacgatgaatacagcaccgccctcacagagcttaggttccaacgaggacagtcagaagatgaatacaacaaacaaaaatatatagtgtatctgtgaatacataaacgtatgctatgtatgacatatacgcatatatgaatagaagttcagcagggatggggaaggcagtgctgtgggtgtctgtgaagattttgctgacgctgctcagaaaaggccttggggagaagatgaggcgagggagccgtacaggcatccagggaaagagagttaaaggcagagggaggagaggggatgcctgtcctgttacaggagtggccgagtctccagtgtggccagagtggaggcagccagaggggctgtgcctagcgtgaggccagcgttacagcaggtatggctgcaaaggtttgattctgtctctgtaaatactttggcttttactgtgaggaggggaagccagtgaattttttttatataaaaaaagtattgatccataattaatgtacatattttggggtccacgtggccatttaatacattcataaaatttgtggagatcaaatcagtgtaactgagatagcctccacctaagatatttgttgtttctttatgctaggaatgttagtattattctctagctattttgaaatatgtaatagattattgtaaactgtcatcacccaactgatctatctaacatgaggtcttatttcttctttcaaactgcacatctgtgtccactcatcagcctgaggggccgagcagaggagtgacatggtcatatcgcccgtgaccgccctggctgtagcactaaagaggggttatgggagaggaggtaaggacaggccctaggtcaccagcaaggtggtcaatgctttgaggtgattgtgtctgggattggggtggtggcaggacccgaggagggctggatcctggctatccttggaaggcactgccaacaggatttgatgaaggcttgggtgtgcagagaggggagaaatgtaagatgagcctagatattggctggagtcagtgaaggaagttgtcctgtgctgatgtgaagaagattctggaatgagtaggtaggagtgctgtatgatgtcatgtgttccgctgccctgttgctttctgacatctctgccttctctctgaaacccataaggatggacgtccatctcatttatgtggtcctagagtcttgaacagtacctagcacttagtggggatttgattcgcatttgttgactgcgttttaagtgagcaaaaatgctccctgaaggtttgcttcagagcagagtggttacaccaattcctgtccgggaattgtcctgtgctccagccatggctaggactcatatggagggagtctcccggagcctcgtgaagcccttctcgctgtcccgggcttttgttggcagcctcctcctttgaggaggtgcctgctgcatctgtcactgcagccctgtctctggagtgggcggaggcagcctggggaacccatttatct

SEQ ID NO: 10866 - DNA, 2300 bp, Homo sapien
gggcacccatcccgttcccctggactccgttacaagggcacccatcccgttcccccggactctgttataagggcacccatcccgttcccccggactccgttacaagggcacccatcccgttcccccggactctgttataagggcacccatcccgttcccccggactctgttacaagggcagccatcccgttcccccggactccgttacaagggcacccatcccgttcccctggactctgttacaagggcacccatcccgtttccccggactctgttacacccatcccgctcccccggactctgttataagggcacccatcccgttcccctggactccgttacaagggcacccatcccgttcccctggactccgttacaagggcacccatcccgttcccccggactctgttataagggcacccatcccgttcccccggactccgttacaagggcacccatcccgttcccccggactctgttataagggcacccatcccgttcccccggactccgttacaagggcacccatcccgtttccccggactctgttacaagggcacccatcccgttcccccggactccgttacaagggcacccatcccgttcccccggactccgttacaagggcacccatcccgttcccctggactccgttacaagggcacccatcccgttcccccggactctgttataagggcacccatcccgttcccccggactctgttacaagggcacccatcccgttcccccggactccgttacaagggcacccatcccgttcccccggactctgttacaagggcacccatcccgttcccccggactccgttacaagggcacccatcccgttcccccggactccgttacaagggcacccatcccgttcccctggactccgttacaagggcacccatcccgttcccccggactctgttataagggcacccatcccgttcccccggactctgttacaagggcacccatcccgttcccccggactccgttacaagggcacccatcccgttcccccggactctgttacaagggcacccatcccgttcccccggactccgttacaagggcacccatcccgttcccctggactccgttacaagggcacccatcccgttcccccggactctgttataagggcacccatcccgttcccccggactccgttacaagggcacccatcccgttcccccggactctgttacaagggcacccatcccgttcccccggactccgttacaagggcacccatcccgttcccccggactccgttacaagggcagccatcccgttcccccggactccgtaacaagggcacccatcccgttcccctggactctgttacaagggcacccatcccgttcccccggactccgttacaagggcacccatcccgttcccccggactccgttacaagggcacccatcccgttcccccggactccgttacaagggcacccatcccgttcccccggactctgttacaagggcacccatcccgttcccccggactctgttacaagggcagccatcccgttcccccggactctgttataagggcacccatcccgttcccccggactctgttataagggcacccatcccgttcccccggactccgttacaagggcacccatcccgttcccctggactccgttacaagggcacccatcccgttcccccggactctgttataagggcacccatcccgttcccccggactctgttacaagggcacccatcccgttcccccggactccgttacaagggcacccatcccgttcccccggactctgttataagggcacccatcccgttcccccggactctgttacaagggcagccatcccgttcccccggactctgttataagggcacccatcccgttcccccggactctgttacaagggcagccatcccgttcccccggactctgttataagggcacccatcccgttccccggactctgttccctgattgtcttgcatagggctctccgtctaatagcatcacctcggttaagatctcagcattaatttgggggaggggcataaacatccagtcattgcaaataccatgtgggcaaacaaagtaggtccaaggttgctggatggtgccttctgaaaagtcatctggtagaccgaggctgtttcagtaaggcagcacagtcaggagggagggagtctccagccagatggctcggctcagatcccagctctggtgcttgctagctgtgtgaagatgagctgggattttatctaactgtgtctcatttccatatctttaa

SEQ ID NO: 10867 - DNA, 2300 bp, Homo sapien
tttagagaaacataaaatgattgtttttaataaagaacagggaccacttgtttctagtcaatatgtctgagaaatgtcttacaaatagactcagtgtcacaaatagatgatttacaaatagactcagacccactgtagcgttaaggatggaacctggattatgcattcagtgcgggcatcaattttgacactcagagaccaggtgaaggtgtccaagagacgaaagctcagctctctcatcactcaggtgaaggagaaaggggaccagtggttccagcacgtgttccgcaggccggcagcatcagcatcacctggaactttttaggaacggagatcggaagtcccaccttgacctgccgagatagctctggggtgggcccagcaacccaggtctaacaaattttccagtgactctcctgctggttcaaacttcagaaacagtgaaagagacaatctcttagggtctttgcagcgtcgactcttaggaattttacaggagagcaatacaaagagaaaaggcaacaagtttaagaaacaaacaaaagaaaaaacagaaagacagatatattcagataagtagatacagaataaaagacaagagcacatctcaaaggacatgaacccagaaaaacaatcttcggtagaacagcagtggcttttttgatcttccttgaaactttgaaagctaaaaactcttaaagcattggtatatttctgcaactacaggcatacaggataaaaaagtccattgccccctcagtcagatgataacgacccatttttatctactgaggtgaattcacctcattagattcagggcttgttggtttacaatattccttaaaaattctgaatgcttttcttccctctgagctttgatggggttaatttaaaggctctcgtggagcaaagcagttcttgggctacaaattacaggacggtgcttagggatcttggtgtgggaatgtcttagttggagattccgggcggtgttgagaatcatgtcttttatcttctcaaagcaatgttgtctcctaatggatccatttcctttcccagtgagccctggggagcacacgacatgtttctagggacactaacttgggggatcgctctgggaaggggcttggggccagcatgacctcagtgtggcgtgtcagagacttcctcactgcgatccctgggagatgcgcagggcggggcgagggcccttctccagccatccttgcgctctccctggcgaagagcctcaggtgcccccgggctggaggacctcccctgggcctgaggttttgatgacgacgagaggccggtggccagctggacacctgttgggagagtgggtggctccgtccccggggtgcgcccgcgctgggagccctcgcccgccgccaccgcgcgtccgcgctcgcagggagggtggccgggaggctgggcgtggggcggccagggggaggtgggatttactttgcggattggggctcacagctgtcactccgaaagggtggggctttttaaaagcagacaaatttttaaggcgaaagccccagccggctccgggcaccgtggcgatcgcctccgttccgttccggatgcggtccttgcggagcggagcccccgcgcctgctggcaggaggcagctgcgttgctcggccgcgtccccgagccggcgggccctcctccgcgcacatctggcccgcctcccccgggcgcaggggggagccccgcgtctccggagcctgcagtgcgctcggcgcgcgtagagccccgcgagccccagccgggcccggggccgggcgggccgaggcggcggccggggagcagccgcacccgccaaactttgggtgccggagcgcgcgcgcgcccgagccccgaggcgcagcggccggcctgggatgggggctgcgggccagggagccccgggccgcccagcgagcccggccacccgcccggggggctccgagccgcctctgcccgcgtcccgggctccgcagccccgccaccccggcgccgcctgcgccagcgcccgctagccagcccgggagcagctggagccgccggagccctgcgcctggaggcgcccctccttgggccaccgggggccactcttcgctcgggtaaacaggaaaggaaataccccctgtggattaaaatttaaaaaaaattctgttggggtcgaaggagggaggtggggtttgcctgcgcgcgtgttggactccggagagcaactcaggagcccgcgcggtcgtcgcctcccggcctggccatggactggcgggaagagggagcagggcgcccgg

SEQ ID NO: 10868 - DNA, 2300 bp, Homo sapien
ctcagagctggaagtggatccagctgtgagcagaacacagaccctcggggatcccccagcctgctggtagagacgacccccatccagggagatgcgggagcaccgaggagaagccccaaccctggggttcatggatggcttcctggaagaggaagcaaggtgaagtcagaggctaaaaatgcacacatttgcaggtgttgagcaagtagtgtggacgcgtgagcgatgaggcacaatagagcatgaaggcgcgggcggtggcaaagggaacttcgccatctggggaggcatcctctgcccagctttgatcactccctgggatgtgaataggagtttatcttgccagatatatgatcttccaaggtcacaggattttgcgaatttgtatcagatttctcagtttttaaatgttgccaacttgtaactttttaaaatagtcagtggaccatacaagacacaactgtaggccaggtgtgttctgcaggcccttgttgcaacatcttgtctaagtggaattcagccaggtgagaaaacagtaaacaggcagaggactggcaggtccaaaggccctgtgggggagagggcctcccctgtgatgtccatgtgtactttcacctatttggcaaatatttatccatccccaccagatgtcagccactgtttgggaggtgtgtgtgcacacatacaaacacatatgcaggcatgtgcgtatgtgtgcatttggagcaatgtatgtgctacacatttgtatgtgtgtatatgtttgcaggtgtattatgcatgtacacatgtgtgtacatgtattcaggggtatatgtgtgtatatatgtgcatgtgtttttatgtatgcacgtatatagtgcatgtgtgcatgtgtgtatatgtatgcaggtgtacatatgcacacgcgtgcatgtgtgtatacgtgggtgtattgtgtgcatgtgtgtatatgtatgcagctatatgcgtgtgtgcatgtgtgtatgtagtgtatgtatatgcaccatgcatatgtgcatgcctgtgtaagtccatatatatgtgtgcacatgcatgcacgcgtgcatgtgtatgtacatgtgttcatgtatgtgcgtgtaggtgtgggtaaatgtatgcgtgtgtgtgcatgtgttcatgtatgtgcatgcaggtatggataaatgtatgcttatgtgtgtgcgtgtgttcatgtatgtgcatgcaggtatgggtaaatgtatgcatatgtgtgtgtgtgttcatgtatgtgcgtgtaggtatggataaatgtatgcatgtgtgtgcgcacacattcatgtatgtgcgtgtaggtatgggtaaatgtatgcatgtgtgtgcacgtgtgttcatgtatgtgcgtgtaggtatgggtaaatgtatgcatatgtgtgcgtgtgttcatgtatgtgcgtgtaggtatggataaatgtatgcatgtgtgtgcacgtgtgttcatgtatgtgcgtgtaggtgtgggtaaatgtatgcatgtgtgcatgtgtgttcatgtatgtgcgtgtaggtgtgggtaaatgtatgcatgtgtgtgcgtgcatatgccacatgcatgtttgcacatgggcttgcatgaacatgtgtatgagtgtgtgtatgcatgtgtgtatgcatttgcaccagtgtgtttgtgtgtggatgatatccgctcctggcaggtcgtgttttctgggcctcattcggcccagcgggagctcctcggctgaggccgtactggagggggctggaatcctccctggggaagcgcgtggctcggggtgttggcctggagtgagctcagcaggaatttgggtcagaggagctccttgggggtggggacaaaaggatccacacaagcccttgaggagtgcggtggggctcgcgtgtcggggctcgcgcggggggcgtggggcacctggggacatctctgaggtgggagccgcgggagcgcccaggcgctgtttccagccagtgcagcctccccgcgcgggtcccggcttcgagagacgcgcgtacgccgccccctagtggagacagcgggccctgcaagctgccgcggagatgctctcccggtgtctgatgggagaatcctgtgcccgcagccctgcgcttccccaggtgaaccgggcaggagcctgttgggaaggcagcgacccacatctgtgtgcacctttgtggatttcaggttccggacgcaggcgaccaagccagagccagtaagcagccttgcctccaggataataccgcttatcaggcttgactctgtgcgcctctgagccaggggtgtgcccagcagctgg

SEQ ID NO: 10869 - DNA, 2300 bp, Homo sapien
ggaaactttctgttggcatcatatgggagccatttctgccaggggacctcagtggttctgtcccagctgacgattaaaatcattaaggaacttaaaaaaaatactgatgcctgaatcctatcccagaccaaattaataaaaagtaaaatctaaggatgtgaactgggtgtctcggtttttgttgttgtttttgttttgttttctttcttttttttttttttgagatggagtcttgctctgtcgcccaggctggagtgcagtggcacgatcttggctcactacaacctctgcctcctgggttcaagagattctcgtgcctcagccacccaagtaggtggaattacaggcatgtggtaccatgcccagctaatttttttttttttaatagaggcggggtttcaccatgttggccaggctggtgtcgaactcctgacgtcaagtgatccacctgcctcagcatcccaaagtgctgggattacaggcgtgcgccaccgcacccggctgttttgttgtttttttaaagaaaccttcatgggaatctgacgttgggaactatggttgatggtattccccaactgcagagatgtccctggtcaccccctaccgaggtgcattccagcttccaactctttgctccagccccaccgtgggcaagctcgctgcgtgcctccatgtgcccacgcccgcccactggagggatctcatttagatccagatacctggaaccgctgggtcgtagtgagtgcactgtgagttttaaaatgtgtgccaaattgccctaaagtggctccaatttacacccccaccaatgagaacctttccttaacacctttccccgtacatgataatgtcaaactttaatatttttgccaatctgatgagtaaaacatttttaatggcaccagctaaaaaagaatggcagagactttacatacgagtttggtgagatctctgagataagttgctgagggagagatctaagttgcaggatatataaaaacacattggcagacaggcggaaaatgtgtcacaggagatggggcagagattccagctctgagttccaccctgcggtcactccatggggcacacatccatgcaggaaaatgaaaagcgaaggattctttaggtagagtcagtgggatgttctccttgtctggaagggtttaatgttttacaaggagaatgagtttaattatatcattagaggttaaattttaaaacacttaaggaaaaattttatgtgtgtgtgtgtgtgtaggcgtgtgtgtgtgtgtgtataaagagaaagggtgtgaaacagagagggagagagtaaatgtagttaaatgtagtaaggtgttccttcttggggtatttgaatgaaaggatccaggaatgctctctgccagtcttacaacttttctgtaagtgtgtcagaagaaattacccaaaaaatccccccaaaacaaccctcaaaactcaaaggaataaacgaggtcgggttgccgaccgcctgtggtctaggtcagctcctgccctgaagcctgtgaaccctgggaagtggagcctttgaaaggagccccggagggcagcccaggcggacaggctgccccggcgcgaaggaggacaggctggcaaatctgcagcacagtcacgcctggatccgtactctgtcccgccgccgacagaggacagagagcaacttcctcttcaaagaccatcctgcataagccaaaatgcctcctgggactgaagttcaaagtgatttcggaggagatctgtttggtgccactgtttggcctggggatttgagcggattactaaagccctgtgttccaggcagcagtaactcggggcctcaggtgcgaaacggcctttgataaacgtgagctctttagaggcccaaacaaattgaggacaaagcagctgggctgctcaggagggggccggctgttgaccctttctttccagtcttaggaaaacaaatacttgatattccaaaggctgagtaaactcattaaaaggatcttggacttcctgcctttgcgcacagcccttggaagcttctccgccaacccccggagagcaggagtggggagggttggaggcagctccctcagtcctgcatgcagaccgcagccactgactgttcccgagtcaccaggccactcttctctcctgcctcatcgtcttattcagggtccacgtcattctgccacctatttgaggacaccaggccttggctgtttctgcttcttgtacctcctgagtcaggtggcggtgggggagggcagacgccacacacacctgggtccact

SEQ ID NO: 10870 - DNA, 2300 bp, Homo sapien
gagaggcactggaatgtgacatttgtggggaggagtttggggacatgtcagtgtcaggcacacagtaatacaagctgataatcaaggcaagcaaataatcaaaaggctaacaagagccgaggctgactaagcatttgacaggtgctgccttaagccttgataggaagcagctcactgcctcctcataggtaccccaggaagctggtccagagaagatttccatttcagagaggagcaactggggctggggagtccgagtcactagacccaggccacggggctactgggggtagagccgacaccattccactcccccaggggctcagctgcctacgcctggcctcctgcctctccacggagatgcaagcacagtgggtacttgtgatggagcctgactttcagaatgggaccccgttctgctgtcctgtctggagccaggcaaagatcaagtcttggtttatggctttgttcaggggctcctggcctggggcgaggctgccactttcctgtcatgttgatattccccgtgatggtgtctgaagggattctttggagccacaaacagggaggaaatggcggaagaagcaatgtgggaggtattaatgtgtgttggtttacccatgtcctcagctgtgtgaccccaggcaagttacttaacctctctgagattctttctgtttcctctgctgtaaaatgggaacaatgacacttacttgatcaggttcggggtaggaatgaagtgagataactcagtaagctctgagaaccgagttggcacataatgctagccctgtgggattcactggtctgtaaactttctggttagttgacttttctttgttaaattcatttgtcttcactggccggaagccaagatggcttactaatagcatcacttacgagtctttctcttttctatagggctgccacacttgtgtatcccttcttccttgaatttaaccaggagtgagcagtggacagcttcttccctatgagaaggaggtgaagcaggacctgaaatcccgtgctcagctcccacatgccccgtgtccaggacaagtcctttgctgaatcagcggcagacaccacccggagccctgcgggagcctttccctgttcttccagcatggatctgaaactcccttcccactttctgcagcctcccagagatagttcaggctccagcctcatgtgatagcatgaagagaaactggttccaacagctgtgtgctctgctgccctcatcccaaacaacagtttaaatgcacaattacgcttttctctaaggcccaaaataggataggaaagatcgttttgctatccctgaatgcctgtcacccttgtttcgtaaggtaagattgggaagggcttggccattgcccttgcagctgagaaaccaactttaggaataaagacactctctccatgtctgacaaatgtctgcccatctgctggcaggtcagtctctctctctgagatatagattatatatgtatacatatatatgtgtgtgtgtatatataatacacatatatacatatatacacacacattcacatatataatatatatgtgtgtatatactatacacatatataatctatatagagagatatataggttatatatatgtacacgtgtgtatgcatattattatacagacatatacatacacacatatatatacacacagacatatatatacacgcacacacatatataatctaattatggagctgcccttacagctcacgcatgtcatgcgcacacacgcaggcacagtcattagctttcagagctgacacatcaggaggctgcatcccccgcctcctcatggctgaacgatgtctgctcctgggtgacgcgtccactaggctgcctcctactcaggttccccctccccagccccttgtctcggagcagtcttactcttattttgtttgtggtactttttctgcccgtcgatgatcttactcatctgcttatgtatttattttctgttcctcctccagcaggaagtcagtcccagaatagttgttctgctccctcccttctaataagtgctgcgctgagtgtgcttgctttgccagatggttaaaacagagcaggggatagaaggacagatgtcttcaccctcatggagttcaccttccagtaggaggaggcgataggccggggtctgcacatgtgcgtgctacagcctgttccacggtgcgtggcgtgcggggcaggtgagcggctcatgccatccagagagctaggaaaggggggctgcagttttagcaagatgggcagggaag

SEQ ID NO: 10871 - DNA, 2300 bp, Homo sapien
aaaaacactataataaaaatggcagtctttcaaaaataaaatcatgcaacttttcacttgggaaataacacagttgaaggtggtgttctaactgcccggagtttctaccttctttttcactttctccctcaccccgacttcctccagcacctcctagtgagacccaggacacccagggacagcgacccaggggtgggtgcctgaacctgcctattaattctgggattctgggcgctcaaatgtctgttgaacggatgaatgaatgagtggaaaggtgagatttccccaagtttcttaccgatgtaaaaattgtagggcttgttttaattaaaagccaatactctccgaggaagtggccccctcctgcacggcgtgcagaaagctggtcagtgaggggggttcctggcgggccccatctccttcccgggcgcttcctagggagaccttgccccgtgcgcagcgtccccaccgcgggggcccgtgcagccgccccccacgccgggtggagcgccgccaacgcgggaagccccagcactgcctccaaagatgtccgcacactccaccctgctccctggaactatcctcaaacgggcagggggcaagcgaggccggtggacgcgggactcgctcctctgacctctccccggccccccgggaggtagcgggagattgcacacgcgatcctgcgagtttccgaactttggaagatcgtgacccggagagaccctgggaggagagggccggccacctcctaggggtgctgtttttttaagggtcaacccaggacgctacgggaagcacctggcgcatccttgggaacagtggggcttggcggtgggcgcccaccgcgaacgccctgggcgggggaagggaatggcggggggacgtcgtgtcctaagtgaccccgtcacagacccgccccaatccgaggggggatgagctcagaggacctgcccaggacgctccttctccactttccaggaaaaccgagcggcgtgcgcgcctccgtgtcctcgcgggagctgggggtccccgggcaggcgctgacgcgctcctcccacgacccactccatcccaccctactccgggtcctcctgcggggctgcagccaaggagggcgctggccgggcacatcactcgccaaatcacataaataccccacgagcgaatgacttcctataataaataaactcagccgccaagaaggcatctccagccctgctggcgcgaggccccggctctgcggcttcggagggggcgggggtcaccgcggtacaaaccaagcccgcacttcccgcggggtgggaggcggtgttcaaagtcccgggacgcttcccgcccctcccccttcccgccttcttagaggagacctcggatgagcggccctaaaatccggattctcgagcccctccccctccccttagctcgtctctttgaaatttcaaagaaaatccctcctcggagcccggagcccggggctggtagcacctccccagcctcaggaagatgcgggcaggtttacaagcaagggcctactttatggcccaggctataaaacgcaaatcccacctccctttgaaagcgccctccgcccgggactcaccataaaaggaagagaagatgcaccccgcgcccctcgccgcggaccacccccaaaccccttctcccgccagtccccgaacttcccgtaacctcggcgtcctcggggtgccggggaccatcccggggaccgccgggaaagggggcgccggcggagaggatagcgagaggcaaagttggaggccaggcagagagagggcgaggagaggcgggcgggactgccggggagggtcgcagcgcgcagagccccgcgcgccaggcgggctgtcccggggctggcgggcgacgcgggcgggactaggcgctgcgccccccgcaggctgggctgcaggccgggggggatcggcccccgcggggcccgggagcccgcggcggggcggcggggaggaggctgccccgggccgctgcgctttctcatgcaaagcagcggcggggcggggcgcgcggcccgggggcggggcctgtcagcgctcggcttttctgcccccctttgcctttttgcgagtcttctcatcccgggacgcaaacctcgaaacagctgccggctggtcccggccgaggccggcgcagggagggaggagccgcccgggctgtgggggcgccgcgagctgggccggcctcggtgtgcccgcgccgccagcccgctccagacgcgccacctgggcgctccaagaagaggccgaagtttgccgcggccgtga

SEQ ID NO: 10872 - DNA, 2300 bp, Homo sapien
atgaggtagcccacggagtagacgcagtagcacatggagaggaagatgatggggcgctcggggtagcggaagcgggccgggtcgatgaggaaggtgagcacggtgaaggcgctggagaagaagcacagcaccgcccagatggccagccagaccactgcgaagcgcttgtcctcgcggctccagtacacgtccacgccgggcgtgcagagcggcgcgcacgacgcgctcttctccacgtggtggaacttgcccgggttgtcgcagccgccgcgcccggggcccccgtccttcagcgggtgctcctgcgcgctgtggggccgctgcggccggaacagcggcgggaacaggcccgagccccgggtgggctcgtccgagccgttgttgggcgcctccatgcacaggtagttggggtcgttcttgttggggagtttccggcagtccagggagtcgggccacttgaagttgaactgctccataatcggggagcacttgagccgggcctgctcgcacatgacccggcaggcggggatgggggtagagacctgctcggtgcacatcggcgcgtacagcgagcacaggaagaagcggaggtggccgtggcagccgtactccaccagcggcgcgaactcgtgcaactggatggctgcctcgcgctggttctcgtggcccatcaggttgggcatacgagtcatgttgtagccgatgtccttgcacatcgggatctcgatgggctggcatttgccgtcgcccgggcgctccatgtccatggagctgatggcggcgcacgagcccatcacctgcaggaccagccacaggcgggggcccgggcgctgcatgctggcgttggacgtgtcctcgcggggagctccgcgcccctcagcgccgccgctcccgggcacgggctgctgctggccccggctctccacccctgctcgggcccccgcccatgcccgcccggcctggcccgagcgctgcgcacagcgcccccggctcggctctccgcgcccggcgtccgccgagttgggggccgcggcggagagcagcaaagtttgcaaacaataccgggaagcgagggaagcccccggagctcccggcgcagcggcccggcgcgagctccaactcacggccgcggcaaacttcggcctcttcttggagcgcccaggtggcgcgtctggagcgggctggcggcgcgggcacaccgaggccggcccagctcgcggcgcccccacagcccgggcggctcctccctccctgcgccggcctcggccgggaccagccggcagctgtttcgaggtttgcgtcccgggatgagaagactcgcaaaaaggcaaaggggggcagaaaagccgagcgctgacaggccccgcccccgggccgcgcgccccgccccgccgctgctttgcatgagaaagcgcagcggcccggggcagcctcctccccgccgccccgccgcgggctcccgggccccgcgggggccgatcccccccggcctgcagcccagcctgcggggggcgcagcgcctagtcccgcccgcgtcgcccgccagccccgggacagcccgcctggcgcgcggggctctgcgcgctgcgaccctccccggcagtcccgcccgcctctcctcgccctctctctgcctggcctccaactttgcctctcgctatcctctccgccggcgccccctttcccggcggtccccgggatggtccccggcaccccgaggacgccgaggttacgggaagttcggggactggcgggagaaggggtttgggggtggtccgcggcgaggggcgcggggtgcatcttctcttccttttatggtgagtcccgggcggagggcgctttcaaagggaggtgggatttgcgttttatagcctgggccataaagtaggcccttgcttgtaaacctgcccgcatcttcctgaggctggggaggtgctaccagccccgggctccgggctccgaggagggattttctttgaaatttcaaagagacgagctaaggggagggggaggggctcgagaatccggattttagggccgctcatccgaggtctcctctaagaaggcgggaagggggaggggcgggaagcgtcccgggactttgaacaccgcctcccaccccgcgggaagtgcgggcttggtttgtaccgcggtgacccccgccccctccgaagccgcagagccggggcctcgcgccagcagggctggagatgccttcttggcggctgagtttatttattataggaagtcattcgctcgtggggtatttatgtgatttggcgagtgatgtgcccggccag

SEQ ID NO: 10873 - DNA, 2300 bp, Homo sapien
aggcgatcacacaggtggccggcacggtgtacagcacagagaagagcccgatacgcaccatgagcttctccagcttgtccgtgttctcgccgcccgtcttcatcaccctccggatgtggaacagggccacgaagcccgagaggatgaaggacgtgccgatgaccaggtagcaggccaggggaatgagcacgaagccggtgagcgcgttgacgtccatgctgcccacgtagcagaccccggtgagctcgtcccccgccaccctgcgcatgaccaggatcaggatggtcttcaccgccgggatggcccaggctgccaggtggaagtagctgctgttggcttcgatggcctcgtggccccacttcttgccggcggccaggaaccaggtgagcgtgaggaccacccaccacagcgagctggccatgccgaagtagtagaggaccaggaagaccagcgtgcagccggtgctctccagtccctcctggatgacatagagctggccgctgtcccggtcgcaggcgatgctctcggcgccggcgaagaggcggatgaggtagcccacggagtagacgcagtagcacatggagaggaagatgatggggcgctcggggtagcggaagcgggccgggtcgatgaggaaggtgagcacggtgaaggcgctggagaagaagcacagcaccgcccagatggccagccagaccactgcgaagcgcttgtcctcgcggctccagtacacgtccacgccgggcgtgcagagcggcgcgcacgacgcgctcttctccacgtggtggaacttgcccgggttgtcgcagccgccgcgcccggggcccccgtccttcagcgggtgctcctgcgcgctgtggggccgctgcggccggaacagcggcgggaacaggcccgagccccgggtgggctcgtccgagccgttgttgggcgcctccatgcacaggtagttggggtcgttcttgttggggagtttccggcagtccagggagtcgggccacttgaagttgaactgctccataatcggggagcacttgagccgggcctgctcgcacatgacccggcaggcggggatgggggtagagacctgctcggtgcacatcggcgcgtacagcgagcacaggaagaagcggaggtggccgtggcagccgtactccaccagcggcgcgaactcgtgcaactggatggctgcctcgcgctggttctcgtggcccatcaggttgggcatacgagtcatgttgtagccgatgtccttgcacatcgggatctcgatgggctggcatttgccgtcgcccgggcgctccatgtccatggagctgatggcggcgcacgagcccatcacctgcaggaccagccacaggcgggggcccgggcgctgcatgctggcgttggacgtgtcctcgcggggagctccgcgcccctcagcgccgccgctcccgggcacgggctgctgctggccccggctctccacccctgctcgggcccccgcccatgcccgcccggcctggcccgagcgctgcgcacagcgcccccggctcggctctccgcgcccggcgtccgccgagttgggggccgcggcggagagcagcaaagtttgcaaacaataccgggaagcgagggaagcccccggagctcccggcgcagcggcccggcgcgagctccaactcacggccgcggcaaacttcggcctcttcttggagcgcccaggtggcgcgtctggagcgggctggcggcgcgggcacaccgaggccggcccagctcgcggcgcccccacagcccgggcggctcctccctccctgcgccggcctcggccgggaccagccggcagctgtttcgaggtttgcgtcccgggatgagaagactcgcaaaaaggcaaaggggggcagaaaagccgagcgctgacaggccccgcccccgggccgcgcgccccgccccgccgctgctttgcatgagaaagcgcagcggcccggggcagcctcctccccgccgccccgccgcgggctcccgggccccgcgggggccgatcccccccggcctgcagcccagcctgcggggggcgcagcgcctagtcccgcccgcgtcgcccgccagccccgggacagcccgcctggcgcgcggggctctgcgcgctgcgaccctccccggcagtcccgcccgcctctcctcgccctctctctgcctggcctccaactttgcctctcgctatcctctccgccggcgccccctttcccggcggtccccgggatggtccccggcaccccgaggacgccgaggttacgggaagttcggggactggcggg

SEQ ID NO: 10874 - DNA, 2300 bp, Homo sapien
aaggcagaaacaaacattgaagaaagatttacaaatgtgggcattaggccaggcagtaggtacaggaaatgccaaggtggtaaaaagtggtccctgccctccaagagactcacgggttccttaggggtaaagaaactagtagtgatgatggtagtgatgatggtgatgatgatggtgatgatggtgagcatgatggtgatgatggtgaagatggtgatgatgatggtgatggtgatgtgatgatggtggtgatgatggtgatggtggtgatggtgacggtggtgatgatgatggtgatggtgatgtgatgatgatggtgatgatggtgatggtggtgatggtggtgatggtgacggtggtgatgatagtgatgtgatgatgatggtgatggtggtgatgatgtgatgatggtgatggtgatgatgatagtgatgatggtgatggtggtgatgatggtgatgatggtgatggtggtgatgatgatggtgatggtgatgatggtaataatgatggtggtagtgatggtgatgatggtaatgataatggcagaaggaagtggagggggaggaacaagagaaaaagaaggaggaggaggagggggaaagaaaactgccacacctttcagagcagaattaacatgagcttaaatatcagaaaaatctgttttccagccctcgtttttctccttaccaagagggatatctttacacaaattagttaatgtccctgctccttaattttcttgtctctaaaattgagattctaatacctatttttcaaggccatcgataaggaaacagtagagagattaattatctaaatattttaaaaccaacaaagtgctctcaaaaaggatgtttgatcaaaaaaacatgttaacacgtgcctccctttcttgctccaaatccccagaaactacaggaaaatataatatatatttaaaaatatctaaatatctgtagaaaacaataacgatgccatcagtagaagagaaaacttccagaaacacctgaaaatgagcagttgggattgggtgaatcagatcaaagtctgggctggtgtccagtgctccaccaggagctactggctatgaagatggtgaaggagaccgcaccccagagagcccacaggtggtagagacggaactgaatgtgtgcccagactcttgtttggtggggtgaagctattgattaatattagacattaataaaaatttaaaattgaatatgatggttaaaaatttaaattacctctagaaaaatataactagtatgtataactactaaagcagttgtttataaaaagttaaatggaataaatgagacttgcttagctcaacttttaaaaaacaaaacgtggaaaagaaacaacataaaataaacagaaatacaagcatgtaaggacatcatgagataataaacactattcacccaattcccctataaaaggaaagacaccttcaacttgggtacaaatagaaactcagctacatgctgtttacaaaagggatatcaaggatgaagtaagtttaaaagggaagggatataaaaatgcaatattaatttagaccaatgaattcaaagtaaaaagccaaagaagaatattcagattaccagaggtataatcattgaaaaaatatgacaatcgcaaagtcttatgcccaaaagttatgggctaatcttatatataattataaatagacaaaatattagcatactgagtctagtaacacattaaaaggataatatatcatgtcaaggttgaacttatttatcccagaagtctttagaatgatcataaagaaagggatggaaaactataaaagaatagaacaccttaaaaatgtgtggatttgcaaaagaagcatgtagaaattctaagattaaaaaaatagtgttggaaataaaacagtcaacggatgtgaagtaggaggcggggcatagctctggaggcagggtccgcactccagaccagatcaaagactggctgaaaaacaggaaggaggtgaaagcagcccttcataagacacgcccaccagtgcaatgtcagtttaccattgccatgggaacacccataagacacgcctaccagtgttatgtcagtttaccattgccatggcaacacccagaagttactgccccttttgcaagacaacgacccagaagttcccaccctttttctagaaatttctgaataagctcacccttgtctgggatggaattaaaagtagatataaatatggctgcagaactgccctgggctgctgctctcaggcactgcctgtgggccctgctctgctg

SEQ ID NO: 10875 - DNA, 2300 bp, Homo sapien
cagcgtgatctgggagtctgtattatttggaagttccctcagtggatgcttacactcaggctagtgtgggaaacgctgacatctaacctgcccctttcatggcacagatgagacgtaggatttgggaaggtggcttggggagccttcagccctctccagcccccgattcccaggcatgcgcttttaagtatgaataataagcaatatgtaggccgggctctgtggcttatgcctgtaatccctgcacattgggaggccaagatgggtggatcacttgagcccagaagtttgagaccggcctgggcaacatgatgaaaccctctttctacaagaaatacaaaaaaattagctgggtgtatttctcgtatttctacaagaaatacaaaaaaattactacaggtggcacacacctgtagtaccagctacaggggaggctgaggcaggaggatcacctgagcccaggaggtcgaggctgcagggagccatgatcccaccattgcactccagcctgacagagccagaccctgtctcaaaacaaaacaaagaacacaaaattatgtgggcatggtggtgggtgcctgtagtcgcagctactcaggaggctgggagacggaggttgcagtgagccaagatcctgccactgcactccagcctgggcgacagagtgagactccgtctcacaaaaaaaaaaaaggaaaagcactatgtttaccgtataaatgcagttttaaaacctgtctgcagaggcgaccctatttctactacctcctacaatcatgtttatagttatggaacataacaggtcaggcagttagtgagcctcagtcccacttccaccttgacaaataaacctgttctatcttacaatatttccggttgttttgtggctgttgactttgcctccatgaggaaattaactcctatggagggcacctagctcggcgtagacccggtcgctaccacctgcgatgccttggaaatgcagccggcggggcccacctgtggagcctgcagaccggaatctctggtctgtgtcctaaccagccctgcaggtgatcccccgcaggtgaaggctgagaacccctgcggtccacgttggcatgcacccaaggcacaagtcattgaaagctaaatttccaggtaacggcctcctggcaccttagacttgcattgcagttttattttctttggggtcaaagttcaaatctctgtgtgctgagtgaaagagcttccgacgttaaaggccagaccaagatcgagtccactgctacagtagggcgctcggtgcccacgtgggcaccatttcgaagtctatggagggtctacttcgtgcgccgccgcccagttccacgagctagtagggaactggcccgaccccgtgtccgcctgcagggggctggcactgggggaactgcaggagtcaagccagggaaggccgggggtctgggcgaagcagaagaggaacagggcggggcctgggtggggctggccggggcctgtggggagggggcagggcacgtgttgggtgtctgggcggggccaggcggggtcttggggggacaggggcggagcctgtggggcgggggcggggcctgtgggggcctgggcgtggcgtctaggcagggccaggcggggtcttggcgggatgggggcggggcctatggggaggggccagggcatgtgcggggtgtctgtccggggccaggcggtgtcttggggggccaggggcagggcctgtggggcggggcgggcctggcttgttgggcctgtgccgggtgtccgggaggggccagacggggtcttggaggggcggggccggggcctgtggggcggggctcctctggtcccgccccggccacatcagaaaccgccgtttgcggggcagccaatgagggcgtggcgcgcgccgctttccgccgttactgggcgtatggcgtacagacacgaggccggcgcccgggaggcggtgttcatccgcccgggaaaagagcgcctgttgctcgctgcccgcgtgtccctggctctctcgggaacccagcgccgaaggcgaggtgggcgcgggccgaaggaggtcctgggaggtcggcggcgcggagggatctccgcgggagccgttggggctgttggcctcgggctgaggtgcaaggaccaggactagggcgagggcagcggtccaaggtgcggggccaggctgaggtgctaggtgtgcgggggccgggatgcgggggcggcggctgggggtccgggatgtggaggtgaggctcgaggtgcggggaccgggttgcgggggcgaggtccca

SEQ ID NO: 10876 - DNA, 2300 bp, Homo sapien
aggggccacttgtttgagccttgaccctgtgcagtaagatgtgctctgtgttccgtgagattgatgtccttgaatcctcacaacatctgctagggttgcagcttttacctccttaagtcacagagagtgcagagaggccaggcagcttgtccaaggtcacatttaaggagagctcccatttgtatttaggcaatttgacctcagaacccataatctaacccctatttcaaatgtctcttgttctcaaattctctgagctattgctgccttagtttaccttggggcatgttggtctctgaggtcagcagccaggtattttgattagtacacccatcccatccccttaagacctccagggattcccccatgtgggacatgctgaagaggctgcagttctctcaagcaaccagtgtgggactacattatgatctgctttacttgagaaaggcaacaataaatgttatgccatccagaccatctcagaagacagaagggaattgctccattatcaatcactttccctaaggttgggtaatcattgtttcccggaacaaagcaccaccgtcttttatgtttgggttccttcgctgtgttttattgctgtgaaaatgtagctaccacagagtagcggagctcattatgactgtggctaagaaaaaaggaaggttgactgaaaaatggaagctgaaaatggccaggaggagcctctctcctagtgggaagtgttgaaaccacgtgatttcttgctgcttttctgatgtgtgaatggagcctagactctgagcactcgaaatattgtaacagagatgaaccagatcaattcaagatgtgggtgtcccaccagtattaatttatttagggtgtgaacagagaacaaacttgaacaattgggaaaaagagaagttctcagcctgacagctggtagctggtgtggttccagctgccttccactgtgagtcattgattatcccttctgcttctcttccttttggaatggatgccattccttcttttaggattctaaacttattgaagtccttttcaggttgctttattatttttatttcctctggagtaaatttatcctgattattaagtttatgagatctctttagtagggttagttctctttatgtgttctggaatttctcttttcagactcatcttgaatgagagattcttaatcccatctctgtgctcactctccctgtcttacttatttgtagttactgtaccacaccctaggtgatctcagtcttgaattagattttattattggcagctccgagttcctgtgccatggtgatagtagagagtaagacaagtcctaaaactgagcctaaaaatgagttttctccctcttgcctctctaggtgcatgaccccataaaagctctggctctaggtggaggtgatggattattttcagctttctttgggggcttaactgttgcctcaggtcatgtggtgaccttagttcatgtctcttgtcttatgtggaatacattgaatcttggatatcttgaaaaagctggactcttaattctccctgcctatttttggactctgaatctagaaggttccagaagttccgctcaccacattgtggtctagccatttagtccttagaatgctttatcttatttttgagtggctaaatatttctaaactttctctgtctattgtttattgtggctgtatgtttggagcagtgttcacgggaaaaaggatgggtcaaagcttattaacaactccaattggcgagaagttccgttgcttttttaggacacagacactaagtgattaatatgtattattgtattatattctaatcatcgtataatataacatgattgccttttgtagatttggaaacttatggtttggaaaaaagagagaaatcagtcccaactcatacacagcttatggattgcagaatcagtgcccaaccttgggtctcattaccacattggagctcctaaccactgcactctaccaagtctctaaacatgggggcaccatctcacatgtcctttccttttgtcctaggaaaatgaactgaaggatgccacccagggagagtatctcctgagatcccatcatgcaggccttcccacaagggcccggcagcatgacaaggtagctgataccactgtccacagaccatctggggccctggagggagcgggctgggccagggaggaacaactgggaaggggcagggaagaatcactgaacatcagtgtgaaggtggcctgagaggctgagccaggtctctctcacttcttcacatgaccagca

SEQ ID NO: 10877 - DNA, 2300 bp, Homo sapien
aggaaggggcagactgggtcagtggggcccaattcacaggcactttctacggtcttttcatatgtttttatggaggtaaagttcacatcacataaaattaaccattttaaagtaaacaattcagcggcatttaatacattcacagtcttgtgcaactgccacctctctcttgttccaatgtgttctcaccaccccaaaaggaaaccccactccagtaaggagtcactcctcatctcctctcctcctagccctcagcaaccaccagtctcctttctgtctctatgaattcgcctattttggatatttcataaaaatgggctcatacgatagatgggctttgtgtctggcttctttccccagcatggtgctctcaaggtccatccatgtggtagcaggaatcacatactccattcctttttcctggctgaataatattgcattgtatggatatgccacattttgtttccccattcatccattgatgggcacttgtgtcatttctaccctttggctgttgagagcagcgcagctgtgaacatgtgtgtacgagtatctggtaaccagtcccttccacgattttctgcagtcttgtagtttctgtgacctgataactctgctgcagggtgaaaaggaatcatctgtggtttgccacctactcctggatacagcacgtatctctttgttccatgcacagaggctggggccactctacacggggcttgaaagaagcctccagtcttgcagccaaattcagaggcatataattcagaagcctatccgggaggccaaaatgagtcctgactgggaaaactcgctggacccgtctgccacagtgttgaaaaagttgtcttgggaagaggtttcctctggctgtctaggtttgagacctttgcgattcctttaagatcacaagcaaaaccacggtgatggtaggatgtgttggttttactaaggagcccattttttaaaaaacttgtaaagtgagccttaattggagaagcaacagaaagcacctcgggacaagtccttcctttttgtacaaaggacccgtggtgagcccttccttggaattctcgtgtcctacactcgagtcttgtccctgcacagggccatcattagtaggagccctcagagcctcaattagggtatgtggagcccaaaataccaaaggggctttcctccgcatgagctatcttattcagcacctttcagtaacaagccatgggatttttaccccagggaaggaagcaagtgtgtgaagtccgtgcgtgtttcccagggttttttccctcctgcaccacccggttgctaggtagcgggtatatctgtgccaccacctgaagttctgtgggaagggggaatctgcggggccactggaggcttggggtggggaggggagccggacaggagagcaaagacccaggcagcttgggtcgctcctcttcatcacttaattctgagggcgcttgagtttctgagcttcctggagtagagcccagggcagcttttactttgatgtgctgatcggttgcctgtcggttgcaggagacccccggcctcctgcagggaagatcctgtgctgttttcccagggatggagagaaaagcaccaaccccaagccccgcatggctgagagctgtttgcctccatctctgtccgagcttttcaccacagctctgtgaaagaaactggcagtgaggggtatagccatcttggtgtgtgtatgcgcacgtgtgtgtgcatgtgtatttgtgtgtgtgtgtgtgtgcgttcaaacactgacgtttcagaggctctggttactgctgcatggcggatgatcctctctctctccctctctctccctccctctctccctctcgacctgcttgcctgcctgcagaaaactaatgaatcatgtctagctgaatgcaagcagtgcagacacaccaatgccctgcaatgttgactgggcgccgcctctgcctgcctctcgctccctgtctctccctctgctgctccctccctccctctctccctctccccctcctccctccctccttctctccctctccccctcctccctccctccgtctcgcccccagtttgtaatctgacacagtacactgcagttgtctccgaggtgaacctccggagccttggcacagctcgcttctaaaggtaggctgagatttatttttttctcctaaaaatagcttcccgtctcccctcgcctttctgcacccgagctgcagcggcgttgatcacagggggttagccggaaactctttgcccagacaaagtttatcttgcagcggatg

SEQ ID NO: 10878 - DNA, 2300 bp, Homo sapien
gggaagtgataagtgtccatgaaatcttcacaatttatgttcagagattacagtaaagacaggcataagaaattataaaagtattaatttggggaactaataaatgtccatgaaatcttcataatttatgttcttcttccatggcttcagccggtccctccattcagggtccctgaattcccacaacgattattcacaacttcattttttttctctggcaggataaggaaagttttgaggttgggcatggtgggctcatgtctgtggtccctgtgcttttggaggctgaggtgggaggattacttgagcccaggagttcaaggcggcagtggactatgaccatgccactgcactccagtctgggagacagaataagactctgtctcaaacaaacaaacaaacaaacaaaaagttttggttgccaattcaacaccatccagctgctgccaatattatcatatgtttttgaaaaatccactgggagagagggagaaacgagggagggcccagtatttaccagagagggagaattaaaatggtggtggcagaggcaagaaggccgaaagaaaagcacttgcctgttgcggggtccaggaggcattctggtggggaagttcaggatatggagagaaaaaacatatcttttttttttttttggagacggagtctcgctttactgtccaggctggagtgcagtggtgcgatcttggctcactgcaagctccacctcccgggttcaagcaattctcatgcatcagcctcctgagtagctgggattacaggtgcccgccaccacactcacctggacaactggctgtcaagaccttccatcgggtaacagaaccacatcacacctagaaccaagtccaaaacgtcctgttttttaatgtgtagcctgttgctctcaagcagatttcttagcgctgccttctggtcagaccaaagccacctcctccaggaggcagtaaagactttaaccttgtttaaaaacaaatctggccttgccttctcctcctggaaggcaatctttgtttgcctgggagtcttcggctagccagagagtaacagtgtgatttatggtgggggcttagggttacatggatatcacttaaccaagaggctgagatcaagcatgaaagcaatcaaacaatcaatcaatcatgcacatgcaatggagcccagtaaacgttctgcacactgtggctcaagtgagcttccctggctggcagtacttcgtgtgtaaggccacacatcagtgcagggcaagtaatgaggcctgactacacagggagaggaccacgggaggaccttgaagctgcacgccgtaatccccagactccccctctgcccttcttccttggctgatgttaatccgtatcattttcctgctaagaaaccatagttgtgagtacagtagtttttagtgtattctgtgattccttctagcaaattatggaacttgaaggtggttttggaaaccgccagaatttgccgttggtgtcagaggtgataatggtcttggggactgttcccccaacctgggtagttcacctaagctcctgcaccttcatgacgacctctctgccagttccgtgcccatgcccttactttcttttctcatctatcatttatttgtctgtgtctgtattgcctgtttctcctgccagaatggtatcccagggctgggcctgcggacgctcttcccgttaccgccccctgccgtgttatgctccgtaagcatcatgtgtggtacacgatctcttctccttcattcacacccgaggctgcgcgtggacccttaaagagaaggttcggcatatgtattacccaaagctgcacccagcacattccgggagctttgctcttttgtcactattcgttgaatgctctatattttgataaataaaacaatgagtgtgaaagcataaaagcagatcaagggacaaacagcacgtgtagcggaactgccagcctggggctcggccggaccccgcccctccccgcctaggccccgcccccaggccccgcccctccgggctcccgctggaaagcgctgccgccgtgtgggtgggtgcggggcgcggcgcgggccgggcatgcgcagagcgcgcggggcgcggttgccgtggcagcgccggctccagggagggctgctggcgccgggccgggaccgcggggcctgaggcggagaccggagagcccgaggcccggccggaggcagctcgggacaggcttgagcggcggggcgcgctgcccggccggcggggatgcgggaccggctgccagacctgacggcggtg

SEQ ID NO: 10879 - DNA, 2300 bp, Homo sapien
ggcgcatgcctgtaatcccagctactcaggaggctgaggcaggagaatcacttgaacctgggaggcggaagttgcaatgagccgagatcgcaccactgcactccagcctgagcgagagtgaggctgtctcaaaaaaaaaaaaaaaaggaaatagaacattgcaggtaaagttaaagtcttctttgactcctcttctcagttccatcacactcctttctaccctttcttgaagcaataaccatcaggatatggtatatagatccttgcagtcaattaaaaaaaacaacaaaatacatatatccaatagccaatatgcttttgttttatgtgtatttgtaaaaaatatacataaatgacattatactatatatataatccctctagataaagttacatatagtgttaggttttatgtattaatttttgaaaacagggtcttgctctgtctcccaggctggagtgcaatggtgagatcattgcccattgcagcctgtaactcctgggtttaagggatcctcctacctcggactcccaaagtgctgggattacaggtggcctagactttataaagctgttatcacctctttcttcttttctcaacactatccttttgacatctatctaaccctgttgaaacagatgaccgtcattccttttaaatgttatacagtattaaatgttgtgcacatgcgtgaggcatgagtttaactctggggcctctccctagaaatggaaatccggggtcacaagcaatgggcattcccgttttactgttagattctgctctcccgccagcagcgtctgagaggtgcttggggttcccctgagggttctgggggagctcggacttgcgttcccagcaggccggttgtcgcctgctttgtgcctaatttgcgtcactggggttcctagcggactcgcctgcaagtgtgctcaggactgcagggaggactcttcggtcactgcggctctctccccatggtggactcttctgaggcgcttgactgcgctgatttgggcctttatctgtctgcatgtcggcaggggcgcccaggaagtcgggtccctctagctcaagcttgtttgggctcttacagcttcaggccaacagggggctgggaagctgagcacttactcattccgtccccgttggtaactagggctggtagacgcgtccagactgcaaacagtatttcatcattttgtctgtagcatgcagcggccaaagctgccaacctatgaaacgctttgagaagccggacgctttgggaggccgaggcgggtggatcccctgaggccagcctgggagacatagttagattctgtctctcaaaaaaatttttaaaaaattacccctgatgtggtgcgcgcctgtagtcccagctactcgggaggctgaggcgggaggatcgcccgagcctgagagttcgagaccagcctgggcaacgtagcgagactccgtctcttaaaaaaaataagtagccgtttttctgggtgggtgcatccctctctggttcctcgctctccaactggccctggtcctgggggcgtgaaggctacgatctggagagacagaacagcgggctgcctctggaggacgggcctagaccccattcattcattcattcgttctgtcacccacccgtcctgcgcgcacgcgagccaccctaagccccaggacctcaagaacccccaccccacggggcacagacaaggacaggctggccagcgcctggaagccgcgtgcctgaccacgtctgcccgagcgagtaccgcctcccacccgggaggcaggagagccgcgaccgtcgggccgcgcccaacgtctcccgctcaggggcgcgccgcctcgctttcagcgcatgcgcgcccgggagcccgcccggggcgtcggcgcacgcggtccccaccggccggcttgcgtacgcgctcccggctcgccctcccacgcggtccaccgcgcctcccgccccaccctaagcgcagcgaccgcccgagcggccgaccgaaccgcgttgcgtgcgtgcgcgcacgcgcgggccacgtgggcgggcgccgcgccgttgccccgccccttgcaaccccgccccgcgccggccccgcccctgctctcgcgccggcgtcggctgcgtctccggcgtttgaattgcgcttccgccatctttccagcctcagtcggacgggcgcggagacgcttctggaaggtatcgcgacccggcgggcccggcacggccgggcggggacaggggtggcggcggcgggataggggtcggagccggggccagggccggggcgggtgg

SEQ ID NO: 10880 - DNA, 2300 bp, Homo sapien
agcttgtttgggctcttacagcttcaggccaacagggggctgggaagctgagcacttactcattccgtccccgttggtaactagggctggtagacgcgtccagactgcaaacagtatttcatcattttgtctgtagcatgcagcggccaaagctgccaacctatgaaacgctttgagaagccggacgctttgggaggccgaggcgggtggatcccctgaggccagcctgggagacatagttagattctgtctctcaaaaaaatttttaaaaaattacccctgatgtggtgcgcgcctgtagtcccagctactcgggaggctgaggcgggaggatcgcccgagcctgagagttcgagaccagcctgggcaacgtagcgagactccgtctcttaaaaaaaataagtagccgtttttctgggtgggtgcatccctctctggttcctcgctctccaactggccctggtcctgggggcgtgaaggctacgatctggagagacagaacagcgggctgcctctggaggacgggcctagaccccattcattcattcattcgttctgtcacccacccgtcctgcgcgcacgcgagccaccctaagccccaggacctcaagaacccccaccccacggggcacagacaaggacaggctggccagcgcctggaagccgcgtgcctgaccacgtctgcccgagcgagtaccgcctcccacccgggaggcaggagagccgcgaccgtcgggccgcgcccaacgtctcccgctcaggggcgcgccgcctcgctttcagcgcatgcgcgcccgggagcccgcccggggcgtcggcgcacgcggtccccaccggccggcttgcgtacgcgctcccggctcgccctcccacgcggtccaccgcgcctcccgccccaccctaagcgcagcgaccgcccgagcggccgaccgaaccgcgttgcgtgcgtgcgcgcacgcgcgggccacgtgggcgggcgccgcgccgttgccccgccccttgcaaccccgccccgcgccggccccgcccctgctctcgcgccggcgtcggctgcgtctccggcgtttgaattgcgcttccgccatctttccagcctcagtcggacgggcgcggagacgcttctggaaggtatcgcgacccggcgggcccggcacggccgggcggggacaggggtggcggcggcgggataggggtcggagccggggccagggccggggcgggtggcggacccaggggcagcgggcggctgagtaggtgggtggtgcgggcccggccgggccggggcaggagacgggcgtggggtcggcgctagcccccgcgaacccccgtttcatcctccgctctcatccccgtcccggtcccagtcccgttcccatccctacacctccggccgccgttccccgggccccgccgccccggatgccggccccgcccgccgccttcccgctcccaggcctggccgccatggcgccgcgggcgggaggcctttgtggggcgggcacgtggggcgctgggggcgcgggagcggggccgccatgggctgcggggccgcgcgagcgctcgcctccgtcctctgcctccgcaggaacgccgcgatggctgcgcagggagagccccaggtccagttcaaagtaggtaaccctgcggggcgggaggcggccgagcccgaccgcgtgcgactcgcgggtccctcctcctggggccacgatggctgtaatggggccccgcatccacattctttgttttaagtgagcctgtggtggttaaagttccgtgactctgggatcttgagaggtgaagtgtttagggtttacttccaaaatgtgtttttcaacagcttgtattggttggtgatggtggtactggaaaaacgaccttcgtgaaacgtcatttgactggtgaatttgagaagaagtatgtaggtatgtgctggaaaaccttgcttgtggaaatatgtgagaaatgggtaagttcatccactcaatcgcatcgtttccgtttcagccaccttgggtgttgaggttcatcccctagtgttccacaccaacagaggacctattaagttcaatgtatgggacacagccggccaggagaaattcggtggactgagagatggctattatatccaaggtaggcatttgtaacttgctgaacggtttttgagaggttttgtgtacttcagtcttcaaggttatagaaaatcaggtctgttccaacaaatagtgtcatttttgggttaaaaaaagacaagtggacttcggggagttgaccaccattttggtggcagagaaaattttatt

SEQ ID NO: 10881 - DNA, 2300 bp, Homo sapien
gtttggctttgctgcgggagggcagagccaggctgggtttggtgacaaacgctgagtgctcaccaagtaccaagccctgttctcggggctggggtgcagagcgaacaggcagaaagaaggtctctgctctcatggggcctacgcctcggtggggagagactgacaataaatgaaataaacgtctaagatatgaagtacattggatcgtggttagtgggatcgagaaaatacagcaggggagggctttagggggagggagacctgctgtcaaggtgatgtttgggtgccgaacaccccgacgtttgggtgatggaatgagatgctcagagacatcagagttgcttggttccaggcccatggaccactcaaggccctgtctcaaatctccaggcttcaggacacgctgctttacatggaggcgggctcttcatctgggcctctgaacaaggcctgagacaggacgcaggcaaatagcatgaggcacgagactgtagtccgggatggagagtcagagtgagtctgaggatgagtgcagatgcctgcagggcaagctctgctgaattgctttgctatctagtttttattacagtcattgaatcggggtgtctcccattatctgatgacaattttatgatgaaaagaaaccatgctggctttgttcggtcatggagatgggaaaggtccgcatattcagcaatctgttgaattcttccaggttaaaactggagctgagaaaaacctgcagctgcctgtccctcccttcacctcttccagcgagaggcagtgggggactggagagctgatgaaatggcagagataaaggttgtaaattagttttccctgaagccgaccagcctgagcaacaggataaaggtcgttattacagacagcccccggcctttggagttcacagtttctccattgctaggagatggaactctctggaacccttctccagctccacagagaggctcaggctatcagaggatctgagcggttgtaggctgcaggcacaagttaaaaataatcacctaacgttttgacagcactttctttttttctgtcccacagagattggaagtcattttcttatcctctttaggaagtatgttggattcaggattcttaattcccatttaaagtcaggacaattgagataactgtatcagctaacatttactgggtgttatgttatacttgctaataataatcatagctaacatttactgagtgataatttttcttaatagaaaatagcagcatttactgagtgccacatattttccaagtactgcctgaagagccttggatctgtcctctaatttattgttacagccctgaggaggaggaactattaacccccattttgtggatgaggaattcgaaaactaagagagatcaagtaatttgcctaggagcacagctggtgaatgttggagaaagtatgaagcggtaaatattacttaaatcacatagcaaatatagctgtgactgcaattctagggtgtgtgtctctgtgtgtccacgtgtatttggagtagatcggataaactttggtcttgggtaaactgaggcatgtctggcgaaggggctgactcttttctatcccattgagaacatcctcctggtgctggggtgggggtatatgtgggatggtgtaattgcgcagcgtaccttgtaattaattccgtagctttcactgacgtccgaaaggattagagagaaaaatgtggtcagcgcttaatatggagggcacagtgggtgtgctgctttctcttttccatccctctgtcaacttcattctcttttgggggcaaacaagactcagatctaaacagagtttatggtttgttttgcattttgtatttattaatatttatgccgactttgaaggtgctgaccagaaggcatcagtaacacacacacgcacacgcacacacaccacacaccatgtctgtttggtttgattctgagcctgagatcctggaaatatttcagctgttgttaagaggctggagttaggacccaggaaggacacagcagtggggatataaatagaaaaggagaacagaacaaagtttgaggagagagacttacatcactcactccccctccacccagagagcaggacggaggtgtgaacttgagccagaccagaaggagctcgagagcggccgcaggacaagcccgaggagcaggcgggcgctccaggggaaaaccacgcacaaaaccttcttcagagaaaagggaagctccaaacctgactgagacaaacggaggctcttgaaataaaaagaaaa

SEQ ID NO: 10882 - DNA, 2300 bp, Homo sapien
tgggagagatccttctactgcctggttggattgctctgtcagaggtaagagaaaagaacatggtcggtcatggtggctcatacctataatcccagcactttgggaggccaaggcgggtggatcacttgaggtcaggagtcaagaccagcctggccaatgtggcaaaaccccatctctactaaaaatacaaaaattagccaggcgtggtggcgggcacctgtagtcccagctactcaggaggctgaggcaggagaattgctggaacctgggaggcggaggttgcagtgagccgaggttgtgccactgcactccagcctgggcaacagagtgagactctgtctcaaaaaacaaaaaaaaaaaaaaaaaagagagagagagaaaagaacattttgatcttcaaaacgtatgtgcctcgggaaccattttgtcttcctagaagtggcataatatggcccagtcacatccacaaaaagaatgatgtatctcccagtcctgacatctgggatataagagctcattttgagtagacatgcaactgattcagaatgccttgtcctctaaggcaaaagaaatgcacgtgtgtcagtaatgtgttactgtcctaaacatggaagaaggaaatgatggttttttccccatgagaaatgtgtacttggttcatcctggtcatttcatgtaatatgtattttttttttctttaccatcccatcattcttgaatgacaatagaaagctttttatgttaaaagtcactggatttagtaagaaaaaggagaatacatgacaatatgtacttcatgattaaggtgcagaaaaaaagcttctcttgttctctttactcaaaatagctagaaaggagaatgaaataatttttcctatatttctgaaaataacttgattgtacttatttaaaaagaaaacaaataaatagttgtggagaagttagaaaatgcagataataaaaaacaaaataaaaatcacttcaaatcctaaaactgagattattaacattcttgtatatttccttatagtctagttttcaattcacttatatatgtattcaacagatatactgtatatttgacttaatttgtttttccttaattatgtcaataacactttccaatgatactaagtattcacctgcaacactgtattagtcaggacaggccagggtgcactgcagtaacaaatagatccctacatctcagtggctcagcacagtagaaatttacttctctgccatgcaaagtccagagtgagtcagaggagcctcttctccacccagatactcagggatcctggctccatctgtcttccggtgctggcttctcaatatgtggtttccaaggttgccaggcaggggcagagaagggtgaggaggactcttaactgccttggcccagaagggtcccaaccacaccaccatgatattaaagtgctcattctcctaagccctgataatatttgaaaatgtttgccagtttgagggcagaagtggcattttattctctcattattaataagattgcgttagagtttacatttgataaacttttgtttgaataatttcaagtggaatgagattaggtttaacagtggcaaagggagaaaaaaaggctcaagaatgtaagatggatacagtcttacctagaaaacaattcctttttaaaaggtttgacctctttcatgatttcaaggggactttgtgtccaaagctgcaggctgggaacacccagaggacagccaatggaagtatccaggcagacgtattttgtgcatgattttaattaactgcttttgaatgcaaaatatgcaaatctgttacaaaatatgaataaccaggaaactgtccagactcaggcagggtccaatatgcattaaagagaatgcatgaatcggtctctaccccacagaactgcatgccagaaacacagacttccatgtgcttaactgggcctggtgactgaaatcaggctatgggcctaaaagcaaatatctaaaattggcctcagcattctatttccagctcatgaggctcttctgaagtgcgtgtttgtgggagaatgctgaggacttagcagcaggcaggtgcttccccagaaaggcaggaagagaagcagtgaaggcagagctcactggcccagctcagcagggcttaagagaggcctctcccctggtgatgtgtgtctgaggatgagggccccctgctttcttgggggcagtgtctaccaggatcctctgctctggaactcagaaaggaaagagggctcttggagtagaaggcaagctcctgggaag

SEQ ID NO: 10883 - DNA, 2300 bp, Homo sapien
aatgtcaccgaacgaggggtccacaacctaatcccagagcctgggaatgtcaccgaacgaggggtccgcaacctaatcccagagcctgggaatgtcaccgttaagaggggtccacaacctaaccccagagcctgggaatgtcaccgaacaaggggtccacaacctaaccccagagcctgggaatgtcaccgaacgaggggtccacaacctaatcccagagcctgggaatgtcaccatacgaggggtccataacctaaccccagagcctgggaatgtcacctacgacgggtccacaacctaaccccagagcctgggaatgtcaccacatgaggggtccacaacctaaccccagagcctgggaatgtcaccgaacgaggggtccacaacctaatcccagagcctgggaatgtcaccgtacgagagtcccacaacctaaccccagagcctgggaatgtcactttacatggcaaaagggacctttctgatgtgggtaaattaaacgtctggaggtgggaggtgatcctggattagccacatgtatccagtgtgatcccaaggatcttgacagagggaggcaggagcagaggagggggaggcacagaggctggggtcaggggaacggattcgcactgcaggttcaagtgttcatccgcactgactataatagtcaatataaaaataagcctggtagattacagcagcaggcaatgagttaacgttggaactacatcgagagctctcagaagtcactaacaaaacaaacactccactggagaaatcaggaaagaaggtggttacaacataaagaaaaatgcagatggccagttcacttaggaagcctcaccaataaccaaagctacgcagctatgaatgacaaccaggtgtgacttcctgtgcatcagagtctgcaatggcgtgggagaggcggcactgccgagccccacccatggctggataaatggttacgacctttctgaagggcagtttcacgacgcgcatcaaatttttaaatgcgtctcaccaaaaatagccgaggccgcctggaataacaagctggagggtttacacgagccggtctcaggccttggcataggacgtggcagttgcaatcgtaccggcatgcaaatgggatgacggacagagcagagtccagaaacagccacgtcgcccctcccgtgactgacggcaaaggcggcaccacagcactaggggagaggttggtcttcccacacgtggagctgggtaaattacatatccgtctggggacagtggtcagtctcaacccctactgcactgcagacacagaaacaagcagagaaggaccacaggcccaaacacgaaagtgaaaacaacaaatgttccaggtaacacaggaaactactttcatggcctcgggttaggcaggattcctccaccaagacataaaagcactgaatacagaagagcttgataaaccggactgcactgacgttgaaaactgctgtccaccagcagacaccatcgaagtcaaaagggaagaccccgtgtaagagatatttgcaatacgtatatcaaacaaatgactcatactcaaaatacacaaaaactccttaaaaaatcagtaagaaagaaaagcaaacagcacaacagaaaaatgagcagaagtcttgagtagatttttttaaaaggatattgatatccaataaacataaaaaggtcaccaacatcattcaagaaaagcaaataaaaaacagaatgagacaacattagccaccagaatggcggacctggaaaagacgggccacacccaatgctggacactgggcttctcacgctctgccaaggggagagtgaaccagtgcccgctctggagaaggcaccgggcaccagctgttcatgctgaacatgcccctcgacccagcgacgccatcctgggcagatcccacaaagaagggcacagtcaggttcaccagcagaaacgcgctcactagaacatccggcagctctgttctgctggcgtctggaaaaggcattccatggtgctggccgtgtgctgcttcttgacctgaggggtgatttcttgggtatgttcgctttgtaaaaactgtcataccatacacacatatacgtgcttttctgcaggcatgttatactccaataacacgtttgcttttaaaacatggctggcagggggatgcagggtgatgagaagtttggtctgagtaaccctgaacccctagctctaatttgtttctctgtgactctacaattctacctgctcccctcagtaaataaacacagatctggattaaacatccaaa

SEQ ID NO: 10884 - DNA, 2300 bp, Homo sapien
gccccatgcagtaagatcctggtgcagtgagtgagacccagtgcagtgactgagacctggtgtagtgagtgagacccagtgcaatgagtaagacccagtgcagtgagtgaggcccggtgcagtgagtgaggccccatgcagtgagtaagatcctggtgcagtgagacccagtgcagtgactgagacctggtgtagtgagtgagaccccagtgcagtgagtaagacccagtgcagtgagtgaggcccggtgcagtgagtgaggccccatgcagtgagtaagatcctggtgcagtgagtgagacccagtgcagtgactgagacctggtgtagtgagtgaggctcagtgcagtgagtgagacccagtgcagtgagtgagacctggtgtagtgagtgaggccccatgcagtaaggcctgggacagtgagtgaggcccggtgccgtgagtgaggcccggtgcagtgagtgaggcccggtgccgtgagtgaggcccagtgcagtgagtgagacccggtgcagtgagtgagacccggtgcagtgagtgaggccccatgcagtgagtaagatcctggtgcagtgagtgagacccggtgcagtgagtgaggctccatgcagtgagtaagattctgttgctgtgagtgagacccagtgcagtgactgagacctggtgtagtgagtgaggctcagtgcagtgagtaagacccagtgcagtgagtgaaacctggtgtagtgagtgaggccccatgcagtaaggcctggggcagtgagtgagacccggggcagtgagtgagacccagtgccgtgagtgaggcccggtgcagtgagtgaggcccggtgcagtgagtgaggccccatgcagtgagtgaggcccggtgcggtgagtgaggcccggtgcagtgagtgaggcccggtgtactgagtgaggccccgtgcagtgagtgaggccccgtgcagtgagtgaggcctggtgcggtgagtgaggcccggtgcagtgagtgagacctggtgtagtgagtgaggccccatgcagtgagtgaggcccagtgtagcaagtgaggcctggtgcagtgagtgaggcccggtgcagtgagtgagacctggtgtagtgagtgaggccccatgcagtgagtaaggcctggggcagtgagtgagacctggagcagtaagacctgatgcaataagaccctggtgcagtgagtaagacccagtgcagtgagtgaggccccatgcagtgagtaaggcctggggcagtgagtgagacctagtgcagtaagacccggtgcagtgagtgaggcccagtgcagtgagtgagacccagtgcagtgagtgagactcactgcagtgagtaaggcctgatgcagtaagacccggtgcagtggttaagaccccgcctcccgtgaatgagaccccctccagtgagtacaaccccctccagtgagtaagactcgctgcaaggctgaaccctgctgtccccatgcctctccaggggcctgatataaaggggccaggaacaggagcagcctcaccaaagttaatttctttttatttttaaacccaaataagctttgttgtttttaaagcaggtaaacaaaaaggagaccaggagaaccttagtagtggtataatgtgactcggttttggcttgggtgtgaatcaatctccaagcaatcatcttgccttttatagatatagtgaaaataattaactaggagaataacatttttatctacattataatttccacttataaaacgttcatgtctgtgtgcataaggcataacaggtctatatctaggaaaatggatccatttttctccttttgatttggctcctattaacattgttataatacagtttcttcgataaataataacaacatcatactatgtcagtgattgactgctgccctgtttctattttcaaacagacaaccagacatcatgtgtgggggcagctgctaacaccccatcatcagttaagcacagagaagctgtgtctcggctcagtggatttccttcttgaggcataaaatgcagaggcggtctgaaggtgcagactgcagtctcaatttattctacgtagaaaacagacgctactgaagtcgcacttgcagtcagaactccgggcccctcggggcgtgactgcccagctgtgtcacccggagcagctcatgctgcttctaagctcagcttccttgttggcaaagggccctactgtgtggcacacgccgtgcacgtcaggacaagcacaacgcatggcgcacaccacctgctgggagaggcaattgtgcactctacagccac

SEQ ID NO: 10885 - DNA, 2300 bp, Homo sapien
aaaccatttggccaacttcatgacaagaagaacaaagggaagaaaaaaagaaacaacctttaaattctagctgagatttcaagtagccatggcccaggagccaaattgaaaagctgtaacacttttatagacgtttataggtattgcttttctggactgactgcagcactgagattaggcagtagtgcccttcggcaggtaaacgtgttcattccgagcacagcagctatatggattttctgttctgcctctttctttactcctgaaagatgccattagatggaatttggatgctctggggccatggccttccatgttctgggaggctcgtggattcctgtggatcgtccccccgaccctgaggctcctggagctgacagagcccagcaggcccatcctccatctctgacgtcacaggcatctgagggcagggccatgcactacgagtccatgatgtaccaggcgggggagccagtggctattctaggaaaattccatctccagggcatgaaaagacagataaagatcagtgtaactcacctgtgctgagtaacatggtgggtcacggtggggctctggaaccaggatgtcttgacctgagtcctgaattggccccttcccagctccgtcacttgccgtgagtcctccaaccaccatgtggcttcgtggcttcatttgtaaagtggggcaagagtgtgcgcagctggcaagggctgagcaattgaatgacttcactcatgtaaaacagagcaggaccaggcgcagggcaggtccgtggaaaaggttaactattgccatcattaggaaccatcaaggggctcacacacatgatctcagtggaggcttctagcagcctgtgagggggtgttagagatgtctggatgccagcaacagacgctgactctggttctcctgagcagaaaggtagtttattggaaggataaggggagcacaatgtatcagagtgaagtcatgaaaacaagacaaaatccaaggtcttagaaaatatcttatatggtattattatatcatttttgtattcggcacaaaaagggcaggccaaaaataagccctaatgagacaactgtataaaaacgttttgagtagcctaatgagtgaaaattatttaaaacgtgttaattattattgcatgtatgaaagaatacaggtcgccttgttgcgatagaaatgccaaagtcccttgctttccaataacatgggcctgagaaaattcagtgtcactcatccacgacgatccgatgtggaggttcctattcccacggagatgaagccacaagcaaaggcctgtccgtgtgcaggtctgtcctgagcatgaacatcctgtcccagagagaaaatgctccctctgggaagagcctccctgggcaccccttgggtccttggagcccttctgggccacatctctgcttagcgttgggggacctgtcacacccgagtggggtgaccacgggctcgcgacctgtatgaggcgagactccagcattctaggggatgaccgcaaaaccaggccctcagcagaggccgcctccttccagagccttctgtggctgggcgggggtctccaggcagctccgcagcccccgcaaataccccctggtgctgagtccgcttatacagacagagacgaagggcagcgacagcgtttttgttttctgaagtgggagggtctcgtgaccgcagctcaggaggaaaacgaggcgccggctttgcaggtgggtaggagtttgtgttgtactcggaggctgggagcccctggggcttctgtagggagaggcggtctgagacgcgctttagaagttgacctgctgctctgcggggactcggtgcgggagacgagtggaggctgctgcgtcatccaggtgagaggagagccaggtgcgcagtgagcagaggtgggaggaaagctggttgccacggagatgagggcgtgtccatcactgcaaggctccacccacagcactatcctgggcggaaccttcctggccccacccacagccttagctgattggactgtggagtacatgtgacttcaggctgtgtccttataggttggctggcctctagtgccctgcccatgtggtcatggagtgtctgcacgggacgtcctggagagtcgggtgagtctgccatccaggatggtggagaagagtcctggggtcagagtgggcctgagaaggggctgtgggctgcaccatcaggggaatgtaagagaggctggagccacttgatagagggtggggccatgtacaaggaggtggggctaagtgaaaggaggtgga

SEQ ID NO: 10886 - DNA, 2300 bp, Homo sapien
gcatggctgtgattcccaggggtcagaggtcaacagcctgaaggtcttctcaaatatgggaggccaggcccaggagttgaaggaaaaaggtttatccatgggagaaggagtagtggggctctcctacccctaactgcatgattctgcaataaccagaaacaagaacaagaaaccgcagccattctcctgaggggacgggggccccatttcttcaaagttccctctcatcctcagggatactgatgggctcccctgtgactgcccctcctctctccctggggcatcatgaacctggaagggggattcttccgtctccctggccctggccacgcagtgcccacctttcccgtgatagccacaacgtccgtggagagggaagtccagcccctgggaaattggaagttgtgcgcaggtccttgcctgctgaggcctgagccggcgttcagcacaggtggctctgcccagccctcagcctctctgccttgtccctgagccggagagcacaaaagggcccctccaggggaaatgctgctggtgtcatggcaacagctgtttcactcctgaagggggccaggccaaggccctgccttctgcaagcactggttctcagagaagataccagggcctgcagggtgaaaatgagctcctgctaaaatgggaggcacaggctgtggcgtccaggctgcccctaccccagccccacgcacccaggaatctagcacgtctgtagcccctcgggcgtgagcccactccgctgtgaatcacagttgaaggcggtgcttgctgagtgttcgggcttcccatggccccctggccccaggttgctccccgtggtccagtgcactacctgcctcaccctgagctggggccccctgggcctgcggcatctcctccctcattgccaacagctccttacacactcagagtggcctccttttgttcctttgtcctggtgatcggggagaaggcatttagactccccctacccgcatgccacaggaggaagctggaggcaggcgtctcggaggacggggggacgtgggtctggggtctggggcctcagtgccggacagggacagcatgatgcaggcttcaggcttcagctgggcctctgacaagagccatgggccacaggaggaagcacgtggcgccctcctgcacgtgagcagctgggaggctgcccttccaggcctgtggcttaggagcccggagcctcctggagcgcagggtcacatgtgtctgagcttgaggccccgacttcagaaccgagggggcgccgtctggattgtgcggtcggtgaactgcggcttcggttctatcctttgtggccctgcagccgcttaatccccaggtgtgttctgttctgcctcattcccacaaggtgttgggacccagcagacacgggtgctggcgatcaccaccgtgtccatttagagagctttcctgaggcccacagtgtgcaggcggcagccattgtgcggggactgggagggttgtggcctcaggcgggggcggtagccagctcttccctagcactactttgtgcggggactgggagggtcgtggcctcaggccggggcggtaaccagctcttccctagctgctccagcactttatgtttgtaaattcatggagtccttgcggccactgtgggaatggagaggggtcattattttcatttcacagccgagtgtcacatggcccagattgtcagccaggacgtggcccagctgggacttgaacccgggaggtctggctctggggctgactgttagtctgcagccctgtgtattgcagtgtagacaggaggctcagcgcctgcccgggccaggcagccacagtctggagactgtggctgagggagcctcagtgttctgtagggcacctcggggcaccggacatgcacgcacagaaccagggctgcaaccccagcaccggcctctgtcggtggcagcaacagacatttgggctgggaggcaggcttggtggtcagcaccacactcacaggggaccagctgtgcacccacctgggccctctgcagcttcaggctccgatggggtgcctgggcctgctgctgacgcctctgctctgctccccgcagcttgcacgcggacaccaggtggcgctgtcgtctatcagctatgtgggctgctccctctccgtgctctgcctggtggccacgctggtcaccttcgccgtgctgtcgtgagtccccttttctaatccacccaacagtctctcggcccctgcctgcacccagatctcaagatggaagagacacgggagaggggaggggctg

SEQ ID NO: 10887 - DNA, 2300 bp, Homo sapien
accggtgcctgtaaaacccagaagtgttccagcacttcagctctcagagaagccgcagccagcttgttctcataatgctaatgcaataaaaataaaacacctgtttctgggaaacaacaatatcatgcattattcagctacaatctttaggtcccgggaaaccgtatctgaaaggatcaatcactgagaaataagtaccaaaatgtgctacttttaaagtgatggtttgacttttcttaaaatgaacaatagaagaagatcttgggggaagacgctgagctgaagctctgcggactctcaacacggccagagctgtcagtgtccctggtcaaaagcagaagaagaggggtccctggatctgaaggaggctctaggcagggggtgtgctttcctctctgatctatgacccccttctgctcccccaaggttggccctggcctagggggctcaggccctgagtctccaggccccacagcccacctgctcgtgggtgcacttctgtgggggtctcaccctcacgcccccgcccccagggtcccacttgtaaaacctgaccattctctgcttctttttcaggagtctggaatcacaatcaataaacagagacttttttaaaaagtgaaagccaggcttctccccctgctcagacctcacttattctattctccacttttcttggggtaggggggtggcagggaagtgaaagccaaccctgtggagggcccctgaggaagaatcttatcttgttattcactgagtactgggctgcttggcactaagaaaatcactagaataaaaccagaggatgaagaatagcaaggtgctggggaagcttcctcacgatgcagtgactgcctcttcctgcctggcgcctgctccctggctgtgcttcctcagccctgggagtcaagtgttacacaatccacactaagaagattgtgaggaagcatccctgaggggcagacctggccgcccaaaggagaggagctgaaggcattgggaaatgtgctgggttgcacaatggagagggacccagagcggtctgtccccagagatgcctgcctgcacctccccggaagggacgcatccctgggctgccaggtgcagacgcaggtgggaaggatgggcaatgccttcagctgtgccctgcaaagacctgggcatgctctcccggggcacgctacctcgagccttcacaagagctgcagacacagtgccagcctgtcgcttggaggacatttccatggagaagcaaaggcagtggacagaagctgcttcctgggtgggcactgatgggaggatggggcgcagtggggtagagatggaaggcggtgcacaggtgcggggcaggtgcacaggggtgttctggtgacagtggaagtagtggcctcatggggctcagacaggggattgtgagcttttgctggagacaagctggcaacagactggctgaccctgaacgctgaggtgagggcctggggagctgagggctggggtgaggaagggacaggtccctccccagccaggccatgagaggtccaggagaccatcctggtctcagcaatggaagaggaaaggacgtgatctctgaccccacgagcatctcttctcgcacggggcacaacccttgaaggtttccaggagctgaacagcccaaggaggctgcagcctcttgtcaggttaatttatggtgtttggaattcattacagactaattctctcatagattcgctgctgacatatttgccacttttgctttcacatcagaacagatacgcggtggctgaagtaacagtacagaatgtcagctgcctggtacccacgccctgcttttcacaaagcccctgaattccctgcgagggacagcctccccagctttcagccctgtggtttgggggtgctaactgaacagtcacacggtcatatgagtgaatccccctctacagggtctggctcagggagggcacaggtccagcctgagtccccatcgtcctccaggcgcaggcctccgtctcagcaggtgggacagggactcccccgtgggcctgaacccctgccgcagccattcggccaccagggggcagagtcgacctcggcctgaagccaacactaaggatgcgaaggcgagctgggcccggtgctgcaactgccaaagaattcctgcaacgccagggcttctgagctccggacttcacagtcagctgcgtcagtgagtcccccttctgcttaggccagtgcatgctgggatttctgtcacctgcaatcggctgggccgtaagagatgcaggtcaggacacccc

SEQ ID NO: 10888 - DNA, 2300 bp, Homo sapien
tgatatgtcgtgtgtgtgcgttctgctgcaggctacttctgtgcgtttgcctgtaaacaacctgtgtgtgccacctcctattacctgggcctgctgctctgtgtattaaaccattcccgcatgctcccgtctgtccgctgctcgtgggaggagtctgcggattccttccttgtatgacctgcatggtgctgtgtgtggcgctgcctgggtgtatctgcatcacccatgtttgtgccacctgcacctgtacttataggtgtcacacacgcaggctgctgacatgattattacctatgtgctacatgtggacactgccagtgtcacccaggcacgggggctcatggatactcatatgctgccgccagcggaacgcacccttccctctactgcggcgcgaggggcgggtagagacgaaggctggtaggaaactctggggaactccgggtcctccagctgcttccgacagggccctccgggtcacgggaagagccggccgctgtcctcaccgggaccgggaccaggaccgggaccgcgacggcatctccccgcccgtccctgagcccctccttccgctggccaggaccctcggaagcgagcccgagccactccccctccgaccaggggtcgtccagaggcctggctcggggagccccgctgctgcccgggtggcaagtgctgcggcccctctgtggactcctgcccggctggcgcggcccttctccggcctgaccctgtttctctgtcccgcacgggcagacgcggggacagcgggctctgagggctcggggctggcgtccaggcggggtctgcccggtgccccccccccatgctgccttgaggcccctcgcgatcccaacgcccgcgccctccgggttttcacagcagggaaattgaggccacgggcccaggtcaggaccgcgcagcaaggaaggggagtgatccaggttctggggttccggattctgatccggctctgtgtggatgaggactccttgggctaggaagcccaaaagccaagaaacgctcaaatgagctcaaggaaataaaagcggggaggggacctggccctggaaacgctgcagcacagacctggctgcaggctcgactggatccagggctccagtgatctttttttctgtctcatatctgggccttcagcggctttggccctgctaatgccccaatcagggacctctacctggcaggctccccctacaaaggagtaagatggctgcagctgcttcctggcttcctctcagctccgtagctctcccgccagccctggggcaggtcctggcatgcactctgattggactggcagagtcatgtgaccaggtctgtaccaatcataggcccagggcacagccacctgacactctgattggacttgctccggccatgtagccagctctgcaccaatcacaaagccagagcacagcctgtggaagtgtaacaacctttcccattggccagggaacaaatcctgatgctcactccgattggacttgctcgggccacgtgaccagccctgcaccaatcacagagccagggtaaggggcttccaaccacacctgggccacaggccccttcatagaccaagagtccttgtagcggtcccagcgtcttagctgtgggtgtgggggctcctgagtgaaactcgggaggtcccggaaggagggggcgaggccctcagcagctgtggagtctgtgccctgaggccccacactgggaactggggacgaggagacggggacgcggcccgggtcttgacctcctcaggctcaccagacactgcgttcaggcctccgggacggtcctggtggggctcggcccccctcgtcctgcgcctcctctgggcccgcgggtccccagctcccccagccccgccgcgggccgcacctctctggacggcgctgtcaggagtaggagttcagccccagcgcatccgcgccaggacccgggctctgtggccactgagtgcagaacacgccgagcttcggaggtctgggagttccaagtggaatttgaatttttaatctaattgtctgattcgtgaactcggaagctgacgtcacgcccagacgtcccaaggtatgagctgtagatacgcatgtgagcgctggtgggagacgccaggctgggatttccgctcgatctgggaatgagcaatgcaacctaatgacacccggagctcctgaatcacctggggaagatgaagagagacactctctggtgggaacgtctcctagaaacaaggcctaagatggggcgaccacagccccacagctgtgtccagatgc

SEQ ID NO: 10889 - DNA, 2300 bp, Homo sapien
gtagacaaatgacaggcgccccgtcctgggggaatcaggaaggggtcctgcagcccctggtgtggcccttttcccatgcacagtccgggccccccacggcttctgcaggacccacctcagctccgggtccaggctgggccagcgctctgtctcctcaacggtgaaacgggttgctcaacccacttgcaggttgttgaagttcaggccttatcctcgggcacagtcggttctggaagccacagtctgctgcctgcaaatgtgctcctcaaatcgccttcccacccgcagcccctcagcccaccgtggtaccaagtggccaaagtctacggccatgccccccgaacgcctacgagctcatctgatctcggaagctaagcagggtcggacccggttagaacttggatgggagaccaaatggcgccagcgctgggctttcttcctcaaaccccacgaccacgacagcgcgataaacagggaccctgttggaggccacgtgggtcacaggcctgcaccggacacagcacttcggcgaaggcaatggggatcctgattggccgcccagggccctcccagagccagacgcggaaggggagggagctctcccgggagcctcacgcgggacactgagcacagcccctccgcgcacacgcggttatcgataaacgcagacgtgacacgttcgtgggttctatttccctggagggcagctgggactggtgtgaattctcccgtctcaccccacaaatcctaacgggcacccgcgagctttctcgtctcgactttcacacgtaaattgtgttttctttttaaaatgactcgtagcgcgagctcctggcgtccgtgccaggttggaatggagacgctgtcccggggggagagagggggacggttgagaattctctggaacccccagcggcgcagacacccacccgcggctggacgcgcggagcccgccctgggcctccctccccggcttcaggtccccgcctcggccctgcccacctggggctgcgctccctgcaagtctgcggcccccacgcggccctcggccccggcgcgggtcttctgcggacgcctccagccagctccgggtccctgcgcggaggacgctgattcgtgtcgttaagcgggtgaagcgggtgtagacagaggtgcgtcctgccctccccacccgctgcccccgcagcagccaccgagcctcgaccggcggcttccgaatgcacgaagtccacgctcctgcccgggaccctgagtcggggcctggtccacgcgctgccgccgcctctagggccctgacccctcccgggcacagcgggcccgtccccggaggcgatgccggcccgggtctgccctgcggttccccctcccgcgctgcttcctgcccgcagtaggggccgctcctcaccgcgcaggccccgctcagaggagccccagagctggagaggcccccgcggctggagaggccccgccgccccccagatgcccccggggccctgcccggttcttcccttcccagccccgacgcctctggcttcacctcttcccttcatttcacggatccgcttatttcaggggagctccaggagggcagggattttgtccgtttctttcacttttggatctgcagagcccaggacagcacctggcccgtagtagatgccgcaagaaacgcttgttgaaggaaggaaggaacgaacccacgagcattgcaggaggattccatgaaagatcaattcatcccacctcacagtaataggcaccctgtttcctcccagccccgagattggagagtttgttttcatcctcctgttgtctgaacacagcacagagcaatcctgagacacaaagcaacgtgcctttcgaaatttttaataaacatggaatcttgctatgctggccaggctggtcttgaactgctagcctcaagcgatcctccctccttggcctctcaaaatgttgggattataggcgtgaaccactgtaaccagcctcaagacagactttctaagacacaagattccgcgtgtcaactgtatccacggaaaccattccttagtttattgtcaccgccattcctaactctgatgtgaaaatccctgcgttcatcaacataacccagttagggtcgcactcatcacggggcccccattgcctctggcgcaccccacgactgacatctgcggggccttcgcgctaggcttcgagtttcagcttccgcaccaggcctgcctttctgcaggggccagggtgggggtcgtgtgctgattgggccctctgaaccgccaccgctgcagaggggc

SEQ ID NO: 10890 - DNA, 2300 bp, Homo sapien
cagcctgtcttctctgttcctttcctttgtgactcagaggccctctgcgccttggtgggaggaagaggaatcatccttgttgctgaccccctgtgacggtgctggctggacggggtgtgcatcgtgccaggagctggtccctcattcatcctcacagcagccctcccgggctcgcccgccgtgactttcactcccatttcacagacgaggaccctgaggtccagggaggctgagtgggctgccctccccagctggagcctggaggggatttgaactcgcgcctcggggcagagcctgttgctggctgggctgggctgagctgactccccagggccatcagctccactgcatcctgaccacctgggaactgtggccagcacttttcaggctcgaaggcatggctgcttacagcgtgcccgaggatgggtgtcatcgtcctcaccctctgcactcactgtacccgtctttgcagggtgagggccctgccgggtcctactctgggcactgaggtacagagggaagccctcctgccctgccccaggagggtgctggtctccaccaggacacagatggaggtggatgaggccacagcccagagaagaagggcaaggtggcagggggtgctggtagaggagtaggactaagggtggtagtgacactggtgaaccccagctgaggaggggcatggactcttctgcacatcaatggggagccacagtatgttgtagaggaagctcattctgccctgggtccccagggagctaaggtctcagccacattcaccctcacagctgggccctccagcccctcccgccctgggaagtgtggcctctgtttttggtgaggtcacagctgcagggagggccagggcgctggatgcctcaggctgcaaatggcttcacccaatgcctccggctgtggggcagaggccggagctagaaatagacccgcagtgacccccaccccagccacacagtgcaggcctcctgaccacaggtcctgggccaccccttcctgctcacatgggagggaaccctgagcttgagggaggctgttccccaaacaaggccaccttgtgtagctctctgagggccttttataatctccttccctccaccaggacagcccagctgcagcccgtcctcaccagcgacccctgggcccttcgcctcagggccaggcaagcggggagcagacagcagtgtgtgaggagggaaaagagccggactacggggacccccagccgcccgccagcccctcccctgcagcctctcttcccagatgtcaaggtccctgagctgccccgtgcagggagcagggtcaggtgaggtccagcggagcccagaagctgttgcaggagcaggacggaggaagccctgggggaaaggcccggctcctgtcctccctgtgtcccctccccttcctctaaatgcctgccctgcctcctgcaatggtgggatggcctggaggtgcagaacgaggctggccctgccttctctggggagctcagccactggaggtgcctgagtctgggttcatcattgcaaagacagaacctgttctgccgtctttagggaagggaaaagggcctgggggagatgggacagtccccctcatatcattggtggcagtgcgtgtaggagcagtctgtttggaggacattttgtgtaatatctattcaaatcaggtgtgcccagcctaacctgggggccagccctttaccatcctcacacgctcacatcggcagccaatacctggaccgtctaaccaatcaactggttccattgactcactgactggcctaacccaacggcatgagcagggctggggccacaggggaggagcaaatctagacagcagtacaattcgccatgtctccagaaattctttaggacattctattgtgcctgtccaggctctgatgctggcctcagcagcccccatctcctcctcacatgaggtcctgggctgttccactgagccctccactttctgaaatgaatggggacacgttctattgttattcgaattgtgggaaattcgacagttattcgagttgtggaaaagcaggctccagaacgtcttggagatatgacttagcaatctgcaggtgtccacggtgagtcctccccagtaggaggagacaggagtctctctggaaggcgaacgccacagctgcccagatgttctcctgcaggggaaccagacaccatcatgacccaaaagggctgcacttctcggggtttgcagaatgtggcagaggtggaaaaactcgaaagtccctaaacacaggtaagcag

SEQ ID NO: 10891 - DNA, 2300 bp, Homo sapien
ctactgcgtattcctcacttacaccacagataagagatcccgaagagcagcccacccagattacataccacatgtcacatgaatcactgggctaaagtgttgaaggaccttctatttctaggggagaactggaacagagcctgggctacttcagccagtccctccctatctcaggatgttgcatcccagctcgttatgcagttactcttgaaaactacaaaggaaaaggagggagaagtgggtaggcccaaggctatacagagaactgtcctgcacaatgaagcacctgcatctgtttagtcactgttcccagaggtcatcattgagggaataggggggccttcagatcccatttctgacaccagaactgttaaaagagaaactttacacaaaacaaattcgagtttattcgagcaagaaaacaattcatgaatcaggcagcatgcagaagcagaagaggttcagagagttccactcagcagcatgagcagcaagcttttatagacccaacacggaagcagaaaaattacttgattgggttttggtttgcttgcataggagctggtgttacagagttgatctcaagctaatggcctccttatttgctttagcaccccacacctgaacccaagggaaagcttgaagggagcccagcaccgaaacaaactagtaaatgcctgggggcaaacaacagtgtttttatcaagtaaccatgacacatacatcttcctcagcagtggcagagcagtcttgtagagttagataggaagatgatggcctggccacgcatgctcagctgctggcccggctcattctacaggtattaaccagtatttggcccacagtgtgctaagcaccattctaggtgctgaggatgctaaggtgaccccaacaatgtccctgatctcttaaagctaattctggtgggatgctgaacacaggatgtaacctaaggtggtgatgagaggtacacagacaaatcggaaggcacaagttagccaccagtgaggggaaactccagacaacgtagacacataaggccaggtggagaaatggatgactgagttaaacttgggtaaggagcctggcaaatgaagacagaagcatgacccagtcaggggaaaccacaacaaaagacgtttggtgggaactgcctgtttcttaatttccaaaaatcagttaaaggttcatatacattatctcatttcaacatcactggtagaaagattccatttttatggagaggggatctgaggcccagaaaggagacgatctgtcatcgttttccactcaagggcaaacatggggatatcccatcccatcccaaagcctaagattttgcactccaggccctttgtctgacctgaaattactgagctaaaagggaccgaaagatcctaatggaaccaccgatgggaaaactgcggcccaggaggaaacacaccaagcaaaattgcaccgtatccaggtggccagtctccagactggggtctccctgccccgccagaccatctcccggcgacaagggtctcaggtttccgaaatctcgccacccgcgagtgatttgcagcgcaggggcctctgctgcctcggaaaccttcaaaggtgggcgggtcggggaccaagtccccctagggatggagaaggaaacggggccaaggaaaaggacatcgccaccctgggcagagcacgcacggccccagcgactcggacatggtgaggggcgcggaggctcggggtggacccgaggcctccacacatgtggcaggctgcagcaacccgccacccacgaggactcgcccaaggcccagagcgcgccgggcccctccctccgactccgtcgccgcccgactggccgcagcggaagccggcgcgcgatcccacgctgcgctttcgccacgtcctgacggctgcccgataaaacggacattaaaattgcactttccactgaatacagcagcgcctattgtggcggcacacctgaatgcgaaaattaaagccaaaatatttcctagcggctaaaagagctccaagcctaggcgaatctgccggtccgctcgccggaaatgcgggctctcctgccggaagctgcccctccaccattttgtggcccgctatggcggcggtgttgaggttgggtacgggatgcggggtctttgactgaaggggtaggccaagtggaggtatcagggacgtcgcgcggcacagaagaggaccagcctggacgccggggacgctgtcatgtacggcgcgagcgggggccgcgccaaacccgagaggaaaagcggcgcgaaggagga

SEQ ID NO: 10892 - DNA, 2300 bp, Homo sapien
ttttaaaaggaaaattacctttatatttttctacttttctagttttatgttttacatttaaatactggatttatatggaattatggttgtcaaatatgtgatatcttattatttttcaaaatggagagcctgtttttccaacattaattagtgttatactaaagaagtttcatcatcaacatctgagagaatgttgctgctttctcggcatctgagaaagccactcatctgttaatatgtaaactatactagaaggtcttctcattttgtgacatgctgggattcctggaacaatcctacttgctcatcatctattactattttcttttttcttttttttttttttgagacggagtctcgctctgtcacccaggctggagtacagtggcgcagtctcggttcactgcaagctccgcctcccgggttcacgccattctcctgcctcagcctctccgagtagctgggactacaggcgcccgccaccacgcccggctaattttttttttatttttagtagagacggggtttcaccgtgttagccaggatggtctcgatctcctgacctcgtgatccacccgcctcggcctcccaaagtgctgggattacaagcgtgagccaccgcgcccggcctactattttcatacatagctgaattcagtttaatattttaacatctatacttgtaagtgatcgtggtctacagattgccaagctttgagagcttcatacttttccatccttcttaatgctctggagtggctttaatgatgtaggcattctatttcttgagggtgaattaacttgacctttaatttgtcttggctgactgcctgggttgagaggtatttcactaaccaattattttcaaaattctttcaggtctataggtctatgttggttcctgatttcttcatgaaataatttcagcacttatgttttcttagaaagcgatatttttcactgattttcaaattcattcaaatttaaaataatatatgttctcatatactttattttctagtgttaacttctagttgtagcttgtgtacttaaaaagatacctataattttcttcctctgtcacgcaggctggaacacagtggcgtggtcttggctcactgcaacctccgtctcctgggctcaaaagatcctcccaccttagcctcccaagtagctgggagcacagatgggtgccaccatgcctggctaatttaatttaattttttgtagagacatggtctcacgatgttgtccaggctggtttctatctccccggcttaagtgatcctcccacttcacagcctctgtgaggagctggtgctacaggcatgtgccaccatgcccggctacatttttgtatttttagcagagacggggttttgtcatttgcccaggctggtctcgaattcctggactcaagtgatctgcctgccctggcctccctatgtgctggcattatgggcgtgagccaccacactccacagcaatttctaagcaatcttttccatgtctgattaccagtagcactagttttataatattttccattttgtagaatacaaattagagacttaaaagatttttctcctgttacgcaagagtctgtttcagagatgcccatatgcctggaggctcagctgtgtctcccgaactttggaatctctgtgggcgcaatgacatttctgtctccgcatcttttcaaagagaggctggcctgtgcttttgagaactgagagttagcatgggttttgtcagatattgagtagatctctgttcaagtgtctcaggcttgggtggatgtagacggtaaacttctcggtgtgttgtttcatctgccaggttctaggacaatcagggaagtgtggagaaggtcacgctggttggcagcagccttgtgggcagggctgctcctctgcgggccccacagctggcaggggtcaggtgccttccctgggctcacaacccctctgcacaccccatagctggctgggtcaggcgccttccctgggctcacaaaccctggggcagcaggcaggctcgggctgtggttgtgttctggggtgtgagaagggatgaggtactgctgcctctgggaagctcccagcttgttccagcctcctgcctgcccctctgtggctgacagtcgactcccctggagtcactgccctgagtctcaagggtacttctctgcaagctccaggtatgctgccttaccctgacctatagacagtacctctccccgggtttctagagcagtaaccattttcctcctctacttattacattcctttgattatccc

SEQ ID NO: 10893 - DNA, 2300 bp, Homo sapien
gccatctcccttcaatgccagcaagccccgcggtgaagccccttgccagcaccgagctacagcccctcaacagcgtcctgttccaagtctcagatgtgtatgagccccatgatgcagtgggggcactggccgcgttccctcttctgagtcctcgacccagctttgcctgccatccaccctcccttcctctgacttcagcacctctgatttcctgtagagaatcccttccagcccagggcttcagctcacttccctgcccctggccccacgatcaggtcctgacccagaatccagagagaggtggccttgggaccattggttgagaaagagtctgtctctggctgggcctgctgagggggaaggatgcacaggagctgccctgggccgtctttgccccacacagagatggactgagagaaaccgcgttctgacgctgttgctgtgagacttggtccagccctgcctgactttggcacacgctaggacgccaccgtttcctgagcccatacccatacgcttcctttccttgactacagccgctttggctgggtctctgctctggaaaccaggttgtcctgatgcacttggtcaaaatcccggatgaggccaggtgcggtggctcacgcctgtaatcccagcactttgggaggccaaggcgggctgatcacctgaagtcaggagttcaagaccagcctggccaacatggtgaaaccccgtctctactaaaaatacaaaaattagctgggcacggttgtgcacgcttgaaatcccatctactcaggaggctgagacaggagaatcatttgaatttaggaagcagaaattacagtgagccaagatcgtgccactgcactccagcctgggcaacagagcaaaaaaaaaaaaaagaaagaaagaaaaaacaatccgggatgtcctgtgaaagtccccacctcctacaggtgatcccatcagtccgaaccaaggtcatctgaagcaggtgtggaatcaccctgttcagaccgggccagggaggctctgagggcagcagggacaggatgggccagagtacccagggaagcgggggggggggggggggggtggttggggggagtcggccctcacaggaggggaggggcaccacttccctgagaccagttctggtaaaaggggccgagcctcagtttccctgtccgtagaatgagacctcagtcctgacagtaccagctgcgatttggggtggtggagcaggagggcctgggaaggaggggaagccatgctgtccagcacgaggagaagctgaataaaggcaagggttacccttgaacctcaccccctgccctctcccaagatctcccactcggtgggcagcctgtacgcaacttgcacgagttcaatccacacaagcgcctgctcgggctctgaccctggctctgccgcttgcccgctccaggacctcccataagttacttcatttctttgggcctcagtttctttgtctgcgaaatggaaatcatagttttcatctcataaatgttgtaagtaaatgaaattatttatgtaactcctgggcatgtgccaggcacacgctgcgctccaacaaacattacaagttaacattctcgctcccaggcccgcagggaccgcagagcctccgccgaggaccccagcccccccaacacccgccctcgccctccagtcccccgcgccccccaagccccaccctccctctcccgcggtccgcgggctccaccaagcgcccacctgctgcgctgcggcggcggctccggggcctgaacccgggtctgaacccgggcctcggcgccgtggggggtggacccgggagcgcggccggagaggggagtcagggtcagctccccgcaggcgccccgacccccgcctccgcgcccatcccgcgcgtccccgccgccccaagagcgtcctaagacacccggggaaacgccttccctgtgatgccgcggacccagtcccgtcgcggacacggcggggcgggcgggggtggcagcgtccgaggcggcgcgggccctttaaggcggccggcctcgttagcatacatttgcatggccccgccccgccgcttgaggctgccgcgcggggctcagtccggcgggggcgccgcggagagcggagggcgccgggctgcggaacgcgaagcggagggcgcgggaccctgcacgccgcccgcgggcccatgtgagcgccatgcggcgccgcgcagcccggggacccggcccgccgcccccagggcccggactctcgcggctgccgctgccgctgctgctgctgctggcgctggggac

SEQ ID NO: 10894 - DNA, 2300 bp, Homo sapien
ccaaatgcaaatcccatcttgccatcccaccctctcctaaactcttcctgggtatttctttgagtttggggtgaagaccccgttagcttggctttccaggccagggtgggctgggctggggttccctgagtactttccaggagtacaggcttcgccatctctagcaatctcggccctcacggtctgccctgatcacctcagcacgtagccacctgttcactcatttttctcttgcaattttgccacgggtggtgcaatctttgctcttcttgtcccccacccctaagcgctgggagctcctgcaggcgggtcttgttctcactgtgtcaactgcagcacttacctcgcagcgtgtgctctctgggcaggccggtgtgcagcaggcactccaggatgtgagtgaatgctatggctgactacggggcactgtggaacctctttattgggaaaacaaacatggtgggccaggagacctcttgtcccttccagctcggtggcttctggcccccagtccagggtcgggagtctgtgtgtcctgcggcctggaggatgagctgggtgcaggtaaaaggcatccaggacttgctgatccagcccagggcatcaggctgtccagctgctgggctgctctgggaggcagcatggagggtcctggctgaagtgtgtgtttctgggctgttactttaggactgtactgaaggctgggttggtgagcattgtttagaatcatgcatttgcaaaagcagtgcttgcacgtggtgaaagccattccaactagcgcgcaacgtgtacggtgaacagcactaacttttccccggtcctctctcccagagcaatcgctgttggctgtgtcttctgtgagtgagcccccgggctcttttggctgccggcggtgtgactttggacacattctccaacttttctccgccttgatttcctcatctgtaaaacagggacataacagcaagtgcctcgtggaatcattgaatggatgcactaatcgctggaaagtgcgctgcttggcctaagtgatgagttagctgtcattatagttaggaacgaccatgtacacattacaggcgtttcacacacacacacatcccaatcctaccgctttcttaaaacgacagacagtacagtgccctgttccatattttgcttttacttaattataatctttggagaactcacccttgagcacaggtatatttacctctgtgcagtgttccacaggaccgatgcgcagcccatctagctaacctttcctccccagcggatttatgggctatgtcgttggtttgggtgacaactttttggtctacaatttttttttttttttttgcaatttggcattatggaactcaactttaaatgcctaacctctaactcagccattctatttctaagaattaattctgcgcagtcccccgttttgggaacatttcccacgcctgttctccattctcctgtagaaggggaacagggagcgggaaggaggggaacagggaaggggagggaggggaacagggaggggggacaggagggaggagaacaggcagtgggggcgggaggggagcgggggggaaggcatgggagggggcggaagggagggggcagggagggagagaggtgatgggaaggggaaaaggagggaggaggacggagagaggggaaaggagggaggggagcagagaagaagcggggcggggaaggggcggggaaggggcgtggaagggagtggggcaaggaatcaacactgagccccgtggcccgctcccgggtcagcgcgcctctctgctctcaccggggcgggtccgctgttggccccacccactcccagcccacccggccccgcaatggcccggcccagccgcccacccccccgacaggccccgccccattccccgccccccgtctgttcgtcacgcccggctctgccgctccgtcccgcaggccccgccctcatcccgcctcccggcccggcgcgcagtgcggctgcgcgggcgtctcaggctctgaggcccgggcgccgcggctcttttgtttctccgttggggccgagcccgggccctagttggagccggagtcggagtcggagtcggatccggattcggattagcagcccgggaagagtgccgtggcacaggcgccggagggagcgcgaccctcggaccccgcctggcccgcggggctgggacccggccccggcctgcccgatggggcgcgcggccccggagatgcgccctcgcccggccccgcgcccccggccccgcgcccccggcccgcccgccccggcccgc

SEQ ID NO: 10895 - DNA, 2300 bp, Homo sapien
ttagagacgggttttgccacgctggccaggctggtctcaaactcctggccttaagtgatccgccctcctggcctcccaaagcgttaggattacgggcatgagccactgtgcctggcctcatttctttttagagctgcatagtattccattgtctgtaggtaccacagtttttccattcacctgccgacatatcggttgtttctgcgtttgggcagtggtaaataaagctgctgtaaaggtccttgtgccagagccaggtggtgagggtgggcccaggggaagccatggcagtacaggaaggacctcatccctgcacacactggccatgtgggggcggggctccaagccagggggaccaggccttggtgcccacactgccacagaactgtggcccccctgggtgcctgtccaaacccccccgcctcagtcctggagcctgggctggtggaggggtgccctcctggggggtcacttatacagctgagccaccctcccagctggacaattgcatctccctcctgcctccccttcctgcctcggccaccagctcctcacaagccactcgcagcccactgagtgccccttgggaaggggtgtcagattggatccctggggctcccatctcactcatagccaatgccaagtcctcggtggcccacgaggccccacacaacctggccccggaccccttggtcctcttttcctatcagtccctccagtcatcacgcagccctgtggtttctctacctgcatactccaggtgggcacagtgccccggccccactgagtcctcacctgtaggagaaggcacagcccctggagggcgggagtggggctgctgcagacggctgtctcctgcctcctggctcttgcactgccaggaacacgctctccccaacacctccatggctcattccccaaattcaagcttgtagttggttgaattgtggccccagagatgggattaaggattttgagattatgccagattatctgcgcgggcccaggatcatatgagtttgtctaagggaaagcaggagacaggagggcaagcttgggagaggaggcaaggaagtggtgggcgcggtggccacacctggaatcctagcacttcgggaggggaggcgggaggatcgcttgagctcagcagttcgagatctgcctgggcaacatagtgggccggtctcttaaaaaaaaaaaaaaaaaaaggccgggcgcgtggctcacgcttgtaatcccagcactttgggaggccgaggaaggcggatcacgaggtcaggatatcgagaccatcctggccaacatggtgaaaccctgtctctactaaaatacaaaaaaattaaccgggcgtggtggcgcgcgcctgtagtcccagctactccggaagctgagacgggagaatcgcttgagcccgggaggtggagattccgagccgagatcgcgccactgcactccagcctggcgaaagagcaagactctgtcccccgccccccaaacaaaacaaaacaaaacaaaaaagagtggctacttttcaggagaccgcatctctataaaaaataagaaaaaattagctgagcgtggtggggcgcgcctgcgaggaccgctggagcccggaggcggaggctgcggtgagccgtgacccctctaccgtgcgggtgaagggcagggcggagccgcccctgcgccccagcgtctgtggaacggggacggggagcggggctggggccacacgagggccgcacagggtgggtgccactgagggtctgggggccgagcccgtgggagcggacccggcaacggagaggagcggggccagcgtgggctcagcgcttcccctgctccgctgggcgggcgacagcacccgggaggcggcggcggagcgaccagtcgcgcggccgcggtgctggatgcaggagggcctggtgccccgccctcaacaccctaatccccgccccaccccacccccaccccctagtctccgcccccatcaccccctccgtctctgtccccgccctgcctcttctcccgaattagttttgtccgcgctcggccgccgtgcagtcggtcgttccacttccgccttcgcccacgtggtccggctccggctcagtcagccgcgtcgcgaatggggcaggagcgagcctctctggtcccgacgcgggtggcccgggtctcctcgactcctgaggaaagcccaccgggcggggcgggaggtgaagaggctggggaagtcagaggttaacctgggcgtcaggggacgttggagttgatccgtcagggtcccggggcggtctgggggc

SEQ ID NO: 10896 - DNA, 2300 bp, Homo sapien
tcgtaccgtcagcatgtctactgcctcacggcacttcaacatgcaaaatcactcccctctgttatccacctaatcttatccccttccaaccttccctctgtctcttcccttttatagccaaattgttttctctttaaaaatttcagtttatttattttttattttttgtagagatgaggcccaggctggccttgaactcctgtgttcaatatcctcttgtctcagcctctcaaagtgctgagattacaggtaagagacactgtgcccagccaaaaattttcagtgtgtttaaagttaagcattcatcactttacctcacagcccacatttcttttttaaaaaataaatgcagacataattcacatacataccataacattcacccttttaaagtatatcattcagtgacttttagtaaatttataaagttgtgtaaccatcaacactatctcattttatgacatttttatcaacccaaaaaggaaaccccacattcatttgcagttactgcctatcctctccccacagtccctgacaaccactaatttactttctttttcttttctttttttttttttttgagatggagtcttgctctgttgccctggctggagggacagagtctcactcaggctggagtgctatggcataatcacggcttcctacaccctcagcctccctgggctcaagtgattctccctcagtctcctgagtagctgagactacaggtgtatgccaccatgactgacttttaaattttttgtagagatggggtctctctatgttgcccaggctagtcttgaactcctgggctcaagggatacaactgcctcagcctcccaaagtgctaggattacaggcaacagccaccgtgcctgcccttttaattgttatgttgtaaattatttactttggacacgagttccatgtcagacatatggacttaaggtaatttctcctgttctgtggattatcttttttaaatggtgtcatttgcagcacaaaagttttaaattgtgatgatgtccaatatatctatgtttgttagttgcgttttcagtgtcatatctaagaaaccatttcctaacccacaaccccgaagatttatgcctatgtctttatctggagacagaatctcattctgttgcccaggctggagtgcagtggcatgatctcggcttactgcaacctctgcctcccgtgttcaagcgattctcctgcctcagcctccggagtaactgggattacaggcgcctgccaccacgcccagctaattttttgtatttttaatagagacagggtttcactatgttggcccggctggtctggaactcctgaccttaaatgatcttcccgcctcggcctcccaaagtgctgggattatagacgtgagctacgtctgtgtcttttaatagagttttgtcgtttttggccgggcgtggtggctcacacatgtaatcccagcactttgggaggccgaggtgggcggatcacttgaggtccggcgttcgagaccagcctggccaacttggtgaaccaacccccctactaaaaatacaaaaaattaaccaggggtggtggcgcgagtctgtggtcccacccactcgggagactgaggcaggaggatcactggagtccaggagttcgaggccagcctgggccacacagggtttgggtcttgcatgtgagcctggtctgtttggtgaatctgcagagtgtgagagctggcggcccacttctgttccacgtgggcgcatttcccgaactgcgcgtggaaaagccgggctgccgcgactccgtcagtctcggccccgcccccgccttcctcagtctcggccccgccccgcctccgtctgtctcggaccggccccgcctccgtctgtctgggaccggcccccctccgtccctctcggccttgggttcggcccccgcccaccccgcagagtctcgcggcgccctagtcctccggcgccctcgacctccggcgccctcgcgcggtcagagcggcgccgcggaagcgcagctacgggcgcgcggacgcgcgtcccttccggctcgccgtagcagccgcgccgccgcttcctcccgccggggccccggatgcactgagcggctgcggcgcggcttccatcctcccgccctcctgacgcggccggagcgcagccctgaggcccagggtaagtgagggcggaggcgcgggacgggggcgggaggctctcgggacggcagcgtccagggtccggggtcgcgtagccgcagccgcgggcgtacagggcccgctcgccggccggcctcgggcg

SEQ ID NO: 10897 - DNA, 2300 bp, Homo sapien
acaggaacttgtcattctgtttctcaagtaactgtttttcatcactttttgataaaggaggaaaagaccagactcttgaaagagcgcctggatcagatttatttagtcaacgagcggcgctgttctcaagctccagtctatggcagagacttgctaaggatttgtgccctgcctagccatggaagggtacagtggcgtgggtccctggatggccgtcgtgggaaggaggccgggccagcgcacagttacacttcatcctcagaaagtccaagtgagctgatgttgacgctttgtcggtgtggagagtctctgcaggatgttattgacaggtactgcagacctcgtgaccttttcggtgctctctggctgcattgcaccccggcaagaccccttcttgtctcgtggatgtacatcttactcccatcggcttctccccacgctgtcccttagcggtctgttttgaagttagtctttgaggtcttcagctttgggatcagatggttttgttatctgggtctcagtgccaggtgcggcttctgaaggaagttggcagccctgggggcagagccgcagcactgagctcacactgtgcttggggacagatcactgtgttgctaaggactttctccatttgactctttcaaaaaatgattgcattaaaagagccccatgagtgagtgaacattacatgatgacaaatgtgggcaggagttgatctcagaacgtgctttaatggagagcaaatctgagcaccggtgggcacggtgggcacccggccgctctcaactgagcttgctttcagtagagtgcgttaccctgtttgcatttccactccctgcttggaccccatctccaggctccacttcagacatgttttcttcccttctttgcagctgttgtagttctcagttgtctcctgtctgcagagggcaacctggcttcttcctgtgccttggctcagctcagctttcaggatctacctatttcagttctttcagatcaggaagcagaattaatggaaaaaaagaaaactgggagtgcttctccaaggccgaacaagccacttctggcttctcctggtctgggagtgactatgtcagtgaccttgtgctcctggagtttttctttcgagtactgatttgtctttgtgtactcctccctcattgaacatcatgggtgaccattcgttcagtttgaatacagctgggagtgagtcatagttgatgtccatagcaagggccttctggtgcaggtgacctccacaggttgcaaggtgggccttaggttggctgtgcgatcttcgctctattgtcattgtcctgaaggctccttcaccctgagtctggcccccgtcctggtggcacagtggctatagcagttctagggtccacgagacagtgcacctttgtcccaaagtttccagctgaagacacactagaaagagaatggcttatctctgacctggtgcctgcggcctagggaatccacccccattgatccatcagccctggactgtctgaattagtccccgaggtggtggttattggccaggactggttaggatctgcctcgttgggcccctgcccgtgtgccaacacccacatccccatgtgactgggttgagccctgctgtttcctgggacttggactgtcagaagtctgccccatctttcaggagcccccatgctgggtgaaggtgtgtggctcctggtggtgacaaaacatgctttctgctcctcagggtggcctttgtgattcctccggtggtggcagcacccccgtccctacgggtgccgcggccgccacccctgtacagccacagaatgaggatcttgaggcagggcctgagagagcacgctgcgccgtacttccagcagctgcggcagaccacggctccacgcctgctgcagttccctgagctgaggctggtgcagttcgactcaggtatgcggcagttgggggcgtggcccgtgcgggagctgcaccggccctggatgatgaggcgctcttgatgtgattcgtttcccagggaagttggaagctttagctatcttgcttcagaaattgaaatctgaaggacgtcgggtgctgattttatcacagatgattcttatgttggacattttagagatgttcttgaacttccattacctcacctatgtaagaatcgatgaaaatgccagcagtgagcaacggcaggtgagaagcacattgtttacattgtctctgatgggtcagtcactggtgttgaatgcctaagtgctgtgtaaattcagtggtctcatggcccttctaagtga

SEQ ID NO: 10898 - DNA, 2300 bp, Homo sapien
gctctgaaaacatctcacgagggcagttaagtgaagggctggggcgcggctgccagcacactcagggagcaccaaggggctgaaagccagggccaggcgactcagagcgtgggcagtagggagtcctgggggtttgcggagatgggccctgagccaactccttctgacaaggatcactccactactgtgcggaaagggggccacagaacgaggaagcctcccaaatccgccactgtgtgacaactgtgggcggcaagccactcaggtgccgaggcaagagaccaaggacacgagctgttccagtataataaaatataaaacaagaatagttataccagatatagatcttagatatgattatctatgaatatcattaatcattagttggtagcaattactctttattccaatattataataatcctcgctctataatcataacctaggaaaagccaggccatacagagataggagctgagaggacacagtgagaagtgaccagaagacaagcgtgcaagccttctgttatgcccggacagggccaccagagggctcctgggtctagcggtaacgccagcgtctgggaagacacccactgccaagcggaccgtggtctagcagtagcattagtgtcaaggaaaaacacccactacttagtggaccgggaaagggagtctccctttccccaggggagtttagagaaaactctactcctccacctcttgtggagggcctgacattagtcaggcccgcccgcagttatccggaggcctaaccgtctccctgtgatgctgtgcttcagtggtcacactcctagtctgccttcatgttccatcttgtacacctggctctgccgtttagttagcagcagcaaattagtgaaagtactaaaagtctccgataagcagaaataataatgtaagatgtttctctccttctctctctacctcggctgccaggcagggaagggccccctgtccagtggccatgtgatccacgtggccttacctatcactggagatggctcacactccttgtcctgcctgagtcttgtatccaataaatatcagtgcagcctggcatttggggccactactggtctccatgtcttggtagtagtggtcccccagtcccagctgtcttttatctctgtcttgtgtctttatttctacgctctctcgtctccgcacacggggagaaacccaccgaccctgtagggttggagcctacagacaacagtgcctaaaccagatgcacatcatttcatcccagcagacctcctttccaacattttatggaaagagtccgacagtcagaaacgctacagacacccatgtgcctggcagtaaggttccacactggggttccaccatccattaccccatttactttcttgcatctacccacttctgtacccatccattcattcattcctcttttcccctgtataacttcagggcaggtacacacacccctaaatgtggtgtgttcttaagatatggcgaacaaaatcagtgcctgagaggtggggtgtgaggaagaaagccccttgtggttggccacatggccctggcacactcatcacatctgtcagcgtctttccccactgagggccagcaaggacaatccctgtaacacagagacagggcaggggccgtcctatgcataccctagcccacggcaggaaaagcacctctctcctgcaggttctgcgcactgccacgtccagctgatgcctgaacacgctaagtgcacaacgatttgctgaactcactgaacttagatgacactggaatgaaatccttccaaacagtaacaaatgtgtcacgaatagagaaatacctttctgccaacacagacgcgtgcttggggttcttctgaaagggattcatgccaagcctgaagtatagacagtgagacagcaattattaaataaaggaaatatctgaagaagggtatgttaaaaacacatcaaaaccaagcttcacgcaatctactcagtcataatgaacataaaatgagcactcaggaaacatacagaggtttgattgggggactcctcttgccagcagtcattttcattaagtcaaagtggctcgtgtacagctgggtgtgtgtggcattctcatcctgggcatagatctggctcgtacggagaggacggttgtttttactctgcaatgaaattgacgagagtgcatctgaattaggcagcatggacagacggctgcgtgggacacagggctcactgggtgggaatctgaggctaaactccccatggctgaacacaaacttccttt

SEQ ID NO: 10899 - DNA, 2300 bp, Homo sapien
gccttcagaggtggagcggctcacttgtcagcagcagcagtgaggccgggagccagcgggggtcgttgtcgtgccagggaaagaaagttgctgccagcctagggctctgcatctcttggagatatcttaaagaacaagggaggccgggtgtggtggcccacacctataatcccagcactttgggaggccgaggcgggcagatctgaggttgggagttccagaccagcctgaccaacatggagaaaccccatctctaccaaaattacaaaattagctgggcgtggtggcacatgcctgtaatgccagctattcaggaggctgaggcaggagaattgcttgaacctgggaggcagaggttgcggtgagccaagattgcgccattgcagtgcagcctgggcaacgagagcaagactccgtctcaaaaaaaaaaaaaaacaaaaaacaaaacaaaacaaaaaaaaacaagggcaaaataaagacattttcaactttggaccttcactgaatgatatgctttaagcagaagaaaggtgttcccagctggaagtggtaacaaggtagactcatggatgaacgcaggagctcactggggttagaaagaggaaataaatacacaggacaataacatgcaagctggggaaggggcagaggggctgaaatgtgcacagatctcgttactgtttaggaaaagcatggagtatttagactttggcaagcatccgtggtaattccagaccagccaccagaagaatgagagcagagcgagttgctcccaactgtggcagggacattggtgaggaaagagtcatctgagaggaggcaaggaaggagatgaaaagaaacatacagcagctgggtggaatggaaaacatggagtaacacgctagatttccatccaaatgcgtaagcaatgagacataaaaggatcaagagaaactaaaaatacactgcacttcggaaccaagggagctggcagaggtcagctggagggacactgcagaggtggcatgattgcgtttgccttccagtttatggtgggacaaggaaggacggtgaggcaaggtgggatagggtgaggggaccactctggctgccacttctgcctgcgggccagagtggactgcagggcacagtgaggatgctctgaattttaggcaagatgaaggtaagatgccacaagaccccacgcacatggtgagacactcagggctgtagtttcagcacagatggggacagtggtagagagccaggactgtgggctgtgtgtttgtgggtagcatgggtgcctcaaggacagtcgttacgttcctggggaccaagaggtctttgtgcggagagggagggacaggacggcctttccagcatgtgcacgggcgtgccgccatctgaagcgtgtttctgtgggtgatgtgatctgctgggagaaaccattgctcagggcacttgcttgtgaatttacacatgaaatcagcagttttcaaaagactgaactctagcgtgtgtttcacttgtttcgcctctgaagttgggtgctcttgtcttccctgctctgagtgtgaacagccctgagtgctgtgtgaaatatttgatgaggtcctctgtttgccttttctagacgccgggaggctctgctcccgcccaggtggtgcacacccagcccccgccacgggcagtcggctccccagccacggcgacccctgacctggtgtccatggcaacgactcagggtgttcgagcggtcacttctgtgacagcctcggccgtggtcactaccaacctgaccccagtgcagaccccggcacggtctttggtgccccaagtgtcccaaggtaaagccaggctgggagctttctctgccacacgtctgctctggcgcgtgtgagggctcagctgctgcttgctgtctgagaatgaggatctgaaggtgggcgagtatccctgtccagacctaatgagcaaacctcttcatagccacaggagttcagctccctggaaaaaccatcacacctgcacatttccagcttctcaggcagcagcagcagcagcagcaacaacagcagcagcagcagcagcagcagcagcagcagcagcagcagcaacagcagcagcagcaacagacgacgacgacctctcaggtgcaagttccacagatccagggccaggcccagtccccagcacagatcaaagctgtgggcaagctgacgccggtgagcatttcccagaggaccatgaacgtgtgcgtcttgcggtcagtcagcccagcgtctgtgagacggtgcctgcttgcatggtgcagtcca

SEQ ID NO: 10900 - DNA, 2300 bp, Homo sapien
ccagaggaccatgaacgtgtgcgtcttgcggtcagtcagcccagcgtctgtgagacggtgcctgcttgcatggtgcagtccagagtgtattttgcaaacgtctagcactgcctttatgtaggacgcgtgcttcgttttattggtctaaaatttcccatgtcataacactttgatcatgccttagagaagtcttacagcttattcagagcactttggagacattaacacccagcgtgcaaatgcgtcttcttgcttaggcgtcttgtgccttgtgttcagcatcagtctctaggcccgcttggtgtggttctggaccagagaaagtgctggtgagaagatattcctcagcagtgttgggagagcaggcgatggaccctgggtttgtttcgatgtggttcacgtgcggtactgtttctcaaaggtggtcattggagtactgatgtacctgatttttgctaacctctgtaccagctttgctgttctttatgtaaatatattcattttcaaaggaaatgttgggccggacacagtggctcacgcctataatcccagcactttgggaggccaaggcgggcagagcatttaaggtcaggagttcgagaccagcctggtcaacatggcaaatccccgtctctactagaaatacaaaaattagccggacgtggtggcgggtgcctgtaatcccagctgaggcccaagaatcgcttgaacctggaaggcagaggttgcagtgagccgagattgtgccactgcactccagcctgggcaacagaacaagactgtgtctcaaaggaaaaaaaaaggaaatgttatgtcctaccataaatgaaaaatcattaatacttgtcatagaaagtaaccagagacacatacggaataaagacaagacaatattttgaagtttcagctcactgttgggcctgccggagtgcttgagtctgggcctctccgtggtctggaagggaggaagtgggctgcaggagacgcacactcagctgagggcccctcctggggctgtcgggagggctgtcggtggaatttagacattgagcttatcctgttcctgtcacaccagccatccctcgagggctgcatggccatatgtggctgtggctaccaccctgggcagcccccgcctagcccacttgtatcctgcgggacgtgccactggacagtgctgaattagaatgctgtgctcaagagtcccaggcccagcagaggcaactgtcagggagtcagagccgggctttgacccccccggcccacagccacacaggtaccttgtcacctgccccggttcaaccactgatgacccccccccggcccacagccacacaggtgccttgtcacctgccccggttcaaccactgatgaccccccggcctacagccacacaggtgccttgtcacctgccccggttcaaccactgagacaccagtgccgtcaacatcaaggctgccacccagccttggctgccaggagctctgtgtgccagctgtttgcctgtctccttcgttcctcactctgccctctcccaaatccatttcaaaaccagttcacttccagcatttcaaaagagacttgatagtcatgatcaactcagtataggttttcttaaaaaattttttcttaaaatgttttttgaacttcaaataagtttggttggtgctacagatttaaatcgacttgtttgtgaggataatagaattctttttgctatgaacttatcagtcagaatccgtgtttgtagttttcaccgacgaatgcacatttttaataaatgaacacctggaagatactgggcagcccatggaaggcggtctggatgctgcacggtagcaggtgtctgctttggtatttaatgggcagtagaggggtggcttaggaacaagatgtctacttaaagaatggagcacagttaatgttgaagagaagatactttgcttgtattttaggaacacctcatcaaaatgcagaagcagaaactgcagatgcccccgcagcccccaccgccacaggcccagtctgcgcccccgcagccaacagcccaagtgcaagtgcagacctcgcagccgccgcagcagcagagcccccagctcacgacggtcacggccccaaggcctggtgccctgctgacgggcaccaccgtggccaacctccaggtggcccggctcgtaagtgtcagtttctgtttgttttccaaaagcagcatctttttatgttttaacacagctgttgcgcttgctcaggtgcgtgtcacgtgttacaggagtgagtgtgagacgggttcttttccccga

SEQ ID NO: 10901 - DNA, 2300 bp, Homo sapien
gcttcatgagtgttagaggaaattaaatgtccattactaagaatttcattaagtaaatgatgtatcatccaaacaatggaatattaagcaattttgaaagtggttttttgtaaagagaagagaaacagatttcaaaatatttataattcatgtcatttttgcacactttcacggtgagccacacagatatgaacagtggctgaaggctaaataccagttttaatattcagatatgagtagtttgaggagtgtgggtaatttttactttgtattttcttatgtaatcttagtctctatacatacaaaaatggaagtacttccatttaccattttttaaatggtaacttaagagaaaatgcgggacgggaggctgaggcagtcattttgaagtgagggacaggctgatgtcgagtgctcgctgaaggaacaggaagtgaaaagccttctgtgggaaaaacgggacaggatgcggttactggttcaggagatggagggaagtgaaggtgatgtcccgtgagatcactgacatctgaacgcagcagcatgtgtgatgagcctgcaggtcttgcgggagcttcagaagcgcgggctgacctgtgacttgacatttccctgcggcgtgcagatctctcagttttcctttcctgttgggccactttaaactttgttgatctttgtaaattttctcatggcatgacctcttgtggagaagtatttggaaagacataccgtgtcctgaatttctctggactctcccattatttctactgtttagacccgggttcccacttctcagctgcaggcgcaagggcagatgcagacccaggcaccccagccagcccaggtggccttggcgaagcctccggtggtgtccgtcccggcagctgtggtctcctcaccgggagtcaccaccctgcccatgaacgtcgcggggatcagcgtggcgatcggtcagccacagaaggcagcaggtgcccgccccagcacaccctcccgtcctgggcttgagcctggtttcacaggcctctctggtggcagtggtcgccagcgacccgtgttctttcctcacacccacccacttgagcgtgccatcacgtgttctagcacaaacgtgccttggcgctttccaggcgcaaggctgggtcctcaattgaactgttaacattctgaaatttccgtcttaatttaagtgtaatttgtgaacccagaaacattttaatgtagttaagggatggcttacttgtctccatagagtttcatagtttgttattttctgtagaggtgagtcagttggaacagagcttggcgtgagcctcaagctcttttcccagtgtgctgactaaggggcttttgctgcctgcaggacagaccgtggtggcccagcccgtgcacatgcagcagctgctgaagctgaagcagcaggccgtccagcagcagaaggccatccagccccaggctgcacagggcccggcagccgtccagcagaaggtaccggggctaggggattctcacttctgggtctatgccaagccaaagctggctgctggaggagagggtcctaagcagacaaatccccatgtggcggctcacgcttttcagagggtggcttcaagggctggaggtgctagtgtggtcatccctgttggtttttccttcctttaaaaggtgaatgctgtgtgtgatgtgacaagtgaggctgaggtcttggcagggggatggagggggtatagtctgtgaggatggctgggtgccaggtaagaagcctgcatggcattgggacagacacagggggtgcaattgcatgatgggggccagtgggctcagggaagcagacgcagctcacaccacaggacccgcctggactcctgctggaggacagggatgccgtacagtctggaccccagacagggaatgtggcctctgtgcatgttggtggtgaaaggggagataaacacgccagggcccgacgtggatgggggcgcagcagggcactgggctccaagggcgtctacagtctcagccagctccctgagacgatacctgtgcctctcagcagccagtgctgtgttgaaggacgtgagggggacacggtggtgagacagctctgcctccagggacttctgctcgtggtggctcatcggtggcacccagcccaagtcccgggcttcggatggctggtgtgggccctcagaccccacgttctgttggcactgctgtctggctagagctagaaggcgggctctgatgggaagccacatggctgtgtggggagctgccctgttccctgagcgctgtgctgg

SEQ ID NO: 10902 - DNA, 2300 bp, Homo sapien
atgccaccaggcccagctaatttttgtatttttagtagagatgggtttcaccatgttggccaggctagtctcgaactcctgacctcgtgatgcacctgccttggcctcccaaagtgttgggattataggcgtgagccaccatgcccagccataattctgtcctttttcatctttgactttttatgtggaattactttccttccacttgacccatcctttggaatttcctttagtgcttgaaaatgcctgtgtgtcactcttgttcctgagagacagttttgcttagtacagaattccggattggcattgttttttggggtttttttttttttttttttttttttttgagacggaggctcactctcccatgctggagtgcagtggcatgatcttggctcactgcaacttctgtctcccacattcaagagattctcccgcctcagcctcccgagtagctgggactacaggcacacaccaccatgcccagctaatttttatatttttagtagaggtggggtttcaccatgttggccagactggtctcgaacacctgacctcaggtgatccacctgcctcggcctcccaaagtgctgggattacaggcatgagccaccgcgcccggtcggcattgttttctgagtgcattcacggtatcatttcctcactgtggctgcttttgttgttgaagaggagccggtgtctgtccagcgtttctctcttccagggtcacctgtctcttccccaccgactgcctgttattgagacgttgtctttgtctttgttgttttgggtcacctctctcccccaccgtctgcctgttactgagacgttgtctttgtctttgttgttctgggtcacctctctcccccactgtctgcctgttatcgagacgttgtctttgtctttgttgttttgcagtttcattccaatgctccagcttcttgaatctcgggcagtctctctcatgtctttaggaaataagcagccactgtttgtttacgtgttgcccctgtcctgcttcctctgccctccaggtctctcagcagcttttgtattttctgtgtctttgtctcgtcgtactatattctgagtcatgtctttcgctctgtctcctcagtcactcatttttcccttggttaagtcaaatctgcttcaaagcttgtctgttgaatttttatcttgatgatttattattttattttcagaagttcccaaataatgcctggtctttgtttatagtctcttgtttccaggcctcgcagagtgagtgaggtgtttttctggatctggtgatttccctgtctgaaatgtgctgcatctgcggggacccctcgcagcctggggcaaaggtggagttttgcttccgcgggcaccttcaggtgccacaggaacactgcttggtgtgtggctcaggctttcactcagctctcaggtgttacccacctggcctctgaatctgtgtctcctcctctctcctccccggcactgaggcttagggcaggtgcttttcttacagatgccactggaggaaggggatgctttctttgcagcctttgggtacctttgtgggtacagtgtctccctccaggatggcagctggcagtagcacggggctcttttgcaagctccccaccgagaactggcctatacctggtgtctggtcagctgtgtcctgtgcgaccctggagatcacggggtgcgtctccatgtggccagcgatcccgggcagaggttgtgcagcttttctgctccgtgactcgtgatgcccgcctgtgcttaggtttggagactggcagttcctgactctttgcaggtttcttggtacatttaagatttcttgctagtgctttatttaagacgtctcaggattttcagtgctgtgccaagtaagtcctggaccattgtggtcttgagatgggccctggagcaccggctgcatctttgtttcccagcagttccacagggggcgctcagggcacttatcttagtgaattttatttataattgtttaagtgacagtaaactagtaaatgccttctgattgattttaattttagtaaggactaacatttatttcgacctttgttcatgtgtgagtaaatcatgtaatttcacatatttcgcagaataatcttgggaaatattattttcatccgttttctgtaagtaacaggacccagcaagagaccagggtccgtgagggccttgtgcagggagggcccttgaaatcagggcccccagcagctgcccacgctggagcctctcttgtgttctgggtgcacgccatgacggtgctgata

SEQ ID NO: 10903 - DNA, 2300 bp, Homo sapien
tttacatgacatttacattgcattcactattgtaagtaacccagagatgattttaaaaagatgtttttgagttatatgcattttgcatcaggggcttgagcctctcggagtttggcatccatgggaggtgctgagggacgattgtacgttgtgttagcactgcctctgtggagggagagactggggggcaaggatcaaggctgctgatctgcactgttatgcgcgtccttttaactgttcaggtagtttgccaagtgcatgaatttttgtgtggtgggggcggggtgggggtggggacagtctcactcactctgtcgcccaggctggagtgcagtggcgtgatctcagctcactgcaacctctgcctcctaggttcaagcgattctcctgcctcagcctcccaagtagctgggattacaggcgcgcaccaccatgcctggctaatttttgtatttttagtagagatgggctttcaccatgttggccaggctgttctcgaactcctgggctcaagtgatccgcccgcctcggcctcccagattgctgggattacaggtgtgagccaccgcacccggccatgaattaatttttaaaataaggccctatcagcttttttgtcacatggtcccctactcgggaacctttatttccgacctcctgcctgatcttgtgtagccacctacactccgaccagcccccagagcagcatcgttctgccccctgtgcagcctttcctgtctccctgactttgtgctcgtctcctttgttgtaaagtatttctcctactttgaagactactcccacttaactaagtgtgcatccattcattcattcatttattcatttctccccagtgttctcctccagtagtatcttgggctgaacaacagtatttgtcttatttctccagctgtagtgtggctctgttttatccctattcaatgaatatttaatgtagcatatttcatgccaactttaccactagtgctggagtggcggaaggacaacacttggctgtttaagaaaatcaaagctggccgggcacggtggctcacacttgtaatcccagcactttggaaggccgaagcgagcggatcacgagatctggagatcgagaccatcctggctaacaccgtgaaaccccgtctctactaaaaatacaaaaaattagccgggcgtggtgacgggcgcctgtagtcccagctactggggaggccgaggcaggagaatggcgtgaacccgggaggcggagcttgcagtgagccgagatcgcgccactgcactccagcctgggcgacagagcgagactccgtctcaaaaaaaaaaaaaaaaaaaaaaaaaaagctgatcagagagatggatgaattactggtttattcagctgtttataaagtacatactatgtggcagtttagacaactaggctatacttgccagcaaaataaaaaagggggttgcatcctagcaggtcagataaaataattcaggggataagtaccatgaagaaatggacaggtggtaagtgatacgggtttcactcttaaatagatgggcaggttatgcagtggaaggcgcctgatgcacagctccaaagctcacccgtctacagtggacacgacgaaaccagggacatgtcccaccatttcagtggtcacaggcaagagtcttgtggatcttcggatcccacgtaacatctcatctccctaggcaccccgactcccctgcccaatttaaaacagacctcagcctgccccatcccggctgctttgcctggtgctcttctaactgcatgtttatctatcctccccgcctagactgtagggcccgcgaggggagccgctagctgtgcttgtcagtgtgaccagcgctcagcaggtgtccggcgggagggcgggcaaatacaactcagtgcccacgtgcgaatgaatgaacaaactagttccgggcggagccagaggcgcgcgccggcgcggaccgaggcccggccctatccgccccgccccctccgccccgccccctccgccacgtccctccgggtccgctgggcgctgattggtccgagcctcgcctgcgcagtgccgggccggctcccgcgcttgcgcactggctccgcgtcggccggtcggtttggtcggttgtagtggcctcgccgcccggtccgctgtcgcagcgctcatccgcgccgggagcccttggctgcgtcgcccggcagccgcggtgagtgacggcccgcgtatccgctgccggggctgtggcgggcgtgaggggttggccctaccctcggcccccgaccgcccaca

SEQ ID NO: 10904 - DNA, 2300 bp, Homo sapien
taacatttagttctttattctgactgaaatggtatgaggtaggggtgttttcctcctttcctccctgcctcctcttccttccttccaggataacatttagttctttattctgactgaaatggtatgaggtaggggtgttttcctcctttcctccctgcctcctcttccttccatgataacatttagttatttattctgattgaaatggtgtaaggtaggggataaccttttcccccctagatgctactaccatttctttttcttattttaatgtaattaaaaattttaaaggaaagttttttgaaacagagtctcactctgtcacccaggctggagtgcagtgacacaatcttggctcactgcaagcttgatctcccgggctcaagcaattctcccacctcagcctcctgagtagctgggaccacaagtgcacagctaatttttgtatttttagtagagacagggttttgccctgttgcccaggctggtcttgaactgctggcctcaagggatctgcccacctcagcctcccaaagtgctgggactacaggcgtgagccaccatgcctggccttaatttttaattgataaataattgttgtatatattatatatttatgaagaacgtgatgtcttaatgtgtttatattacagaatgatgaaattgtgctcattaacaaacccatcacctcacacaccatttttatgtggtgaaaatatttaaaatctactctttcagaaattttgaaatatacaatgcattcgtatttattataattatcatcctctgcaatagatcactaaaacttactctttctatctaactgaaattgatccctttgatcaatatcccccttccctttttcccccaccccccggccccagtaaccactgttctctctgtttctatgagttcaacctttttagattccacgtgtaagtgagatcatgtggtatttatctttctgagcctgccttattttactcagcacagtgtcctccaggctcatccatgtccttgcaaatgacagaatttccttatttttttaatggctgtatactattcctttgtgttgtatatataccacactttttaaaatcattcatctgatgatgggtacccaggctactgtgaataatgctgccatcaacatgtgagtacagataactattcaacatcctgattttgtttcctttggctgtgcacccagaagtgggattgctggatcatatcttcattctatttttatttttttgaggaagcttcggactgttttctataatggctgtactaattacattcttaccaacagtgcacaagggttcccctttctccatatcctcgccaacacttaactatcttttgtctttttggtaatagctatcctagcagttgtgaggtgataatctcattgtggttttgctttgcatctccctgatggttagtgatgatgagccttttttcatgtatttgttggctatttgtatatcttcttttgagatatgtctatttaggtcttttgcccatttttaaattaggttgttttcatgctatggagtggtttcagttccttatatattttggatattagccccttattaaatgtatggtttgcagatattttctcccaatgccactaccattaaagtatctatacatttttaatctttttcctttttctttcctctttttcttttttccataaaaacctgttggcttttgtatgtttatcttgattacagacacttcaccgaattcgaagtattcttataagtttttgtctcggattttgtaggcatggaattatatcatttgcaaataaagataatttcaggctgggcatggtggctcacacctgtaatcctagtactttgggaggccaagagcatgctacttttttttagtttaaactttaaatttttatggctacacaatagctgtatatacctacattgcttttttattacagaagctctagaataagtatgactattttcctaagtcaggaattctactattttgtttttcttttattttgtcagtattcttatgtttttcaaaaaagcactgtctctttaaaaacatatcacttcattgagctttaagctaatttttttcttatttctaaagcaaaacaaaacccaaactcattgtaatcctctttggaattgcattacatgtatatgttcagttgtgaaggcatgacattttatgatagtaaatcttattctggaacatggtatgttgcttcattttattcgtgtttttttgagacggagttttgcttttattgcccaggc

SEQ ID NO: 10905 - DNA, 2300 bp, Homo sapien
acccactgagcatctaccctcccctcaccctgtacccttccaagtttccagtgtctctcattccacacatctgtgtggacgtgtgagttagctcccgcttacgggtgagaatgtgcggtgtttgtctttctgtgtccgagttgtttcgcttaggatgatggcctctgtttgcatccatgttgctgcaaaggacagtttcattcttttttatggctggacagtattccattgtgtatatatgcaccacatcttcttatccaactgtctgttgatgggcacttaggttgattccgtgtctttgctgttgtgaactgtgttgcagtaaacatgcgagcgcaggtatgacttcaagagaatgatttatttccctctggatacacacccaggagtgggactactggattggacggtagttgtatttttagttttcggaggaacctccattctattttccatagaggctatgctaatttacactccccccaacagtgtgcagtgttccctgttctccacgtcctcgccagcatctactgttttttgtctttctttaatttttgcaagtttgcattgcttatagagtacaccgtagttttcaaggaaaacacaccagcaaataccggtactaggatatgcatacgtacgtgcgcatcagtgtgtgcctagagacccgggaaaccggtccatgatgataagtcacatcgatgcgctccttcagcagatatttacagagactggcgagtggcgaggcccgagtacgcagagatgcgtgaccgccaccccctgcctttgcccggaccggctcccgactgctcccttctctttattcaggtcttggctccacggcccaccttggagaggcctttgccgccccggcgcccgccctgcgccgtcatgtttgctctccctggtcctcagagcgcccactcccgtcaggtcgcctgtgtctgtgcctcgctggggaaggcagggcctggcgtgccctgcgctcctctctgccctcgggacaggaggtggtcagggaaggtggtcccgtgtcctcaaggcggagtccctcgcagatggtgctgaggtggagaagctgcgctgctgctagaacagagtgggcgctgctgaccgcgcccgcctgaggagggttggtggcagaggctgcgccacgtgcacgccccgaggcaggtggtcgtcgaggccttcaggctgcagctgctgggcagggtgtgagccaggagcgttgcagctgcggggcgggcaggtgggccgggcctggggagtcaccatccaggagcacggagcccccggagcagagggcacggccatcgccttctcccagcgtgggggctgtgaggcgagttgtgcggttgcagatcaccagaggaggaaaagcgcgcccagaggcgggagccctccaatcacagggcagtgcagaggctggcaccctccagtcacaggccagcgcaggggagggcgccctccagtcacaggctgacgccctccaatcacagggcagctagaggcagtcaccctccaatcacagtccagcacaggggagggcaccctccagtcacaggccagcgcagggcagggcgccctccagtcacaggccggcgccctccaatcaaaggccagcacagaggcgggcaccctccagtcacaggccaacgccctccaatcacagagcagccaggggctggcgccctccaatcacagggcagccagaggctggcaccctccaatcacaggccgtggcattggccgccctcatctgctgctgagagttctgtcgagtaggaggaaggaggtcccttcaggaccatgggcctgaaaaggaatgatggggccaaattgatagtttagccactgcctagattctagagatttccatcttttttggttgtaaaatgtaaaatcaaatcttttatattggctatgtttaggactggaacaactactgtaaaaatgatttttttaaaacctgtgcttgaaggttgcggcggctcagcctggaatcccagcactttgggaggccgaggtgggcggatcacctgaggtcaggagtttgagaccagcctggccaacatgcagaaatcccgtctctacaaaacatacaaaaattagccgggcgtgatggcgcacgcctgtgatcccagctactcgggaggctgaggcacaaggatcgctttgagcgcaggggtcaaggctgcagagacaaggctgtgattgctccactgcatgccagcctgggtgacggggcgagcccttatttcgaaaataataataacgattcaaacgttactccttggagt

SEQ ID NO: 10906 - DNA, 2300 bp, Homo sapien
ccgctcactgcaagctccgcctcccgggttcacgccattctcctgcctcagcctcccgagtagctgggactataggtgcccgccaccacgcccggctagttgttttttttttttttttgtatttttagtagagacggggtttcaccatgttagcaatgatggtctctatctcctgaccttgtgatccacctgcctcggcctcccaaagtgctgggattacaggcatttgccaccgcgcccggcaatttttttttttgagacggagttttgctcttgttgcccaggctggagtgcagtggcgcaatctcagctcactgcaacctccacctcccgggttcaagccattttcctgcctcagcctcccaagtagctggattacaggcatgcaccaccacgcctggctaattttgtatttttagtagagacagggtttctccatgttggtcaggctggtctcgaactcgtgacctcaggtgatccacccgccttggcctcccaaagtgctggaattacaggcatgagccaccatgcctggccaagagcttgatttttaacattagctcaaggttaatgcccccaactctcagcaaaagcatgacgggtgcccgcgtccgtctgggagtacttttcaccgttttactaaggcttcattgcccgcagccatcctgacctccacactctgaaagtgacaagccctgaagtctccagtcggggcaggtgcttgagctctgacgcccgggctgcctggcgcagagaccacgtgcttggggaggaaggctgtgtccactgggggattcctttcctcacatacaggatccagtgatcagcactgctctggaaggagggtcagggtggtgagcgttcagtccctccggccctctgagccccagcctaggccgccctctgcttgcgctcttcctgtggaggaaaggggagggctcagcaccacacactctgtcccctcatcgtctgtggggccccgggctctgcccctggaaccctgaggacaggaagccctgtgcatgcagaaaccaggccctggccccgctgacagccctccctggtgccacgtgtttccaccactggtgcccaggggctccccgcccttgggccagaagctcgaggacaacctgtgtgaccctctgttgccttctcgctttcctctttttccctcttttctccacgtgtggtgacgacgccctctctgcaaacgccctccccagagggtttcatgccggactctggtgcccttaccttgacagactcctccagctgggacagggcctcctcgtaccgaggaaccagcggctgcagcagcttgctggagagctcgtgccgctgcaactcaggtgccccagcttcagttagcattcggaggaatctcctctcctggagagaagctcatggtggaagggggttcttgggccagccccttaacacccaccaacagcagaaactcccaagaccctcgcagcctcacctgcactttcaggagcagtgtgaaggcctgtccagttttcccagcgcgagctgtcctcccaaccctggaatcaaacgcagctatctccagactggcccctgagccttcaagagtctgacggaacgacagcttctctccacaccaaccccaccccacgccagtcaagacggtcccacatcaacgcccaggagctcacaaagccccagaccccccagtggccgctgcgccagcgctcaccggtgcacgtaggttctcaggtactggggggcgtcgtagttcaccaccagctccacaccctgcacgtcgatgcctcgcgcggtggcgtccgtgctgatgagcctgccgggacacgcagcattgtgggcccgacgtgccaggagcaggggccgtggcagcaccggccctgcggggggcagctcaggcctttctgggaactggctgccatggggctggggcacaggaagccaatttgcagaaggaagcaccttttagagagccccaggctgaccctggagtgggcacccccaccccacagaggccttgcccctgcccaggaactcacagctggatcttcccctgttcaaactgcttcaggatcatcctcctctggccaggcccgtagcgcgaggagaactcagccacgtccacacccccaaaagcttgcaccagcaggaagagcctaggcagagagaaggctgcggccaagtgatgctgggaccagaggccacctctgccacccccgcccagccggggcctcacctgtgggagttctctcgggagttagtgaagcagagaaccctcgagaagcccatctccagga

SEQ ID NO: 10907 - DNA, 2300 bp, Homo sapien
gtcagaaggaatgtcaccgaagacctggttcctatcgaggacatccctgacgtccatcctgacctgcagaagcagctgcgggcacacggcatctcgtcctactttccaggtgccccagccccgggcaggcagctgagggaacacctccctgggcacccacacacaaggctgtgagtggccgtgggtcaggcgtccctgccacatcggtgccaagtgtggtctcagcactctcaagctcatggttcccacttgggtctcctgaggctggcgttcctctgggccttggtgccatccctctggggagcggttcccaggcctccagcagagcagcccagcccagaggtcacaggcagggaagcggcaggcctaggcctaggcgtaaacacgacttctctctcgcctttcctcatccagtccaggcagctgtgattcctgccctcctggagagcgcagcctgtgggtttctggtgggcagaggtggctaccggcctagcgacctctgtgtttctgccccaacaggcagtgggaagacactggccttcgtcatccctgtggtgcaggtctgtgtgagggtcccctttctctacagcgggtgtgcagaggacaggtaacagccttgctgacgcaggcgctccttccccctcaggccctgctttcgagagtggtctgccacatccgtgccctggttgtgctgcccaccaaggagctggcccagcaggtatgtggaccctagacctggagcgtggcaccgcccgcctcagcttccctgctgagtgcacagcgatcagcccctgggggacccagattagatctggggtcctttttgctgcagtaggtggacaccagctacctccaggccagtgacagacttctcctgcaggtgagcaaagttttcaacatctacacagatgccacacctctgagagtctccctggttacgggacagaagtctctggccaaggagcaggagagcctcgtccagaaaacgtaggttgtgtcagggtgcgggtttttcagggggtccctgctcagccctgcaggtggcctgaggcaccgtgggagcagaggaggggccaccatctttaaccacctgttcccgtgaagaggaggagctcccaccggcccccttcccatgtggggtggagtcggggctgtggggtgaggcagcgtcttgctatccggaagcccttgagaaagcttccttctctcgagctgctctctggtctgtagagctgatgggtaccgctgcttggctgacatcgtggtagccacccccggccgcctggtggaccacatcgaccagaccccaggattcagcctccagcagctccgcttcctggtaggtccccgccccaggggcctgggctttgagctcagggccgcgccacccagtcccgggctccctgtctcctgcagattatcgacgaggctgaccggatgattgacagcatgcatcagtcctggctgccgcgggtggtggcggccgccttccagagcgaggaccccgcggacccctgtgccctgctccagcgaaggcaggcccaggctgtgacagccgccaggtatccagcagcacgcccaggtgctggcctcccctgagcagagtcctctgcacacagctctccttccttaatgcccagagataagggtggcttgagctctggtgcacagaaccgcatcgtactgtcacgtgagctggacccaccttgctcctggtctgcggcagtctctacagtgcgtagcatgaggaatcctgttccctggaggttcggggcagccactggtagggtgccagcaacacccccttctcttccagcacctgctgtccccagatgcccctgcagaagctgctcttctcagctactctgacccagaaccctgaaaagctgcagcagctgggcctccaccagccccggcttttctccacagggctagcacacaggggcctggaagatacagatggggacggggattcggggaagtatgcctttcctgttgggctcacggtgagtgggataccgtgtgggcagagggttgcactgggaacctggggcccctaaccaaccctcacctccaccccgaccccctgccgtccctgtagcaccactacgtgccctgcagcctcagctctaagccgctggtcgtcctgcacctggtcctggagatgggcttctcgagggttctctgcttcactaactcccgagagaactcccacaggtgaggccccggctgggcgggggtggcagaggtggcctctggtcccagcatcacttggccgcagccttctctctgcctaggct

SEQ ID NO: 10908 - DNA, 2300 bp, Homo sapien
gccggtagccacctctgcccaccagaaacccacaggctgcgctctccaggagggcaggaatcacagctgcctggactggatgaggaaaggcgagagagaagtcgtgtttacgcctaggcctaggcctgccgcttccctgcctgtgacctctgggctgggctgctctgctggaggcctgggaaccgctccccagagggatggcaccaaggcccagaggaacgccagcctcaggagacccaagtgggaaccatgagcttgagagtgctgagaccacacttggcaccgatgtggcagggacgcctgacccacggccactcacagccttgtgtgtgggtgcccagggaggtgttccctcagctgcctgcccggggctggggcacctggaaagtaggacgagatgccgtgtgcccgcagctgcttctgcaggtcaggatggacgtcagggatgtcctcgataggaaccaggtcttcggtgacattccttctgacacagttaggctcagccagccaccttggcaggaaaggctggacctgccatcaaaaagaaagagaggccaggtgagcgctttccaggctctcgcgcagaagcccacggtggaaaaagctaggggagggaggctggggaaacctctgtcgtcttcagctccttctcagccccaggatgcgctttccatacagccttcagaagttaaacagtaaaagcagatgccactccctgagcaaactcactctgtagcctcccatcaacccacagtggcacccaccctcccgcagccaggaggtcctgtgacctggcgctcgcctgccccagccacgccggcgtccctgcctcgaggcctctgcctggcacccccaacccccaaccttgacctggcttcaagtctttgcatcccaactcaaagagaacctcctccacctgccctacctaaggtgcccgagcactctgtcaaacttctcgctttcttcacctgtctcgccggaaatctctttaccgaaaaccacacgtgctaagcaaaaacaccaacggtcaggagcttgcagaacggcctctgacttactcctgaggcggtgagcgcacagcaggaaaccccgcacgttcacgcaaacacatcttgcagaactggcgcggcgcggcgggaggacaggggcaagcctagcagaggaaacgggagctctgcacgtgcaggatccagacccctaggcgatgaaactgcagacctggcagcgaggcgcggctgtgacccgggaacattcgctgaacgaaatcttccggggcgaccgccgcacttaagaatccgcgcagcctaccctctcacgccgaccaccctcccgcccgccgaggctcaccttcggcgccttcctcttcccgaacccccccagcaccaggccggggaccaggggtccggccgcctcctccagggccggtccatctggggccgcctcggcgctggcgctggtgctgcgctcccccggcgcctcctcgctgctccctgcgctgggctcccctggcgcctcctcgctgctccctgcgctgggctcccctggcgcctcctcgttgctttctgcgaggcagacacccacccggcagcgcgtcagcaccgagtcgccggcgccccagagggagcccgctcgccccgcggcccacctgcgcccgcgtcctcgccgtccgccttccgtcgctttccctgcggcgcctccgggctccccggctccgcgtcgttcacccgccgccgccgccggggccgccgtcgcctcctggtcgccggctcggtcgatgcagccgcctcggtctgcgcgggctcccgctgctgctgccgttcgcgggcccggctctgcagccgctcgagcagcgcgcgggccctgccgtgcgccccggcctccgcgccctccggccccgccgcagctgccgcatcggggcccgggtaccgcgcgacgtagaacagcgccatggccagccgcacgcctgggactcgggcgtggcgcgctgcgatgacgtcggcggcacgcctgcgactcgggctccgcgcaaaagatggggttggggtacggcgcgtagagatgacgtcgggttctacgcgcagtggtgacgtcacgggagcgccggcggctgagaatccgcgttgttccgtgttgggggcggcatggagcgggagccgggcgccgcgggagttcgccgggctctgggccgccggctggaggcggtgctggcgagccgcagtgaggccaacgccgtgttcgacatcctggccgtgctgcaggtgggcctggcggcgtcgcagggccggagtcgcggcacggga

SEQ ID NO: 10909 - DNA, 2300 bp, Homo sapien
acgcgaacgttcacagtccgctgttcgtaacagccaaaggtggaaacgacgcaaatgcccagcaacctacgagcggctgaacgatacgtgctgtgctatacgacgcgctgctactcagccacaaagagaacgaacttcgaacacgccgatgagtggaagaagccacataccgtatgatcccccttatgaggagcgtctaaaaaaagcaaacccattgatccaggaagtaaccactgatccaggagtggctgcctggggctgggggtggaaaggggcgggatatggaagcgatggtaactggtacaggatttcttttcggggcgataaagatgttctgggatagcggcaaccactgcacaacacagtaacagatgctaacttctcagctttaaacggtaaactgtgcctcagttattcctcactacagattttaagaaagctcataatgcattcccatggctgcagaccacagtgtgatctgagcaaacacatctgtggactggcacgaggcttggtgtgcgtgctctatgcaaacacagagatccccgtggatgccactggaaatgaacacggattctgcgtcttcaatattcactacaggactcgatagccatgtttctgaatgggactgaacacccacagggtgatgctcccatgaaggaagcagctttgcctggacaattgtgggagccccagacctctgctttgtggataacctgggagttggggtgcaggggatggacaaggatgaggccagcccaatgacccaccttgacctgaaaggaggggtggcccaggagctctcccaagcgattgcagcagctgtgatagcggtgtctcatccacaccttgtacttccgtgtggctccctgggaccctgcagacaggttagggtggtcagcccacgtgaggcccacatacgccaccctgggcccagcccaaaatctcaggcctggctccaccctcccattgtcttctactcagcctccgcaggtggaaacaggtcgctaaggcccccagacctgtgctgagaccagcacattccctgagccctgcaaacaggaagagcacctcctaccccaggactgccccagccaagctgccaggagcaggatccacatcccctctctttactccaagacctgacgtccccaggatggggacataaaggaagctccgagtttaagcgaccgtgtcaggatcagtcaacatcaaattacaaaaggggtgcaaagcacacaaaaagtcgtaccttgtccagtgttcatctacactcagctgcagggcacccatgtcacccctgccccaacgccaccatccatcttccacggtgggcttggtgcgtcctcccaccagcctgcacggcctgtgccagggttgggggcgctcatcccatggtgacaaagcctccctccgacccacggaaagagaagagcagccccggggccctccagggctcacctgtcatgaccatctcctcagagggcagctggcccacaaacagctctccccgctccagcaaggccccgaaaagacggctgcacgtgcggactgcttcctggatctcctcctggtcctcagactgcaggagaggcggcggcagggtgcccggccgccaactgtcaccttcgcccctgcctaggctgcccccaacccgttcccttccccctcgggacgccagccccgtcacccccgacccgtgacccacacgcctcccaccctgaccccccaacgccgtctcggaacctcctggggacctgccgccgcagccccccattcaagtcccgctcccgtgccgcgactccggccctgcgacgccgccaggcccacctgcagcacggccaggatgtcgaacacggcgttggcctcactgcggctcgccagcaccgcctccagccggcggcccagagcccggcgaactcccgcggcgcccggctcccgctccatgccgcccccaacacggaacaacgcggattctcagccgccggcgctcccgtgacgtcaccactgcgcgtagaacccgacgtcatctctacgcgccgtaccccaaccccatcttttgcgcggagcccgagtcgcaggcgtgccgccgacgtcatcgcagcgcgccacgcccgagtcccaggcgtgcggctggccatggcgctgttctacgtcgcgcggtacccgggccccgatgcggcagctgcggcggggccggagggcgcggaggccggggcgcacggcagggcccgcgcgctgctcgagcggctgcagagccgggcccgcgaacggcagcagcagcgggagcccgcgcagac

SEQ ID NO: 10910 - DNA, 2300 bp, Homo sapien
ctagtctggaaggcagaaaggaagccccggctcagggggctggaaaaccccaggcttttctcaggcaggttgtcccacagcagagacaacagacagaaacccagaaaccacctgccacgatgtgaacctgatgcagaaacgcggttcgctccctcgggatgcaaaggccaacttcagcctggcacggcggcgccgcggactccaccatcccggggaaggagccggacccctgtgggtgacgtgggactgtggggcgggggtgtccccggctgggctgagctgagcagcgaggaggctctgggttgccggaccggggtcagggagcctggcgttagctgcgtgctgtgtggtcatctcggcgaggagggagcggctccctcctgccccggactctggatctgtcctgcggtgggcggtgtcggagcagccgtaagtgatcggcgatacggcctcccggttctctctctccctgggactcggcttcctgaaggcagagagtccgggggagggaggagccccctgctcccccacacaagggactgggcctctggggtgggctgggctgacaggcgacccccggaggatgcagctaggggacgtgtgagtgtggccctctttgggaaaagggatctttgcagacatgattaagataacggcctggagatgagagcagcctggacgaggatgaaccagagtccagggatgactgagggatccgagctcagctgggcagaggctccaccccgtgcgcccctgcagttggcaccaccctcggcctcggcaccttctcagcaccgcggagggaacggggcaatgccagggctgcccaccctttctcgggtggtggggggattcaggagatgaggcaagcacagtgcccgccctgggcctggcacactcgtccagcatggcaggctcagggctgaggacctgagcacggcggagcttgggccacgtggatcagacccatttgttcatagtgatgtcagcccgtgggtggcatcggcctttttttaatggggtggatgggatgggacagcacaggatagggtaggataggatgggacggggctggctcagggctctccagggaaacagattaatagcagatggtggggacgtgggcttagctgtgaaagttcatctaaggaattgactcacccggttacgggggctgagggtaccgagattggccgtcggctggcaggcgcccaggagagccggtggcgtgagctccaagcctgaaggcaggggaggacccacgtcccagcccgaatcgagcagagtgtgtgaacactccctgcctcggcctttctgtcctactcaggcctgtaggggacagatttaaacacggctcccaccagaggccatgcacagaccacccagaatcgggagagcaaacgtcccagcaccctgttccctgccacgctgacacaaaaccaaccctcacaggcaggacagcgcggggggacaaaccggagtgaaagagcacgtataggaaggctggtattgcttaagtggaacgacacggaaggaagcataaaaggatacgcagtgacaaacacgtttctgctgcgcgtgggggttcagaaagccaggggctgcggggttttattagctggggaggctggttgggcttttgattgtgtgtgttctggggatgcgtggagcggtgtctgcatggcaagcagctgtttgtaaacagattgttggtgtgttcgggtgctgggggaggtggctggtgcagtggggcggggggttccctgcacagaacaagcactgggggtgggaaccacagggtgaaaaacctgttaagtgttggggtcggtagaataaacccccctccccacagccatcgtgtaacgcacaagagaaagaagtcccagagaggacgcaacccagacctgaactttctctgtgggcggggtcccctgaaaacagcccccgagaggcaaagccccgggacccaccaggcccgtcggtggtgggggtgccccaggaacagagggccgggccccttggcctctcacgggcccctagctggccgggctgcccgcttccgttgggaaggacgccggcacccagcgccgtctccccgcaggtgtggcagtgtggcggcagcatggaggtgctgccctgctcccgcgtggcccacatcgagcgcaccaggaagccctacaacaacgacattgactactatgccaagcgcaacgccctgcgcgccgccgaggtgtggatggatgacttcaagtcccacgtgtacatggcctggaacatccccatgtcggtgagtcccccac

SEQ ID NO: 10911 - DNA, 2300 bp, Homo sapien
tcccttgagactgtgatgggagagcctttaaattctccctctgcataagcatcaatctcccggggagcgcggcacaaggcagatgatatactggtccctggcttcaaaatatgtgaaaaactacacggtcattaactctgacgcagaaaagagacctgccccgggtgtggggacgccacacaccagtgctgcttgcgcgaggagtcgtggtggggggtgggggctgtcttgttctttccctgttttgcagggattggaaaggggatgttgctgagggcatgggggttcactctccgactttatcactcctgagctaatggccctgctgaaaagccaggtcacgcaagccgtgggcccttgtgcttagggggcacctcacacaccccgaaagctcaggggtctgcggcccaagcccggagactgaagcagcccagtccccggctgtgacaggtcctcagctaatgatggaagttggccgactcccaccgcccgggagcctcgcctctcccgtagcttcggtccttctagagacacggtgggggacccgagggccgagagacctgaggctgcattcacccaagaaggggcctcggcaccacccgcaagctcagcacacactgacggggctggcacctgtggagctggcttggggaggcctcgcagaccgcccagcagtcccaccaggttcccatgtggaatcgccccagcgccacagaaggccccggggacagagtggccgtaagtggctgtggggttcctaaagggaacacattcgttccgcagctatttatcaagcacctactgtgtgcccggcctcgctctgagcactgggaggcagctgtgagcagaagcgacagaaaccctgtcctgcggagctgagccatggggagggacaggcagagacggggacggatagcaggcggcgccatactgaggggtgtgagcctctggtccggacgcccagctatggggcaaggacggcggctctaaacaggatggagggagaggactcaccctgaagacttgatggtgacatttggggtttatttttactttttatgttttcagacagggtctcactctttaacccaggttggagagcgttacgtgatcttggctcactgcagcctcaacctcccgggctcaggtgatcctcccgcctcagcctcccaagcagctgggaccgcaggcatgcaccaccacacctggctaattttgtttttttctgtggaggtggtgtctcactatgttgcccaggctcgctggtttttttaatggacaaataggattgtccccgttcacggggtatggcgtgccgcactcaggtcagccgccatctccacatttgccatttccttgtgtgggggctcggctcctcctcccagttgccggctgggtcacggtcaggtccacggtcctccctcagcggcaccagcactggctcctctctgcctgtggttttggtcctttttttttttttttgagacggagtctcgctctgtcgcccaggctgcagtgcagtggtgtgatctcagctcactgtcacctctgcctcccgggttcaagagattctcatgtttcagcctcctgagtagctgggactacaggcatctgccaccatgcccagctaatttttgtatttttagtagacatggggtttcatcatgttggccaggcggtctcgaactcctggcctcaagtgatccacccacctcggcctcccaaagtgctggaattacaagtgtgaggcccctgtgcccggctggttttgtgcctttaactaatctctctggcactagagctttgaaggctggaggcagtggagcatgcagagacctgggaagggcgcccggcgtgggcaccacctgtgccaaggccctgaggggtgcacgtgggggtgctgggaaggccaaggtgcttcgaacccagggggtgggcaaggcaggcgtcaggagccctggggggcttcgtgttccccagcgtgaggcccgaggacaggattctgtggtgggtggggggaccgagtcaccgtggcctctgtactgggggtagacaaggaggctgaaactgctggaggtcgtcccagaggccagtgtgccaggcgcttctgaagacgggtgggcagacgatggaggacgaggctctgtcccgcccctgcagagcttccttcgttccggccccttccagcgaagggcagggctccgaggtgcttcccccctccttctcacgaaacctgggtggtctcaggttgagggtgggagacatccgcggagtgggagggcggtgggcgggattcacca

SEQ ID NO: 10912 - DNA, 2300 bp, Homo sapien
tgactcatttttcaactcagggaaatatgggctgttgtcactgcagggggccttggtgggaagggccagctgatgtttgatctcagtgttacacggaggctgggactgtcatgattggctgggacaccccactgcatgtgaccttgggcctcctgctgggtccccggggaacctggcgttttggggcttcttaaagtccgtggtttccataacagcatcagtgggttcaagtggggacttggcacctctcaggcttctcccctcacactcggctttcctggggcatctcagtccccagccggcgctgttctgacaagacgctgcctcctctgccctgtgccctcccttccccttcctcgctcctccgcagggcgctttcctttccctcgatgtttatcagcttctgacgtgttgtgcatgaattgtgttccactgtctgccccccacaatgtcaccccatgcagtcgcacacgttgtgcactgcacaactacaccggcagccttttagtccctctgatgccgggtaagctccccgaggcctgagggcgtctgggggagccttgggtctgtcacgtcaaaatgcaattttaaaccggtccaaatttaattttcacaactgaaaacccagttatccatctgcaaatagcaccccctcccgtaactgtctccacaaaggattctgccttattagaagacctggcatttccagggagcttttcatctctgaagcacttcgctaacagtaattaattaatcctcctcacaaagctgaaaggcaggtaaataccaggcctcatgctcagaaggacgggaagaaggggtgaagacagccgtgtggtctcacaggcagggtcagggccttgcctctccccatgccggctctgcctgagccgacccgaatctgccctcaggccatccagcctctcactgcagcctctgggctctgtgtcagccagtggctgggtggctttggccctgtgggtctccagcgtggacggcgggcctccgcggccatctcaccttgcggtagaccatggcgtctccaagggcgagggctgcacctgcttcccaggacccctgcttgggacggggaatcgaagactgagctgatgcccatcgaggctgcttctactcaccttcctctctgccctcctcgccccccattgccccatcgctctgtccggcctcctggccagccctgcaggcccattaggcacacgccggggcttcggtgcagctgccgcaccctctgagactccctctatgcctccttccagtcactacccagggcagccctacttaaaactgtgagccccctctacaacatccacgactgcttatacctcatcctccgtcccgtccttgagcggggccgctgcacactcacgcaggttccacactgcacaacggtgcctggtggcttttcatcccacaccgtgcgagctccccgtggcacggattgtttttattccttagttcatgattgtattccaatttgtgggaacagggcgtggcacatagtagatcctcaattaattcttgcaaatgaatgcagctcccacaggagcaggaaaggagaggagggactcggggctgggcagagagggagaccgagctggggagccccgtggtggacatagctgacctcttatggacccctgggcagcccttcagagatactgcagttgggccaacgtggccggtgtcagcgtcccccaggggccagtggcattcgaggggctaccccagcaggggtgaggccttggtcagggtgggtctgctgctgagaggggcccttgggcttccaagggaggatgtgggtctagctcagcagggggtggcagggctagatgcagaccaggtggggactggcctcccctccctgtgggcgagtggaccctcctcagggaatgcggtgggctggggccgcccctcctcacagctgtgcctccgcagggccgagcccgcactgtcgcggatccgagaggaccggcgtcgcatcgtgctgccagccatcgacaacatcaagtacagcacgtttgaggtgcagcagtatgcgaacgccgcccatggctacaactggggcctctggtgcatgtacatcatccccccgcaggactggctggaccgcggcgacgagtcagcacccatcaggtgagctgcgccctcaggggtcgagggcggccctgcccggcaaggagcggagcagagcgaggcgggcgtggggacgagggccagggatgagggccggggacgagggctggggacgagggcgtggggacgagggcgtggggatgagg

SEQ ID NO: 10913 - DNA, 2300 bp, Homo sapien
tcagggccgctgctgctggctgcctcctggtttccagctgtgcccgaatcagctcgccccacttcaatggtggcaaggtgcccttcctgggggcgggcagcccaggacccacagccgggaccctgtaggctccagcagctctgtgtgagcagccctggcccctggccctgtgctggaggcagcgtcctccccactccgatgtcacagaggaaacaaatgcaaaccgttcagcagtggcccccgaataactcagcctgagtggaacccgagggttctttgcaggacttaagtggcgccgtttctgtcagacagaaaataaactaagtttatggtatttggaaagcatcagagttcagcaagatcacggcacccaggaccacttgagagctgcagtgattgagggctgggcagaggcgacgcagctggggacaggccaggaatgtcggccccatccagggagcacagggcgcccctcccagggccttggaggaaattcaaccctgtcaagcttggaggccttcggcgcatttagccgttgaaggaagtacccaccgtggtgtgctccaaccagcattttcacattcacagtgaggccagctcgctcctgctcccaccagcccatcgcaggtcagagaaaagccagacgccctgctccacatctctctcatacttctccgctcttcacaacaggcagcctggccagccccttctcacctccctgggcactgcggctgcacccccaggcctggcaaggtcacggtgacctccacaccagcccatgcaattccaggcttcccattgcccctgagaaggtcaaagccccgggttgctcagccaggccgctccctccaccatcccctcttggttccctttggctcactcacctgcgcccggcccctggctctgtggcctgcgctccaggcctgctcctgccccagggcctttgcgctccccacccccacctggatggccacacacgccctcacccttcaagaggctcaccccgtgctcaacgtaaaatcccaccagagccccggcctccagcctgctgctctgcctctcccacccccacccccggcttgctctttgcacccctgccctgctctcctgctggctggggctcctggggcaggggttctgggtgtgggtttgctgtttcaccgcctcatctcgggacccagaactgtagacgcacacagggctccatgtgtggcctttatggagcttgaattcattgcactcagcagaggggaaggcaggtgatgagcgggcgtcgtccaaagcctcagagctgtgggtgagtctccaaatggttttgtttgaacgtaacattaaaagtctaagttgtggcttgggctgaattagaagctacagcaccacacacacatgcacacataagcagacaccacacacacgcacacatgaacatatgccacacacaagaacataccccacacacacgcacacatgcacagacactacacatctatgaacataccacgtgcacacaggatacaccacacacacgcacacacgtgcacactccccccgtgggctcctggcagcaggggctgttcccatcactctggtgcttgcccctgctggggaaccgtccagttgtcaccaactcacttctaagccatgtatcagggcttcccagcctcagctccagactgcacgctcagcttctccatgtccagcccggcatgcagggcatgacgtgtgacagggctcagcccctccatgtcccttctttcccccgtgtctaggctgtccttgccaggcagtggactttcgctcttgccctgctcagccgcttccctcctccttcccataaaacatggggctcagcccggcaggaactccctaagtagctgggtggagttccagccctggatgaaggggagggcacaggaccaggctgagccaatcagcatggcaataggctcagggagagacacacggcccaatcagagccaggagaggttggctgggctccgggagacaggacgtgaggctggagtggctgcagcctcttgcagacagtggaggctcaggctaagccagcaagaccaagaggagcacggagagctggcaagacgctggcccgatgatatcgcctgagccgtgaatcctcctggccaacgccagggcttcctcaggctttgtcattgcagggacacttccctccctccctccttctctgtctctctccccactgcctctctttctagcttaagccaatttgagatggattttctgtcacttgctgttgaaggagtcctggtccagcccaggtg

SEQ ID NO: 10914 - DNA, 2300 bp, Homo sapien
tgtgggagtcttccatcccctgcaagcagccacggaagctgcatcttgtcccacgtgggtggatgtgcctggccattgcaggccccagcaagcgtccatggatgattaaagaagtaaacaaaagcaagctcagcccggcccacttgaaactcagacttggattccctgcatggctttaacccctcagaggccaactatcccggcagaaactgcactgctgattggtttggtttgacagggctggtcatcggaaacacacatagaatgtaggagagtgtgtgtgtgtgtgtatgtgtgcatgcctgtacatgcgcatgtatctgcgtgtgtacatgtgtgcatgtatctgtgtgtgtgagatgtatgtacatgtgtgtgtgtgtccacagatgtgtgtgcatgtgtggacatgtgtgcatgtgtgtgtgtgttctggcaccaacaggtgattccatccactttcaaacccaactcctcaccactttctccattagctgcattactgatttctctttgtcagacggtagatgcttgtctaattaggcagtggctttaattatgccacaaagcacataacatagtcttgattattaagactggcccatgggataatgaaaggaagactggcaaatccaaattaagcagaatcataaaaatgaatgaccttatccgagaagccgtcctacatcccagcacagtaacatgcccctgctctgtgtttgcggactcctcatgcatattaattgtttaagcctgagcagcctggctgtcagctctaatagatgcagatttaccggatggcactttgaggagctgggagcaggtacctcagcccagtccagattcctgatgaagctgctctgtctaaagccttctgcgtctcgggtctgggatgggaagggagtagacgtggacggtgaggatgggagaagccaggtaccatcgtggagataggcggcgagccatgtggcttttctgcaggaacagctaccaggtttctttcctcatcaaggttgggagctgcggccggttccccagctgacatcttcccgtttcacacgtgcccggctctgtccaggcctggggtctgtgccctgggaaggaaatgtctcagggggagtgggacccttgggtgagcaccaggggaatgcactcccactgggtggtctttgcctttgaagcagctctcccggcctctccgggcacaactttaagcaagcttgtccttggttcatggaagccaaccggaaagctgaggttcctgccctgtggcttcctgctgcaatgtggattcactgggacctgcggggcagagccggctcgatgccaggcagccctggactctctaagcagaaagagccttctcaggcctgggatccagctcccccttctcccactgtgcgggtggcctgggatccagctcccacacacacacctgggcacacacacatgcacacgcagcatctcacccacagacccagcacacacctggagacagatggacctcagacggaccccggcggcccagccgaggcgctcgtgtcacccatggctcctgttcataaggcgaagggcacgcgccgatcgcagacgatcacttccacacagacttgcattatgtgggtttcatttgcacgaaatccacctgggctggaccaggactccttcaacagcaagtgacagaaaatccatctcaaattggcttaagctagaaagagaggcagtggggagagagacagagaaggagggagggagggaagtgtccctgcaatgacaaagcctgaggaagccctggcgttggccaggaggattcacggctcaggcgatatcatcgggccagcgtcttgccagctctccgtgctcctcttggtcttgctggcttagcctgagcctccactgtctgcaagaggctgcagccactccagcctcacgtcctgtctcccggagcccagccaacctctcctggctctgattgggccgtgtgtctctccctgagcctattgccatgctgattggctcagcctggtcctgtgccctccccttcatccagggctggaactccacccagctacttagggagttcctgccgggctgagccccatgttttatgggaaggaggagggaagcggctgagcagggcaagagcgaaagtccactgcctggcaaggacagcctagacacgggggaaagaagggacatggaggggctgagccctgtcacacgtcatgccctgcatgccgggctggacatggagaagctgagcgtgcagtctggagctgaggctgggaagccctgataca

SEQ ID NO: 10915 - DNA, 2300 bp, Homo sapien
gatgatgaggtgtctctctctctcgagttagaagctgctgtgcctgcctctgggagacatccaattccagactttccaaagtgaaaaatgcaagtgcagtatcgatattttaaaatagcatgattacgtatttatctcacaggattaaaataagaaggggaagtgatttgtgtcatttttcaattctacgtccaatctgtatccttcagtcctacataaatacggacactttgtttactcatttaaaatggaatattccagaaagtccagaggttccgggaggctcaaagcctcggctctgctgaggggagaaagccactcactgccctgtggggggcggagggtcacagactggaatcttcccagggcatcggtccctccctccccatagcaggaatcctacagagatcccaccaggctccaggagctggcgccgcgagagaaggtcccctcccaggcgggcagttgtgggatattagcatcgggtatttcacaagtttgtgtttccactggccttcctccgaggaccagagacctctctgtgcaagctgacaaaaggcagcccagcctcaggggtccatgccgcctctttctggcttaaaactattgcccaggcacccgcccccaaatccaagatgccccagagactcccagctcagagacagccaatggtgccatctttgtggggagacacccctctcactcccgtccccctgggaacagcatctccaagccgcgtctgcttgcccagcacaactgagcacctagaactttccctggcccggcccccttgggcacccattccacacaccctgaccaagctgcggagcctccctgtcagcccagaagttccaccggctcctttccagtcgacactgccccaccccggggtccccgtcctgccccgatggccatggggtgggttgtgattccgtctgttcttgaacctcacgccggcggccacacgggatgaggtctcctgtgttgatctttggcttggcgtcacgtgtgtgagccacgtctcggctgctgcctgtgtcgacggctcggttcttcctaccccagagtagcagcacgcatgtggatgtgtgttcagctcaagttacacaggcggatggtgtcaagggctggtggggatggtggcggcggcatggcgtttaaaatacctaatcttagagccgttgcaattttcgggttaatatttttaacattagtaggcctgaccatcagagcagtttcgggttgatagagactgagcggagttcccgcatcctctgccccgcaggcacagcgcctgggcgtgaacgtgtgtgactgtgtcactgtcgatgagccaatgctgcccgatgcaggaaactcactgagggccgtggctcacggggggctggcgtgcgtgagtgtgactgtgtcaccgtcgatgagccgatgctgcccgatgcaggtgactcactgagggctgtggctcacgggggggggggggggcgctcactcagtgtcacacctgctgtgcgtttggacaattgcgtaagaacaagtattggccagtgcagtgactcacgcctgtaatcccagcactttgggaggcctaggtaggtggatcgcttgaggtcaggagttcaagaccagcctgaccaacacggtgaaaccctgtctccactaaaaatacaaaaatttgccagttgtggaggcccacccatttactcaggaggctgaggtgggaggattgcttgagcctgggaggtccaggctgcagtgagctgagatcatgccactgcactgcagcctgggtgacagagcaagaccctgaatcaaaaaatacataataataacagatatccaccattgcagcatcacacagagtccactgccttcaacgcctcatgtaccacccattcatccctccctcttccgcctggcaccgccctctcactccgcgcacagccttgcactttctggaatgtcctgagctggcagcctgccatctgcagggagtttgctgggcttgtaccgggggaagcggccgtcggggagaggggcgggaggggcgtctcctgggtgcagacgcagcgtgtcctgggcctgcctgacctccctctcttcctttcccccaggccttgccaagcccatcggcctggtggaggggccaggaggcctgggccagggtggcttggcggccaccctgcgtgatgacggccaggaggcggaaggcaagtatgaggagtacggctacaacgctcagctcagcgaccgcatctccctcgatcggagcatccccgactaccggcccagaaagtgagtga

SEQ ID NO: 10916 - DNA, 2300 bp, Homo sapien
cagaaccccccagatccccctacacacatgtgcatacacagacacacacacacaggcacatgcacacacagatatacatacaaacacacacatagacacatgaacacatgaacaaatgcagatatgaacacacagacatgcacacatttgaacatgcacagaccacacacatgaacagacatacatacacagaaacatgcacacacagagacacatggagagaaacatgcatacatgtgaacatgcacagacatgaacacacatgaacacagagacatatatacatagaaacatgcacatatgaacacacaaacacagacatgcacacacagacacacagacactcgtacacagatacacagacaaatgcacacatggacacacaaacacagacacatagatgcacacagatatagagacacatgcacacatgaacaaacagagatgaacacagagatatgcacacatgtgaacacacacacagacatacatagacacatacacaaatacacacaggcacagacagacacatgcacacgcatgaacacacacagagacaatgcacacagacacaggcacatgcacacacagatacatgcacacacgggcacacagacatgcacacagaaacacgtggacacatgcacatgcatgcgtgctgacaacacagacatgcacatatgcagatacacaggcacacagaggcaaatgcatgcacactcatgcacacacacggacacacacacagccaagagctgtgaagccccttgccttactcatctctgtatggagagccaagcacagccatgctcttaataaatgctccgtcatttattcactcatcccgcaaatgtttactgaacaccagctatgtgtccaatctctgggaacacaggggtgaaccctgcctttgggtgaaactcctgcctcttgggtgcttgcattctgccagtggaagttgggcccctgtgctgcgcggcttggctgacatctcccctggcttccagggtctcctccacaaaacgccagtgtggggccagatcagagcctgggctgggggtgggggcagccggggtttgcggcctcgggtcttacctgcgagcctggctcagggacggggccttctccctcctggtggctccagggccccctgctgttcccggaggtccggctgcatcccaagccccaacccccccatacccgtcccgggactcagcttccccagtcctcagccctggacgggggagagggagggaggccgggagctcggcttggggaggggtgggcaggagactaccagagtggccctgacccgggtcctgccccggccgccccctcccccattcactcccggcgacaccgccctggccaggcattcccggaggccccgctgccctcgggtcaagcttggggtcgattcggaccgtgctggccgttgggggccccgggcgtctggcgggtcctggggagggagggtccgcgcctgccccgcccccgctccccgcgcccgcgcgcccttggcccaggctaccccgcgcgccccgccccccgtcccccgccccccggacctgctgtcctggggtccccgggggggcgcggtggggggggcggggcaggcgcgcggggcggtcccggggggcggccttgaggggtgggggaggcggggcggggcggtcctggggccgcggttgcagatgaggtgaggtgaggccgcgtcactctgcaccggcgcggtggctgcggggcgggcaggacaggagccggcacagacaccgagcgccgcccgcccgcgccttccccgccgccccccggcgcccccggcccccctcaccgctccccggggcggggccgcgccctctgagcgggggatgccggccgcgccccgcgaccccagccccgggcagccctctgcgctctgggggacccccggcggccgtggcccggcgcgctgagctggtgctgaagggacagctccggccgagccccgcagcccccgcagccccgggcggctcatggtccccgaagccgaagctgaagcccaggcccgggcggggatgctggggatgccccgcgggtgaggcccccgctgcagccgtgttcatggcggtggccaggaagatccgaactttgctgacggtgaacatcctggtgttcgtgggcatcgtcctgttctccgtgtactgccgcctgcagggccgctcccaggagctcgtgcgcatcgtgagcggcgaccgccgggtgcgcagccgacacgccaaggtgggcacgctgggggaccgtgaggccatcctgcagcgcct

SEQ ID NO: 10917 - DNA, 2300 bp, Homo sapien
tcccaactgcctcagcccagcaaacagccagtggtgcctggaccacacccttcctgccctgcacaagaggccgccagtaggctctcccagaggcagggtaaagtggaccccgcagagtgggcgaggacccgttcccactaagggcaaccgagggcagggtcccaccactgtcttgggcaccctcccctccgccctccagcaaaccaccattcttctccgagggcctgtgcaggggtgtagccccgacctgaaacagggtgcccatgactgctggggctcggagtcgtcactcctcggggaggccctctggaccacccaatgcccactctctgtgacacctccccgttcgattttcttcagattatccttggctgatattctatttggccctgtgttcagggtctctctcccacttctaagagggtagtctatctcagccgctgcggggtcaccaacagagcctggacacaggaggcatctggcaaatacgcgctgcatgaatcaatgactccagtgcccacgcgcaaggggcccctgggctcagaaaaccccaccaggcgggcccctccgagctcggcctgtcctgggggtggaggaggaagttcgccccgcgcctgcctcgcaaccgcagccgcctccgtgcgcttcctgcccgcgccgccctccacactgcgctccgtgtctggcagcagcccccgcctcgctgggcgcgttcccgggggtctcggtggcgggagccgccttcttgtgggacttgggggcacgtggcgcggggcggggacgcggacagacccctcccgcatcctaggaggcctgggagggtccgcggggacgcggggagggggcaccgcctggccgaggaccctcccccggtcctccccgccccttccccgtcccttccacgctcgccgagggcaggacttcggttccgcgagaccggaggcccctcgtcctcctcggaagccgcccgcggccggggaccccagtcccgcagaggagggcggcgctgcccccgcctcccgcttggagagcgccgcccgcaggtgcccacggaggggccgcggcatcccagcgccctcccaggaaggagccgagcggatcaccgccggctgcagcggaggtcggggcgccggggaggggcgcggctagggggcgaggtcgaagggcgggcacctgcgggtggggcggggcctgaattagcgggagcgcccgggaggggcggggccggggcctgcgtgagcgggtcggggagggggcggagcctgcggggggcggggcctgcgtgaatggggcggggaggggccggagccttgtgagcggggcgggccgcgtgtgcggggtgggggcggagccttatgagcggggcggggcaggggcgtggtcggggcggggcgcgcgggcgcccgcggcggccctcacttcctctggcgagcgcagccgggcggaagtgcgtcagttgttatctgttcggggcgccgccgccgcctcacgagcccggtgcccaggagcccggccgcctcccgcctgccgcctgccgcgcccgcccggccccgcccgctcggcccgatcgccgcgccgcgcgcatggggcgcgcccccgggggggcggccgagggccgctgagcgccgggcccgcccccgccgatgcgcccagccgcccgcgccgggggtcccaggccgcgccgggcccggggctgagccgccccccgcgcccggcatgcccggcccggcccgccgcccgccgccgcccagggcccgagcccgcgcggcgcacactcagcccggcggcgccgcgtagccgagggagcccgcctgctgcgagccaggcgcggggcgtcaaggtcaccggcccgacggggcgcacgcgcggccatggaggccaaggtccgcccgagccggcgctcgcgcgcgcagcgggaccgtggccggcgccgggaggccgcccgcgacgcccgcgcccagagtccgtcgtcgggcgacgagcccgagcccagccccggcaaggagaacgcgggcctccgcggcgcgcccccccgaggcgccgcccccgcgccccgcaccgcgcgtcccccgcgccgccgccgccgcgagtccagctcgcaggaggaggaggtcatcgacggcttcgccatcgccagcttcagcaccctggaggccctggaggtaggtggacgggtgcggcttcgcaggcgttgaggcgagaacggggcccggagttgacgcgtcgggcgatcccgggacccctgggcttgcgaccgcccgcgccgtgggcagccctgagggaagccccggccacttggt

SEQ ID NO: 10918 - DNA, 2300 bp, Homo sapien
tctgctcagctgagttcatgtaagaggagcagtatttgctcagcaaatactgtccgtcagccagacaagcaatatttttggccaatctattaaccatgcagcaggcagcagtcaccaagaggggtcttgagattaaccctccttctccccttctcagcagagccctcgaagggaggagggaacgggatggcccgcggagtatccattttatcaccacctccctaagatccagcactgctccctagcacgtcctgaaccaggcagagcgatatgctggccacagaaacacaactgataaaaggccgacggtgctgtcagacagcccccaatttcgaagcgtagatttttttgcctctgcaacttaaaacgtccccaaacccacccgacgctgctgggtcttccagatgcgacggtctgggcgagcggtgggcacccagggtccctggaacgggtaccaagtggccggggcttccctcagggctgcccacggcgcgggcggtcgcaagcccaggggtcccgggatcgcccgacgcgtcaactccgggccccgttctcgcctcaacgcctgcgaagccgcacccgtccacctacctccagggcctccagggtgctgaagctggcgatggcgaagccgtcgatgacctcctcctcctgcgagctggactcgcggcggcggcggcgcgggggacgcgcggtgcggggcgcgggggcggcgcctcgggggggcgcgccgcggaggcccgcgttctccttgccggggctgggctcgggctcgtcgcccgacgacggactctgggcgcgggcgtcgcgggcggcctcccggcgccggccacggtcccgctgcgcgcgcgagcgccggctcgggcggaccttggcctccatggccgcgcgtgcgccccgtcgggccggtgaccttgacgccccgcgcctggctcgcagcaggcgggctccctcggctacgcggcgccgccgggctgagtgtgcgccgcgcgggctcgggccctgggcggcggcgggcggcgggccgggccgggcatgccgggcgcggggggcggctcagccccgggcccggcgcggcctgggacccccggcgcgggcggctgggcgcatcggcgggggcgggcccggcgctcagcggccctcggccgcccccccgggggcgcgccccatgcgcgcggcgcggcgatcgggccgagcgggcggggccgggcgggcgcggcaggcggcaggcgggaggcggccgggctcctgggcaccgggctcgtgaggcggcggcggcgccccgaacagataacaactgacgcacttccgcccggctgcgctcgccagaggaagtgagggccgccgcgggcgcccgcgcgccccgccccgaccacgcccctgccccgccccgctcataaggctccgcccccaccccgcacacgcggcccgccccgctcacaaggctccggcccctccccgccccattcacgcaggccccgccccccgcaggctccgccccctccccgacccgctcacgcaggccccggccccgcccctcccgggcgctcccgctaattcaggccccgccccacccgcaggtgcccgcccttcgacctcgccccctagccgcgcccctccccggcgccccgacctccgctgcagccggcggtgatccgctcggctccttcctgggagggcgctgggatgccgcggcccctccgtgggcacctgcgggcggcgctctccaagcgggaggcgggggcagcgccgccctcctctgcgggactggggtccccggccgcgggcggcttccgaggaggacgaggggcctccggtctcgcggaaccgaagtcctgccctcggcgagcgtggaagggacggggaaggggcggggaggaccgggggagggtcctcggccaggcggtgccccctccccgcgtccccgcggaccctcccaggcctcctaggatgcgggaggggtctgtccgcgtccccgccccgcgccacgtgcccccaagtcccacaagaaggcggctcccgccaccgagacccccgggaacgcgcccagcgaggcgggggctgctgccagacacggagcgcagtgtggagggcggcgcgggcaggaagcgcacggaggcggctgcggttgcgaggcaggcgcggggcgaacttcctcctccacccccaggacaggccgagctcggaggggcccgcctggtggggttttctgagcccaggggccccttgcgcgtgggcactggagtcattgattcatgcagcgcgtatttgccagatgcctcctgtgtccaggctctgtt

SEQ ID NO: 10919 - DNA, 2300 bp, Homo sapien
cgcggcctggggtctggggcaggcgccgtgtgggccgcagtgccgggctcagccgtgtctggggctccagcatcctgggctgcttccagccacgatgtccctgcccaacacacctctcctcgcccgtccgcagatggacactgttggggacgcgtcctggtggtcacaaagcccataggagtggcctcacccgggaccccgcgtggctccgcgtggccctcagcccctgcccacagcttccgcgcccgaaccgtgacgggcctaacatttcagatgagtaaccttgtcctgatctcaggaatgaaatgaggtcacgggcacccaggaaatagccactcaccccctccccacctcctttcatttaaaagcagtttttggggaagacaccctccacaaccaagggttgctctgagagaggcaggaaggaggggatttcgggagcctggggcctactgggggctccctctcccctccccgcctgccttaccgagatgaggcaaagccacctgtggccccggaggccaggtccacgtggagtcggcgatgccggcggggaaggctgacagccgcccccataactgcacgccccccatgtccagcaaccaagggtaacgccagcctccgagacccaaacgatgtctgtgcaggctgtgcctgcagagatgcggcccctgcccgggcctgggctggaggccgaggggtccatgggagagcacaggctgaaagagggttctagaatggggtcaggtggagtctgcacactggggcgtttatttctgagacgcccaagcagccccaggggagatgaccagctctgggcggtgtcggggaggctgagtccagtccagggctctgcacacggagggtcccggcagggcgagtttggcattcctgcacacggagggtcccggcagggagagtttggcattcctgcacacagagggtcccggcagggcgagtttggcattccgtgccgttggggccgtgttggggcttctagggctgtggtggccacaggtcctgaggaggacagcaggggagggagaggggctgcggaggacggcaggggagcggagaggggctgccagcctttctccagggcagaacttcgggtcacgcccactctggggagagcagagaggcctggcggggcggggacggagaaggcagctccgccaaacactgagtccccgtgatggtggctccttctggctgcggcaaggtctgagcgccggcgcacaaagcgggggcacggtgctggcagagtgggtgggacctgcctgtggccccgtttgcttctgttggggggcagctcccggaggctgctcggggagagcagcagggtgggccaggaaaactgcaggggcctctccttgttggcccgtcagcctgtccgtctgtgtgaccttggggcatgctctgaggggtgtgtcccaggctgactcaagacagctaagccagaggtggggacgaccctggtgcgttctgggagccggcagtgcatcctgggctgcagcggagcgagagagaggagcccagagccggcagcaggagtttccgtttccctccgagtgcatgggatgctgcaccgtaggactcccccgtccagacgtctccgtttccccatggcatccagcccctgatgctcagaaattagcttcctgagtttgggagagttgggagggcaggaggcctcaggtccctcctggtcttctctgcccggcgctgggttcagggggtcaggaacttacgctgggcggagggtgtgcgtggagcccatccagacgcacacagaggcgtaggcaggtgtgggaagtcagccagcaccccactggccgtccccagccctcctccctacccgctgggagcagaggcacccagatctctgtccctgggcactgctgtgcgaggccggcacccctgccagggagcaggcaggagggacagagccctgcaggctccagatggcagaattcccggctctgagacaggaacatgggggtgcttcgcatcagcagtgcccagagcccctcagcagccccgggcttgtgtggaacccgtctgtgaactggatatggaaggaaggtccccgagtgcccacatttacagggaccctcagagacctcactcagacctgggaggcccattgctcacatggcctggctgctcccggtgggcagaagatggagaagccacagacagcgtcctgcgtggggtctgtgggcgctgacccagcagccgtgcagggaacagccctgcccgcagaagcggatgccggggcaggtggcagtgcaccccga

SEQ ID NO: 10920 - DNA, 2300 bp, Homo sapien
ctgggaggcggaggttgcagtgagctgagatcacgccaccgcactccagcctgggcaacagagtgagactccatctcaaaaaaaaaaagaattgctcaaagtagagggctcaaaacacatggtcatagagcacaaatccagcagagagaactcacctatgactctagatgctttgagagatcagcaggcacacaggccctactgagcattcagtgctcctagggggtggctggaggtctacttcagatcccacttctgacaccaaactgttaaaacaaaaactttggacaaattaaatttaagagtttgtgtgtgtgtgtgtgtgtgtgtgtgtgtgtgtgtgtgtgtgtgacagagtctccctctgtcatgcaggctggagtgcagtggtgcaatctcagttcactgcaacctccacctcccagattccagtgattctcctgcctcagcctcccgagtagctgagattacagatgccacaacacctggctaacttttgtgtttttagtggagacgaggtttcgccatgttggccaggctggtctcgaacccctgatctcaagtgatccacccatgttggcctcccaaagtgctgggattacaggtatgagccactgtgcccagccaacagagtttaattgagcaaaacacaactcatgaattgggcagcactcagaaccaatgggggaggttcgagagctccactctgtaatgtgggcaggaagtttttatagatagaacacagaagtgagatacaaaaaaaaaaaaatcacaattagcttgattttgttactgcttgaaatgtttgccttatatggcatgatcagatcagttagcagcctgtgactggctgagacccagctatttgttccaaaatatactcataggttaagcttttagcttgtttctgtggtacattaggttgcagtttgttgttacctagaaactcaaggcacagaggcagcctgttaattgagttaatttaacagttcaaacaaatacttatgcaccagtgtttataacagcactattcacagagttagtttgaaagcaatctaaattccttctttggatagcctagacatttctcctggccataagaaggggtgatgccctgacacatgctacaatgtggatgaaccttgaaaacatgctcagtgaatgaagccagacagaaaaggcattaacccagaaacaaatattgcatttccttgatatgaaatatccagaacaggcaagtccattcactgagacagaaaagcgaccagtggttgccagggcatgggaggagtgtggaacgggtcgtgactgcttaatggatgggagttttattttggggtggggaaagtgtttggggacgaaacagaggcggtggtggttgcacaatgttgtgaatgtcactgaattgtttactttaaaatagttaattacatgctatgctgattttatcataataaactattttaaaattattttgtgaaaaactgtgatgcttgggatttgcttcaaaataatgtgggtggggtggaggttcgaaaagttaccaaaaaaaaaaaaaaagaaagaaagaaagaaagaaaactctggcttgcaaagaagaaaacggatcggccgtggatccctctccagctcgagggctggagctgcggcggaggcaggagctggaagcgaggcgtctgctggcaaaggcgggagtgcaggttgcgctcgaagccccggcagccgcggcaggaaccggcctggacggggtggggggcgccgcggaggccggcgggacttcccatgtctttctcctcgagctcggaaaaagttcccacccggggaatcccgaccctccaacttcgagaccgccggttccgcgctcggcccccacctggaccaagagctggggctgggctgccgcgcccccggctctgtccccgcgaggccccgctcccagccccacctgggacacccgggactcccgggacacctgcggggcggggcggggccggggcgaggcggggcgggctcgaggccgcaccccggaggcggagccgcgagctacccgcccgccgcgcgccccccgctctcggtgcgcagcggggccgaccctcagccctgcagcgccttcctggaggtgggggccgcccgcgccatggccgccgcccagcccaagtaccccgccggggcgaccgcccggcgcctggcccggggctgctggtccgccctctgggactacgagacgcccaaggtgatcgtggtgaggaaccggcgcctgggggtcctgtaccgcgccgtgcagctgctcatcctgctct

SEQ ID NO: 10921 - DNA, 2300 bp, Homo sapien
cgaggagtgacaaggatgacgatagcttaaaagagcttggcagtgggaagcactgtggttggttaccagcaggtgcaggtcacctaaggccgcagagcagaggcagaacaccctgtgggccatccccagcacgaggaggcacccagctctctttgtggcgccagctcccaggggcctggtgggcctccttagttttacgtttaccacatttccccaggaagcctgagggatgatgtggtctgaatgaactttcaaattcagtgttaagtaagtggagggtacagatagatacaaggggaaataaaggaaagttgagaacaaggtcgatttcactgaagcagcgtcttcaatgcttcctctgcagcatccattcaaaggagaccttccattctctgacaatttctttctctcgatgctgggaatttcttctctggatggatccatctaactatggcggaatcaaaggaaaagtttcatctcgtattcactgtggactggtaagcgagctgcagtgtggcacccgagccagctttgggggtcgcgttcattcctgcagcaagtgctgagtgctcagggccccggcgggcctggccgtgagcagcagacactgcacccgcatcctgccctcatgaacacggggagggaccatgcgcagacaagcacgtcagtgtggagtgtggcgtcagccctggtgatggcaaggcttgccgtgggcaacagggaggtggaggcccatgaggtggtgacagggaatccgagagctgatgaagtgcaccatagttgtgcgagcataaggcgcctccagcggatggacaccagggaggcaaagcacaagtcagtggagcagtggttgcagatgcaggcagagagctgacagagccaggcaacttgggcatggcagggcagggcctcggctttcgtggggatgggagcttctgtgtgggtgatgttggagctttcttggccccatgtggataacccaccattggagggcacaggcaggtaaagccggttagtgcctgtgtcagggagatgctgggcagcgaggttggtgagaagggcctgggtgggctttgaagtggagccaaggggccagcggatcggatgtgtgtaaatgcccaggtgcgggccaggctgtgggtgagtggaggtggctgtcgggagcagtctggggaaggggtcacgtctggctggggctcatggtgtttgcaaggttgagacgtgggtggtcagctggtgcaggagtggccagagagtggctgggtgggttgagaggaggcctgtgtcctccacaggggccctcatagtggactgagaggaagctgtgggtaccagagccaggggctcagatgtcagagggaaagccctttgtaaggacgcagacgcttctgggagctggcaggatgaagccaagactgcccaggacacctggatgggagcgattctggttggagttgggggataaaccctgattgaagggattcagaacaaagtgggagggtagaaactcaggcagtgtagaccgctctgaggaggggatcagcgtgtggtcagggcaggtggcagtgggtgtcggtgtctacacagacgtggatggtgccgtggcacgaacacaggctgcgcgggaggctgggtctgtgatggggtcgtgccgtcccaggagattcatggactcagaggagagaacagtcaccgggaagctctggctggttctttcgtccttggggggtgggagttcaacaattaaagtgaactctggaagagcagagtgaagctcacagtcccaggtcacgagcacttctgtgtgccaggcgcttcccacaaagcactttgtactgggagccaccctgggggattcacgcaggctccaggggatgccttgactgcgaggaaggcctctggtcaaacggggcagatggacccaggttggaggagccttcgctgtggcatcctacccctctaccaggccgcgatggtgcaaacacagccgcgttgtctcatgtgttacagcaagactcccagaaagcagggggagcagaggatgagcaggaaaatgaggacgatgaggaggaaagagatggggaggaggaggaagaggcggaggaatccaacgtggaggatttactggaaaacaactggaacattttgcagtttttgccacaggcagcctcctgccagaactacttcctcatgattgtttcaggtaagcccagagcccagggctgcgcagcccccactgaagggactcatggttagtagatgtggctcctgtgccatggtatcgcaagaagggagacagg

SEQ ID NO: 10922 - DNA, 2300 bp, Homo sapien
cgcatcatcctctgtacaaagaagcgccgtgtggaagatgccatcgcttacgtggagtacatcaccagcaggtgcggctggctggtcctggtgacgcagcactgtggctttgagagggatgctaaaatgaccccctgaggtgccagctctcctcctgggtgggctgggaggtcgttagaagtgcaggactcaccatggtgaatctgagcagcgtgaaaagggggttaccgccacctgtgcgcggtagcagatcggaggccactcagctgtgcagcttgagttgggcaagttcaggaagtggcctgcctttgctaagaaggttccacagtgatttttgtttgtttgctttttttccccatggatattcagggcacagattcaaggtgccctgaatatatgcaccccgtaagtgttgacgttgtaagccttttcatagacgtcagtgttggcgagtggagtggtgtggttcccgggtgctcaggtgtgcacagctctcagctgtcagagcctggtgtggttttgacttcctgccttccaggccatgttcctgaggttccctcctaggccttgctgtgcttctcacacactcagcactatttaaatctaaatagaagacaaagcaacagaaaaatctccaccagcaacttttgttcaactgatagtaggaagctccctcctaggtgcgctcaccctggggatgaatgcagccctttctgagcacagaggggagttgcttgtggaggcacagagagtctgcatgggtctgatctttgcatggttacaggggtagcatctgggggcgctgcagaaaaggctgacactaaattgataataggccttatcactgagaagtaggaaggtagagcttataagactttcattcctaatcaaaccatatgcactggattaatttgaaacacaaaagcactgttgtcctcctgcagacccactgtggccccttatgtctatccaagatgagccttgatggtcagtggtcacgctgtgtgcctgggaaagctggcttgggctagaattgtatttcggagcatggctgagataatgggaaggatgtgcctctccccacgttggccatgggcagctccaggggtgccctgtacctgaggaggccggggttgctcatgtcgagaaacaggctgctattcttccttagcgcgaagagcagagttagggagaacataaagttctcctgcaggagctgcgatgtgggctactcagctgcattttgaaactgtgatttaggatgttcctccttccttcctctctttctttgtttattcttccattttttggggttttgtttgttttttaggagatggggtcttgctctgtcacccaggctggagtgcagtggtgcagtcatggctcactgcggcctcaaactctgggctcaagctatctgcccacctcagcccactgagtagatgggactagaggtgcatgccagcatgcccagccaatttttgtattttttgtagagacagggttttgccacgttgcctggggtggtcttgaactcctgaactcaggcgatcctcctgcctcagcctcccaaagtgctaggattacaggcgtgagccaccgtgcctggcctgttctttttttttttttttttttttttttttccttaaatggatctaatgtgcagaggattgggtcagcgctagggaggcttaaccgaggagtgacaaggatgacgatagcttaaaagagcttggcagtgggaagcactgtggttggttaccagcaggtgcaggtcacctaaggccgcagagcagaggcagaacaccctgtgggccatccccagcacgaggaggcacccagctctctttgtggcgccagctcccaggggcctggtgggcctccttagttttacgtttaccacatttccccaggaagcctgagggatgatgtggtctgaatgaactttcaaattcagtgttaagtaagtggagggtacagatagatacaaggggaaataaaggaaagttgagaacaaggtcgatttcactgaagcagcgtcttcaatgcttcctctgcagcatccattcaaaggagaccttccattctctgacaatttctttctctcgatgctgggaatttcttctctggatggatccatctaactatggcggaatcaaaggaaaagtttcatctcgtattcactgtggactggtaagcgagctgcagtgtggcacccgagccagctttgggggtcgcgttcattcctgcagcaagtgctgagtgctcagggccccggcgggcctggccgtgagcagcag

SEQ ID NO: 10923 - DNA, 2300 bp, Homo sapien
gagccgtcggtctgctgcagagggcgtggttgagggtcaggagccatcagtctgcggagagcatggttgagggcagctactcgcattacccaccagcggtggttcatgctgggcaatgcttgctgtgtaccaggaggtgggccgagcacttcgcattctgcctctgtccccacatcagcccagggacggggagcggttattgtctgtttttcagataaggaaactgaggtcagaggggctgcctttgtggtcataccacaaatgaatggaagggtaggtgctcaaaaacaagtctttgtaattccagagcctgtactcagctgtagttttaatgactccatacaaaaggggagagggagcatgccagagctgggaaatgaggcagggagaggactggtggaaagaggcagggaggcagttgggagccgggagcagggtcttggcagagagacagtagcccaggcctgaaaggtagaaggagtccaacagcagatacccaaactgccgctctggagaatgtggggtttgccaaattattgaagagtttgtgatgaaagggagttttaggaatgggacttggacctctgtaggttctcttgtaacattctgttcttgaccccattgaagttcccgcttcttcagtagggtgatgtgcagttttggaatcctttagctgaattggggttccagtaccagagcagctggcatctctgccccatgggaagtgaagggggccagacagggcgtgtacagtgcactggccaatgcctagctgtctggcctgtgaccagggccccccggaacgggaaacttgtttacactggcacacgcccttgtggcttttgtgtgacctgtgtctaggtaccacctgcctgaccattgcttcggtgtaggggcccagccttgtgttccccctagtgtcgtagggaagacccagcccagggcagcccctgcctcttcagagggaaggcacaaaatcagtcaccaccacaatagggaacaagtgcaaagatgtgttccttacagctcctgggcagggagggtgccgtgagtagggaggccatcctccatccctgggtcctgcaaggcaggactgaagagtcagacagggagggtgcccagggcagctaggcgtgtgagggaatggggtgtaggcatgtgttagttcacgggcgagcgcctgaatggtccatttaaaggaagtggcgggaaggcagggcccagcctgctaggcgggagagaggcctctaagttcttgtttctgaccagctggggccatgtgggtatggtgatgttttgttttgttttgttttgttttgttttgttttgttttgtttttgttttttgagacagtctcactctgtcacccaggctggaatgcagtggcaccatcttgggtcactgcaacctccacctcccgggttcaagcgattctcctgccttagcctcccgagtagcaggattacaggcatgcactagcccagctaatttttgtatttttaatagagacggggtttcaccatgttggccaggttggtctcaaactcttgacctcaggtgatccacctgcctcggcctcccaaagtggtgggattacaggcgtgagcctctgcatccggcctagtgtggtgttctgatgtctaggcagtggctttgctgtgtccttcctgtcagggtccccggcccgtcacacacttgctgctttgtactgtgctgccctcccgtcctgctttagaacacacagagtttgggatgcggtgaagcctgaacaagtttaaggaatgaaatgggaagaaacagatgaggcatgagggtgaagggatgaaatttggaccgtgacttaaggtggggacagtgagaaggggaggcgacagtgacggatttggacccagccgtgtagggaaaacctgtgcccatttcagttggagcgtcccgcgtggcagcagcgtgggaggctgagggtacgagggtgtcgtgcaccttctctttcaggatcctgaagagcatggtcgtgggctgggtgaaggagatcacccagtaccacaacatctatgcagacaaccaggtgatgcacttctaccgctggcttcggtcgccatcctctctgcttcatgaccctgccctgcaccgcacactccacaacatgatgaagaagctcttcctgcagtgagtgctcctcctccctgggctgtccaccgcgtcctcagctgggctggtcccttactccccagaaccagagacatggccagccagtgcctctgggataagtagtgtatttctgagtttgtggagcataacaa

SEQ ID NO: 10924 - DNA, 2300 bp, Homo sapien
ttcccacaggtgaggtgaatgtcagcagtgtgtctgccaaaagtggcctttgggcagtgggccgggcagctgcaggggcacagccacatcccgggcagaagtcacgtgggcagccagagcccccaccatccagcccttgccggcctgtctgcccgattcttccaggttccgttactgttccgggccctggtgcacctgggctgtgtgtgtgtggtcaataaacagctggtgaggcacctttcaggctgggaagcagagacctttgctcttgagcacctggagatgcgctctctggcccagttcagctacctggaaccaggtatggcctgcaccagccgcccatcatgtgcctgcctcccacacatctggggtgacggtcttgtttccttctccagggagtatccgccatatctacctgtaccaccacgcacaggcccacaaagcgctcttcgggatcttcatcccctcacagcgcagggcatccgtctttgtgctggacactgtgagtcctgggccctccatggcagcacattggctggggcagggtttggggaaggaggacatctcccagggtgcccaggccctccaggtcttgtcctcaagggcctttgcccatgagtgcttgtcgtgattgaattggcagtgccgtggcagtggtggagtctgccccagggctgcccccacttcctcctgcgcagggggaggctgacgtggcctgcgttggtctaggtgcgcagcaaccagatgcccagccttggcgccctgtactcagcagagcacggcctcctcctggagaaggtgggccctgagctcctgccaccccccaaacacaccttcgaagttcgggcagaaactgacctgaagaccatctgcagagccatccagcgattcctgctcgcctacaaggtgagagtggttggggtcttgctgtgtgagccccatcttctttgaggctgggtccacccaggtcttttcttccattttgccttgacccaggaggagcgccgggggcccacactcatcgctgttcagtccagctgggagctgaagaggctggccagtgaaattcctgtcttggaggaattcccactggtgcctatctgtgtggctgacaagatcaactatggggtcctggactggcagcgccatggagcccggcgcatgatccgtcactacctcaacctggacacctgcctgtcgcaggccttcgagatgagcaggtgagcacagtactgtcgttgtgggccagtggtccccaggcagagccggcctcggtggtctctgtgacccggcgatgtgccccggtgctgacctgtgccctggtgcaggtactttcacattcccattgggaacctaccagaggacatctccacattcggctccgacctcttctttgcccgccacctccagcgccacaaccacctgctctggctgtcccctacagcccgccctgacctgggtggaaaggaggctgatgacaactgtcttgtcatggagttcgatgaccaagccactgttgagatcaacagttcaggctgttactccacaggtaagtgggcgggaggacgaggcccatgagacctggctggtgtttctgccattctgtgacatcttctcaaggcaatagtgccgaggatgggctcagagttcgaccgcgcaggtcagagctgaggctgcaggagacggtcctggggtcaaggtccaggtggggcctcctgtgccctcgggaatctgaatagcctggcaggtgtgaggatgggtgtgggcaggtctgttgctggttctggaggtggtggtggctggagtcaggcccagggggctggtggtgctggagctggcaggatgctggctgagcatggcgtcttcctgtgcagtgtgtgtggagctggaccttcagaacctggccgtcaacaccattctccagtctcaccatgtcaacgacatggagggggccgacagcatggggatcagcttcgacgtgatccagcaggcctccctggaggacatgatcacgggtggtcaggctgccagtgccccggccagctacgatgagacagccctgtgctctaacaccttcaggtgccaccctctctgggaaggagtgttactaatagaagggtcttatcctttgcccttaatttggaaagctaaggtctaagacagggtccattgggcttcccttagtcttaatggcagagccagagaccactgtgtggcgagttttccatagtctattgtctttaccactgtgggggtccggcctggtccctggcgactgttcagtgtgctgcctctgacct

SEQ ID NO: 10925 - DNA, 2300 bp, Homo sapien
caggattcccccagccccccacacacgaagctagggtgccccctctccagctctcctctccaggattcccccagccctccacacagggagctagggtacccctctccagctcgcctctccagaattcccccagccctccacacagggagctagggtgccccctcttcagctctcccagaccccccaggaccccacacaggaagctagggtgcaccctctccagctctcccagaccccccaggaccccacacaggaagctagggtgccccctctccagctctcccagacccccccaggaccccacacagggagctagggtgcccctctccagctctcccagacccccccaggaccccacacaggaagctagggtgccccctctccagctttcccaggcccccccaggaccccattcacgaagctagggtgcccctctccagctctcccagacccccccaggaccccacacaggaagctagggtgcccctctccagctctcccagacccccccaggaccccacacagggagctagggtgccccctctccagctctcccagacccccccaggaccccacacagggagctagggtgcccctctccagctctcccagacccccccaggaccccacacagggagctagggtgccccctctccagctctcccagacccctccaggaccccattcacgaagctagggtgcccctctccagctctcccagagccccccaggaccccacacacacactctggctcccccaggggctctctttccgtttctctgactaggaaaatgtgatttctctcagtttttgccatctacaccctcaggttaaacccatgagagaatggaggaagatgaactgggaacctccccagatcagtgttgactgctgtattctgacagctcttgtctattctcagaggctgcaggttgcttttcaaaattgcgtccagaggccaggcatagtggctcacacctgcagttccagcgatttgggaggatcacttgagtccaggagtttgagaccagcctgggcctcatagtgagacctcctttctacaaaaaaaaaaaaaaaaaaaaaaagccatccgtggtggtgtgttccttgtcccagctactcaggaggctgaggctggaggaccacttgagcccaggagttggaggctgcagtgagctgtgatcacactgctgcactccagcctgggcaacagactaagaccctgtctgtaaaaaataaataaataacataaaaattacatccagagtttttagttgtaatcattgagagaggtggactgtggcgtggtgggtgtaccccgtcgctaggggcaccagaagtctaggactccgaatagcgtgtgctttgtgtgtgtaccacagacattaccacttacgcccagtgacgagatcatcgtcgtattctcgccaggtaaatcgggtccttcctcgctccaacatggtctacaatctctatgagtattcagtgccagaggacatgtaccaggaacacatcaacgagatcaacgctgagctgtcagcgccagacatcgagggcgtatatgagactcaggtgactccccagccaccctcgactgaactgggggaggctccagcagggtggtatggaggaaagaaacccgcccagggtgtgggctggggaacagcagcgacagtggactcgttcccacaggtgaggtgaatgtcagcagtgtgtctgccaaaagtggcctttgggcagtgggccgggcagctgcaggggcacagccacatcccgggcagaagtcacgtgggcagccagagcccccaccatccagcccttgccggcctgtctgcccgattcttccaggttccgttactgttccgggccctggtgcacctgggctgtgtgtgtgtggtcaataaacagctggtgaggcacctttcaggctgggaagcagagacctttgctcttgagcacctggagatgcgctctctggcccagttcagctacctggaaccaggtatggcctgcaccagccgcccatcatgtgcctgcctcccacacatctggggtgacggtcttgtttccttctccagggagtatccgccatatctacctgtaccaccacgcacaggcccacaaagcgctcttcgggatcttcatcccctcacagcgcagggcatccgtctttgtgctggacactgtgagtcctgggccctccatggcagcacattggctggggcagggtttggggaaggaggacatctcccagggtgcccaggccctccaggtcttgtcctcaagggcctttgcccat

SEQ ID NO: 10926 - DNA, 2300 bp, Homo sapien
ctgttttaaggatgagatgaggtaacccacataaagcatgtaaggtaaaagccatcacttgtacttatcccagcagcagccttccccctgcctggaggccatcactgagcttggggcagggcagtggagtggagcacgtgagtgcagtcctgtgtcctgaagcagggcagtcagtaaccgtctctaagctccaagttccaacacaccatgtagaccctaagggtacctgcctctctagggcttgcctgatatggacagacagcgatgagcacaacagcagttagggatccttaccacttggtttctcctctgggaagaattttgttcagctaagtgtctgtaaaaagcttcacgttctcacacgttttttctatttttttttttttgagacagagtttcattctttgttgcccagcctggagtgcaatggcgcgatctcggttcaccgcaacctccgcctgccgcgttcaagtgattctcctgcctcagcctcctgcgtagctgggattacaggcatgcgccaccacgccccgctaattttgtatttttttagtggagacgggatttctccatgttggtcaggctggtctcgaactcctgacctcaggtgatcctcctgcctcggcctcccaaagtgctgggattacaggtgtgagccaccgcgccgggcctcatccgttttctgcttatggcaggccagtcctccggtcatgtttaccgtttgctctggccaccaagcagccgcgtcttatccttgctctattttttttgagactgggtctggctccgtcgcccaggctggagtgcggtggcgcgatcccggctcacagcagccttgacctgccgggctcaggtgaacctccggctcggattcgggagtattaatagctgggacctcgggcgcgcaccaccagcctgtctaatttttcttgtttttacaagagaagggccgggcgcggagtctcacgtctgtaatcccagcactttggaaggccgaggcgggcggatcacctgaggtcaggagttcgagaccagcctggccaacatggtgaaacccggtctctactaaaaatacaaaaactagccgggcctggtggcgggcgcctgtaattccagctactcgggaggctgaggcagcgggatcgcttgaacccgggaagcagaggttgcagtgagccgagatcgcgccactgcactccagcctgggcgacagagcgggactccctgcccaaaaaaataaaacagaggagacgaggtctctctctgtagcccaggctgatctagaacaggatcctgggctccagcgatccgcccgcctcggcctcccccagcgctaggcccccaggcagggtccccggccccgcccctccccgcaccctccccagccgcgcgtccaccccgcagggcctggcccgggtcccgccgctctcatcgcccccgccgcgcggcaggtcccaaacgcagctgcgcggaaggcgaggcccgaaaaacctcagaaagagccgagcagggaaaggccgcgcggcccgcctcgtttccccgcaaagaagccgcgcccgtagcgcctccgcccgccccgagcccctccgtcggcggtcggggcgcgccgccctaccccagtcaggcgcggcgagtgcgggcggctgcgggaaccgggcctccctcccgcctcggcggcgccagccgaggacggccccatggcaccctccggagggccggcccgagagcctcaggagggcgcccctcacctgctggcctcgccatccgcgcctgggtccgcgcgccgccgcccgccgctcctcagagacatggagccgttggctaccacctctgcttcaggggagaaatttggcgcgctcccacccagactcgcgagagccggaaatgccgccgtccatcaagaggcgcgctccgcccctcccccgccccccgaggcgctccaattggcgccggcgcccggcgggggaggtggccggcagggaccggggaaaagtgtgtggtaggcgcgcgcggcgcaccgtggggttgggaccgggcggcgctgcgggccgcggtggggccggaaatgtcaggcggtccccactccgctctcggcgcctcgggctccgcgcccggccagcctgaggtggggtcggtgcccccggcggcacggcgctggggaggcgatggcgccggccgcgtccaggctgcgggccgaagccgggctcggggcgctgccgcggcgggcgctcgcccagtacctgctcttcctgcggctctacccggtgctcaccaaggcggccaccaggtgagcgggggcg

SEQ ID NO: 10927 - DNA, 2300 bp, Homo sapien
atcagatccctggcgattcccttcacatctcctgcctcttgctcagggttcactttctccacacacagatcttccctccctcgggactgagtccaagctgcacctctctccgcctttctttaacgccggccttcccttcaaaacctaacagagacctttgccctgctgttccctgtgccaggagagcctctgctccacttctttacacagcctgttcaatgtcaccttctcaaaacaccttccctggccgtgtctccacccgcgccgtgcggacccgcgccccgcagactcgctcccttggccctgtctccacacgctccatgtggacccgctcccctggccctgtcttcacccgcaccacgcagacccgctcccttggccctgtctttacccgtgccccgcagacccgctcccctcgccctgtcttcacccgcgccccgcagacccgctcccttggccctgtcttcacccgcgccccgcagacccgctcccttggccctgtctccacccgcgccatgaggacccgctcccctggccctgtctttacccgcgcccccaagacccgctcccctggcgctgtcttcacccgcgccccgcagactcgctcccttggccctgtctccacacgctccatgaggacccgctcccctggccctgtcttcacccgtgccccgcagacccgctcccctggccctgtcttcacccgcgcccccaagacccgctcccctcgccctgtcttcacccgtgccccgcagacccgctcccctggccctgtcttcacccgcgcccccaagacccgctcccctcgccctgtcttcacccgtgccccgcagacccgctcccctggccctgtcttcacccgcgcccccaagacccgctcccctcgccctgtcttcacccgtgccccgcagacccgctcccctggccctgtcttcacccgcaccacgcagacccgctcccttggccctgtctttacccgtgccccgcagacccgctcccctcgccctgtcttcacccgcgccccgcagacccgctcccttggccctgtcttcacccgcgccccgcagacccgctcccttggccctgtctccacccgcgccatgaggacccgctcccctggccctgtctttacccgcgcccccaagacccgctcccctggcgctgtcttcacccgcgccccgcagactcgctcccttggccctgtctccacacgctccatgaggacccgctcccctggccctgtcttcacccgtgccccgcagacccgctcccctggccctgtcttcacccgcgccccgcagacccgctcccctcgccctgtcttcacccgcgcccccaagacccgctcccctcgccctgtcttcacccgcgccccgcagacccgctcccctcgccctgtcttcacccgcgccccgcagacccgctcccctcgccctgtcttcacccgcgcctgcggacccgctccccttgccgtggcttccccgggcgcgcggggcccctgttgggtccttgggtggaacctcagcgccgacccccgggtctgggcgggccctccacgcgctgggagggcgggatccgcaaggcgcctcacaatcgctgactgcggacgcgggtgtcgccgcgggaagttcagcgccgggtcggagggcgcccgctccgggggttctgacccgggcgcgcccccagcctggtcccggcccggcgctcccgtccaggccccgcgccgctgcggccgacctggggccggggcggcgtccgattcccgcgcccccgctcacctggtggccgccttggtgagcaccgggtagagccgcaggaagagcaggtactgggcgagcgcccgccgcggcagcgccccgagcccggcttcggcccgcagcctggacgcggccggcgccatcgcctccccagcgccgtgccgccgggggcaccgaccccacctcaggctggccgggcgcggagcccgaggcgccgagagcggagtggggaccgcctgacatttccggccccaccgcggcccgcagcgccgcccggtcccaaccccacggtgcgccgcgcgcgcctaccacacacttttccccggtccctgccggccacctcccccgccgggcgccggcgccaattggagcgcctcggggggcgggggaggggcggagcgcgcctcttgatggacggcggcatttccggctctcgcgagtctgggtgggagcgcgccaaatttctcccctgaagcagaggtggtagccaacggctccatgtctctgaggagcggcgggcggcggcgcgcggacccaggcgcg

SEQ ID NO: 10928 - DNA, 2300 bp, Homo sapien
ccgctgtcttcaccgccacatccttcacggcatccaggagctggaaacagtctagccactgacggacagacggacaggcaaaatgcagtccacgcacacggcaatgttcagccttttaagtttttaatttttattttattatttcttagtagagagggggtttcatcatgttggccaggctggtttcaaactcctgacctcaagtaatccgcctgcctcggcctcaaaaagtgctaggattacaggcgtgagccgctgcacccagccctatttttattttttattttatttatttatttttttgagacagagtctcactctgttgcccaggctggggtgcagtggcacgatcttggctcactgcaacctctgccttcccagttcaagtgattttcctgcctcagcctcccaagtagctgggattacaggcatgcatcaccacacccagctaatttttttttttttttttaagacggagtctttctctgtcgccaggctggaatgcagtggagcgatcttggctcactgcaacctctgcctcccaggttcaagcggttctcctgcctcagcctcccgagtagctgtgattacaggcacgtgccaccacgccctgctaatttttttttttttttttttgagacggagtctcactctgttgcccagcctggagtgcagtggcacgatctcggctcactgcaagctctgcctcccaggttcacgccattctaccgcctcagcctcccaagtagctgggactacaggcgcccgccaccacgcccggctaattttttgtattttttttagtagagacagggtttcaccatgttagccaggatggtctcgatctcctgacctcgtgatccgcccgcctcggcctcccaaagtgctgggattacaggcatgagccaccgcgccttgcccatgccctgctaatttttatatttttagtagagacaaggtttcaccaggttggccaggatggcctcgatttcttgacctcgtgatccaccagccttggcctcccaaagtgctgggattacaggcatgagccgctctgcccagccgctaattttttatatttttggtagagatagggtttcactatgttggccaggctggtcttgaactcctgacctcaagtgatccatctgcctcaagtgatcccagcctcccaaagtgctgggattacaagcgtgagccaccgagcctagcctatttttattttctttaaagaatcttaaggacaatcaaaagtcagcctttattaaaaggaaagagggccgggaatgttggctcaagcctgtaatcccagcacctccggaggccaaggcaggcaaatcatgaggtcaggtgttcgagaccagcctagccaacatggcgaaaccctttctctactaaagatacaaaaaattagccgggcatggtggtgcacacctgtaatcccagctactcgggaggctgaggcaggagaaatctcttgaacccaggaggcagaggttgcagtgagctgagatcacgccattgcactccagcctgggcaacggggcaagactctgtctcaaaaaaaaaaaaaaaaaaaaaaaagagcccagtgcagttgctcccacctgtaatcccaggagttcaaagaccagcctgggcaacacaggaagaccccatctctacaaaaaaaagaaaacaattagccaggtatggctgggtgggaacttataatcctagctacttgggagactgtggcaggaagatatcccaggagtgtatgtgtgtgtgtgtgtgtgtgtgtatatatagacacatatatacatatatatgtgtgtgtgtgtgtgtgtgtgtgtgtgtatatatatgtatttctttttttttcttgtagaaatgaggtctcgctgtgttgcccaggctggtctcaaattcctggcctcaagcaatcttcctgcctcggcctcccaaagtactgggatgacaggcatgagccaccacgaccagatgcatggtaaattttgtgttttatgtatcgtaccacacacacgaaaatttaaaaaacatctggctatgcatgtctttcaaagcaacagcaattgttctgagagattaaagtcaccattgaagaacctgcattatcgtttattgtgatcctaattcggtccacagtaacaattgaaactgcctcgactaaattttaagtttctggggcagcaccacctgaaggcagcgactgcctttttaaaagacagggttctgacattcagagatttctgtttctctatccatcatttttgggcatcttgaatcacctgatttag

SEQ ID NO: 10929 - DNA, 2300 bp, Homo sapien
ccagcgattctcctgcctcagcctcctgggtagctgggattacaggtatgtaccagctaatttttgtatttttagtagagatggggtttcaccatgttggccaggctggtctcaaactcctgatctcaggtgatctgcccgcctcggcctcccaaagtgctgggattacaggcatgagccactgagcctggctgattttcttttttttgagacagagtctctgtcacccaggctggagtgcagtggcaccatcctggctcactgcaacctctgcctcccaggttcaagcgattatccggccttaggctctcgagtagcagggactacaggcgcgcaccaccacgccaggcttttttgtatttcagtaaagacggggtttcaccatgttggtcaggctggtcttgatctcctaacctcgtgatccgcccacctcagcctcccaaagtgctgggattacaggcgtgaggcactgcgcccggcccaattttcctttatttttttgagacagagtctcgctctgtcgcccagtctggagtgcagtggcgcgatctcggctcactgcaagctccgcctcccgggttcacggcattctcctgcctcagcctccctagtagctgggactacaagcacccgccaccatgccctattttttttttttttttttgtattattagtagagacgggttttcaccgtgttagccaggatggtctcgagctcctgacctcgtgatccgctcacctaggcctcccaaagtgctgggattacaggcgtgagccaccacgcccggccttccttttatttttattttttaaatcttcctatcatttttagtaaatgacctggaagcagcagacccaactggaagcgtacaggttcaagaaagcctgtttaagcagaagtctcagtatttctgtggaaccattcagtttttttatttttatttttttgagacattgtttcactctgttgcccaggctggagtgcagtgaggcaatctcagctcactgcaacctccgcttcctgggttcaagcaactctcctgcctcagcctcctgagtagctggtattacaggctggagccaccgtgcccggctaatttttgtatttttagtagagaccgggtttcaccatgttggccaggctggtctcaaacttctgacctcaggtgatccgcctgtctcggcttcccaaagtgttgtgattacacgcgtgagccaccgagcccaggcccaagtgatttttaaatagcttaaatcagatcatgtcatttcccaattttaaaatgggcagagatggtccagcaatcccacttctgggtacagacgcaaaacaatcaatgaaagagagatctgcacgcagcactgttcacgctagcgaggagatggcaacagggcaagcgtccagcaatgggtaagcggtggggtcggtgcacgcaggcgtccagcaatgggtaagcggtggggtcggtccacccagggagcgctggtccccctggaaggaaacccaggctctaacgcggtccctctgaggaccctgctaggcgaaacgcgccggccatagaaagactgtcccgcaggagagggcggtgttcggcccggggtttgaggggtcgggaccaggaggagggacagcccggccgaacctgaacgcacttcaggccgcttgaacagcacacgcaggaactgcgccgacggaaaactttacttcgtgttccgccaccaaaaaaatatcgtttaaacaaacctgcggcagcttcccagctcccttaaaccaggatcccaagttctccgcgtctccgcccctgcacccagcctccggcctcggcaggcgcttccggtgcggaaccttctggaaagtaccgcgccgccctcccggcgtccccacaaccccgcccgcacctgcgcgcaccggcgctcgcgagcacaagtgacgggactggagcgtggcgcggcaggtggctccacgaaaacgccccttcgcgcaaggctgccccgcgtcctgccgcgccccaggaggcgggacttccgcccccgccgcccggaagcggcagccgggggaagcgtgttcctcgcggagcgccgtcggggccgtgggcgcctgcgcgggccggcgcgggagcaagcggcatggcgttccggcaggcgctgcagctggcggcctgcgggctggccgggggctcggccgccgtgctcttctcggccgtggcggtagggaagccgcgcgcaggcggggacgcggagccacgcccggctgagccgccggcctgggcggggggcgcgcggccgggccccggtgtctg

SEQ ID NO: 10930 - DNA, 2300 bp, Homo sapien
ctggagtgcagtggcaccatcctggctcactgcaacctctgcctcccaggttcaagcgattatccggccttaggctctcgagtagcagggactacaggcgcgcaccaccacgccaggcttttttgtatttcagtaaagacggggtttcaccatgttggtcaggctggtcttgatctcctaacctcgtgatccgcccacctcagcctcccaaagtgctgggattacaggcgtgaggcactgcgcccggcccaattttcctttatttttttgagacagagtctcgctctgtcgcccagtctggagtgcagtggcgcgatctcggctcactgcaagctccgcctcccgggttcacggcattctcctgcctcagcctccctagtagctgggactacaagcacccgccaccatgccctattttttttttttttttttgtattattagtagagacgggttttcaccgtgttagccaggatggtctcgagctcctgacctcgtgatccgctcacctaggcctcccaaagtgctgggattacaggcgtgagccaccacgcccggccttccttttatttttattttttaaatcttcctatcatttttagtaaatgacctggaagcagcagacccaactggaagcgtacaggttcaagaaagcctgtttaagcagaagtctcagtatttctgtggaaccattcagtttttttatttttatttttttgagacattgtttcactctgttgcccaggctggagtgcagtgaggcaatctcagctcactgcaacctccgcttcctgggttcaagcaactctcctgcctcagcctcctgagtagctggtattacaggctggagccaccgtgcccggctaatttttgtatttttagtagagaccgggtttcaccatgttggccaggctggtctcaaacttctgacctcaggtgatccgcctgtctcggcttcccaaagtgttgtgattacacgcgtgagccaccgagcccaggcccaagtgatttttaaatagcttaaatcagatcatgtcatttcccaattttaaaatgggcagagatggtccagcaatcccacttctgggtacagacgcaaaacaatcaatgaaagagagatctgcacgcagcactgttcacgctagcgaggagatggcaacagggcaagcgtccagcaatgggtaagcggtggggtcggtgcacgcaggcgtccagcaatgggtaagcggtggggtcggtccacccagggagcgctggtccccctggaaggaaacccaggctctaacgcggtccctctgaggaccctgctaggcgaaacgcgccggccatagaaagactgtcccgcaggagagggcggtgttcggcccggggtttgaggggtcgggaccaggaggagggacagcccggccgaacctgaacgcacttcaggccgcttgaacagcacacgcaggaactgcgccgacggaaaactttacttcgtgttccgccaccaaaaaaatatcgtttaaacaaacctgcggcagcttcccagctcccttaaaccaggatcccaagttctccgcgtctccgcccctgcacccagcctccggcctcggcaggcgcttccggtgcggaaccttctggaaagtaccgcgccgccctcccggcgtccccacaaccccgcccgcacctgcgcgcaccggcgctcgcgagcacaagtgacgggactggagcgtggcgcggcaggtggctccacgaaaacgccccttcgcgcaaggctgccccgcgtcctgccgcgccccaggaggcgggacttccgcccccgccgcccggaagcggcagccgggggaagcgtgttcctcgcggagcgccgtcggggccgtgggcgcctgcgcgggccggcgcgggagcaagcggcatggcgttccggcaggcgctgcagctggcggcctgcgggctggccgggggctcggccgccgtgctcttctcggccgtggcggtagggaagccgcgcgcaggcggggacgcggagccacgcccggctgagccgccggcctgggcggggggcgcgcggccgggccccggtgtctgggaccccaactgggacaggtgcgcgcggggctgtttggggccggggtcgggatgggggtcagggcaggtgttaccgttgggatcgagatcgggaccaggtttaaggttgcgatcgggtcgggatctggggtcgccgtctgctttccccagcggaggagccgctttccggggccgctctgcgcggagggttccgggggcggctgacccttcccgccggcttctgtggccgagc

SEQ ID NO: 10931 - DNA, 2300 bp, Homo sapien
acagatttactctgccgttaaagaacttgaagtaggctgggtgcggtggctcacacctgtaatcccagcattttgagaggctgaggtgggcggatcacttgaggtcaggagttcgagaccagcctgaccaacacggtgacactctgtatttactaaaaatacaaaaaaattagccaggcatggtggcatgcacctgtagtcctagctacttgggaggctgaggcaggacaatcacttgagcccaggaggtggaggctgcagtgagcccagatcgtgccactgcactccagcctgggtgatagagtgaaactctgtctcaaaaaagaaaaaaaagaacttgaagtagaaccgggagctgagcccagcctttctcttttaagcaggtgttctgtatttgcttgtcatgtctggggagaagtgaattgggccttgtgggttgggaaagacttatacagacagaaggcatgagcaactacaggaaggtgctagaagacagcatgtttcttcttgagtctcacctgtccacacttgaaagttccagagcctcatctggtgaaatctccagcttcttcctggaggtctcatgcagtttacggcttcctgtctctgtgcctatagctcccaaatattttctctggctcagcctgactcccccatacctgccaatttgagtcttggcctggtttatgacaggcccccaggtcggcgtggcccaaacggagcccttgagtcaccaccgtgcccttccacagcttccttttccgccactgtctcagcgagtaaataccagcaggttcgacttttgctattcccagctctgccgcgttgaactttttttgttgctgttgagacagggtctcgctctgttgcccaggctggagtgcagtgcagtgcagtggcaagatcatggctccctcctaggctcaagcaattctcccacctcagcctcctgagtagccgggactacagctgtggaccaccttgcccggctaattttttaatgtttttgtagagacggggtccccctgtgttgcccaggctagtcttggactcctgggctccagtgatctgcccacctcggcctcccaaagtgctgggatccactctttttcagattccagcagctctggaacagaccttcataatgggaatgttttcttcctcactgagtgtttgtttatttatttattttctgaggcggagtctcactctgtcgcccagactggagtgcagtggcacgatctcggctctctgcaacctccgcctcccaggttcaagcgattctcctgcctcagcctcccaagtagctgggatcacaggcgtgtgccaccaagcccggctaatttttgtattttgagtagaggtgcaatttcaccatgttggccaggctagtgtcgaactcttgacctcagttgatctggccacctcagcctcccaaatgctgggattacacgtgtgagccactgcacccggcctgagggtctaaaatgtgcttagtatgactgaggacatgatgttttaattttatttaattttgcttaaattttgaattgaaacatcctcatagctagtggctgctgttgggcattgcagttctaggctctgctgaagcatcatggtcagggaggcccatcttggccccgtggacactttccgcctgcgccccgatagccgctgtcctctttcctagcctggcgttctccgtaaccacagttgcgtttggggtagtctgtctcctgctgttcactgtctgcctctcattagagaagaagatgcacagggctttgcttgtctgttttgctctccagcgcatcactcagaacagacctggcactagctttgtgggagggagagtggcggtatgctcagagaggcctccccagggctgtgccaagggccttgtcttctctccatgctcttcccaaatagtctgacaatttggaaataacatcttgtcagaaaaactcaaacttgggaacagaggtctcaaggacatatcttgtatttcaacatcaggcgagaaccactgtctctgatcaacgtgcggaagaggaacgtggaatctggggaagaagagctggcgtccaagctggaccactacaaagccaaggccacgcggcacatcttcctcatcaggcattcccagtaccacgtggatggctccctggagaaggaccgcactctgaccccgctgggtatgtggtgggttcagatcctctgtggaccctcgtggttatgtggccaggtgcatatctgctggcgccttggttatgtgactgggtgcaggtcctccgccgacc

SEQ ID NO: 10932 - DNA, 2300 bp, Homo sapien
acaccaggacgcagagagcttcacacggtgcgtatcagacaccaggacgcagagagcttcacacggtgcgtatcagacaccaggatgcagagcgcttcacacggtgcgtatcagacaccaggatgcagagcacttcacacggtgcgtatcagacaccaggacgcagagcgcttcacacggtgcgtatcagacaccaggatgcagagcgcttcacacggtgtatatcagacaccaggacgcagagcgcttcacatggtgtatatcagacaccaggacgcaaacgcaaagcgcttcacacggtgcacatcagacaccagcatgcagagagcttcacacggtgcatatcagacaccaggacgcagagcgcttcacacggtgcatatgagacaccaggacgcagagcgcttcacacggtgtatatcagacaccaggacgcacacgcaaagcacttcacacggtgcatatcagacaccacgatgcaaagtgcttccaaagcacagatgcactgaatggaaagagcatgatggaagaggttaatctacaaaatctaaaagtgattcataaaaacatcaacgatggccgggcacgggagctcaggcctgcaatcccagcggccgggcgtggcggctcacactataatcccagcacttagggaggccaacgtgggtggattgctgaaacccaggagttcgaaggcagcttgagcaacatagtgagactctgtctctatttatttttttaaaaaaacagaaatttgctaataactagagattcgaatctgctaaaatacaaattaaagcagatatacagtttaaactgtgtgtgtgtgtgtgtgagtgtgtgtctgtgtgagtttgtgtgtgtaaggtcataatagaaccattagcccgcaagacacttcatttataaaacaaactccctggaatgatagaaaatgaaaatgattgacatacattaaactaagaagcagtgaatcttcaacagtcacgacctgtgactctgaaccacagaactagagcgacgtcagtgccgtcgttatacaggaatcattgaagtctgaccttgctgtgttgtagctgatggtggcacagaactcacttctgtaaagcggcctcatttacagtgttgtcttgtgactatgtacattttaattagtaaatattaaataaagttgaggcatttcctaagtagcaggagccacagctcaagtgttctggatcctcctgtggccgcggccaccatcgtgaacaccaaacgggacatttctgttgcctgtcgcacagtgctgcgcccgggagctcttctgtgttatcttcacacctaaagcgcagcagggttacttcatggagttgttctggacgatcttcgggatcctctggggcactgtgacactcggagcccctggggtcgcagcagatcggagctggagggtggctgggggtgcagggcagtcatctcgcccatcacctgggctgcccttggcgttttcatgtccctgcctttgaaagaaaagtcagcctggcagctttatttccctcctcgtctgaaatagggtctcactctgtggcacaggatggaaagcaatggtgcagtcacagcccactgcagcctccccctcctgggctcaagcgatcctcccacttgagcctcccaaatagctgagactacaggtgcgtgccaccatgtcagctaatttttctatagagaacggggtttcgctatgttgcccaggcagtcttgaactcctggggtccagcgacccccctgccatggcctcccagagtgctgggattgcaggcgtgagcttctgtgcctggccccagcagcctgattgtgtctggagggtcctgtttgcccttttccagggagtcgtgtgggtggttttccatcctgaaatctgatgaggaggttttggatgcaagagttgctgttgctggggtcacggcagttggtcgcggatggagtggggaggttttgggtataagagttgctgttgctggggtcacggcagttggtcatggatggggcggagcagctccgtggcttcctgtcgttcccatcactgaagtgctccttgttgtcctcacaggcagcaattccatttccgtgagggcgtttctagatgaagatgacatgagcttggaagaaataaaaaatcggcaaaatgcagctcgaaataacagcccgcccacagtcggtgcttttggacatacgaggtgcagcgccttccccttggagcaggaggcagacctcatagaagccgccgagccgggaggtccacacagcagcagaaatgggct

SEQ ID NO: 10933 - DNA, 2300 bp, Homo sapien
caatcttggctcactgcaacctccacctcctgggttcaagcgattcttctgcctcagcctcctgagtagctgggactacaggcgcccgccaccacgcctggctaattttcgtattttttttttttttagtggagatgcggtttcaccgtattgaccaggctggtctcgaactcctgacctcgtgatccactagagtgctgggaaggttaatgttaaatgggttgtgtgtcggggagggtacatgaaaaataatggcatcgctttgagcagtattgctgtttctgcttgtgtttgcattatccaaaatctaatatagtttcattctgtgccgttttctcaaaactcataatagctgaactccattggctgagcctgatattttagatttggtatattttcaggaaaaagacgagtgcacatcagaatactggtgtatatcagacaccagggcacgaagcgccttgcacggtgcgtatcagacaccaggacgcagagcgcttcacacagtgcatatcagacaccaggacgcagagcgcttcacacagtgtatttcagacaccaggacgcagagagcttcacacggtgcatttcagacaccaggatgcagagtgcttcacacggtgcatttcagacaccaggatgcagagcgcttcacacggtgcatatcaggcaccagcacgcagagagcttcacacggtgcatatcagacaccaggacgcgcagtgcttcacacggggtatatcagacaccagcacgcagagagcttcacacggtgcatatcagacaccaggacgcagagagcttcacacggtgcctgtcagacaccaggacgcagagcgcttcacacggtgcatatcagacaccaggacgcagagagcttcacacggtgcacgtcagacaccaggacgcagagagcttcacacggtgcatatcagacaccaggacgcgcagtgcttcacacggtgcatatcagacaccaggacgcagagagcttcacacggtgcatatcagacaccagcacgcagagagcttcacacggtgcatatcagacaccaggacgcgcagtgcttcacacggtgcatatcagacaccaggacgcagagagcttcacacggtgcgtatcagacaccagcatgcagagcgcttcacggtgcatatcagacaccaggacgcagagcgcttcacacagtgcatatcagacaccaggacgcagagcgcttcacacagtgtatttcagacaccaggacgcagagagcttcacacggtgcatatcagacaccaggatgcagagcgcttcacacggtgcatttcagacaccaggatgcagagcgcttcacacggtgcatatcagacaccagcacgcagagggcttcacatggtgcacgtcagacaccaggacgcagagagcttcacacggtgcatatcagacaccaggacgcgcagtgcttcacatggtgcatatcagacaccaggacgcagagagcttcacacggtgcatatcagacaccaggacgcagagagcttcacacggtgcgtatcagacaccagcacgcagagcgcttcacggtgcgtatcagacaccaggacgcagagagcttcacacggtgcgtatcagacgccaggacgcgcagtgcttcacacggtgcatatcagacaccagcatgcagagagcttcacacggtgcgtatcagacaccagcactcagagagcttcacacggtgcatgtcagacaccagcacgcagagagcttcacacggtgcatatcagacaccaggacgcagagagcttcacacggtgcgtatcagacaccagcacgcagagcgcttcacagtgcgtatcagacaccaggacgcagagagcttcacacggtgcgtatcagacaccaggacgcagagagcttcacacggtgcgtatcagacaccaggatgcagagcgcttcacacggtgcgtatcagacaccaggatgcagagcacttcacacggtgcgtatcagacaccaggacgcagagcgcttcacacggtgcgtatcagacaccaggatgcagagcgcttcacacggtgtatatcagacaccaggacgcagagcgcttcacatggtgtatatcagacaccaggacgcaaacgcaaagcgcttcacacggtgcacatcagacaccagcatgcagagagcttcacacggtgcatatcagacaccaggacgcagagcgcttcacacggtgcatatgagacaccaggacgcagagcgcttcacacggtgtatatcagacaccaggacgcacacgcaaagcacttcacacggt

SEQ ID NO: 10934 - DNA, 2300 bp, Homo sapien
ctccacagtccccctccttggctgccagcactggtgtagagtgacagtttcctcatccgtcttggtagctgggccctgagctcttcctcctcagcctctgtcagaccctcaacagcagtagcctgggcagccccacctgtgtcaacagggacattggtcatggagttggacggcaggcctttgtgaggagaattcgggttgacatcttggctggcggcgtctgtgttcaggcagtcatgggccgcggtgcgggcgctgtgggagccgagtgatgggctgtgggagccgagcaggcagcagcagggttgctcactgcacgcacgctgcccgggagctgcctctgctggctgttttaataggaatggtagccagtattgtagtttaagaaagatttgtgaggccgggtgcagtggctcacgcctgtaaacccagcactttgggaggccgaggcaggcggatcacgaggtcaggagatcgagaccatcctggctaacacggtgaaaccccgtctctactaaaaatacaaaaaattagctgggcgtggtggcgggcacctgtagtcccagctgctggggaggctgaggcaggagaatggcgtgaacccgggaggcggagcttgcagtaagcccatatcacgccactgcactccagcctgggcgacagagtgagactctgtctcaaaaaaaaagtctatagtgcttactatctggtccttgtccaagaaagcttgccagcccctggacagaaggatggagtacaggtagcgtggtggtatatgcaaacatccagacctttttggggtcgtgtgagagagttgtaagggatacctctagtgggtgatggcgggagggagctgtaggaggacatttgcgggtgacctaggctgtgttgccagggagtggaggcgggggtgtcagtgcaggccgcagggtccatgatgagtttttcttccctgtgcagaagcttagggatggctgccatggcatacgatgccaccggacacttcacagccagaatcttggtaatcagaggtgacgagagaaggtgtttctggctgtgctaggtgtaaatgaattctgttttctacacggtgcagtggagctgcctgtgggatgtccaagtgaggtgactgggagggagttggcccttcaggtcttgggctcaggggcactgttgaccatgaggcccgctggtctgtaggccacagttgaaggtgacattgagactgcccagagcataaggaaggatagaggtgcagctgtgggagctccaggcagatggtgtggagacctgtgacaccatccggggaaggagggcgtgacgcagcgtcatggacggagacctgggttcccagccagggcgcgatgcagcatcgtcagcagtgaaaaaaatttcgtttactgtggtgtcacaggccgcagagacttctttgagtacagaccaaattcgtgcgctttgctttattctggttgtggtcctcatctgtgtatttcacttcctgggcatgttttacatgacattgtactgggccctgaatggttaaagctgctgttcactgtttatggagaatttaagctcctccagggtctgggcacccaggtcagtatgctaagctcaagccttggcacgaagtgggtatgtgctagaatgccaattatttttccattataaaagcagagtcttttatggcctttttgtttgtgagtctttttttttttaaaaaagtataagccaggctcggtgactcacacctgtaatcccagcactttgggaggcaaaggcaggtggatcacctgaggtcaggagttcgagaccagtctcaccaatatggtgaaaccccatctctactaaatattaaaaaaaaaaaaaaaatagctgggtgtggtggcgggtgcctgtagtcccaggtactggggagcctgaggcaggagaatcggttaaacccgggaggcagaggttgcagtgagccaagatcacgccagtgagactccgtctcaaaataaataaatgaatgaatgaatgaatgaatatgtattttcaccttagagcaacctcatgagacaagtgtgaataattgtacttcctctgcaccttttttcagggctatgacacaccgttgcattttgcttgtaagtttggaaatgcagatgtagtcaacgtgctttcgtcacaccatttgattgtaaaaaactcaaggaataaatatgataaaacacctgaagatgtaagtacttattacaatgcagttgctatctagagttagaaatggaaatatataaatttacagtctgtgatcacag

SEQ ID NO: 10935 - DNA, 2300 bp, Homo sapien
gcgcctgtctaatttttgtattttttttttagtagagatggggtttcaccatcttggccaggctggtctcgaactgctgacctcgtgatccacccacctcggtctcccaaagtgctgcgattacaggcgtgagccaccgcacccggctttacttatttgagtatgtaaatcacgaacatgtttttaaaagtcagaaccctgtagaaacttaaattcagatgtattactcccccccgccatctttttttttgttgttgttgttgagacagggtctgattctgtcacccaggctggagtgcagggttgccatctcagctcgtggtggcatccacctcccaggctcaagtgatcctcctgcctcagccccctgagtagctggggctgtaggtgtgcactactatgctcgggtaattttttttttttgaaacaaggtcttgctcttgtcccctaggctggagtgcagtggcgtgatttcggctcactgcaacctccacctactgggttcaagcaattctcttgcctcagcctcccgagtagctggggttacaggcatgtaccaccacgcccggctaatttttgtatttttagtagagacagggtttcaccatgttggccaggctggtctcgaactcccgacctcaggtgatctgcctgcctcccaaagaatacaacgggctgggcatggtggcttatgcctgtaatcccagcactttgggaggttgggagttcaagaccagcctgaccaacatggagaaaccccgtctctactaaaagtacaaaattagctgggcgtggtggtgcacgcctgtaatcccagctactcgggaggcttgaggcaggagaaccgcttgaacccaggaggcagaggttgcagtgagctgagatcgcaccactgcactccagcctgcctggtgacagagcgagactccgtctcaaaaagaaaaaaggctcacgcctgtaatccaaacactttgggaggccaaggcaggtggatcacctgaggtcgggagtgcaagaccaacctggccaacatggtgaaaccccgtctctcctaaaaatacaaaaattagctaggtgtgattccaggcgcctgtagtcccagctacttgggaggctgaggctggagaatcacttgaactcaggaggtagaggttgcagtgagctgcgatagcaccactgcactccagcctgtgcgacagagggagacaccatctcgaaaaaaaaaagaaaaattctttttttttttttgagctggagtttcgctcttgttgtctaagctggagtgcaggggtgtgatctcggctaattgcagcctccgcctcctgggttcaagcgattctccagcctcagcctcccaagtagctgggattacaggcatccgccaccacacccggctaattttttgtattttcagtagagacgtggtttcaccatgttggccgggctggtctcgaactcctgacctcagatgatccgcccgcctcagcctcccaaaatgctgggattacaggcgtgagccaccgcgtccagccaagaaaaaaagtttttaatgaaagaaacagaaactgatgccattatataatgaaccctagtacccatcacccagcttcagcaggtgttagtattttgtgactctttgatttttttgtcttgggcctaggtgaaatgacaatggatgctctgttggctcgattgaaacttctgaatccagatgaccttagagaagaaatcgtcaaagccggattgaaatgtggacccattacatcaactacaaggttcatttttgagaaaaaattggctcaggctttactggagcaaggaggaaggctgtcttctttctaccaccatgaggcaggtgtcacagctctcagccaggacccacaaaggattttgaagccagctgaagggaacccaactgatcaggctggtttttctgaagacagagattttggttacagtgtgggcctgaatcctccagaggaggaagctgtgacatccaagacctgctcggtgccccctagtgacaccgacacctacagagctggagcgactgcgtctaaggagccgcccctgtactatggggtgtgtccagtgtatgaggacgtcccagcgagaaatggtaatgggaccgtgtgtaggatttcctcacacagatagcacatacgcggaggggcgggatgacgtctgaaaatggaaaactacagattaagaaggaaaaaatccaatcccctccatctcatcaccccagttaaccattgttaacatttttatgtagaacttttctgaaatatttgtgaatt

SEQ ID NO: 10936 - DNA, 2300 bp, Homo sapien
catattgctcaggctggtctccacctcctgggctcaagcgatcctcctgtctcgacctcccaaagtgctgggattacaggtgtgagccaccgtgcccagccttcttgggcctcttctaagggaagtatataaggctctgtcccatgacctatcacctcccacaagccccacatcctaataccatcaccttgggggttagggtttctttttttttttgagacagagtctcgctctgtcacccaggctggagtgcagtggcgcgatcttggctcactgcaagctccgcctcccgggttcacaccattctcttgcctcagcctcccgagtagctgggactacaggtgccttccagcatgcccggctaattttttgtattttttagtagagactgggtttcaccgtgttagccaggatggtctcgatctcctgacctcgtgatctgcccgcctcggcctcccaaagtgctgggattacaggcgtgagccaccacgcccggccaaggggggttagggtttcaacatacgaacgctggggacagacactcagaatacagcagaggtgtacgtttaactttgaaagaaactgcctcactattttccaaggtggttaactcagtgtttgctcttgccagcaaaatttgatattgccaatttttaaattttagccattctggtggatttcaagcagcatctcatcgtggtttgaatttccatttcatccatcttcaaaattactgaccctttcttctgtagtgcccaaccaaccattagtaccatccaatgatattttttaagagatggggtcttgctatgttggtcaggctggcgtgcagtggctattcacaggcgagatcacgctcatggcagcctcgaactcccggactgaaactaccatcacccctcacgctccagagttgctgagactacagacctgagccacctcgctcagatcaattatgtttttaaccaaggatatcaattatatttttcaggtctttcattttcatttaataatatctaaattaggcggggcgcggtggctcacgcctgtaatcccagcactttgggaggccgaggctggtggatcacttgacatcaagaattcgagaccagtctggccaacatgaggaaaccccgtctctactaaacatgcaaaaattagccaggcgtggtggtgggcacctgtaatcccagctacttgggaggctgaggcaggagaatcgcttgagcccaggaggcggaggctgcagtgagccgagatcgcgccactgcacttcagcctgggcgacagagcaagacaccgcatcaaaaaataaataaaacatctaaattacatacagtaaaatcctccttccctttttcgagacagggtctcactattaggttggtgcaaaagtaattgcggcttttaccatgactttcaaaatatttgcccgggctggtctcgagctcccgggccgtggggatcctcccgcctcgcctcccaaggcgctgggactccggacgcagccgccgcgcccggcaaaatccgcgctttcaactgcgcgtcagggccccttggtgaaggagcgggaagctccgccggtctccatagcgccggcggcctgttctgcgggttcgcgggggagtgagaggcgcttcctcactcctgctccaggacgggacgacggccgcaaacagtactcgggctcggagcacacgaacccggaggccgcttcgttctcggagacgcacagcgccccacggacgccaggccggggccgggaggcgcgaagaagcgccgccccgcgcccggccccgccctggtggcctccccgggccccagccccggcccccgccagcacattgcgctccccgcgcctcgccggtcccaggaccccgcgtcgggctgcccgcgccccgcctgccgcgcccgcccgtccgctcgcccgttcccgcccgcttgggtcccagggccggggccgcgccctcgccgggcctccgcgagcggggccgccgtccgtgtcccccgcgccgccccggccgcctcgagcgcggcgccgtcaggcagggcgcgggcagcccggcgcggggtcctgggacgggcgcggcgcggggcgcgggcttctcggcggctgcggcccgggcggcggcgatgctgtggccgcggctggcggcggccgagtgggcggcgctggcctgggagctgctgggcgcctcggtgctgctgatcgctgtgcggtggctggtgcggcggctgggcccgcggccgggaggtctgggccgcagcgggaccccagttcctccgccaagcgcggccgc

SEQ ID NO: 10937 - DNA, 2300 bp, Homo sapien
gcggctcttttcctgcaagccccgccttgggcctgggcccccggctgtcagtcattgccagtcagggatggcgctgggtacagagtgggtacggaggaaggggccagtgcgtttttgcctgacagcctgtcgaagcctagggatgagaggattttctttgcttactgagcactcagactgcattgccatttaaccctccagcaaccacacgctgtcgaggtcatggccgctgcctgcacagccatctccagaggacagaaatgcagcagccttgatagctgttctcctttagctgtggggcgctggacaatttcttacctctctgagccgcatcttttttttttttgaggtggaattttgctcttgtcgcccagggtggagtgcagtggtgcgatcttggctcactgcaacctctgcctaccaagttcaagcaattctcctgcctcagcctcccgagtagctgggattacaggcactcgtcaccataccctgctaattttttgtatttttagtagagacggggtctcgccatgttggccaggccagtctcaaactcttgacctcaggtgatccgcctgcctcggcctcccaaagtgctgggattacaggcgtgagcctcatctttataaaatggggatagtgtcacctactcgatagccttgtggaaaaattaaagaagaagaaatggtgtaaaaccccaaggcagtgtatggagggaggttctgtgctggatgttgctgggctggtctcgttgccgatcttgccagttgtacagggagctctctgcagcctcacgtggtttctcatctcctgcgactgctcccacctctctgtggcattagctgggctgcccggctgggatgagaagaatcacgttgcgtcagccatagtgcttcaagggcttagtagagaagaactgaaaagaatttcaagtttcaagttaggaatttgtgttttccctaagaagtgtaccccgatgtgaggctgtgttcactgcgggggcctctggtctcttacccggtagcaccaagcaccgctcttgtgagagcatgtccgggtctcactcccgaaaggaggcagctgtcgccacacgagaaagtcggggaggctctgctcaccagtgggtccaagtccttctcacggggttgctggcctgggctgggcctggcctcggtctcctggttggggggcggccaagctgcccatcctgggccctcagtctgcagtcggtagacaggatgaggaggtggatggggcccatgccagggcggtgggtttctctgcagagcacggggccaccggctgctgttcactattaaggtttcctgcctttttaaaaacaagtttcctgggctcaggctgacatgttggatcaggaagcagccttcatgcagattcaggaggcaaagacgatggtggaggaggaccttcagaggaggctggaagagtttgaaggtgagagggagcggctgcagaggatggcggactcggcggcatccctggagcagcagctggagcaggtaagtccctgcagcccttcaggctggacccaggccccaggtgatcccgagcagccaggactgcacacaaggagaccgagcagtcctctgctgtggggccacgtccgctcaggtgggagttgggctgtcggtcagacgctgctgctgctgcagacctgaccctgtgtttgccctgctggttcttctataccaggattgtgcgtgaaaaaaagaccctccatagtgtccatcaaaattacttgaaacccgaacaggaaaagggcatacgctctcggaggagggtcaggcgcagccatgtgggcttcattccttctccaggtgaagttgactttactccagcgagaccagcagcttgaggctttgcagcaggagcacctggacctgatgaaacagctcaccttgactcaggaggctctgcagagcagggagcagtccctcgatgccctgcagacacactacgatgagctgcaggccaggctgggggagctgcagggcgaggccgcctccagggaggacacgatctgcctcctgcagaacgagaagatcatcttggaggcggctttgcaggcggccaagagtggcaaggaggagcttgacagaggagcaagacgcttggaagaaggtaccgaggaaacgtcggaaactttagagaagttaagagaagaattagctatcaaatccggccaggtaatgcattctgctgtgttttgttttgaatcagaaccctccttgcaggaatgatgctgattatttgcttctttctttctttctttttttttt

SEQ ID NO: 10938 - DNA, 2300 bp, Homo sapien
atgagccattgtgcccagaataattgtatttttttttactgtcaagttttgagagttctttatatattctagctactagtccttcaacaaacgtggtttgaaaatattttctcacagtctgtaactcatcttttcatcctcttaatgtggtctttctcacaaggttggtttgtttgttttgagatggagtctcgctctgtcgcccaggctggagtgcagtggcacgatctcagctcactgcaacctctgcctcccaggttcaagtgatccccctgcctcagcctcccgagtagttgggactacaggcacacaccaccacgcccagctaatttttttgtatttttcatagagacagggttcaccatgttggccaggatagtcttgatctcttgaccttgtgatccacctgcctcggcctctcaaggtgctggaattacaggcgtgagacactgtgcccggcttttttttttttttttgagacggagtcttgctctgttgcccaggctggtggcacgatctccgctcactgcaacctctccgcctcctggattcaagcgattctcctccagcctcctgagtagctgggattacaggcacatgccaccatgcccggctaattattatatttttagtagagatgggtttcaccatttggcctggctggtctcaaactcctgacctcaggtaatccgcccaccttggcctcccaaagtgttgggattacaggcgtgagccaccgcatccggtgaaaagtttctaattttttcatgaagtttactctatcaacttcttttgtgaattgtgtttttttggtcagatctaagaactcttccccaagctctagatgtgagaaattctgttttcttctaaaagttgtatattttacgcctcagtctgatcattttgtgttagaatttgcatttgcagataacatgatggcccatgtaaaaaatacaaggattttacaacaacaaccgcaaaacaccaaatgaaccctcaaactaatgagttcagcgaggtctcaggataagaaaatcaacatagaattcatcacatttgtgtagaccaacagtgaacacgtggaaaacgtcaaaaacgcagtgttacagttgtttgatgtgaaatactataaacttaaaaggtgcagaatctgtatgctgaaattacaaaatgctggtggaagaaatcaaaagaccgaaataaatggaggggccaccagggacgcagatgaaggaccgagtcagcgatgcccgtgctccccaaacgatctgcagcagttcccatcaaaatcccagaaaacttcgtagactgaagcgtattccaaaatccgcagagatgagcgcaacatcacagaggaccccgaggcgccctccaggccatttccttcctgacagctggaagagcggcctggcggatgagggaaggtggaaagccgttccccagcggccagcggcccgcgccgtccagctttgccctttttaaaggggaagcaaatagggtccaaagcagcgtcgcctttgatctggcacctgaagcgcgaagggcgccggccgggtggaggtgcggggttggggcggggacccgactagggcgggcggggaagtcacgcccacaccgagctcggccgcgcccatgccgagccccggccacgccacttccgccggaagctcggttcagcttcctgaaagagttggtcctgcagttccggaagttgcgtttctactagggaaaggtccgcaaactcttaaggtcactttctgaaggcggcctcatcacagtcggaggtgagctcgatccggaccctgtgggcagagggtccccggccctagggtggccacttgaagaagaggaggacgttctctgttccggaacgaaagtagcgcgtgcaggctgtttccggggacccgaggccgatgcaccgctcgccccgcccctctcacggccacgtctccgccggagcatccgggccgggcggcctccggggctgccagagcagcagggtgaggggctcggaggccgcggcgcctcggggctcgggctcccgctcccgctcccgctcccgcagtgcatgggcgggggaggctcgaggggcggcggcggggcctgggcgcgtccctgcagcgtggcgggacggccccgttccagtcacccccgcctcgctgcggtggcctcgggcctgggcgcccgccttcagctgcggcggagctggctctgtaaatgccggtgcccgcgagccctcctgaatgcttgtctgcgcccgacgagcgcggcctgtcccgaagctgtccactgccaccact

SEQ ID NO: 10939 - DNA, 2300 bp, Homo sapien
agccacccaaatagctggcattacaggtgtgcgtcaccacgcctggctaatttttgtatttttagtagagacagggtttctccatgttggccaggctggtctcaaactcctggcctcaagtgatttgcccccttagcctcccaaagtgctgagattacaggcatgagccattgtgcccagaataattgtatttttttttactgtcaagttttgagagttctttatatattctagctactagtccttcaacaaacgtggtttgaaaatattttctcacagtctgtaactcatcttttcatcctcttaatgtggtctttctcacaaggttggtttgtttgttttgagatggagtctcgctctgtcgcccaggctggagtgcagtggcacgatctcagctcactgcaacctctgcctcccaggttcaagtgatccccctgcctcagcctcccgagtagttgggactacaggcacacaccaccacgcccagctaatttttttgtatttttcatagagacagggttcaccatgttggccaggatagtcttgatctcttgaccttgtgatccacctgcctcggcctctcaaggtgctggaattacaggcgtgagacactgtgcccggcttttttttttttttttgagacggagtcttgctctgttgcccaggctggtggcacgatctccgctcactgcaacctctccgcctcctggattcaagcgattctcctccagcctcctgagtagctgggattacaggcacatgccaccatgcccggctaattattatatttttagtagagatgggtttcaccatttggcctggctggtctcaaactcctgacctcaggtaatccgcccaccttggcctcccaaagtgttgggattacaggcgtgagccaccgcatccggtgaaaagtttctaattttttcatgaagtttactctatcaacttcttttgtgaattgtgtttttttggtcagatctaagaactcttccccaagctctagatgtgagaaattctgttttcttctaaaagttgtatattttacgcctcagtctgatcattttgtgttagaatttgcatttgcagataacatgatggcccatgtaaaaaatacaaggattttacaacaacaaccgcaaaacaccaaatgaaccctcaaactaatgagttcagcgaggtctcaggataagaaaatcaacatagaattcatcacatttgtgtagaccaacagtgaacacgtggaaaacgtcaaaaacgcagtgttacagttgtttgatgtgaaatactataaacttaaaaggtgcagaatctgtatgctgaaattacaaaatgctggtggaagaaatcaaaagaccgaaataaatggaggggccaccagggacgcagatgaaggaccgagtcagcgatgcccgtgctccccaaacgatctgcagcagttcccatcaaaatcccagaaaacttcgtagactgaagcgtattccaaaatccgcagagatgagcgcaacatcacagaggaccccgaggcgccctccaggccatttccttcctgacagctggaagagcggcctggcggatgagggaaggtggaaagccgttccccagcggccagcggcccgcgccgtccagctttgccctttttaaaggggaagcaaatagggtccaaagcagcgtcgcctttgatctggcacctgaagcgcgaagggcgccggccgggtggaggtgcggggttggggcggggacccgactagggcgggcggggaagtcacgcccacaccgagctcggccgcgcccatgccgagccccggccacgccacttccgccggaagctcggttcagcttcctgaaagagttggtcctgcagttccggaagttgcgtttctactagggaaaggtccgcaaactcttaaggtcactttctgaaggcggcctcatcacagtcggaggtgagctcgatccggaccctgtgggcagagggtccccggccctagggtggccacttgaagaagaggaggacgttctctgttccggaacgaaagtagcgcgtgcaggctgtttccggggacccgaggccgatgcaccgctcgccccgcccctctcacggccacgtctccgccggagcatccgggccgggcggcctccggggctgccagagcagcagggtgaggggctcggaggccgcggcgcctcggggctcgggctcccgctcccgctcccgctcccgcagtgcatgggcgggggaggctcgaggggcggcggcggggcctgggcgcgtccctgcagcgtggcgggacggcccc

SEQ ID NO: 10940 - DNA, 2300 bp, Homo sapien
gaaaaaggccacctaggctgggcatgggctcacgcctgtaatcccagcactttgggaggccaaggcaggcggatgacctgaggtcaggagtttgagaccagcctgaccaacgcggtgagaccccatctttactaaaaatgaaaaaattggccagttgtgggcatctgtaatcccagctactggggaggctgaggcaggagaatcgcttgaacccaggaggcggaggttgcagtgagccgagattgctccactatactccagcctaggccacagagcaagactctgtctcaaaaaaaaaaaaaagccacctgaatatgtgcagttgggggcaagcatgttgcatgttcagagctagaatgaagcccatcgaagccgtgttagggtggtggagcaggtgagatttctttcttttgtgtctctcactgttttcctgggatgagcatgtggtgttcagtttaagaaacgatgtgggtctgaggccgggtgcagtgcatcacgcctgtaaatgttcagtttaagaaacgatacgggtctgaggccgggtgcagtgcatcacgcctgtaaatgttcagtttaagaaacgatacgggtctgaggccgggtgcagtgcatcacgcctgtaaatgttcagtttaagaaacgatgtgggtctgaggccgggcgcagtgcatcatgcctgtaatcctagcgctttgagaggctgaggtgggaggatcccttgaagccaggagtttgaaaccatcctgggcaacatggtgagaccctgtctctacaaaaataaaaaataaattagccgggcctggtggtgtgcacctgtagtcctagctactcaggaggctgaggtgggtggatcccttgaacccaggaggcggaggttgcagtgagctgtgattgttcccctgtactccagcctgggccacagagcgagactccatctctaaaaaataacaaaccagaaaatgtgagcctcgccttttttcagggatacaactcctcgccatcacagtccatcacaacctgggtggcgttagctggatgtggccccgccccgatttccatgagacccctcctgaacaatgtttccagaaagagttgagctcctgagcctggtgctgacgaattgtgttggagacagccctcagcgctgagtgcgtgtaacgagtgtcctctctccacaggtgcggtctgcctgcagcctttctgccacctgtactggggctgcacccggaccggctgctacggctgcctggccccgttttgtggtaatactggctcttcaggccccagttgctttgacctttgcatgttctcttggtgaacttgagggcaggggatggtggggtccatagcctgatgtttatagggatgaggccactgttggtcatcaaatgatacctattcctggctggactgcagaggtgtgtcaaattcgtgttagctcaaaatcaagccttaacagaattattaggggagatactcccaggacagaatccttgcagcggggttctgctgttacgataccaagaccaggtgctggggagactcggagagctgatctttttaaggagggagtggaatggaaatcatttctgcttgtcctctgtttaaaattgagttttatcattgaacttcttattctttctagaatctgtaatgaaaagaaatatgtttatcctcagtgtcgggcagacagtgctttcctgcgacatcattataaacaggtaacattgccccttcatctcggcagagctcaacctgggtgacaagtgtctggacggcgtgctgaacaacaacagctacgagtcagacatcctgaaggtaccgactcgctgcgggctggggagccgggagccacattttctccctagtgcagccagctggttctctgcattctattggtgtttatctgttttacctgacccgctgcgggttggggagccgggagccatgtttcctcactggtgcagccagctggttctctgcatgccattggtgtttgtctgttttttccgtattccaaaaataggtatttcgtttttgtgcctcctgccaccaattcgtaggagccgcttcccgcagctcttgttcccggcagctcttgttcccacagctctcggtgagggcttcttgaaggtgccgccctttagcaagaccagggccttttctctggtccctgtctcttctggccatttgccttcccacgtctaggaagctacctcggtttctaggatttacatatgtttaacatgcgcattcgccctcctgccgagcactttgctgacagcacacacaatggtggg

SEQ ID NO: 10941 - DNA, 2300 bp, Homo sapien
ttatttcatggctgttttaatgtattcctgcagaaatgtctgtctatgtcctttgccttttttttatgacttcctaatttgtcagagcttcttatatgtgaaagtgttaggtgaagaaagccctagccctgttgagcaccgcggttggctcctgccgcacacaccggtgttgctctgtgcactgagccctgtgtgagcagcacacaggaccacagcactggttctgtctggaatggcttaaaaatgttctgggcactcaggaaaccaaacaggttactgctggggtctgtaccctgagactgggcttggcaggggtggggcctagcctgcagcgtcgggacacatggccgtgggacacacccggtgatctgggcggtcgctgcctcgggggtcatccacggcaggcgctggccactgctgatgctgcacgtgggagggcaggtgagaagccacagagaacagcttgtcccatgtctcacacacgcggtggtcagcagatggcagctcggcccagcttttccccaggaatccaaactcttcactctaatttcacagagcatgcttcgtatatagaggcattggtgaagtggtcgtaggcgttataagacttaaggactcaatcctgtgagaattttagcgagggtttacctaacattatattttagggatttccattgtatagaatatcagacaattaaaaataatttcctttgggaggctgaggtgggtggatcacgaggttagaagatcaagaccatcctggctaacatggtgaaatcccatctctactaaaattacaaaaaattagccgtgtatggtggcgggcgcctgtagttccagctacttgggaggctgaggcaggagaatggcgtgaacccgggaggcagaggttgcagtgagccgagatggcgccagtgcactccagcctgggtgacagagcaagactctgtctaaaataaataaataaataaataaataacgtctacaaagccaaggtgacaacatggaaaaatacctaggtagaaaaaggccacctaggctgggcatgggctcacgcctgtaatcccagcactttgggaggccaaggcaggcggatgacctgaggtcaggagtttgagaccagcctgaccaacgcggtgagaccccatctttactaaaaatgaaaaaattggccagttgtgggcatctgtaatcccagctactggggaggctgaggcaggagaatcgcttgaacccaggaggcggaggttgcagtgagccgagattgctccactatactccagcctaggccacagagcaagactctgtctcaaaaaaaaaaaaaagccacctgaatatgtgcagttgggggcaagcatgttgcatgttcagagctagaatgaagcccatcgaagccgtgttagggtggtggagcaggtgagatttctttcttttgtgtctctcactgttttcctgggatgagcatgtggtgttcagtttaagaaacgatgtgggtctgaggccgggtgcagtgcatcacgcctgtaaatgttcagtttaagaaacgatacgggtctgaggccgggtgcagtgcatcacgcctgtaaatgttcagtttaagaaacgatacgggtctgaggccgggtgcagtgcatcacgcctgtaaatgttcagtttaagaaacgatgtgggtctgaggccgggcgcagtgcatcatgcctgtaatcctagcgctttgagaggctgaggtgggaggatcccttgaagccaggagtttgaaaccatcctgggcaacatggtgagaccctgtctctacaaaaataaaaaataaattagccgggcctggtggtgtgcacctgtagtcctagctactcaggaggctgaggtgggtggatcccttgaacccaggaggcggaggttgcagtgagctgtgattgttcccctgtactccagcctgggccacagagcgagactccatctctaaaaaataacaaaccagaaaatgtgagcctcgccttttttcagggatacaactcctcgccatcacagtccatcacaacctgggtggcgttagctggatgtggccccgccccgatttccatgagacccctcctgaacaatgtttccagaaagagttgagctcctgagcctggtgctgacgaattgtgttggagacagccctcagcgctgagtgcgtgtaacgagtgtcctctctccacaggtgcggtctgcctgcagcctttctgccacctgtactggggctgcacccggaccggctgctacggctgcctggccccgttttgtggtaatactggctcttc

SEQ ID NO: 10942 - DNA, 2300 bp, Homo sapien
tttttattttattttatttttttaatttttgagatagagtcctgctctgtcacccaggctggagtgcagtggcatgatctcggctcactgcaacttccctcttccaggttcaagcgattctcctgcctcagcctcccgagtagctgggactacaggcacgtaccaccacacctggcttatttttttctattttagtagagatggggtttcactgtgttgcccaggctggtctcgaactcctgagctccagcaatctgtctgcctcggcctctcaaagtgctaggattacaggtgtgagccactgtgcctggccagaaatttattttcatggttcaggaggctgggaagtccaagatcaaggtgttggcagattgggttcctggtgagggctctcttggcttgcaggtggccactttcttgctgtgtcctcacatggcagagagggggactctgcttgctctctctgcctcctcttaagagggcaccagccctgtgacatctgattcccacctagtgacctcatttaacatttatcagctcacaggccccatttccaaatacagtcacattggggattaggacttaaatatatgaattttaggggggtacagacactcagttacaaacattcagttcctaacagttgtagaacttgattattttatttatttattttatatatatatatgtatttttttttttgagacggagttttgctcttattgcccaggctgtagtgcagtggtgccttcttggctcaacctccaacctcccgggttcaagcaattctcctgcctcagcctcccgagtagctgggattacaagtatgtgctaccacgctcagctactttttgtatttttagtagagacggggtttctccatgttcgtcaggctggtcttgaactcctgacctcaggtgatccacccgcctcggcttcccaaagtgctgggattacaggcgtgagccactgtgcccggcctgatatatttattttttgagacggagtcttactctgtcacccaggctggagtgcagtggtgcgatcttcactcactacaacctgcatcttccaggttaaagtgattctcctgcctgagcctccagactagctgagatttcaggcgtgtgccaccacacctggctagttttttggtatttttagtagagatgaggttttaccatgttggtcaggctggtcttgaactcctggcctcaaatcaaatgatccacctgccttggcctcccaaagcgttgggattacagccatgagccacctcgcccagacagaacttgattattttaaagcaatgatgtgcctgccatttataaggcattatttgggggaaaagggaaagcctaggtaacgtgtaggaaggggtgcaacaaccttgttttcccaaagagctctttatccagtctggagtgcagtggcacgatctcggctcactgcaagctctgcctcttgggttcacaccattctcctgcctcaacctcccaagtagctgggactacaggcacccgccaccatgcccggctaattttttttgtatttttagtagagacagggtttcaccatgttagccaggatggtcttgatctcctgacctcatgatccacccgcctcggcctcccaaagtgctgggattagaggcgtgagccactgcgcccagtctttttttttttttttttgagacggagtttcactcctatttctcaggctggagtgcaatgatgtgatctcggctcactgcaacctccgcctcccaggttcaagtgattctccttcctcagcatccagagtagctgggattacaggcactcaccaccatgcttggctaatttttgtattttgtagagacagggtttcatcatgttggctaggctagtctctaagtcctgacctcaggtgatcctcccgcctcggcctcccaatgtgctgggattacaggtgtgatccaccgcgcccagccaagagctctttattctaagagagtggcagaaatgtacatcaactgcttgaaagatttaacccaccaagcgtcaagcgcagcaaatgctgtgaatagaactttagcacaaagcatctcggttccagattagaatgctgatattcaggccaggcacggtggctcatgcctgtaatcccagcagtttgggaggccaaaacaggaggatctcttgaccctatgagtttgagaccagctagggcaacatagaccctgtatctacaaaaacttaaaaaattagctgagcgtggtggtgcatattggtagtctcagctactcaggaggctgaagt

SEQ ID NO: 10943 - DNA, 2300 bp, Homo sapien
gaatttcacaaggtaatgtcatcagttaaggcaaggaccggccattttcacttcttttgtagtggaatgtcatcagctaaggcaggaacaggccattttcacttcttttgtgattcttcagttacttcaggccatctaggcatatatatacatgcaggtcacaggggatgcgatggcttagcttaggttcagaggcctgacatgatccacctgcctcagcctcccaaactgctgggattacagacgtgagccactgcgcccagccggttttacaccttttagggagaaagttcatagatggattcaaagattttctgattggcacttggttgaaagagttgttattatctaaagacctggaatcaatagaaaggattgtctgggttaagctaagggagacaaagtttctattttgttattttttttttgacagggtctctgttgcccaggctggattgcagtggcacagactgtggtttaccgcagccttgtcctcccgggctcaaggaatctgcccacctcagcctcctgaatagctgggactataggcatgtgctgtcatcatgtccagctaagacggggtctccccatgttgcccaggatggtctgaattcctgggctcaagcgatccacccacctcggcctcccaaagtgctaggattacaggcttgagcaccaccactctggccattctaatgcagatgccgctccaggcagcaggcttcagagagaatagatggtaaacttttcttatcagagttaaaaaggtgccagagtcttacattctctcctggatcaggaaaagatgtggaaaaggaaggagattctctacaaagtagatttcccccaggagacagttttgcagggctacgtaaaactatgttaaataaatacatgtcagggtaaaatacttcgttttcttccagggcctgctatttgtcatgtgatgtatcttaatgctacagaccgtttggtcagccttaagttgtctgttttaacgtcgacgctggtcagttatacctgaattccaaagggaggacagtataatgggacatatccaaaccctgcttcccatcagggactgaactggtttttcagattaactttggcgttgagagactcagttcattcagttggttggggaggcttacaattttatttttggtttacaaggtatagataactatgcctatacctatatatacaaatgtttatatatgtatatatgtgtgtatatatggtttgttttacacaaatggatgcctactttatttattttggtagcgatgaggtctcaggctaatctcgaactcctgggctcgagatcctcctgcctaggccttccaaagcacttagattacaggcgtaagtcactgcgcccggtcctgcttcaccctcttaaaaccgcccttgggggctcctcatgagtgcagacattggcgcgttcctccaaaccgcacagactccccctgcgtggacgcgtctcgccgtctttactcctctttcgccgacctttcactttcagggaataccctctggcgcccttctctggagcacacacgtgaacgccgccggattccaagaagtgagatactgaggcaaaagttacgcgcgttcagaacaggaagaccccgcaaaacgccggccaagacgtggccccgcgtccaccctgcccacaagcagccgctcccactcgcggaccgcgccctgtgcctcagacttcggatctgtgtgatccactgtgtgcaactgtacccgaaagggtccccacgtgcactacctcgtgacaactaagatggaccgtcttctactcctaggagtcatccccagattagcggggctctcagaatccttggggcttccaatccggaagttccccgtcccttctgccccaacataacatggcgccgaccgcagccacttccgtgatccgcaggcgacgaagtcgcctggtcaggatcaaagatggccgagcgccctccacgcgcctactctcgcgggccactcccggctccgctttagctgccgctcttggtgagcgccgccgccagccaatcgcggggcgcagaggcctctggccccgccccgcggatcagctgagggagccgcaatgtctcttgacagcggcggcggcgcagccggttccgggttcggcgcggggcgggggtaagcgcggctggcgagggggctgcggcgggcggcgaagggggacctggttgcggccgtgggagggggcgcccgccggcgtccaggccgggctgcggggctgcgtgggcgcgggcggccgggccggggcccgc

SEQ ID NO: 10944 - DNA, 2300 bp, Homo sapien
gtgtggtggctcgtgcctctaatcccagcactctgcgaggctgaggcgggaggatggcttgagcccaggcgtttgagaccagcctgggcaacctaggcagacctcatctccaataaaaatacaaaaatcagcctgacgcagtggcacgtgcctgtagtctcagctacttgggaggctaaggcgggaggaccacttgagcccaggagttcgaggctgaagtgagctatgatggcaccactgcactccagatgaggcgacagagactctccctctaataaataaatcaatacatcaatgaaaaattttaaaaagattatttgttgactgtcagggtgatttattcttctaataaatagaatatttacttacaattatatatcttctcattaatactccagttctggttacaaactggtaaaaattgagataaaatcataaaactaaccaggaaaacattgacctgctaaaaacatagaatcagtgaaactactcaggaaatacttgctatgacagattactctctctgttaaagggtcccatgtagagacatttctatgaatattgaacagttaacaaaaaactgagactgggggagtgacagacaattcagattacaaagcaaaagcaacataggattcagataaatacgataccatggtgaaacaaaatctttaaagcacaaatggttttgaatgtagaagctcatatttcactaactattcactgatgcgtagtccacttttcagcagtgatctccaatcagtccctcctttcacagaagccagcgcaggaggcgcacgcgtcgcttcccgccccgcacttcaccgccccagcccgtcctggctgccacccgccgtccctgagaaacgctcagacgcttctctctctctttttaaaattatactttaagttctggggtacatgtgcagaacctgcaggtttgttacataggtatacacgtgccatggtggtttgctgcacccatcaaccagttatctacattacgtatttctcctgatgctatccctcccctggccccccacccccgacaggccccggtgtgtgatgttctcctcccattgtccatggtttttattttattattattttttgagacggagtctcgctctatcgcccatgctggagtgcagtggcaccatctcgggttcaagcgattctcctgcctcagcctcctgagtagctgggattacaggcatgcgccgccacgcccggctatttttttttttttttttttttttttttttttttgtatttttagtagagacgaggtttcaccatgttggccagtctggtctcgaactcctgacctcgtgattcgcccgcctcggcctcccaaagtgttgggattacaggcgggagccgccgcgcccggcctcagacgtttttctctaggtaaagccgcgggatgaaccagcccctgtggaaatttagaagtaacgacgtccgtcaatttctgtatgaaaaatatacagatcgtgtgacacgtcttctgggaatgaaagtctgctaaactcgccgtcacgagtagatgaacacatttaaagtttgtagttaagaggaaaacaacgccaacgacacaaatgccccaagcgctggatgaagcagcgacctaggatggggctggcctggaacgggaaccaagacgcccgcccggacgaaaacgagcagggaaacccgggccggggtcggccgccccacacgacgcactgcgcagagaccacgcggctccgggtctcgcctgcgccggcgcatccctcgcagacgcgctcctcccacgcgagggccccttccccgaagcgcacgcctaagactgcgcgccgcagcccgccctgtctagctgaggcgcagacccggatgggtcccagaggggcgggtcggggcggagagccgcgcccaaaggcaatgggagccgcacgctgctaggcaacatgctgtctcccggcaacgtagaggcggggaattcgccaacgtgtctgaaacagacaacaattttagccaacggctgcgtgggccttgggcgtcctggccaatgggaatagtgaggggcctgtcactaagaaacctgtccctgagcaacgcataggaggggtggaacccagcagcgctgactgagccgccgcgaagtgccggaacgtattacctgggagccaaatttcagagcgtcgtttgtcttcccaagcccaccagctttcagcgttctccagcctcgccacacccccgcctcgggccgtccccgcccagacgcttgtccccgcgagaagctgagcgcactgaagtga

SEQ ID NO: 10945 - DNA, 2300 bp, Homo sapien
ttcttttttggagacagggtctctttctgtcacccaggctggagtgcagtgccacaatctcattgcaacctctgcctcctgggctcaggcaatcctcccacttcagcctcccgagtagctgggactacaagtgtgtgtcaccacactcagctaatttttaaattttttatagagacgaggtctcactctattgcccagactggtctcaagcgagcctcctgccttagcctcccaaagtgctgggattacaggcatgagccaccgcgcccacccaatattctctttttcatggaccttgtttagttgcactaaaaaaaaattaatatattttatttttgtttagagcgtgttgggtttacagaaaaatcaactggaaagaacaaggagttccccccatccctttctaccttagtgttccccttatgttctaccatagtgtttcccctatatttacgtttcatattactctggtacatttgttacaactgatacaccaatattaatatattattattaactgaagtttatagtttactttttttttttttttgagtcggagtcccgctctgttgcccaggctggagtgcaatggcacgatctcggctcactgaaacctctgcctcccgggttgaagcaattctcttgcctcagcctcccaagtagctgggatgataggtgcccgccatcacgcccggctaatttttgtatttttagtagagacggggtttcaccatattggccaggctggtctcttggcccggctggtcttgaactcctgaccttgtgatccacccgtctcagcctcccaaagtgctgggattacaggcgtgagccaccacgcctggcccttttttttttttttcctgacggagtcttgctcttgttgcccaggctggagtgcaatggcgcgatctcggccccatgcaacctccacctcccgcgttcaagtgattcttctgcctcagcctcccaagtagctgggattacaggcatgtgccaccacgcctggccacaagttttaaattttaatgaagttcaacttatcagttttttgtttcacagattgtacttttggtatggtatctgagaaaatatcactaaacccaggatcacctagattttcttctgtgctgtcttccaggagttgtatagttttgcatttcacattcaggtctttgatccattttgagttagtttctgtgaaaggtataaggtctttgtctagattcacatttttgcctgtggatgtccagtttttccagcaccatttgctaaaaagactatcctttctccattgcattgcccttgctcctttgtcaaacatcagttgactatatttgtgtggcgctgcttctgggctctttattctgccccactgacctctttgtccattcttctgccagtatcagagtgtctccattactatcgctttataggaaattttgaagttgggtagtgtcagctccccaacattgctcttctccttcaatactgtgttgactattctgggtctatttctaatctagcaatggaagttttgcatttcattagtctttatttatttatttatttcagacagcgtctcaccctgtcgcccaggctggagtgcaacggcacaatctcggctcactgcaacctccacctccagggttcaagcaattcccctgcctcagcttcccaagtagctgggattacaggcacacaccaccacacctggctaattttttgcatctttggtagagacggggtttcaccatgttggccaggctggtcttgatctcctgacctcgtgatccatctgccttggcctcccaaagtactgggattacaggcgttagccaccgcgccctgcctcactagtcttttcaagaaagaagcttttagatgtggatttattatctgttaattctcattttcatcttcattatttcctttttgctacttttatttggatattttctaggattcttcctaatctcttgggttggatgcttaacacttacatttccattgatcctgttttcctaatagaggcatttggggtaatgcattttccagtaagtgccactttagattatatcccattttgtgtggtgtcctatatcagttaaacccaccgtattcattgtataaatcaaatttttcatatacttactgtattagtccattttcacgctgctgataaagacatacccaagactgagtaatttataaagtaaaagaggtttaatggactcacagttccatgtggctggggaggcctcataatcatggtgggtgaaaggcacttctgacatgct

SEQ ID NO: 10946 - DNA, 2300 bp, Homo sapien
ggggtttcaccatgttggtcaggctggtctcgaactcctgacctcaggtgatccgcccgccttagcctcccaaagtgctgggattacaggtgtgagccaccgcgcctggcctggccaaaaaatatttttaagagaaggtgtctccctctgtggcccaggctggagtgcagtgttgccatcatagctcactgcagcctcaacctcccaggctcaggcaatcctcctgcctcagcctccagtagttgggactacagggacaagccactgctttatatatccataaatatattttatttccctgtaatgtcctcatctcatttatttttccttttttttttcttgagatgaggtctcactctgttgccaggctagagtgcagcggcatgatggctcaccgcaacccccgcctcccgagttcaagtgattctcctgcctcagcctcccgagtagatgggattacaggcgcccaccaccacgcccagctaatgttctgtatttttagtagagacggggtttcaccgtgttggccaggatggtctcaatctcctgacctggtgatccgcccacctcagcctcccaaagtgctgggattacagccgtgagccaccgcgcccaaccctatcatctattttcattccttttgtcaatactgctggattggatgtactaaatgtaaggtcctctgagctggccgcaccatggtcaagccatcgtgacattcccccacccttgtgataatgtactttgtaatattcccggtccttgtgaatgtactttgtaacattcctctccgcccttgtgacaatacaccctccccgcccttgtgaatgtactttgtaacatcctcccctgcccgcaaaaaattgctgctgaggccgggcgcggtggctcacgcccgtaatcccagcactttgggaggccgaggagggcggatcacgaggtcaggagatcaagaccatcctggctaacacagtgaaaccccgtctctactaaaaatacaaaaaaattagccgggcgtggtggcgggtgcctgtagtcccagctactcaggaggatgaggcaggagaatggcgtgaacccgggaggcggagcttgcagtgagccgagatcgcgccactgcactccagcctcggcgacagagtgagactctgtctcaaaaaaaaaaaaaaaaaaaaaaattgctgctgactccaccgcctatcctatcccaaagctataagaaccaatgacaagcccaccaccctccgctgactcctttctcagactcagcccacttgcacccaagtgaataaacaggcgtgttgctcacacttagcctgctcaggtggtctcctatacggacgcacgtaacactaacatttaccgatattacttacagctacgatgaaaaatggaaaagcagccggacgcagtgactcatgcctgtaattccagcattttgggaggctggggcaggaggatcatttgaacccaggagtcggagaccagcctgaggctgcaatgagcgttcatggcaccactgcactccccactgggtgacagagcgagaccctgcctccaaaaaaaaaaaaaaaaaaaacaaggaaaagatgcagacgcttcctcctggaggcgcctttaggttctctcacagacatgttgggccagcagtgctggctccatcctagatttcttccagtcctccccagttagccgccaaggggcttttccaaccggaaacctccaatccgcgaccccggcgggtgcaccgccgagccccccgggaagtgtagttccagcgcgagcgggacgctgggaaatgtagttctgcgcgttcacgtccccgatcgggccgtgtccgccgcggccctgcgaggtccgaggggtaagggagcgtgcagcgggggcgggaccacgaggcggcggggctgggggcggcctctgtgtctgcgccggggatcgcggtgaccccgctgcggaccggctcgcggtgaccccagcgcgaacgagctggctgccggctggggcgagaaaggcctgcggaccggcctgggcgcatgcgcggaaggcgggcctcaggcgggggctctgggggcgcgcgggggtgggaggcagagggtggggtgggggctgtagggcgggcggcggcggggcgctgaatgtgggtgtcgggggagatttggggtcagctgggcgattcactgggggcctatggaggtcgctgtagacttggggtgcagcacgggcggggcaaggggacgcgaggttgcccttggccccaggggagaggggcccctgggaggccgtgtggaggatttgtc

SEQ ID NO: 10947 - DNA, 2300 bp, Homo sapien
gccatttcaattttttaaattgccaattgtgagtgtgtttcctgtttctccccatttttattttaaaaaactaatatgcttttacagtttttctttttctttttttttttttttagacagaatctcactctgtctcccagggtggagtgcagtggtgagatctcagctcactgcaacctctgcctcctgggttcaagcaattctcatgcctccacctcctgagtaggtgggattacaggtatgagccattacaggcatgagccaccacacctggctaatttttatatttttagtacagatggggtttcaccatgttggtcaggctggtctcgaactcctgacctcaggtgatccgcccgccttagcctcccaaagtgctgggattacaggtgtgagccaccgcgcctggcctggccaaaaaatatttttaagagaaggtgtctccctctgtggcccaggctggagtgcagtgttgccatcatagctcactgcagcctcaacctcccaggctcaggcaatcctcctgcctcagcctccagtagttgggactacagggacaagccactgctttatatatccataaatatattttatttccctgtaatgtcctcatctcatttatttttccttttttttttcttgagatgaggtctcactctgttgccaggctagagtgcagcggcatgatggctcaccgcaacccccgcctcccgagttcaagtgattctcctgcctcagcctcccgagtagatgggattacaggcgcccaccaccacgcccagctaatgttctgtatttttagtagagacggggtttcaccgtgttggccaggatggtctcaatctcctgacctggtgatccgcccacctcagcctcccaaagtgctgggattacagccgtgagccaccgcgcccaaccctatcatctattttcattccttttgtcaatactgctggattggatgtactaaatgtaaggtcctctgagctggccgcaccatggtcaagccatcgtgacattcccccacccttgtgataatgtactttgtaatattcccggtccttgtgaatgtactttgtaacattcctctccgcccttgtgacaatacaccctccccgcccttgtgaatgtactttgtaacatcctcccctgcccgcaaaaaattgctgctgaggccgggcgcggtggctcacgcccgtaatcccagcactttgggaggccgaggagggcggatcacgaggtcaggagatcaagaccatcctggctaacacagtgaaaccccgtctctactaaaaatacaaaaaaattagccgggcgtggtggcgggtgcctgtagtcccagctactcaggaggatgaggcaggagaatggcgtgaacccgggaggcggagcttgcagtgagccgagatcgcgccactgcactccagcctcggcgacagagtgagactctgtctcaaaaaaaaaaaaaaaaaaaaaaattgctgctgactccaccgcctatcctatcccaaagctataagaaccaatgacaagcccaccaccctccgctgactcctttctcagactcagcccacttgcacccaagtgaataaacaggcgtgttgctcacacttagcctgctcaggtggtctcctatacggacgcacgtaacactaacatttaccgatattacttacagctacgatgaaaaatggaaaagcagccggacgcagtgactcatgcctgtaattccagcattttgggaggctggggcaggaggatcatttgaacccaggagtcggagaccagcctgaggctgcaatgagcgttcatggcaccactgcactccccactgggtgacagagcgagaccctgcctccaaaaaaaaaaaaaaaaaaaacaaggaaaagatgcagacgcttcctcctggaggcgcctttaggttctctcacagacatgttgggccagcagtgctggctccatcctagatttcttccagtcctccccagttagccgccaaggggcttttccaaccggaaacctccaatccgcgaccccggcgggtgcaccgccgagccccccgggaagtgtagttccagcgcgagcgggacgctgggaaatgtagttctgcgcgttcacgtccccgatcgggccgtgtccgccgcggccctgcgaggtccgaggggtaagggagcgtgcagcgggggcgggaccacgaggcggcggggctgggggcggcctctgtgtctgcgccggggatcgcggtgaccccgctgcggaccggctcgcggtgaccccagcgcgaacgagctggctgccgg

SEQ ID NO: 10948 - DNA, 2300 bp, Homo sapien
tttgtgttacaagcaatccaattatacttttagttatgttaaaatgtacaattaaattatttttgagtatatcctgttgtgctagaaaatactaggtcttattctaactattttttctgccaaatgactatttccatcccccacagtgtcccactaccctcccagctgctggtaaccatctttctactctctatcaccatgagttcaattgttttaatttttggctctcacaaataagtgagaatatgtgaagtttgtcttctctgcctcgcttatttcacttaatataatgatctccagttccatccatgttgttgcaaatgacaggatctcattcttttttatggcttcctagtactccattgtgtatatgtaccacattttctttattcattaacctgttgattgacacttcggttacttccaaatcttggctattgtgaatagtgctgcagtcaacaagggagtgcagacagctcttggatatactgattttctttctttcgggtatatacctaggagtgggatagctgcattgtatggtagctctatttttatttttttgaggaacctccaaactgttctccatagtggttgtactaatttacattcccaccaagaatgtaccagggttcccttttccccatatcctcaccagcatttattattgcttgtcttttggataaaagccattttaactggggtgagataatatctcgttgtagttttgatttgcatttctctgatgatcaattatattgtgtaccttttcatatacctgtttgccatttgtatgtcttcttttgagaaatgtctattcagatgtttggcactttttttttttttttttttttgagacagggtttcactcctgtcatcgaggctggagtgcaatggtgcaatctcggctcactgcaacctccacctcacgggctcaagcaattctgctgccttagccccccaagtagctgagactacagatgcatgccaccacatccggcttacttttgatatgttttgtagagacgaggtttcaccatgttgcccaggctagtctccaactcctgggctcatgcgatccacccacctcagccctccaaaatgctgggattacagacgtgagccatcgtgcctggccattttgcacatttttaaatctcaaaaggccaatctacaatagtggtgttatctgtaggagtaactggggaagttgcgtgtcttgtgaccaatccacatcttagcagaattcaggctcctctcctcccgctagcttggtggtctctcataggttttacaaaggcagttgggttttggaaaagggctatcatttgaactataacctaaatgtcttccaaagttagcttggcctaagcccaggaataatgaaggcatcttgacagccaaaggcgcgcagagttgggggtttggttagattagacctcccccactgctataattttctcactgatataatttttgcaaaggcagtttcattactggtgtggttctatttatttgtttttcacatctactatagtttctcctttatgaagttggttactgtattatttggtgcactgatattcaaaactgttatttaaccctatgaactgcagcttttagctttacaaagcgtccttttttgctgtgccttctggtctgaaccctatcttgtttgatatcaaaacctcagcacgcctgcgtctctgctggggtcggactctgagtcagttctacaggccctgggaaactgggcgtccaggctccgaggatggtactgaacctggcgcagccgtgggagggtgaaccaggtgccgctggcggagccccctcccagccttcctttcccgtcaggctgtgcccctctctagatccgcggcagctggaagccaggcctgtaacgagggagccttctccgaggattgtgggagatgtagtttttccggcgccttcgcgtcctggcgcatcgacgcaggacgcacttccgcatgcgccgcactcccggccttagtcgggtgcgcgcgtgcagggctgtttccggcttagactcagtggaccggaatctggccagcgggtgtacctggctgagtctctgtggccgcggaggcgcggagctaagcggctcggattatcctgggcagaccagagacttgaccagctaaacacttccgtcggtccggggcgtggacggggccagatcagcctcctgctctcccgagtcagggccacggaaaggcacaaatccatccgtgcgactcctggtacccagaccgggaggttgtctagtcacgcgcggtctg

SEQ ID NO: 10949 - DNA, 2300 bp, Homo sapien
agaatccagccaccatttatcatccccatcgctgtcactttggcctacactgccttcttccactggactaacacagttgccttctaactggtctccccggtatctcctcttacacaaccccctccctcttccacagcagtcaggatgatctcaaaataccagtcagagcgagaagcctttcagtggcttctcacagcgcttgcatttctgcctaggtataacctcatcagagagctgccctgatcaccgtgtctgaaacagcacctgtgcctccctctgtctcatgactctgtcccttacctgcttggattttttgtttgttttttgtttttttgttttgagatgtagtcttctgtgtcgcccaggctggagtgcagtggtgcgatttctactcactgcaacctccacctcatgggttcaagcgattctcctgtctcagcctcctgagtagctggggttgcaggtgtacaccagcatgcctggctaatttttgtgtttttaatagagacagagtctcaccatattggccaggctggtctcgaactcctgacctcaggtgatccacccgccttggcctcccaaagtgctgggattacaggtgtgaatcaccatgcccagcctggattttgttaagagtacctagcacccctggcatgttaggtagtcatgtgttggctgagtaacacccaccctggagaccctaggtgggtgggacctgggagcctaattcatatactgcttttagctgtttacagttcacacctcattctcatcatgcaggatgactgttcccaaagcttttggggcttctgtgggagagatggtttgctgtgcatcagcttacctctgggagagcttttgctcacggaagtcagttaccagatttttggcttactgtttattaaaaatttatcaaaatatcatattggcttctgtttatgtagttcccttttcttttttttttttttttgagatggagtctcgctctgttgcccagctggagtgcagtggcgcaatctcggcacactgcaagctctgcctcctgggttaacgccattctcctgcctcagcctcccgagtagctgggactacaggcacccgccaccacgcctggctaattttttgcatttttagtagagacggggtttcaccgtgttagccaggatggtctcgatctcgtgaccttgtgatccgccgcctcggcctcccaaagtgctgggattacaggcatgagccaccgcccctggcctcccttttcttttagaggtgtgtttgtgtgtactgtattcctgtatgtaatttaaatgggtctcagaggaggatactgataatcatgtttaaatcttctctccattctctctgttcctactttcaaatcatgtttagtctccatctcaacctccctaatgggcataaatcttacaactttgtaggtgttttgatttgtgaaattatatattatagaaaagccatctagcatagaagaataatgcccgagtattgatgagccaggagggatggtgaaccacgtggaggtgcctgggcaagaggagtctgttggctgtagtgagaccgtcatgctacttgggatgtataaataagaaatgcctttagtttaagtcccttgagttaaactgatgtaaaaatgcaattatttatgctaattctgtgagtatcagctttcattgatgtagcatttacctgatatctttcttcatttctttattttctaatttgtattttttctttggtgtatctcataagtttcaaactgtcttagttttgttttcagtatgtttcttctaacatgaatgtgttctttctcagtcggttttttctctactgtttgggaagctgtacttgtcttcctccctgctccctccctacatttttagtgcttgattgtctttaagttgttcacaggcacactgaacgtttccctttaaaacaaagtctaaacagttgcattttctcttttcccaagtgaaagatgtttctttataccttcattttttatgattctcatctatttgcatcacacacatgcttaaattgtagctgattataattttagttcagatgtgtttgaatcaatagatttatgttctgctgatttcagtgctcaccgttgtatccagcttcccaccaattctttctgtgtcttaatgttgtctctatagggtgtaattttttttttttagagacagagtctggttctgttgcccagtgtaaagtgcagtggcatagtcatggccaactacagcctcaaactcctgtgctcaaaccatccttccacctca

SEQ ID NO: 10950 - DNA, 2300 bp, Homo sapien
aactgggtaatgggcagagtttggaagagtctggaggagcaggttagaaaaggcctagattctggtgagggattgtctcaaaaaaaaaaaaaaagaagaagaagaagttgtgaaaccatgcccccaaatagttaaagaaaccagtgactaacgaattttttttttttgagatggagtctcgctcttgtcgcccaggctggagtgcagtggcgcgatgtcggctcgctgcaatctccacctcccaggttcaagcgattctcctgcctcagcctcccgaggagctgggattacaggtgtgcaccaccacgcccagctaatttttgtatttttagtagagacagggtttcaccatgttggccaggctggtctcgaactcctgacctcaggtgatctgcccgcctcggcctcccaaagtgctaggattataggcgtgagccaccgcgtccggctaacagaaattcttgagcttacaggatggcagataagaaacagtttgctgaaactccgtttgtaatataatacaactggctgaaatcagttgaaaccaatataaccaaacggagtccatgcagaatgagcttgctgatgtcgcagcctgaatttccactgcacttttcacactaactctaccttaatttgcacatgggacccaagaagaggcttgaagagacaactgcacatggtcggggactttccagacttcctttttccttcaccattcacctgtgaatcccagaatccaccctctaaaccttttttcacaatagtgctgccttaagggcagcacagagagatagatttgaactaaactcctgtcactttgttggtcaactcgcaattaagcttttcttttctcaaacgcctggtgccatagtattggcttctgtgcacatcgggcaatgaggtcttttgcgtagcagtatttggatatccggtttcctcacgctatttattgaagcgactgtcctttccccatcgtgtattcttgacacaagattagttgacttgcctaagattagttgactgtatatgcatggggttatttctggtttttctacgctgttccacattggtccatgcgtctgtttttatgctagtacttcactggtgagttctacctctgggaataaatataagaattctctaatcactggatgtttgaagcaattcactaagcaactcattatgatgctttctggcaaaggatctctgaatttgtcttcaaattgtggataaaattgggtcaaatttggcccatgttgtcctggagaatcatttgtgtcacaaattatcaaatttattagtatagagcggattttcattcaatttcctatgtgtctatggttatttctcttttttcatctctctcctccatctccccggccccatcttgctgtcataagcatcgtgacttacctataattctccctacgactccagttatggatcaactttacttttttctgttaattcttaccttctttccataaatatatttaaattttttctggtttcctcaactgaagtcaaaccaattgagtattggtgggccgggcgcggtggctcacgcctgtaatcctagcactttgggaggccaaggcgggcggattgcctgagctcaggagttcgcgaccagcctgggcaacacggtgactccccgtctctactaaaatacaaaaaaattagccgggcgtggcggcgggcgcctgtagtcccagctactcgggaggctgaggcagaagaatggcgtcaacccgggaggcggagtttgcagtgagccgagatcacgccactgcactccagcctgggtgacagagcgagacgccgtctcaagaaaatatatatatatattggtggattcggtttccctttatgtttctcagaaaaccgtgtgagcccgtttggagtcactccgtctccaagcgacaggcacttccggacgcggggcactgtgggaagttgagttcgcggggctccttccttcgcgcatgcgcacatgcactcttggtaatgcttgcaggtggcccgttcttcctctttgtccttcgctgccacgtgagaggggagtgtacgcgtgtgcgcgcgtgcgagtgtgcgcgtgtgcagtccccgactcgtcccggcccgttcggagccgcccgggagcgcacaaaggccgacggtttgggcgcgtgcgcgggacacgggggacgggcggtgtcacgtgatcgcgaggccgcgggcgcgcgggcgcgactcggcggcggcgtcttttgtgagttcagtgagtttattgcgggcccggcgctgggggctccggg

SEQ ID NO: 10951 - DNA, 2300 bp, Homo sapien
cccaggctggagtgcagtggcgcgatgtcggctcgctgcaatctccacctcccaggttcaagcgattctcctgcctcagcctcccgaggagctgggattacaggtgtgcaccaccacgcccagctaatttttgtatttttagtagagacagggtttcaccatgttggccaggctggtctcgaactcctgacctcaggtgatctgcccgcctcggcctcccaaagtgctaggattataggcgtgagccaccgcgtccggctaacagaaattcttgagcttacaggatggcagataagaaacagtttgctgaaactccgtttgtaatataatacaactggctgaaatcagttgaaaccaatataaccaaacggagtccatgcagaatgagcttgctgatgtcgcagcctgaatttccactgcacttttcacactaactctaccttaatttgcacatgggacccaagaagaggcttgaagagacaactgcacatggtcggggactttccagacttcctttttccttcaccattcacctgtgaatcccagaatccaccctctaaaccttttttcacaatagtgctgccttaagggcagcacagagagatagatttgaactaaactcctgtcactttgttggtcaactcgcaattaagcttttcttttctcaaacgcctggtgccatagtattggcttctgtgcacatcgggcaatgaggtcttttgcgtagcagtatttggatatccggtttcctcacgctatttattgaagcgactgtcctttccccatcgtgtattcttgacacaagattagttgacttgcctaagattagttgactgtatatgcatggggttatttctggtttttctacgctgttccacattggtccatgcgtctgtttttatgctagtacttcactggtgagttctacctctgggaataaatataagaattctctaatcactggatgtttgaagcaattcactaagcaactcattatgatgctttctggcaaaggatctctgaatttgtcttcaaattgtggataaaattgggtcaaatttggcccatgttgtcctggagaatcatttgtgtcacaaattatcaaatttattagtatagagcggattttcattcaatttcctatgtgtctatggttatttctcttttttcatctctctcctccatctccccggccccatcttgctgtcataagcatcgtgacttacctataattctccctacgactccagttatggatcaactttacttttttctgttaattcttaccttctttccataaatatatttaaattttttctggtttcctcaactgaagtcaaaccaattgagtattggtgggccgggcgcggtggctcacgcctgtaatcctagcactttgggaggccaaggcgggcggattgcctgagctcaggagttcgcgaccagcctgggcaacacggtgactccccgtctctactaaaatacaaaaaaattagccgggcgtggcggcgggcgcctgtagtcccagctactcgggaggctgaggcagaagaatggcgtcaacccgggaggcggagtttgcagtgagccgagatcacgccactgcactccagcctgggtgacagagcgagacgccgtctcaagaaaatatatatatatattggtggattcggtttccctttatgtttctcagaaaaccgtgtgagcccgtttggagtcactccgtctccaagcgacaggcacttccggacgcggggcactgtgggaagttgagttcgcggggctccttccttcgcgcatgcgcacatgcactcttggtaatgcttgcaggtggcccgttcttcctctttgtccttcgctgccacgtgagaggggagtgtacgcgtgtgcgcgcgtgcgagtgtgcgcgtgtgcagtccccgactcgtcccggcccgttcggagccgcccgggagcgcacaaaggccgacggtttgggcgcgtgcgcgggacacgggggacgggcggtgtcacgtgatcgcgaggccgcgggcgcgcgggcgcgactcggcggcggcgtcttttgtgagttcagtgagtttattgcgggcccggcgctgggggctccgggaatggcgggggaggcgcgcgggagtggccgcggggagcttcggcttcaaggccctgggcgtccgcgcgcggatgcgggtctggggcgggttggggctgggccgggtcgtgaagatgccgtgggccgcggagctgcgcggattctgggctgtggggcgggcacggcctttccggaggcgccgctcctgggc

SEQ ID NO: 10952 - DNA, 2300 bp, Homo sapien
cacaaaaatataaatgaaggacgccctgcctcaactgtatcacactaacaagcagcactttctttttcatgcctttttgtggttcaaacttcagtgccaactcagaaacacacagcagtttctcccagttatacaagaaatgactcctttataccttaaattgtgataatacataaatcttagaacaaaagctggcacacagtcatacgaaacatatactagctataattattattataaaagtaatatatgatggcaaaatataaaaaacatacacaagctaaataagaactattatctatgatctcaccacaggtaaccattcttaggatgatggaaactattgtgatatttttcatacaatggaagcatatggtcatatttaaaagctgtttttgtttttttcccattatgtgaagaacatctttccaggtcaataaccttatttctgtaagatataaacaactcacataaaataacaaaaaaataaaatccgactcataattgacaaaatacataaaatatgtaggaatatcaagacccatatgaagcatactaaaaacaccaatgagaactataaaaatagaattaaagaaatttataattcgattttattctgggataggaagacttcagattgtgaagataatttgacctcaaatgatttatataactcatcgactccaatcagaatctcaaaattctaaagtttatgtgtaagaaaaaaggttcaagaacaattcggacactttttttttttttttgacagggtcttactgtgttgtccaggctgaagtgcaatggcataaccatagctcactgcagccctgaactcctgggctcaagtgatcctcctacctcaacctacagagtagctggggctacaggcatgccctaccacaccgggcctggatgcttttggaaatacaaaataatgagtgtgaacaggcccactgtaatacatacaaattataatcattataacatttgacactggctccagagaagttatacagatgaaaaaaagcaaactgtctaaatatgcaagagtcagcatgcaataaatgtagcatttcaaagccatcagtaaaattaaattatttaatgaatacaagaatatttgaaagaaaataaacgtagctatttcatacaactactttcagtgggttaaattttaaaataatggaaaccctaagaatgtctacaaaaaaaaaccacaggtgaatgaatatatgtataatttgaggggagatttcgctacaccataccaaaagcaaaagtcacttaaaaaatttaaaacagtcaataaatataaccattaaaaaatacacggccaggaatggtggctcacacctgtaaccccagcgctttaaaagcctccttcgatagcggcagagccaggctgctggtggatgcggtccagcagggcagccgctccttagggccacggcgcggcaagcgggctggcccgaggtcgaggctaaacgcgcccgaggctaaacgcgcccgaggctggcgcctccacgcccgcctgaaaggacgcccaggagcggcgcctccggaaaggccgtgcccgccccacagcccagaatccgcgcagctccgcggcccacggcatcttcacgacccggcccagccccaacccgccccagacccgcatccgcgcgcggacgcccagggccttgaagccgaagctccccgcggccactcccgcgcgcctcccccgccattcccggagcccccagcgccgggcccgcaataaactcactgaactcacaaaagacgccgccgccgagtcgcgcccgcgcgcccgcggcctcgcgatcacgtgacaccgcccgtcccccgtgtcccgcgcacgcgcccaaaccgtcggcctttgtgcgctcccgggcggctccgaacgggccgggacgagtcggggactgcacacgcgcacactcgcacgcgcgcacacgcgtacactcccctctcacgtggcagcgaaggacaaagaggaagaacgggccacctgcaagcattaccaagagtgcatgtgcgcatgcgcgaaggaaggagccccgcgaactcaacttcccacagtgccccgcgtccggaagtgcctgtcgcttggagacggagtgactccaaacgggctcacacggttttctgagaaacataaagggaaaccgaatccaccaatatatatatatattttcttgagacggcgtctcgctctgtcacccaggctggagtgcagtggcgtgatctcggctcactgcaaactccgcctcccgggttgacgccattcttctgcctca

SEQ ID NO: 10953 - DNA, 2300 bp, Homo sapien
tgtgcatgggaataggagctgactccaggatttatgttgtgtgtgtttgtgcatgtagatatgcacaaatgacaatatgactttagtattcatgctttgaacatagcaggatagagaattaacatttgaattttgctacttactaaatgtgcaatcacaggcacattttacaatcactcattgtcccagttttctctctgtaaaatggagattatgttaaacgccttatagggttgtgcatgagttaaatttaaaatgcttagtatattgtctcacatacagaaagcactggaatgttagctgtaactgttattacaaggccccagtcgctttccttttaacacctcatttgtttcttagactcccattgtgaggtccactttatcttcaccattttagcaagtacagaaattgaggctttgaaggcaagaaaggaggggggaaaaacagtaaccacaataaacattaaatgtattcaatttgtcagttaaaagacacactgttggtttggattttttttttttttttgagatggagtttcccttttgttgcaccaggctggagtacaatggcacgggctgcaacatccacctcccaggttcaagcaactcttctgcctcagcctcccaagtagctgagcttacaggtgcatgccaccacgcctggtttatttttgtatttttagtagagatggggtttcatcatgttggtcaggctggttgaactcctgacctcaggtgatccatctgccttggcctcccaaagtgctggaattacaggcgtaagccatcgctcctggccaatttggatttttttttttttaaacaccaataaatttgagctctgagctgcttataagggacaaagataatgatgctaagatttttagtgtagttgaccagatgataacataccacgtaaataccaaaagaatgctgaagccaggtgtggtgttgtatgcctataatcctagcactctgggaggctgaggtgggagaattgcttgagcccaggagtttgagactatcctgggcagcatagcgagatcctgtctctacaaagaaaaaaaatacaaaaacagttagctgggcatggaggcacacaaacctgtagttccagctacgtgggaggctgaggcaggaggatcccttgagcctggagttcaaagttgcagtgagctctgattgtgccactgcatgccagcctgggttagggagcaagaccgtaccaaaaaaaaaaaaaaaaaaaaagaatgctgatgttgcagacttcatctaagataaaatagattttaaggcaaaaagcattattgggggtatgaagcgttgttacacaatgattttttaaaacccctatttaaccttgacgcatcaaacaacatagccataagcatataatccaaacatcagcagaattataaggaaaaactgaccaatctctagtcatattgtgagattttaacccatttccttctgaaatgggtagacaaaaatggcagacaaaagttaaggatatattaatagaagattttaataggaaattaggctcagaatggtgaaatttgtttgtttttgccaaaagtcatctagctggtaaaggaaaaagttgattgaaactcaaatctgttttaatacagatcatataaactgtgtttttcctaacagcacctgttaaactgatttgcatttcagcattcacagtgaatattgagtgaatctcacaattactttatttctgatatttccttatctgtttgcagagacctaggcttccactgttccattttactatattctgtttccctgagagtgctgtttcagttatatagcaagcgtacctctggccttagatgatcgtgaattccaagttcctagcaagagagaaagagatttcatgtgcaatgtgaatataccagttgaagtacatttctcccgaagtccacagatcctggtccctacaaataagcctgctcatgtgagataagaaaggagttcctggaaccaggaattcattctcagtgtagaagacctagctgagacctcactccacagttttggggcagaagcagaagagacgcacagtagaaccgatctcagccttgctgatcatctcgtacagcagcagaaaatgaccatgttacaggtgagttgattgttgagttcttattttttcccagggaattagaagaaatgtataagccttccggtgaaaaagaaaagtttaaatagttaagaaatcagaggaaaatagcctcagatgatcaggattggaacaaaattggcacagtgatatattaacta

SEQ ID NO: 10954 - DNA, 2300 bp, Homo sapien
caactcatcagagaactcatactggagaaaaaccgtatgaatgcagggactgtgaaaaagctttctcccagaaatcacagctaaatacccatcagagaattcacactggagagaaaccctatgaatgcagtctttgtaggaaagctttttttgagaagtcggagctaattagacatctgagaactcatacaggagaaaaaccttatgaatgcaatgaatgtagaaaagccttcagggagaagtcaagtctcatcaatcatcagagaatacatacaggagagaagccttttgaatgcagtgagtgtggcaaagctttctctcggaagtcacaccttataccacatcaaaggacacatacgggtgagaaaccctatggatgcagtgaatgtaggaaggccttctctcagaagtcacagctggttaatcatcagagaattcatacaggagagaagccttatcgatgcattgaatgtgggaaagctttctcacagaagtcacagctcatcaatcatcagagaactcatacagtaaaaaaatcctaggaatacagttaatagtagtctttgacagatcatcttggacttcaggaaatgcaattatgataacgtttgtagacagtcacgtcatgttaggtgtttgtactccatgaggatgagaactctaaatgaggtggtgtatggaaagccgatcataattcatagagtagagtgaacctatgactgcagtggatctcaaaaacttttaaaaccatagacaagccttatagagtagaacattcacagcaaagaagaatcctgtgaatgtccaaaagccttccagaagtcaagtctcttaagctattagaaatattcccactggggatgagggaaaaccccatgaatgcgggaaatgaggcaatatttttaagaaatgacagttcattgtacataagaaaatgctcttaggaatgaagttctatgaaagtactaaatatgggacagtgcaacaagtaacgagactattttgtattttggagaattcatattatggagaacctaacaatttaaagacactgggaacacttgcccctcagtatagtactgtcaagggaagccatacactttttgtagacatgggtaccaaaaatacccaattctaagtggttgacagatgttcactttgaagtgtgaagttttaaaaatacgtgaataaattggttattgaaacatctaagacatttcttagtggtatttgtggcttatcttctagtgtcacgtatgttttgtgttttggacttacctataatttaatgtaattgggagtatgaaatgcatatgccttttagtgcctctgatgtctgtgaagacaacactacacaccactggtttttattttttaacaataatataaaaaatggaaactcatgtaacatgactacatgaataagtaccttaagtgataacccgtttcttttaacttatagacatacataaggggtcttttgtttttatggacctttctattcagtaactgaagccaacattgtgtaagtcttctgcatcctcagagtctgagtaacagtttatataaaataaatatgcaaaggcaggaaccacagaataaccatagtaatatataactgaatgagcaaaataaaggtgtgtgaactacattacaacacccaaactaaatgaaataaagtagtgctgtattaaatctttttctcatttagtgaggtgcctccatatagtatatatatatgtatcttaagtgatatgtaacccaaatgtcactattttaatttactgtgataaagtatcatggatattttgtgctgctgttatgctttttgtgttgcataaaatatcttgtaaaaattagatggataaatgaattattaaaaaatcacatttctgaagatgtaaagtattagggaattttgtgctggaaaaacatttttgacattcaaggatgcctattttatcttctagcaaatttctgtggtccctggaaaagtacagatgatcctggacttacagtggggttacctcccaataaacccattgtaagttgaaaacattgtaagtcaaaaatgcatttaatacacccaacttaccaaacatcatagcttagcgtagcctaccttaaacattctcagaacacattctaatgcatcatctattttataaaaaggtgttgaatatctgatgtaattattgaatactgaaggtgaaaaatagtagtgtatggataccattgtaatgttgagaaactgtaagtcacatcctcttaagtcaggaactatctgtataaggaaacaa

SEQ ID NO: 10955 - DNA, 2300 bp, Homo sapien
tgactcttccctaacctcgtatttcagcatacagttggtgctcttcaagcacagggatgtgactggcttgcttccccaaaacctctcctacgtgcccaggacagtgccccacacaatgctgggagtagaggcgcccccaggtcactgggcgtccagcccctgtaggtgcaatccagcgcctctttccagaaggcttctgggggagggctcgagctggagcacatgaaaaaccagggccgctccagcgttccttctcaggtaacatgagactgctcagagactgctcgaggctgggggaatcccagagggagaagccatggctgtgccggtaccaagtagagactgggccgctccataaggccacgagggactcggagtcacatcctctgagaccactgtttcaaggtgacctgggagcgttgcaaggattctggttattacagttatacgaagccaaagcatcaggggtgcttgaatcagagcaactccatcttgttttttattttatttgttgttgttgttttgctctttttttttttttgacacagtctcgctctttcgcccaggctggagtgcaatagcgcgatctcagctcactacaaccttcgcctcccaggttcaagcaattctcctgtctcagcctccggagtagctgggattataggcgtgcaccaccacgcccagctagtttttgtatttttagtagagatggggtttcaccatgtttgtcaggctggtctcaaacttctgaccttgtgattcgctggccacagtctcccaaagtgctgggattacatgcgtgagccaccacgcccggcctgtattttttttttatttttattttttgagatggagcctcactctgtcgcccaggctggagtgcagtagcgccaacttggctcactgcaagctccacctcccaggttcaagtgattctcctgcctcagcttcccaagtagctgggaatacaggcacccaccaccatgcccaggtaatttttgtatttttagtagagacgaggttacactctggcctgttggccaggctgattgcaaactcctgacctcaggtgatctgcccgccttagcctcccaaagtgctgggattacaggcatgagccacagcacccggcaactccatcttaaataagaactgggtaaaataaggctgaggcatactgggctgcgttccaagaccgttaggcattctaactcacagtatgagacagcaggtcagcatgagacacaggtcataaagaccttgctgataaaagtttacagtaaagaagccggctaaaacccaccaaaaccaagatggcaatgagagtgacttctggctgtcctcattgctacgtcttccactgtcagaggcggttgaaccagggcaactctatcttgagtaggggctggttaaaataaggctgagacctgctgggcagcattccctggaggttaaggcattcgtagtcacaggatgagacatgaggctggcacaagatacaggtcataaagaccttgctgataaaacaggttgcagtaaagaagccgactaaaaccgagatagcgatgagaacgacctgattgtcctcactgcccaccagtggctatggcaacgtcaggaagttaccctatatggtctaaaaagaggatgcatgaataatccaccccttgtttagcatatcatcaagaaataaccacaaaaatgcgcaaccagcagccctcggggctgccctgcctatggattagccattctttattcctttactttcctaataaacttgctttcaccttatggattcgcctcaaattctttcttgtgcaagatccaagaaccctctcttagagtctgagatccggacccctttccagtagcaaaaggtcttagactgaagtactgactccacagtcgttgttaagaatcctagttgtttaatagaggcggtcttgggctcttgctgggccgcggtgtgttctgggaagtgtagtcacctgagtctccagttccttgtctctgggccgtgtgtgcacgccagcgaagcactgtgggagtcgtagtaggggaggaaaaccctataccctctggcgtgcggcgcaggagtttgggggaatgtagtcgccagagctctgcgttgtcttccggctttgggcgtggccacgatgcactctgggagtcgtagtaggggaagaacgtcctccgctcttttgcgcacggtcgctagaggttctgggaagtgtagttgcctgaagctcgtgttctttgtctttcgatgatgtgcgcttggcctcaaagcaccctgggag

SEQ ID NO: 10956 - DNA, 2300 bp, Homo sapien
gtatttttagtagagatggggtttcaccatgtttgtcaggctggtctcaaacttctgaccttgtgattcgctggccacagtctcccaaagtgctgggattacatgcgtgagccaccacgcccggcctgtattttttttttatttttattttttgagatggagcctcactctgtcgcccaggctggagtgcagtagcgccaacttggctcactgcaagctccacctcccaggttcaagtgattctcctgcctcagcttcccaagtagctgggaatacaggcacccaccaccatgcccaggtaatttttgtatttttagtagagacgaggttacactctggcctgttggccaggctgattgcaaactcctgacctcaggtgatctgcccgccttagcctcccaaagtgctgggattacaggcatgagccacagcacccggcaactccatcttaaataagaactgggtaaaataaggctgaggcatactgggctgcgttccaagaccgttaggcattctaactcacagtatgagacagcaggtcagcatgagacacaggtcataaagaccttgctgataaaagtttacagtaaagaagccggctaaaacccaccaaaaccaagatggcaatgagagtgacttctggctgtcctcattgctacgtcttccactgtcagaggcggttgaaccagggcaactctatcttgagtaggggctggttaaaataaggctgagacctgctgggcagcattccctggaggttaaggcattcgtagtcacaggatgagacatgaggctggcacaagatacaggtcataaagaccttgctgataaaacaggttgcagtaaagaagccgactaaaaccgagatagcgatgagaacgacctgattgtcctcactgcccaccagtggctatggcaacgtcaggaagttaccctatatggtctaaaaagaggatgcatgaataatccaccccttgtttagcatatcatcaagaaataaccacaaaaatgcgcaaccagcagccctcggggctgccctgcctatggattagccattctttattcctttactttcctaataaacttgctttcaccttatggattcgcctcaaattctttcttgtgcaagatccaagaaccctctcttagagtctgagatccggacccctttccagtagcaaaaggtcttagactgaagtactgactccacagtcgttgttaagaatcctagttgtttaatagaggcggtcttgggctcttgctgggccgcggtgtgttctgggaagtgtagtcacctgagtctccagttccttgtctctgggccgtgtgtgcacgccagcgaagcactgtgggagtcgtagtaggggaggaaaaccctataccctctggcgtgcggcgcaggagtttgggggaatgtagtcgccagagctctgcgttgtcttccggctttgggcgtggccacgatgcactctgggagtcgtagtaggggaagaacgtcctccgctcttttgcgcacggtcgctagaggttctgggaagtgtagttgcctgaagctcgtgttctttgtctttcgatgatgtgcgcttggcctcaaagcaccctgggagttgcagtggggcggggaaagccatatgctctctcgcgcggggtcgcggttgtttctgggaagtgtggtggcctgagttccacgttcttcgtttctccgctagttgtgcgcttggccgcgagacactctggcagttataggaacacaaaggtctgtgtactcttccgcggggggccgcggttatttctgggaaatgtagttgcctaggacccgggttctttgtttctcggctctgggcgtgggaggatagcccctatgctctggcgcaccgggccgcgatggctctgggaattgtagttgtcgcaggccctcgttctttgtctcctggcgttctgggcacggcagcgaggcgctctgggagttccagtaggaacgaaaagcccttgcgcgcagggccgcattggtttctgggaattgtagtttcttgaggccggcggcctggttggggtgacgtcggcgaggcttctgaagacgcaattcctgcgacgcccgcggaggggccctggggggcggcgccgagcgtctggcctgtgttggctgtaggcaacgaaaggagccctcccggtctgcgccggatggccccgggcggtgactcggtccggagccctggaacgctacgcccacctggcggaaagcaccacggaaacgcatccttctgtggccactgttaggtgagggggttctggggaggcgc

SEQ ID NO: 10957 - DNA, 2300 bp, Homo sapien
cagaggctgaggcaggagaatggcttgaacccgggatgtggaagttgcagtgagcagagatcctgccattgcattcccgcctgggcgagagagagagactctgtctcaaaaacaaacaaacaaacaaaaacaaaaattagctggattagccgggcgtggtggggcctgaggcaggagaatcgcttgaatccgggtggtagaggctacagtgagccgagatcacgccactgcactccagcctggagacagagtgaaactctgtctcgaaaaaaaaaaaaaagtagaaaaacagagacaaagtaaaagaaaaatttaaaaattaagagcaaaacttactgtaataggacccccctccccaaaaaagaccaaaacaaaacaacaaaaaaaccaaaaccaaatctacatttttgaaaagactatgtacacatataccttataggagtaatcaagaaaaaaaggcctagataattaggttcaaaaaagaaaaaaataacaattacagcagtaaaatattaaaaagtggtgattttaaaaatcaccatagaaattacttacagtgataaaatagcatgggcaattttatgccaataaatttgaaaaattagattaaaaacaattatctaggaaaggtatctaaaacagaatacgaactaaaaaacctaatcaatgagactttttaaaaaattgagtcagggccgggtgcggtggctcacgcttgtaatctcagcgctttgggaggccgaggcaggctgatcacctgaggtcgggagttccagaccagcctgaccaacatggagaaaccccatctccactaaaaatacagaattagctgggcgtggtggctcatgtctgtaatcccggcaactcacaagactgaggcagaagaatcacttgaacccgggaggcggaggttgctgtgagccaagatggcgccattgcactccagcctgggcaacaaagagcgaaactctgtctcaaaaaaaaaaaaaaaaaaaattgagtcagaagttaaatgcgtactaaatattttaagaccaaatagcaccaaacttttggaggcgggcggggggcggtgaggggtggtgacctgttttacagaatagaagagagactgtgctgtccaaattattcatgaagcttgtaaaatcttgttagtataacgggcaaggatagtacacaaaaagattaaaacacaatcttgtgagcataggtgaagtcaaagggaaacagccaattgaatacaccagagtattaaagaaataaaaccatatcgcattcaaccacagtataaggcaataggtgaaaaaaacgatggctgtgattcaactcattactaggtttagagattcaagagaggctgctggacagaggcgtgcaccctttagccctcccgtgttgcttagagaaggaggcaaacgcgcatccccggccccccagcgctccctgcgtggcacccgcagccagcccgggacccctccgccccgcgcgcccctggtccccactcgctccccgcgctccactcgcacccggtaagtagcccctcctccctcaagggcctctcccaccgccgcctcccgggcaggctccctgctgctcagactcccgtgaggcgatccctgcacgcaggagaactcagcgggccaggctgatcccacgagggacttgtcccgggtgaacgagccacaggcccgcatgctcacccgtcctcagtgcctgcctccaggcgtccgcggtcccgcccgagggggacgcgaggccgaactacgtttcccaggagctcctgcgccgccccgcagaggggcctggtctgtgcgtcacggacgcgctctgggccgaaggcccgcagggtccggcacagagtggcggctgcggcgccggcgacgaatcgccggctctagggtcccggggcgcgcggctgacgggctgggggcggagcgtggcctgaacgccaggctggggcgcgtgcgtaacggtgtgtgttgtgggtgcgtgtgcgtgcgttcgcagcaggggcgggcgtaggaccaatgggggcggggcgcgtgcgcgtgcgtgacgtcaggccacggggaggtggcgccgccgtgccgagccggcctcagactcacctctgacgccgctcttcgcgctccgctggtgaatggagtcgcgttctctgttttgctgttgctgctgcctttgtgacgggatcgctttctcccatcgaaccttctagttgcttattgcaggtatatacgaaagtgctgaattttgtgtttgcatcgtcatcaggcgcgtgttgagccctttagtaatgtagc

SEQ ID NO: 10958 - DNA, 2300 bp, Homo sapien
gagcgaggttgtgggggaaaaaaaagagatattatcttacatcagtcacagtagctgttattaaaaagacaggccgggccgggtgcggtggctcacgcctgtaatcccagcactttgggaggccgaggcgggcagatcacgagatcaggagattaagaccatcctggctaacacggcgaaaccccgtctctactaaaaaatacaaaaaagtagccaggcgtggtggcgggcccctgtagtcccagctacttgggaggctgaggcaggagaatggcgtgaacccgggaggcggagcttgcagtgagcccagatcgcgccactgcactccagcctgggcgacagagcgagactccgtctcaaaaggaaaaaaaaatcaaaacaaacaaaaacaggccgagctcggtggctcatgcctgtaatcccagcactttggtaaactgaggtgaccggatcacctaaggtcgggagtttgcgaccagcctgaccaacatggagaaacctgtctccactaaaaatacaaaattagccgggtgtggtggtgcatgcctgtaatcccagctactcaggaggctgaggcaggagaattgcttgaacctgggcggaggttgcggtgagccgagatcgggccactgcactctagcctgggtaacaagagcaaaactccgtctcaaaaaataaaataaaataataaaaataaaaagacaaagaagatgttggtgaggatgtggagaaaaggaaactcctatacactgttggtgagaaagtgaaattagtataacctatggaaaacagtgtggagaattctcaaagaactaaaaatagaattaccatttgataaagcaatcctgttactgagtatctacccaaaggaaatcattatatatataaaaaaaatacctgcactcatatgtttatcacagcactattcacaatatcacaggtatggaattaacctaaatgtccatgaatggatgaataaagaaaatgtgttatatatacacaatggaatactattcagccataagaaagaatgaaattgtcttttgcagcatcatggatggaactagtggccactatcttcagtgaaacaactcaggcacagaaagaaaaacacatgttttcactttaagtatgagctaaaggatatgtacacatggatgtagagtgtgggatgatagacaatgaagactcaaaaggtgtgggggggtttcagggataatcataaattacctgactggtacaatgcatataacgtactatagggcgtggataccttaaaagccttgacatcaccactacacaactgatgcatgtaacaaaattacacttgtacctcataaatttataaaagtttttaaaagccaaaaacaaaagaattctagaaaacttgtatctgcctctgtgaatgtcacctcttcccaatacttaagatcaataatgattagtggatattttccgttggtgcaaaagtaagtaattgcggcttttgccattaaagtaaaccaatattttccaactggccaatacatgatgttacgaaatcatgcgtgataaaagaatccattcaaagtgcagtgtagaccaacggattttatgtaatagagtagaaaaagttcatctacgtggtttcagattgtacactaacaaaactatcccttgttcgacttgtatctttatatactttaacaaaaacaacatacgcaacagattaaacatagaagcagatatgagaatccagctttctagtaagtcagaaaagacttaaaaagcgaagccactccttactaaattttttcttttgtaaaatatatgtaattttcattaaaatattatttatgttaacatgtaatgggaattttacgaatctgttattaaagtgtaaagcaaaataagacttttaccatttcagtaaagcagggactagaacacttgtaacctaatttacatccctccaaccgttgagccattggtgtcaagtattttaattctctttaaaatttaaaacctgcaagcgcgggagctcagggacctggccaggaaggcctgagcttccgggtcatcttagcacgccccctcccggtggcccttggccggagccctccggcgcgggagtaactcctcgcagaggcctctgggagttgtagtttttttgcctttgcctctccatgacgcaattcctgtgcgacatacgtagcggccgccattgttccgcgccgatggcgagatccttgttcctcagatagcgttcatcgcccgtcgtggtcaacgggccagccgagtctggagtggttgcgaaccct

SEQ ID NO: 10959 - DNA, 2300 bp, Homo sapien
ataaataatggacaccctaaacagctagttttccacaaacctagtaaaataacttgaaattggatgagcatattgtatttcagggacctttgtcattcatggatgtgtttgtggattttacctgggaggagtggcagctgctagacccagcacagaagtgcctgtacaggagtgtgatgttggagaactatagcaacctggtgtccctaggtaagtgctgcctccctgaggaggagtgtgctcgatctccaggcttcttcttggttgctgaaaactggagggcttctatgaaatacttagtgattttggacttagattttaaggccagattttcttagttccctattggcagcagagtatgccagttgaatggtctttactttgccaaattgcaaaaaggcagcttcatcatgctacctccaaaccaaatctttcccgttcttcagaatctctgaatctcaagctgtttgttccaggttgtctgtgatttttctatttatagggtaccaacacaccaaacctgatatcatcttcaagttggaacaaggagaagagctgtgtatggtgcaggcccaagttccaaatcagacctgtccaagtgagtgatggagacaaatcttttcttctttatttagaattagcatgaattccaatgtgatgtgctcctcttgtttgtactttgcctcgtgtattaccatgcacttttttttttttttttttgagacagagtttcactttgttgcccaggctggggtgcagtggcgtgatctcggctcgctgcatcctctgcctcctgggttcaagcaattcttccgtgtcagcctcctgagtagctggggttacagttgtgcgccaccatgcccggccaatttttgtatttttagtagagatggggttttgccgtgttggccagtctagtctcgaactcctgacctcaggtgatccgcctgccttagtctcctaaagtgctgggattacaggcgtgagccagcgtgcccggccttaccatccactcttaatcttctcgttggcacccttatttccctccttactctatcttggtgatagactcatttcattgtgcattttagcaagcctttcctctttccttcacttgatgtgactctcatgatccttccctttcctttctacattttgaaaattacatttaaatcccttacacataaattcaacaaccacagtcccatcttccttctttttgaaacctgttagtagattctaccccttttgtgcttctctatgctaatggatttttttttttgagacggagtctcattctgtcgcccaggctggagtgcaggggtgcaatctcggctcactgcaagctctgcctcccgggtctcctgcttcagccttccaagtagctgggactacaggcacctgccaccacgcccggctaatttcttgtattttttgtagatacagggtttcaccacattagacaggatggtctcgatctcctgactttgtgatccgcccacctcggcctcccaaagtgctaggattacaggtgtcaggcaccatgcctggccttgctaatggctttaacattatcactctataccttctgagcacattcctttgtcatgtgatagtgtccatgatcctgcagtgacacctgttgatcctgctcttctgctgcatgaccgagcactttttcccttcatgttccactgggcttctcttgctcttctgaatccaaggggtctttattcttcatttccctcatatagtgtaacttttaaaagacttacgcattagctgagcatggtggtgtgcacctgttgtcccagctccttgggaggctgaggtgggaggattgcttgagcccatgaatttgatgctgcagtgaactatggttgtgccactagactctggcctgggtgatagtgagatctcatctcaaaaaaagaagacttctgtctcagtctatttgtgttgctgtaataaaatactatagactaggtaattttataaagcacagaaatttatttctcacagttttgaaggctggaaagtccaaagccaaggtgctggcaggtttggtgtctggtgagggcctgctctgtgcttccaagatgacgccttgttgctgcatcctctggaggtgaggaacactgtgggacagaaagaggggcaaaaaaggcctaagatcattccctcaagcccttttagaaacgactaatccattcatgagggcacaacttaatcttctcttaataccaccacaatggggagtaagtttcaacatgagttttagaggggacacattcaaacct

SEQ ID NO: 10960 - DNA, 2300 bp, Homo sapien
caggcaaggggttaatacaacacaaaatatataaagaactcaaactactcaaagcaaaaatacaaataatctgatttaaaactcagaaaaagttctacccaaaaattttgtcccccaccttcttttctcaaccacctttggccccctccctctcgccaccctttttcttcatctaccccaaaacatttctcccactatttttccccactgtcatttcgcaaagccttctctactctcctgctcaccacccttttcgccatccatctacccaaaaacttttcccccctcactggacaccctctttttctcccttctgctctcattctccttttgctcctccatctacccaacttttccctcatattttcccaaggccttctcgccattcctgctgctcgccacccgcttttccaacctccatctacccaaaaactgttttccccatcgtctttcccccctcctccttgccaccctctttcccttctccatctacgcaaaaacgtctccccaccgtcttttcacaaagccttctccccactcctgctcaccaccctctttcttcctccatctacccccgcaaatttccccaccgtcttttcactaagccatccccgttcccactcgccctcttctttcctctatccttaccatcctccttttgccctccatctaccccaaaactattttccccatcgtcttttccccaactttttccctcctccctctcgccaccctcttttctccttccacttgccaccctcttttcccgctgcgtctacccacattttacccaccgtctgtcttttctttccccaccatctgtcttttctgcccaccatcttttcacaaaaccttgtctccctcccactcgccatcctcttttcccctctcccgcttgccaccctcttttccccctccatgtaccgaaaaacttttctctccccactgtcttttcctcacggtcttttggcaaaaccttgtctccctctgcttgccaccctcttttgtccctcctgctcaccaccctcttttcctcattcctgcccctcctcttacatgccaccttcctgtcgccctccatctaccccaaaactatttttccatcgtcgttttcccaatcctccttccactctcccgcttgccaccctttctctcctccatctacccaaaagcttctcccccagttttttctccccactgtcttttcttcccaccgtctttttgcaaaaccttctccttcctcctactcgccacccttttttcttctcctgatcaccacccttttttctccatctactgaaaaaaaagtatttccccaccatcttgtccccaccgacttttcacaaaatcttctctccctcctgctcaccaccttctgtcttccccctccctctctgcaccctctttcttcctcccacgtgccaccctttcccacctccatctacccaaaatctttttacacatcttttctttccccagtctttctgttctcctcaccgtgtttctccccaccgtctttttgcaaaccttctctccttcctacttgtccccgttttccccccccaccaccctgtctttcctccttctacatgccacccttttttaccccctagatacccaaaaacttttttcaaccatcttttccccaccgtctttttgcaatgccttctcctgcttgccatcctcttttccctttgctgctagccaccctctttatccctccatctacccaaaaactatgtaccccctcctaccactccagccgagctgccgtctctgtcgccagcacccaccacagcgaggcgagccgtggtgccacacgctccagcctccagctgtggcaagtgactaccccttctcctggtcctctaagcctggcacggagcagctgcgcaggcagccacacaagagcctggaatggcctgatgccccttctgcatgccttatacatgagcttatgcaaatgaggttcctggactacatattctgattggatgagagaaaacctctaggcctattctgattggactttattttcatgctgtgattggttgtcctaagacttgctctcatccaatcagaatcgaagctgggagctcagcttagagaacaggaagtgggagccacataccccgagctggcggcttgagcctgtggtatctaggctcacctcactgcggttggtggaggtgatggaggttgcagcttggccagcatggtagaaaggtggcagggtaggtgagctatccagggatgcgctaccctgggtaggagcactatcaaggtcacattgccggtgg

SEQ ID NO: 10961 - DNA, 2300 bp, Homo sapien
ttttccttcatttcaactttggagaatctgacgattatgtgacttggggttgctcttctcgagggagtatcttaacagtggttctatttcctgaatttaaatgttagcccgtctggctaggttggggaagttctccagtataatatcctgaagtgtgttttccaacttggttccattctccccaacactttcaggtacaccaatcaattgtaggtttggccttttcacatagtcccgtatttcttggaggctttgttcattccttttcattcttttttctctaatcttgtcttcatgccttatttcagtaaggtgatattcaatcactgatatcctttcttccacttgacagattcggctgttggtacttgtgtatgcttcacgaagttcctgtgctggtttttttcagttccatcccgtcatttatgttcctctataaactggttattctagattgcagttcctgtaaccttttatcaaggttcttagcttccttgcatttggttagtacacgctcctttagcacagaggagtttgttatttcccaccttctgaagcctacttctgtcaattagtcagtctcattctctgtccagttttgtgcctttgctggaaaggaactgcgatcatttgaggagaagaggcattctggttttggaattttcagcgttttctgctattttatcttcatcttcatggatttatctacctttgatctttgatgctgatggtctttggatgaggtttctctgtgggttttttgttgttgttgttgttgttgttgttgatgttgatattgttgctttctgtttcttagtttttcttctaacaggcccctcttctgcaggtctgctgcagtttgctggaggtccactccagaccctgcccacctgggtatcaacagtggaggctgaagaacagcaaagattgctgcctgctccttcctctggatgcttcatctcagaggggcactggcctgatgccagccagagctctcctgtatgaggtgtctgtcgacccctgttgggaggtctctcccagtcaggacgcttgggggtcagggacccacttgaggcagtctgtcccatagcagagctggtgcactgtgctgggagaatcccacttgtcaggatcagctgctgtcttcagagctggcaggcaggaaagtttaaatccactgaagctgcgcccacagctgctccttcccccaggtgctctgtcctaggaagatgagttttatccctaagcccctgactggggcctttccttcagggatgccttgtccattgaggaggaatctagagaagtagtctggccacagccgctttgccatactggggagaattctacccagtccagacctcccagcctccttagaactatgtttatggttcccactaagagtaaggcataaaaccacagtggcacagggatcaagaggttactacgaacagtaaagctgtgctctgaagcaccgcctgcaggtaggatcctgtctagagagccaggaggaagggaggccactggtcagcattctgggctatttttggctgcctcccacctgcccctccttttggcccaagttctagtcccacttgctttgtcacccactgcctgtttatggcagcttcctctccggtcttcagtgtcctcattgagccaatgaatacagcatcgctcctctaatcacatatattcatgcagcagtataaatgatgtgaaagtgctttgaaaatcatagtaagtgaaagactggggcactgacttcttcccattttcccaagtcctgcttcagaaccactctcctaggcccccagcccctaactccatcttggccctttgatcaaactttgcctactgaggggcataactacacggtatccccagaaaagggacaaatattacaggccttatttcttctctttgccatttcccatgatcactcttacatctagaaactgggaccctttctctggttggtggggccctctccctagaccaaaagacaggggcacacaggcatcataatgggcattcaaacatggtatgatgcaaggggtgggcatgttataaatgctggggtaggtctgggcacctcccagttcctcatctggactcactgggagaagtgattcactagaattctcattggaagaaatgacaggaaagctccctccaatatctcaatttccaccccactcagtacctggttttatgattccacaccctcctaatccatcctgccctcctaacacatcccactctcgtaagccatcccactctcgtgcccgcgaatccct

SEQ ID NO: 10962 - DNA, 2300 bp, Homo sapien
tccatctaggccgttatcttaccatatacaaaaatctactcaaaataaaaatttaaaagtaggaccagaaaccatgaaagtactagagacgaagacaggataaacgcttcatgaaattggttaggacaagggattttcaaatagatatcaaaagcacaagcaacaaaagcaaaagtttaattacattaaacttgtcaaagcacaagcaacaaaaccaaagatgtaattacattaaacttaaaagcttctgcaaagcagaggaagcaatcagtagaatgaggaagcaacccagagaatggaagaaagcatttgcaaactatgcatcagccaaggggttaagacacaaaatatataaagaactcaaactactcaaaagcaaaaatataaacaatctgatttttaaaaaatctacccaaaacctttgtctcccacctttatttccccaccttcttttcccaaccgcctttggccccctcccccctcaccacccattttcttcctccatctagcccaaaactttttccccaccgtcatttcgcaaacccttctctactctcccgctcaccaccctttccccaaccgtctacctaaacactttccccactgatttttcccagtcttttccccttctctctggccaccttctttttccccgtcccactctcatcaccctcttttgctccttcatctaagtaaaaacatttccccgtcttttcccaaagccttatccccactcttgctgctcaccaccctcttttaccccttcatctacccaaaactgttctcctcaccgtctttccctccgctcctccttgccaccctctttcccttctctaatctacccaaaaacatttccccaccgtcttttcgcaaagccttctccccactcctgcttacctccctcttttccccctccatctatcccccaaaattttccccaccgtattttcgtaaagccttctccccggctcctgctcacctcgctcttttccccctccatctatcctcccaaattttccccaccgccgtttcacaaagtcatcccctcttcccactcgttctcttctttgacctgtcctgcttgccactctcttttttgccctccatctactccaaactaagttcccttttttcccaaccctctttccccactccatctacccactttttacccaccgtcttttctttctccaccgtctttcttttctggccgctatcttttcgcaaaaccttgtcttcctcctagctaccctctttttccttccccaacttgttaccctcttttctcccgtctaaccaaaacctttctccccatttttttcacaaaaccttctctccctactgctcacccccacttcccccccatcaccctctttcctcctcccacttgccaccctcttttccccctccatctacccataaactttttaaccgccgtctttctgcaaaaccttccctccctcccgctccccaccctgtttttccccctccatctacccaaaatttttttttcccaccatctttttcctatcgtctttttgcaacgccttctcctgcttgctatcctcttttccctttggcactaaccacccactttactcctaaccacccgctttaaccccctccatctatcccaaaactattttccttctcctatcactccagccacgctgccgtctccgttgccgccaccaccaaccgcagccaggcgagccacgttgtcgtggccccaccatccagtgcacagccgctgataacccattcctggttctctaagccgggcagtaagcagctctacatgaagacacgtgaacttgcaagggcctgacttcccttcagcagcattcatatactgaggttatatacaggaggattcctggactgcacgctctgattggatgagaaggaacctccggggttactcggattggactttattatcatgttctgattggataagagcaagccttaagacaaccaatcacagcatgaaaataaagtccaatcagagtaggcctaaaggtttttctctcatccaatcagaacatgtagtccaggaactgcgtgtgccttaacctcggctataaagcatgctgaggcggagtcccctcgtttcaggctcttcagtgtcagtgctcagtatctgccttagagaactacgagaaggggctgctagcagccgccatccggggcactgggtggctgcaggtggtggtggcgatggaacggtaggagggcggccagcagcgggagcttctcctgccgggcaggaggacgagtagaagggagaggcaccacca

SEQ ID NO: 10963 - DNA, 2300 bp, Homo sapien
ccatgatagggtgctgcatcctggtgatgagctgggggtaagccagcacgtctcctccaggccttttctcagaactgaatatacactgttaagatgatctttagaaatggaagaatcaaactgggaagaattacacgcctgtagtcccagcctacaaggaagcctgaggcataaggatcacttgagcccaggggttttgagtccagcctggtcaacatggtgagaaccagtgtccaaaaaataaataaataagcaataaataaataagaatcaggtgactgttccagactcctccaaaatgggcattgtgtccctactctgctcttcccaggacagggctgtgccttcccctttcctggtggccataaacccagtccctctcactaaaggagagagaaaagaaaaagtgttcaaagcactttgagttatgcgaggtgtgcagaatgtatcaggcccagagagacaggaatatgggacttcagtcacacacctcatacccatgccccagcagctgtgtaaaggcattttgttcctgactagctttatcttcctgttactagaatttgtgatacaaaagacaatatagagccaataaatagcttatgttattttaatatacattcctctggccaggccagccaaggtgggaggctcccttccggccaggagttcaagaccaggctgggcaacacagcaagactctgtctctatttgtaaaattcttggtaaacaatttagaaactgccccttcttttcctttaaaaacccatttgtaactgctgctaattagagtgtatattaaggcaacttgcatctccaaggttgcagttcgcaaacttggcccaaataaactgtatttttttttagttttttattttttgtgagacggaatctccctctgtcacccaggctggagtgcagtggcacaatctcggctcactgcaacctccacctcccggattcaagcgattcttgtgcctcagcctcccgagtagctgggattacaggcacccatcaccatgtccggctaattttattcattttttattttttgtagaaacgggggcaggacgggtctcaccacgttgcccaggctggttgcaaactcctgacctcaagcaatcctccggcggaggcctcccaaagcactggaattacaggcctgaggcactgcgcccagcccaacctctccacctatattaattttacctctgcttcttcttttcttttcttttctttttttttttaagacggagtctcgcccaggctgcagtgcgatctcggctaactgcaacctctgcctcccgggttcaagcaattccccagcctcagcctcccgagtagctgggattacaggcacgcccaccatacccggatagtttttgtatttttagtagagacgggatttcaccatgttggccaggttggtctccaactcctgacttcaggtgatctgcccgcctctgcctccgaagtgatgggattacagacgtgagccacagaaacccactcactttttcctttcagatcacaaaagtgatcgaatcccgccacttcccgggtgctgggtgggaaggtggggtgattgctgtgctgctgtgacttgggtagatgccgtgaaggcctctcaaaggcggccatgtttgcaaagatctgaataaggcacctccagaggaaccggtctggggcaactggggaggaggcagcggcacaagttcgtggtcaagccactgcaaggctgggagcttacttacaaagcaatgttcctccacctataaagacgcagtagctgctccatccccggtcagaggacccccggaaacgtctcagcccacgcactgccctctgaccccactgccttcccgccagtcctgcatccagtcagagggccctctctgagcctgctgccttcccgccaatcctgcatccaatcagagggcgtccccactacgtggtttgcacaacggccaatcaaaactaggatccgagccttggcccgcctcccaggacgtccggaccaatggtggcctggcaccagcaggccaatcccagacagcgcacggcgggaggctgtcgttgggcgtgcgcagctgcagcggcggttgaggtcaagtagtagcgttgggctgcggcagcggaggagctcaacatggtaaggccaggtcactcccaccccgcagacgcccaggctggagggtggacgaagttggcctcctgaggtggctggatggagggatgctgttgcgggccagggtgcagaaaggaggtcagagaaggatgcggggcccagggcgggacac

SEQ ID NO: 10964 - DNA, 2300 bp, Homo sapien
cacatttttcattgcaaataataaatgtctatatttatgtatataatgtgaatattttgcaagtatgttgtcttttattttgttaacttttttctgatgtaaggggagttttaatttttgttttctaaatcaacctgcagaatgcattcataggaaggtctttgtcaacataaaaatgtatctgtataaataggcattcgtgttttcttctggcattttctaattttgtatatttaagtttttacgcatattctatcaataacttatttttgtaacataaaaatctagctagttttctcgagttcacagacatgtcatttacaaataactcatctttccatacacatatgaaatgtcatcaggatcaggttctaaaatcttacacatttttcagtatgtgtgcattttttattctgttccacacatttatctgtcttctcatcttttagtaaatgaaacctaatatcacactttgatatatagaagggcaagtctttactctgttataaaaattttcttaatgtcatcataagagtaaaaggtagcatacgtaacctagaaatcttaaaaccttgatgcttttatttggtttatctaaaatgaatagagttcacatctcgagaaaaatgagtcttcccacatgcacacgtatgttgactgcggcattattcacaattacaaagacttggaaccaacccaaatgtccataatgatagactggattaagaaaatgtggcacatatacaccacggaatactatgcagccataaaaaaggatgagttcatgtcctttgcagggacatggatgaagctggaaaccatcattctcagcaaactatcacaagatcagaaaaccaaacaccacatgttctcactcgtaagtgggagttgaacaatgagaacacatggacacagggaggggaacatcacacaccagggcctgtcggggggagggggtggggggccaggggagggataacattaggagaaatacctaatgtaggtgacgggttgaggggtgcagcaaaccaccacggcacgtgtatacctatgtaacaaaactgcacgtcctgcgcatgtaatccagaacttaaagtataatttaaaaaaaaaaagaagaaaaaaagaaagaaaaatgagtcttcctattcaagaacagggaaccatcctctcacttcaaaagatccttctgaggtcattcatgaaataacttattactcaggtgtaggtggatataaaagggatattagattttatccaaagaatttttagcccagaagttaatataatatagaaattatttttctcatgatgcttgtttccataacatatataacattgtttaaaatgtgtacaataaaaataaaaagctatgtttcttaattttttttaaagcactaaaactttcagtaaagtaacgggaattatgagaggatcggaccagctaaagttttgtttgtcgcgctgctcatattgatgaccttgaggttgccacaccggctgctgcgggctgcagagggaacaaagcccagcgccctcggggacaggggtgagccgagagcaggaaagggggcctctccccgacccgccctcctccctcctctgccgggctccagttcctattacctgttcttctcgtctctgtcatccacgccactcttcggcagagaaaggatccgccgcatcgtctctgtccggtgtcggccggcagctctgcggagcctgtcgaaccccttgtccgggtcgtggcgcctgggctgggaggaggcgtggtcctcactctcactcccggcgcccgcgcccaccttcccggggctgctgaccgagccccagggcagctcgcccttccccctcctgaagcccgaggtcttcttcatggctccgtctaccggcttcggagacccgctggactttccgccgcctccggaaccctatatgaggaagcaaatcgcgtccgccacagcctccaaccaggaaactccgcgactctcagcccctcagaagagaaacggagacgcgccaagcaaagccgttacacggactgtgcacgcgcctccggtgtccctgcgcgtgacacaaatttggccccgagggagctccgtgtgctcagcctcagagccgtaggcgagagcgcctgtctgcatgagtgagcatatgggtgtttttgagtctgtgggtgtcacagagaggagatcgggagctgcctgctcacaggcactttgggaccccgaaagaaaaggctgtgccgagagagttcttccagtcagaggtttgggaatgggggagaagggagtgcccgg

SEQ ID NO: 10965 - DNA, 2300 bp, Homo sapien
gagcatcagagctgggtggaggatgagaggtgaccagatggttagggggacagctcctgaagtcaaggatcctacaggtggcagtgctctctgatccaggagcgctatatctgtctccatcttaaggagaaaacatcgtggagacaggatgtcactcctgatgtgttacaactaagagcaaaaatctaggactctccgaaggaataacagcacgtgcataggatgggccatggggctgccaggaaatataattagcaacaaaggggattttcatgatctattgagtataaaaggtaggatataaatggcatccacagcacaaactcaattttctgagatatattttatatgcacacgcaaaaaaaccagaaggaaatgtgagcagtgggagaatgggtaagtttcattgttccctttccatttctgagtttctaattttctgtggagagaaagcccatgatacatcatggtatttgagagggaggatcctaaaatctaagccctggagctaaatctgccatcgttgctgggggaaatcactccagcactctgcctcagtttgctcatccataaaatagaaacacatccttccctacctcaaaggagaacagaatctaacagcagcccacatgcatgccctccggctggtttatgctcttcctgcgcagtagggctgtctatgtccacagccttatgccctatgccctctaaaaccctgagtcaggtctgagctggagcattctgcagccctcctcctgcagcagccctgctggtttccaggcacataggccttggcggccagcagttccccctccggccacagcctgcatgcggtgacacagtccagtgtgcccagaatgcactgccggccagcacccgcagcagcccgcagctgcgcaattacacacagctgtctgggtgtggcgccccctgctccaccacctcttggaagtcttcctggatgcaccatgaatttcctgctggccagcaatgtcctcggcctttgggtgacccaagatgaagtcctggagggtgctgaccacacaaggaggtaggggcatggcagctgaatgcagccaggttgaaggcgatgggaggctgggagtgctcaggccgagatgctggtctcttggcagaggcaggccgcgagttccttggctgacatcatgcccatggccctgataggcccatgtccagtcttcatgacacctgggggatggagagtgtggtcaatgcacaggggtcagccagtccatgcccccgtggccacccatgcccagcctcaagccacctcctgctctctcccagtgagaccccagggtcagtgtagaccccattgcatgaaaactgggggatccagccgttaaggggcgtttgtagtgctccctcagtagttggtctccatgggctgggattggggtctaccaggcccactcccagcccactgtttacctcgtgggcctcagcttcctcctctgcagaaggggacggtgaccctgcccagcttagttccctctaagaacacctgacccctgagtgcccacatgggcagggtctgagtggcctgaggggtcagagcccagcgataggacccctgccctcatcccttacccctcccagcactgggccacgcaggaaggcagaactccccaaccccaacccctgtcaatcccgggagccttctcagctggacccagggccacccctctgcccaccggctcacacctgggccatgcaaggcagggtggatgcacctgcctggcccttgagcgtgtgggggagccactgtttcccacttcggaggctcagttctgaggtcgggattccgggcactcccttctcccccattcccaaacctctgactggaagaactctctcggcacagccttttctttcggggtcccaaagtgcctgtgagcaggcagctcccgatctcctctctgtgacacccacagactcaaaaacacccatatgctcactcatgcagacaggcgctctcgcctacggctctgaggctgagcacacggagctccctcggggccaaatttgtgtcacgcgcagggacaccggaggcgcgtgcacagtccgtgtaacggctttgcttggcgcgtctccgtttctcttctgaggggctgagagtcgcggagtttcctggttggaggctgtggcggacgcgatttgcttcctcatatagggttccggaggcggcggaaagtccagcgggtctccgaagccggtagacggagccatgaagaagacctcgggcttcaggagggggaagggcgagctgccctggggct

SEQ ID NO: 10966 - DNA, 2300 bp, Homo sapien
cggatttatgatttaaatgacaaacaagatttaaaatgtttgaagcaggctgggtgcattggctcatacctgtaatccaagcactttgggaggtcgaggtgggcggatcacttgaggtcaggagttcaagaccagcttagccaacatggtgaaaccctgtctccactaaaaatacaaaaaatttgccaggtgtggtaatcccagttattcgggaggctgaggcaggagaatcacttgaacctgggaggtggaggttgcagtgagccaagatcgcgccactgcactccatcctgggcaacagagggagactccatctcaaaaaataaagaaaaaagaaaaaaaaaggctgggcgtggtggctcatacctgtaatctcagcactttgggaggcgcaggcaggcacatcacgaggtcaggagactgagaccatcctggctaacacggtgaaaccctgtctctactaaaaatacaacaaattagccgggggtggtggcgggcgcctgtagtcccagctactcaggaggctgaggcaggagaatggcgtgaacccgggaggcggagcttgcagtgagccgagctggcgccactgcactccagcctgggtgacagagtgagactccgtctcaaaaagaaaaaaaaaagtttgaagcaaaatacaggagaatatctttatggctctggtgtaggcaaggatttaagatatcaaaagcataatctctgaataaatttgactatgttaaaatttagaacttcttttaagcaaaaaggcaaaaccaagagtgaaaagataagcatcaaacttggagaaatattcacatataatcactaaatggttagtattcagaaaatataaagaacttctgtagccaaaagtaccatttatgaatctacttattgatggatgttttctgaacttcttttgcccagaggaaaaatagtgcattaaaaagcttctgtccggccgggtatggtggctcacacctgtaatcccagcactttgggaggctgagataggtggatcacctgaggtcaggagtttgagaccagcctggccaacatggtgaaaccccatctctactaaaaatattaaaaacctagctgggcatggtcgtgggcacctgtaatcccagctactcaggaggctgaggcaggagaattgcttgaacccaggagacagaggttgcagtgagccaacacagtaccactgcactccagccttggcgacagagtgagactctggctcaaaaaaaaaacaaaaaacaaaaaaacacttctgtcccaaacaaacaaacaaacaaacaaacaaacttctaaaaatcaaatagaaggtggcctgggcacagtggctcacgcctgtaatcccagcactttgggaggctgaagtgggcagatcacctgaggtcagaagtttgagaccagcctggctaacaaggtgaaaccctgtctctactaaaaataaaaatttagctgggcatggtggcaggtgcctgtaatcccagctacttgggaggctgaggcaggagaatagcttgaacctggcaagtggaggttgcagtgagccaagatcgcgccactgcactccagcctgggtgacaagagcaaaactccatctcaaaaaaaaaaaaaaaaatcaagtagaagacaaccccccaaaatagtgggcaaatgccatagcatttcatacatttcatagaagaaaaaatataagtggctaataaagatataaaataatgctcagggaaatgcaaattaaaaccatattgaggtagcatttgtaccccttagatgcataacccttagaaggccaaaaaatcaaaagttagctggtattactttcacactgttggtggcactgtaaattggcaacccccttttggaattacataattatatttataatatatgttctatataattatataacatttatttcatattcatattaaacaagtatattcatgaatatataaataattgtgtatatgtattgtatatatttatatatgtaattacataatttatgaaaatcaatcctgttcctggagaacatacccccccaaaaaaacctcttgcagataaggactgggaagcaagtacagaaatgatcgaagcagtacaaatcaggggagaacgtgcccaagacctggagaactgataataaattgtggtttatccttgcaatggaacactatatggaagtgaaaatgattgaaatagagctatacacatcatcacagacaaatttcagaaacaacgctgagtgaaaaagtaagttgcagcagaatacatgcaatataata

SEQ ID NO: 10967 - DNA, 2300 bp, Homo sapien
actggaattacaggtatgagtcaccatgcctgacagacagacagacatatatatatatgtgtgtgtgttttttttgagacgaggtcacactctgtcacccaggttggagtgcagaggcacaatctcaggtcactgcaacctttgcctcccaggctcaagggatcctcccacctcagcctccctagtagctggggccactggcatgagccaccacgcccagccaattttttgtatttttggaagagacagagttttgccatgttgcccagcctggtcacgtactcctgagcgcagacgatcctcccacctcagcctcccaaagttctgggattactggtgtgagccaccgtgcccggccttatgtattttttaattgaaaactttcatcatgaatatgtgtccttaaattttatttaaaaacacataaaagcagagaatagtataataaacctgttaagatttaaaatattttaaatgttgccatgtttttcatctcaaatcgttacaaatctacaacaatcttctcctccctctttttcctttaactggaagaaacagtcagttgtccaataggatatcccacattgtggatttgtctgattgtttccttttcctctttcccctttattctttcctataactggaaattccacttaaaggcctgagtatattaaggatcaacatttttgttaacagaaagcatacagtctggttgttccacttgtagtaatgctaacattgatcagtgggctttcaaatgtgaagccagatttcccctacaaccaacaaatgatctgtggatctatagtgccttgtgaatatccagttcctcatcatcaccgtttcatataatgctttgttccttagatcttttgcacacattattgtgatttttctaacttttcttctatatttatcatctggaattctgtaaaaatgagctttctcccatcaactaattatatgggtaatatttttacagtttttaaaatacataattgttagtattggtgtgtgtcttcctgggactccttcctgtgggtcctaggaaggcatactacactctactgatctttgtattcctgttactaatgcctactatagtgatggtacataggatgtatttaataagctcaacggtatatcatttactatctgattacagttgagtgaaaaaaaaaaaatcattgagccaactcaaagatctggtgatcctttccaaaaggatttgccggaccatagattgttcttcagttaaagctcagagatttgacgatgaggctcatcttacaaattaagtccactgttcaaagaaacaaaaatagaaagcttgatgccataaagacttcagttgcacatccgaaattcaaagtgagaaaaatatattatccttaaatgtattttcctagcagtatttcgctaactttgggtggtgtaatttttgtcaactcttcacaacctgaacaaatacttttaatcacgtccttctccgatattttcaatgaaaaggcaaagggcgctagaacttggaaaacggatgctttttaggccgctaaatttccttgtctttaaacaacactcattaaaatataagagcactgtgagttatgtttgattggatcatccacacgtgctaaacctatcaaaatcatatatgacttctgggaagccgttctgcttggctggggtttcggcagcagcagggttccctttcctagaaagtccccagctctggccctaccgacgtccgcacctgaggcttccctgctgggggatcaggcactgtcagctcctcggggccgccctcagccctgggacgccctccgccccaacgaccctcctcctccccagcgtcgcgccactcggcggcctcgccggctcccctcccacccttgaccttttccgccacagctacagaacgcccaagcgctcttccgcctagggtgccctccctgccccgcccacctgcgtcccgcgggctcagcggtgttacgccgcgcccgccttaatatgattggtttttgttcctgtcactctaggatccaagcccgccattggtcggcttccgttacgccgctgatgtggagtagggccgagcgcggaacgcgaggggctgctggggtgtttgtcgcagcgggttttcctcggcggtttgcggagctgctaggatggagcaggttgcggagggagcaagggtgaccgcagtccctgtgtcagctgccgacagcactgaggagttggccgaagtcgaagaaggagttggagtagtgggcgaagataatgacgcagccgcgagagga

SEQ ID NO: 10968 - DNA, 2300 bp, Homo sapien
aactctgtctcaaaaaaaaaaaaaaaaaaaaaggcctgtatggagaaaattttaaagatttcttgattgcttgaaagttactaaaatgtatatatgccatttttattagaaaacagttttagggtccaggcacggtggttcacgcctgtaatcctagcagtttgggaggctgaggcaggcagatcatttgaggtcagaagttcgagaccagcctggctaacatggtgaaaccccatctctactacaaaatacaaaaattagccaggcagaattttttttgcatgagcaaaaaaatagcttttttttttttgcgcttgagcaaaacatagctcatgcaatttcagctactcaggaggccaaggcacagaaatcacatgaacctgggaggtggaggttgcagtgagccgagatggcgccactgcactccagcctggggacagagcaagactccgtctcaaaaaaaaaagaaaagaaaatcaagcatatcaggtccagaggcaagacccacacttgtcaggaatgaacatgggttttgaaccagtttgctttgttagagaccacaatctgagctgcagctcagcctttccagtggttctggtctaggcatgctctctgttcttacagcagtcctgtgagtttggtggtattatctcagttcataaagacctcatctgttctgcttccacaatctttccacattgcttcctcagtggtgggatgggtcatggggcatagcaggtgggggcttcatgggggactcagacacctgaataagaagactggctctgccactcactgctgtgtgtctctgagcaaaccctggagcctctcccagcctctctcatctgtaacatgtctccccttacaggttattgtgtatggaggaaataaatccattcatgtaaataagttaacatgtcttatgattgctagtggctttcactattaccattgctgatagacctgggatgctgcaccaggatggacagcccagaggctgtgctgtttctctgctgtcagctctcagagttagcagaagtgttagtttgagttgagggctttggaaaagttcttcatttattgcatatgttttacaaactttttttctgtggccaggccatctgcctaacatcatctatatagtttgaggaactggtttcaggtgaaaatcctttaactctaccatcaagtagttctgtttttcacttgtaaaaaaagcacaaaaccattgtgaattactcccaaatgacctgcactgaagtctgtgtgattgattgcagtggtgataaaggctgaacacatgcgtcctcagtgttcccgtgcctgtaggtcctgtcggggaagactctagcaatacctcacgggggtgggtgtgggccagggcactgggagcaggaggcttccagatgtaggggcctgtgggagtctggaaggatccataagcagtgcctttgactcacatgctgggatagctcacatgctgagaatggctttatctgtacatggttggaagcagtgtatgtccaagaagaatggtgtaagggagaagagtcacattagaattgcatttcctcttaccagatccccgatccctccttcctttgagctacttagtcttaaaattcctcctttgctattttacaatgacagcttacctatttatctttatgccttcagagtaccatggcttctaaatgtggatcgttcatattacttcccaaagaaaattggggattttatcaattaaaagaccccattatacaatgacttgtgttaaaagtgtacataaagctttggttaagacaccacaaatttcataaacaacattgtgggttttttatacttcagacaaatgtatgttaacaaggctattgtgtgttccagatggcaggcagcagattctgagtttgggcatggacctgcagttggaatggatgaagttggaagatttccaaaagcaccttgatgggaaagatgagaattttgctgcaacagatgcaattccaagtagtgagtagttttggaaatattgaaatccctttcacaaatctagatttataaaatctaacttattttttctttcattttagatgtgttaagggatgctgtgaaaaatggggattatattactgtaaaagttgcacttaattcaaatgaagaatataacctggaccaagaggtaatatgtcgttgaaaaatctcatgaaaggaaaatggaaagtaacacttgaaagaattcagtttaacttttcatttattttaattacaaaaggctgggcgtggtggtgcacacctgtaat

SEQ ID NO: 10969 - DNA, 2300 bp, Homo sapien
catctcaaaaaaaaaaaaaataatgcacgttcactttgtaaaataaaaaaattgtagaaccctataaatgtacaattatagtccctttaattccaaccccctcccctctaaaagtgatggtttggtttggttatggtctacctgttttgtatgtggtttaccctctgccactcttgagagcgtagagtgagaccattttcctgtggtcatttgtgtttctttgatggttgtcccatttacaacaatggtccatctctcctgttgtagctggggatttttcatactgatatgtatggattttttttttttttttttttttttgagacagtgtctcgctctgttgcccaggctggagtgcagtggtgtgatctcagctcactgcaagctccgcctcccgggttcacgccattctcctgcctcagcctcccgagtagctggactacagttgcctgccacctcgcccggctaattttttgtatttttttttttttagtagagacggggtttcaccatgttagccaggatggtctcgatctcctgaccttgtgatctgcctgcctccgcctcccaaagtgctgggattacaggcgtgagccaccgcgcctggccacgtatggatttttttaatggaagcatattgaccctttctccctagattttaggtttgtgtttgagtcttgtattgcttgaagatttttagttttaggcaatcatatctgttgatcttttacatttatggcttttgggtatcttgtcttgcttagaaaatatttttatattctttagttttttagcttagctgtggattttttaggtttaatcctttgggattacaattcacaaaattattgggcttttgattaaaattgcatgaaataatatagattgagaattgacatttactttttgcatcttctgtctaggaacatggtaattctacattcactcagctcttcatttatatccttaagcaaagttctatgggttttttcattcatatagacgttgcacatttcctatagatgtatgcctatatgttttataatggtcattagagtcttttttcatttacattttgttttctaactggttattgcttgtcgatggtaaagctgtggatgtctttgtacacataagtgtgtgtaactccagtcatttaatgaaattcttatagtttttaagttacttgttttggattttctaggtagaaaatttgatcgtatgccccccaaaaattcactgttcattttgtatggtgcaaacttttcatgtgcctttaggatttaatacacaaaacaaaaagaagatacaaaaatgagagctgggcgtggtggcatgcacctgtaatcccatctacttgaggctgtggcaggaggaatgcttgagcccaggagtttgagaccagcctgggctgacatagcaacaccgtctcaataaaaaagaaagaaagaaaaacaacaccaacaaaaaaaattgaagcattccttggagatattgtgggtttggttccagactgttggaataaagcgagtcacacaaatttgttggtttcctggtgcatataaaatttaggtttacactatactgtagtctaaatgtgaatagcattacatcttttaaaaaacctatatatcttaatttacaacactttattgctaaaaaatgctgacacaacaacacaaaatgagcacatgctgtggggtaatgatgtgaataaacgtgcttgtggcagggttaccacaaaccttccctttgtaaaaaacacagtccctgtgaagtgcagtaaagcaaagctcagtgaaacaaggtaggcctatagaggaaagttgtaaaattttatgcaaacattcatatgtgaaaagatactctaaaagctagtagcttctgatggttgggatattttagtgaaaatcctaagtagatgcctaaatcagtgcctattagtgatttcacattgaaacatctcgagtgagaagacttggttctgaaattgttctgactaaagattaacacgttttttatttaacaaaccaacacaggattccagtggaatgacactggtgatgcttgccgccgccggagggcaggacgacctcctgcgactcctcatcacaaaaggcgcgaaagtgaacggtcggcagaagaacgggaccaccgccctcattcatgctgcagagaaggtttgtggcttcttatgcatcagtttcagagctttcatggtattcctgccgatggactgagaggatctctttggtagtgaaatatagcagtcacatggtcacatcgcttttttttttttt

SEQ ID NO: 10970 - DNA, 2300 bp, Homo sapien
tagagtgtcactctgtcacccaggctggagtgcagtggcttgatcatagctcactgcagccttgagctcctgggctcaagtgattctcccatctcagcctcccaagtagccaggacgacctgtgtgtgccaccgcactcagctaatttttacattttttgtagagtcatcttgctatgttgcccacgctggtctcaaactcttgacctcaagcagtcctcctgtgtcagcttcccaaagtgctgggattacaggcatgagccaccgtgcccggccttgtattttaatgttttattctttaagtcatagaaaagtatgtgtggtattgactgtttacatttctgactatgtgaaaaatgtctccattcaatcttagggggtggttagaggggcctttttcactcgcttttgtttaaatgttttggcatgaggataaaatcccccgttaatgtgtgggtagttcttagtgacccaattttattctgaaattaaagacagaccacctgtgttcaagatggtgtcatatagttgttacagttatacttttaggatttcacttaagggagaccttttcttttaatttgattattggtttttttttcatattaggcagtatcactttgatggagatgctgttcttcagaatgaggaagtattaagtgctgtctttgtcttagctttctaggacttcgcatattttgaaatccaaattatgagtatcattgaatagatgtgtagtagctcattgtgatggttttattagggttgattacaatgcaatgtacaatcagccttgtcactttttttgtaagaccagtttaaacagaactctagtaatttttcaaatattgaatagaagtaataagaaaaaatgacccttttaaaaattaaatattgggccgggcatggtggctcacacctataatcccagcactttgggaggctgaggctggtggatcacctggggtcaggagttcgagagcagcctggccaacatggtgaaaccctatctctactaaaaatacaaaaattagctgggcgcggtagtgtgcgcctgtagtcccggctacttgggcagctgaggcaggaggatcatttgaacctgggaggtgaaggttgcagtgagtcgagaacaccccactgtattgtagcctgggtgacagagtgagactccacctcaataaataaatacataaaaatttaaaaattgaaattaaatattgacaactaaaacttggctaaattctggaaattacttttctaggttttagtaatggtttataaattgagtattcacatatttgagaagctgagaatgcttaaagtttttagtaatcctgatgttattgagaaggattaagtgacactgttgtccagtttggtttatggttctgtttatttttattgtcagcctttactgtaccaaaggcataaacagttgttcctccatttcctgggaggttgcttctgcccccatgaatatcaaaatctgcagatcctgaagttcctgatataaaatgctgtagtatttcacatatcccatgtacatcctcctgtatactttaaattatatgttgcttataatacctcatacagtgtaaatgctatggagctatattgtttagggaataatgacaaggaaaaaagtctatacatgttcagtatagacacaaccactcggggcctaactacattttcttttcttcctttttttttgagaaagggtcttgctctgtagcccaggctggagcacagtggtgtgatctcagctcacttcaacctccacatcgtgggctcaaacgatccttctgcttcagcctgccaattagttgggactacaggcatgtaccaccacgtgtggctaatttttgtatttttttgtagagacgggactttgccatgttgtctaggctcttctcaaactcctggactaaagtgatctgcccacctcagcctctcaaagtgctgggattacaggcgtgagccactgcacctggcttctaactgcattttcaatccatggtgaatataaggatacagagtctataaattcagagcttgcatacaagagtagatagaatgccaattgctggtggaaatatataaaaaataattttttgttcatttatgccatgccttgttttaaaaaatacttacaggacaggcatgttggctcacacctgtattcctagcactttgggaagccaaggctggaggattgcctgcgctcaggagttccatacgagcttggacaacatggcaaaatcacatctctacaaaaaatacaactagctgggtgtg

SEQ ID NO: 10971 - DNA, 2300 bp, Homo sapien
ctgaggcaggagaatcacttgaacccgggaggcagaggttgcagtgagccgagattgtgccactacactccagcctgggcaagaatgaaactccgtctcaaaaaaaaaaaaaaaaaggatttgggtggtgactgaggactatggtaaatagagattagtgttgattgtgttttatttttattcttttgggtagttaaaaaaatgtttgttcaaagtataacttaagtacagtaacattcaccctttttttttgtctcttgttgcccaagctggagtgaaatggcaccattcagctcactgcaacctccgccttccgagttcaagcgattctcctgcctctgcctcctgaatagctgggactacaggcttgcaccaacatgcctggttaattttttgtaattttaggagaaacggggtttcaccatgttagccaggctggtctccaactcctgacctcagttggtccgcctgccttggcctccaaagtggtgggattacaggtgtgagtcactgagcccggccaacattcacccttttagtgcacagttagacttagttttgacaaacgcatacaattgtgtagtcatcaccacaatcaagatttagttccatcattccaaaagcttccgagtgttaccatgtggttaactgccctccacatcccagtccctggcaaccaccaatctgtgttctgcagcaatagttttgccttttccagaatgttatatacacagtttgtaaccttttgagtcagggcattgcttgtatcagttcatggtgttgcttgtatcagtagtttattcctttttattgctgagtagtatcctgttatgtggacgtaccactgtttatccattcaccagtggaaggacatttgaattgtttcttttgtttttgttttgaggacaaataaagcccctgtaaacatttgcatacagatttttgtgggaacacaagttttcatttcacttgggtaaatacttagaaatgggattgctattgtaaagtaagcaaatgtcaagcttcatgagatactgctgaactgttttgcatagtgactgagttcatttcttttcaacattcattaaggagtcaccatgtgccaggagcatagagttgagtagttgttagagaatgtggcctccaaatctgaaatactggctatctggccctttacagaaaaagtttgttgacccttgtcataagactatggcccataagagctcatggcctgattatactaattttataagcaatttcacggagtcctctgaggccaataatcaacagcacagttattttatagaattgtattgtttaactaggaaatataaaaaccttgctcttgaaacagaaataaagatttttaaaaattactgggaggtatcttgttattgaatgctacatccaaaatatgcaagtttttatttttccacaatcattgaaaattgagcttgatatggccgggcgcggcggctcacgcctgtaatcccaacactttgggagtccgaggcgggtggatcacaaggtcaggagtttgagaccagccttaccaacatggtgaacccgtctctactaaaaatacaaaaaaattagccaggcgtggtggtgcgcacctgtaatctcagctactcaggaggctgaggcaggagaattgcttgaacccagaaggcggaggttgcagtgagccgagatcgcgccattgcactccagtctgggcgacagagggagactccgtctcaaaaaacaaaacaaaacaaaacaaaacaaaacaaaacaaaacaaaattgagcttgatatctaaaagggtaaggatgtttactcaagtcattgtattttcacacactgctgcacacatcacataatttgtcccaagagtacagccaacaacagttttgatattttagcaggatgggaaaggacgtcttcaccctcctaggagatttgtcgattgcacgcgcagcgttatgcgcatgcgcggtcagtcaacggtccgttggtgccgcgagtgcgcaggcgcgtcgttccggcgccggctttggcggaggggtgggacttgcaccggcgtctcttcttctaactgcagtttgtggcagcgccattttgaatgtgcagctgcagcgggcgtgagttgggggaggacgggttgccgactcgcctacctagcggtctcttgattgtcgatattttgttggcataggtttatgtagagacgtatacatatatatagacacactgtctataaatctaggcctgtatccggtgtccgaggcgaactcagtaagatgatgttaagagga

SEQ ID NO: 10972 - DNA, 2300 bp, Homo sapien
tggtgttaaaagcattaagtgaatagctgacagagaaagggcatttgtactgtaccaaaatgaacacatagatcactgtctagtagcaaaaaaaaaaaacccgaaaaaacaaaaacaaacattaacttcctaacagagagagatcaggccactcagattcggtggtcaatcttagaattaggaatagtttgacaactagtttatgttatctcctcgtgtgatgctagctggaggactgtcagggtacataaataacagtcttcctcaaatacaaggcaaatatcaacgtcaaaacaacagattattcagtagtgtttctttttaatccaacagtaaaaaagtttttccaatctactggaaaagaaaaaattgttaaattcaaggcacttaaaagagagctaactttaaatcttgttctggaacttgagagagttccagtggtataaatgtcagcactccccgtgccttcccagggactaccatggcttggctctggggacaggggcacccaagcaattagcttgaaggccaaggccttcaagataacacaaaggcaaatccctcaggaagaacaccctactactgcactaattatattagacagcaaagcggggtaaaaaaaaaaaaacaactcacaatggagatatttccttcttaatttctgccaaagcctcacgacataggcttgaaggtgattcctggtcctagaatgagaattgaaaaccaatttcggtacaaccaatctggatgcacaaccaactcaacaccgtgaggtggcaaaggggtaagaggccaaggagttcctgggctctgctaccctcccccaccctaatgttaccgagaaactaagttgaaaaaaaagaactataggaaccgcaacgacgagacaaagctaaaagtgcttcgtccaactgcagtactggggatgcagtgggctcggggatccgaggcctgctcccaggacgggagagggaagggtaaacgtcgtctcgacgccagcaagggatttgtattccctcctaaatttgcccacccagcgtcatctctgtcactccaagcaccatttcagaggtaacgggcggcgcgcatcacctctgggcccacagttgcctcaagaagttgccctggggccccagcagtcgacgacagggccccagatccgccattaaactcgcccagatcagcagcaaagagtaaaagccgcgcagcgcctgggaaaagatgagcgaaggaggggacccagcggggcagaggcagaagccctcgcccgaaaaacctggggacctcggctccggcggcagggtggcagcgcggtcctgacagcgaagacccggccggggcgcccctccctcgcccaacccgccccccgccactatgcggcaggagagaaagaaaaatgccccgcgacctccccgggcggccggcaacccgccccgccaccccgcctccccgccggccccgcgacctccgccgctggcgaccgcctcacccaaccctcccggcctcgctcgcactctcccagcccctcaggccggacgcaaaagcgccggtgacaggagggcagccccgagctgccctcgaggccccgaagcggcaacggcgacggcggccgcgccgcggggtattaatcccgggtcggtgggagcctccggaggctgctctcacccatctccgcctccccactcacctcggcctccgcctcctcctccggaggctgcgctgctcccagccacccccactctcagcggccctggactggaaagacagcggggataagcgtcacccggttctggctgcggctgcgcggaacgaacaagcccaccccgcttcggcgacaagcacaactccgcgaggtccagtcccggcttttcgcgctggtgaggaggcggagaagcaggggacggcgcagcagagcccgaggaggccccaccctccgtgcgctcgttggctggcgagggagacgagcctgggcgccttgggcacgcccattggctccgacggccgtccttcagggcgccccctcggtggggtggccgaagagctgtccgtcaggtgcgggccacacccgcggccctgcagttccactcccgcctgccagccctcaactcccggtcgggttgtctccccgccggtctcccgcccccagctaccgggtccgccagggtcaggagcccgagattcgccgcccgtcgtagcggcccgcttcggcccctcggggcccggggctctccgggacctacacagcccgggagactccggcggggctgcctgccctcgcccgagcccgggggcccaagctg

SEQ ID NO: 10973 - DNA, 2300 bp, Homo sapien
gagcttaccatttaaagtttctgtcagaccttcaaattttctctatggagcccttctccacgaactcagggtagtcagtgcttgtaatttacagcagtcattaaaatgatgacattacatgtaattcacttatttccaaagagtaactgaggacctaaaaaatgtaggtgatattaggcatatccatgacatacagcactatgcaatatgcaaaggcttacacagaactctcatcaatccgtgaacatgcttttgtcttagatcaagcttgtccaacctgcagcccttgggggttgcatgcggcccaggacggctttgaatgcagcccaacacatatttgtaaattttcttaaaacgttatgagatttttttggcgttttggttttttcgtttgttttagctcatcagctattgttactgttagcgtattttatgtgtggcccaagccaattcttccaatgtggccccgggaagccaaaagattggccacccctgcattagatggttaacgtctgattttcattgaataaacctgtgcctttaccataccacagaagtaaaacggggctcaatgtgttttttaaaaatcacattatctgtatttccagacataaggtaagtatttcaccaactttcatccaaactaacatcctcaattgtaatcccactaagaaccgccagggcgagacgaaagcggaatcgcttccatctttacgtggagtccgggaaatggttcagcaccatgacatccgccgaagacgtaggtgtagacgaggaacaaaagagaagacccctcgtggaggtggcctgtggggcccgccctcaccgggcgccatctgtccctgattctgctccccgcaggggccgcagcgggtgcgccccgcgatagagcgggctgtggagggagcctccatggagtctccatcaaccattccggaccaggagacggtggcaggcagtaaaaaggcctaggcagggccagcgccccgggctgctagcacaggacggcggcgcccagggacgccccagggcaggcctcagcccctccaacccgcgagagcccagctccaagggagcctgcagctccctccatcttggttgatggaggcggggagctgcgtctgggtgtctccaccgtcgcgcccgaccagtactgccccgcggacgcagacgccggcagctggggctgttcccttgtccgaatggcagagcccagtcggggcttccgggacaagtcctggccccacggggtttggttttgaggggtcccaagttcccacagttgtcccgacaaaatggaggacgtcgtctcctcctgctgcagccatggcgggaggtgggggactattccccacggggcgcggcgagggtggaagggcctccactgaccgcagcgcactcaagactccagttcaaccgcggccccgaaagctcacttggccccgctccagcacctccccggcctcgcccctcttgggggccttcaaggaactggacagggagggcgctggggcatccaggccgccgctctcctcgagcagaggcgttgggagccgctgccgcagcttgggcccccgggctcgggcgagggcaggcagccccgccggagtctcccgggctgtgtaggtcccggagagccccgggccccgaggggccgaagcgggccgctacgacgggcggcgaatctcgggctcctgaccctggcggacccggtagctgggggcgggagaccggcggggagacaacccgaccgggagttgagggctggcaggcgggagtggaactgcagggccgcgggtgtggcccgcacctgacggacagctcttcggccaccccaccgagggggcgccctgaaggacggccgtcggagccaatgggcgtgcccaaggcgcccaggctcgtctccctcgccagccaacgagcgcacggagggtggggcctcctcgggctctgctgcgccgtcccctgcttctccgcctcctcaccagcgcgaaaagccgggactggacctcgcggagttgtgcttgtcgccgaagcggggtgggcttgttcgttccgcgcagccgcagccagaaccgggtgacgcttatccccgctgtctttccagtccagggccgctgagagtgggggtggctgggagcagcgcagcctccggaggaggaggcggaggccgaggtgagtggggaggcggagatgggtgagagcagcctccggaggctcccaccgacccgggattaataccccgcggcgcggccgccgtcgccgttgccgcttcggggcctcgagggcagctcggggct

SEQ ID NO: 10974 - DNA, 2300 bp, Homo sapien
tgaacagttgcatggacagatgtacctgaatgaatttaaaaagtaaataataaatactataattagcacagttgctcattagttatataaaacagcaataacactagggaattagtagcagtatagagctccaactgaacagtacgtggcaacccaatctatcatttatcacagagcttatttggaagtattagtctactttagtcttctaaatgtaaattcaatgagctgaagctacttcaataggacctggcagcagaaaaggaatgatgtaagttttcaccaaattattacaatttggtagtagaggatgtttgttttgatgatagtggctgtttttgttgtgatgtttctgttgtgatgatagtttttcagtctaaaccagtactgtgtaatatgaaatcttaagaggctattttagtgtatttaaaactaaaaaattttagttacaaagtttcctaaaaattagtgatactttttgaaaagctggttcaagtacattttattaatttttttcaataaaagagaacagtgtattcaaggtatttagtacaaggtggaaagcctacttgatttattttttttaatgagtgaatgaattcaacttctactagattatcctctgtaagttgcgtctattagtttacacatcagtctttcacgggtgattaacctcactaaaaacttcatgttcatcaatattgtgttgaacttgaaactgtattatcatatatgtttattaataggcaatggtgtcagataatcgtgaaattgagaagtcgcccatccatttgggtgggaaaataaccaacatcctcagttgtaatcccactaagaaccgccagggcgagacgaaagcgacatcgcttccatctttacgtgagtcttggaaatggttcagcaccatgacgtccgccgaagacgtaggtgtagacgaggaacaaaagagaagacccctcgtggaggtggcctgtggggcccgccctcctcgggcgcctgtcgtcgtctgtccctgactccgctccccccggcggccgcagcgagtgcgccccgcgatgcagcgggctgtggagggagcctccatggagtctccatcaaccattgaggaccaggagacggtggcaggcggtagagaggcctgggcagggccagcgccccgggctgcggagcacaggacggcggcgcccaaggacgccccagggcaggcctcagcccctccaaccggtgggagcccagctccaggggagcccgcagctccctccatcttggttgatggaggcggggagctgcgtctgggtctctccaccgtcgtgcccgtcccctgtggccccgcggacgcagacgccagcagccggggttgttcccttggccgaatggcagagtccagttggggcttcccgaggacaagtttcccggccccacggggtttggtttttagggggtcccaagttcccacagtcgttccgacaaaatggaggacgtcgtctcctcctgctgcagccatggcgggaggtgggggactattccccacggggcgcggcgagggtggaagggcctccactgcccccagcgcggtcgggattccagttcacccgcggtcccgaaagcccactcggacccgctccagcgcctccccggcctcgcccctcgcaggggccttcaagcaactggacagggagggcgttggggcatcgaggccgcggctctcctcgggcagaggcgttgggagccgctgccgcggcctgggcgcccgggctcgggcgagggcaggcggccccgccggagtctcccgggctgtgtaggtcccggagagccccgggccccgaggagccgaagcgggttcggtacggcgggcagcgaatctcgggctcctgaccctggcagacccggtgggtgggggcgggggaccggcggggaggggacccggccaggagtcgagggccggcggaggcgggagtggaacggcagggccgggggagtggcccgcacctgacggacagcccttcggaccaccctaccgagggggggccctgaaggacggccgtcggagccaatgggcgtgcccgaagcgctccggccagccttccccgtcagccaatgagcgcgcggagggcggggcctccccgggctcggccgcgccgccgcctcctccgcctcctcctcctcaccagcgctaaagccgggactggaccgagcggagttgtgcgtgtcgccgaaggggggtgggccgggggaggggaggttcgttccgcggagccccagccagaaccgggtgaggcttatccccgctgtctttccag

SEQ ID NO: 10975 - DNA, 2300 bp, Homo sapien
gtaagtcttcataaggatttacctctgccattttgctgttttctgcatgtcttatgttttttcctttccatttcttttttttttttttgagacggagtctttctttgtcacccgggctggagtgcagtggcgcgatctcggctcactgcaagccctgcctcccgggttcacgccattctcctgcctcagcctcctcagtagctgggactaccgtccgccaccacgcctggctaatttttttgtattcttagtagagacggggtttcactgtgttagccaggatggtctcgatctcctgaccttgtggtccacccacctcagcctcccaaagtgctgggattacagtcatgagccaccgcgcccagccaaccctttccatttcttctattattgctttttatgttaaatttttctctagtgtaccatttgattcccttcttttctatatattttaaaagttttttttttttttgagacggggtcttgctgtgtcgcccaggctggagtgcagtggcacaatctcggctcactgcaagccccgcctcccgggttcatgccattatcctgcctcagcctcctgagcagctgtgactacaggtgcccaccaccacgcctggctaatgtttttgtatttttagtagagacggggtttcatcgagtcaggcaggatggtcttgaactcctgacctagtgatcctcccaccttggcctcccaaagttctgggattacaggtgtgagccactgcacccagcctaaaagtattttttaaatggttaccttggggattaaaatagccatatacccttccaaaaatggatagaaccaccaaacagaagactaaatttataataacatattgcaaataacttggtttcagaagtatacaaacactctactgctgtacttctctgtcctcttcctttgtaatattattgtcatagattacatctgtatatattgtgtgctcattaatataaatttaaaattactgttttttgggttttttttttgagacgaagttttgctcttgttgcccaggctggagggcaatggtgcaatcttggctcaccacaacgtccgcctcctgggttcaagtgattctcctgcctcagcctgccgagtagctgggattacaggcatgtgccaccacgccagctaattttgtatttttagtagagacggggtttcttcatgttggtcaggctggtctgaaactcccgacctcaggtgatctgccttccttggcctcccaaagtgctgggattacaggtgtgagccaccgttcccagcctaaaattactgttttgtgcctttatcttttatatcatataaaaaaattaattataaacctaaagtacattaccgctgacttttctgttttatctctttagttaccttcactcatatgctttatttcttcttaccatgttgagttactcttcagtgttttatcatttttgctggaagaactctcttcagcatttcatgtcgggcaggtctgcaggaaatgaacttctttctgcttttgcttatttggaaatatcttagtttcaccttatttttggagggatgttttgctgcgtatagaattcttggctgacagatttttttcccccctctttctgttagcactttaaatatgtcatcccactgacttctggcttctatagtttctgatgaaaaaatgctgataatgataatctaaataatctaatgaggattccttgaaccagatgagtctcttcttttttgctgctttcaaaatttctgctctctttgaggtccacaatgtgtcttgacatggatatctttgagtttatcctgcttttggagtttgttgagcttcttggatatgtatatttatcatcatcatattagggcagttttcagccattgtttcttcaaatgttttgttaactttggaaatctgattcccccagtctttatagatcgcagattttttacttgttgagggatagagctgttcacgtgactttttctgcacttttttttttttttttttgcccagtttatgtttcttgtttgtaggcactggagtttctcttccattatctgtgtggtgaggtactgacctgacaaaaatttccttaaatgtctgcagagaaaagagaaaatggtcatgtctcagtaaatctgtgatagatgctacagggaaagctgctcctgcccagaaggctgaaaccaaggaagtgtctgctccagaccagcccaaacacacaatcccaaattttggtaaaagttcctatcagccctgtgtacagccagctgtgccaagaac

SEQ ID NO: 10976 - DNA, 2300 bp, Homo sapien
aagtgctataggacttccagctacaaatcctgaaaacacggagtggctgtgataatacgactagccaacatcacacagtaattttgcacataaggagaactaaatcaaagaaaacaaggaaaagaaagttgagcctataatcgtgatacaggcactaaaatctcaggtgacatttttcaatgggggaaagtcagtcaacttccgatctccaaaccatctttactagcgagcttcccacaatggttctagaaccttccttcattccaacccaaccaggattccaacagactcataaacaccacagcctttgagaaattaaagggagaacccaccaaccggcgccccactccccaccccaagtcacctctggctcaaccaagatgcgctcaggccaagaaagctgccccaccccacaggctttgcctgtcatttttaacaagccgactcagcacatctctcagatgggccatgcaaggcttttcgcagctcctggggctttgcctcttcatgagcagacactccctcttagactaagacctggagctggaaagtaggtggtaaccgcggtacaaaactcacgctcgtccctgcagaaactgcctaggtcggcccatggccacggggcgccaatttttcaaggaaaagtcaatgctaataatggtggcaatcacgggaaatccattctgaggccagatctgacttgtcaggattaatcatcatttccacttaacttcgaactgacctgggtaaaaacgtgagcgcgaggggaccaggctgcacctctgacctggctcccctctgcaaaaatcgcgaagtgggtgcccgaggtggggcgggggttgggggagacctccccgggagtccccacccagcctgctctgcacatcttagtccctcatccgcttgcgctgtgcaaatctgtcttctgtcatttgtatcgcaagacatcaaaatccccaaccaaatgcaaatactgagacctcataatctgagacaaagtttcacggtatccagaaagcccccagcaggtgtgcagtgcagagccagccccccagcggtcttccgcagaatcctatcagtttccccctttcgtgctgtgtgcatcgagcaggaaggggcttggcaggttttacctgccctctttcctttctgaaaagtctgggcctcctcaccccgaaaggagtcacctccttgcagttccccagttgcgaaaagaggaggaagttggctgggccgggggccgcggggggcaccctccgcagatggcgggacccccctgccggccatggcaaaaacgaggcttgtctctcccaccgcccccaaccttagtccttggcacattgttgaaagtaattgaataaaatcggaaattcgagaaggcgttcgttcggattggtgagattttgaggggagaaagaagcggggacttcgccggcaccagcggcgccccctcctcggccaccgttaacccccattccagagggcactgccccgccacccagcctaggtccccctgcgagagcctcgcgggcccgcgcagcctccgcgactcgaacagatcttcagtccttggaggaatgcctgtttctctaacaataaaaaattaaagaagcgctcataaatgccaagtcctctcgcactatgcggagtacagaggacaacgaccacagccatccctgaaccccgcccacggcacagcgccggagccggggtctggggcgccgcttcctggggggtcccgactctcagccgcccccgcttcacccgggccgccaaggggctgggggaggcggcgctcggggtaaccgggggagactcagggcgctgggggcacttggggaactcatgggggctcaaaggaactaggagatcgggacctcgaaggggacttggggggttcggggctttcgggggcggtcgggggttcgcggacccgggaagctctgaggacccagaggccgggcgcgctccgcccgcggcgccgccccctccgtaactttcccagtctccgagggaagaggcggggtgtggggtgcggttaaaaggcgccacggcgggagacaggtgttgcggccccgcagcgcccgcgcgctcctctccccgactcggagcccctcggcggcgcccggcccaggacccgcctaggagcgcaggagccccagcgcagagaccccaacgccgagacccccgccccggccccgccgcgcttcctcccgacgcaggtgagcccgccggccccggactgcccggccaggaacctggcgcggggagggaccgcgagacccagagcggttgcccgg

SEQ ID NO: 10977 - DNA, 2300 bp, Homo sapien
tgactgaaaagcggggaggcaatgtggtctctcctggtgcactgtcccgaggaaggcctgctccgcttccccggaggagtcttcaaaggatggaggtaattaataaaaacaacccctgtacctcctctaagtggtcattaattaataaagaacctccaggctcctataggagaggtctgtgcaccccgcgggctatgagaaggctggatcacccagaaagactgaggatgtgtcctggcaaaaacacagcctgcccctcacactgctccccacgggtgcactagggaggaagagttccctcgagggcctgagcaggcgccccacacctgcacccgtgcagagggggctgggcccgccctctgcgctcccgagggagagccctaccccctgcatccccggtaccccgttccctccaagggccggaaagagggccccgcgcactgtgcacttcttaggggtcccccaccctgcgcccccgccacgggaaaaaggtccccgctctgcgcatccggccccggagggacagccccggtcctgcactccttgctcctcagggggacggtccgcgcccagcggctagtgcgccccgggtaggtgggggcggggggctcgtcgagtgacagcgctcgcctcccgcagcccgcccgagccgcgtcagggcagaggcggggtggggcgcggttaaaaggcgcagcaggtgggagccggggccttcacccgaaacccgacgagagcccgacagccggcggcgcccgagcccgacctgcctgcccagccggagcgaagggcgccgccccgcgcagagcccgcgccagggccgccggccgcagagcaggtaagcgggcgcggaccggctgggtcttgcggggggcgagcgggcggtgccacctcggccccccagcggaggaatttcctccaagaaaacaaaacaggtgaggtcggcggctggtccccacctcgcccctgtcgctcctgtctggcaccggatcagagccggcagagcgcggccgggatgggtgtctggccgcacgtggggcgaccgggcccccgatctgcctctatccgcaccctcctgtccacgcgccccggccccggcccgatggcagtgggcgccgcccgcgctggaccctctctctgtacgcagaggaacgaggatggactggtttgacttttaccccagcgtggtcccctttgacttgtacaacaggttttatgaaggtttcatatcgtgtgtctaagaggccagagtgagggccggtgcccctttcccccgtttcatttgctgcgtgttggattttctaagcttttgtgggtcaccggggtgtccccttggatttggggagaagaaagccaggtctaggatgcgggtttcagttcagacaaaccctcaacttgggccgatgcataagtccccggagaaccgcagggtatgggctgcgtgatgggcttccgagaaacttgtgaaatgctgatgacaatagcgtggacgacagtaattaaaagtaattggcgacacatcttagttaaaacgtgcaggcaccagaaggcacttcctgtcggtgaagaagacctgtctccggtgtcacgggcatcctgtgttttgcaaacggggctgacctcccttcctggggagcaggaagggtcagggtgagtgtggcctgcccgcagctctgcactcccggaggggttagggacctgcaaccaggcggggacactggcccagcgacctcagtgtcccctgggtgggcgtgcactctgtttagtgtctgattgaacgtaaccgtgccgggttgttcttttccctcaagtagactttatgccatacagctattttcttgccccagttctagcagaatctaaccagtgttctagaagaaaatgtcctgcccccatgcagtctccttagaattgcagggtgctgctcagaactgctcctgtggagagctttgtctgttgtttggatccagcagcgtctttgggggtgttgcttgaagcttgccaaggaggagaggggggttctgaagagagaacaccagggctctagcctgtcacataactgggggtgtggagagcgcctcattgccactgcagtgactaaagctgggaagacgctggtcagttcacctgccccactggttgttttttaaacaaattctgatacaggtaatgatgactttatgctttttttcttatgtcttctcttctgaattctgagtgttaggaaggaaaagaagtacagaagatctggctaaacaatttctgtatggcgaaagaaaaattctaacttgtacgccctcttc

SEQ ID NO: 10978 - DNA, 2300 bp, Homo sapien
aacagaaaaagagatattttacacagtgatgagatggtttcatttttgcacacatgagcaaatgcaacacattctctgtgacaactttggtttgaaagttctatcctgcaccagtcctagaacaatttccactggtccaggatgtcaatgctcagacacagtactgcatggaatcaggtgcaggattgagaacagggcatgctttagaaaaagcaaaagctatttccaggactatctgctatgctggttcagctttgccaagcaatattcaaatactcatggagcagcacatactatgagcaaagtacttagtattgtagaaatgcaaaagaagaagaagaggaagaaaagcttaaactgtttataatccccaaagaagtttacaatctgcttagaaaaattattttactatgcaaacagctgagcctggctgaagcatctgtttgggagaggaatggagagaagactgggaagtccacagttagattgtgtggggcaggacagagcacccaagatttaccgcatagggcacatctgggcagtgtgaggatgtctaacaaaaaagcctagagatgctcggcgcggtggctcacgcctgtaatcccagcactttgggaggctgaggcaggtggatcacctgaggtcaggagctccagaccagcctggccaacatggtgaaacccagctctactaaaaatacaaaacctagccaggcatggtggtgcgggcctgtaatcccagcgactcgggaagctgaggcaggagaatcacttgaacccgggaggcagaggttgcaatgagctgagatcacaccaccacactccagcctgggcaacagagccagacttagtcaaaataaataaataaataaataaataaataaataaataaataaatttaaaaagcctagagatttctgtgtctctccactctccaagttcaaggccatttcaggggcctccccaaagtttttaaaacttgacttgggcaaattctttaagaaccttgttctcctcaaataaaatattttggaaagcggatttttatgaagtcttggctcaaattccatgacctttaacagacatcttaattgtttcgtgggagaatatgacccaacaagtggcatatggtttaggtggggacgtttaattaccgaacagttttgtagaataagcaagtcacacatcttttgtccgatgcgtgacaggtttgaacctgtaaagccaggtgcctaaatagcttccaacgtttccaccccaccagcccttgcaccactccctgtactggccctgagctttctagtcttgactgaaaagcggggaggcaatgtggtctctcctggtgcactgtcccgaggaaggcctgctccgcttccccggaggagtcttcaaaggatggaggtaattaataaaaacaacccctgtacctcctctaagtggtcattaattaataaagaacctccaggctcctataggagaggtctgtgcaccccgcgggctatgagaaggctggatcacccagaaagactgaggatgtgtcctggcaaaaacacagcctgcccctcacactgctccccacgggtgcactagggaggaagagttccctcgagggcctgagcaggcgccccacacctgcacccgtgcagagggggctgggcccgccctctgcgctcccgagggagagccctaccccctgcatccccggtaccccgttccctccaagggccggaaagagggccccgcgcactgtgcacttcttaggggtcccccaccctgcgcccccgccacgggaaaaaggtccccgctctgcgcatccggccccggagggacagccccggtcctgcactccttgctcctcagggggacggtccgcgcccagcggctagtgcgccccgggtaggtgggggcggggggctcgtcgagtgacagcgctcgcctcccgcagcccgcccgagccgcgtcagggcagaggcggggtggggcgcggttaaaaggcgcagcaggtgggagccggggccttcacccgaaacccgacgagagcccgacagccggcggcgcccgagcccgacctgcctgcccagccggagcgaagggcgccgccccgcgcagagcccgcgccagggccgccggccgcagagcaggtaagcgggcgcggaccggctgggtcttgcggggggcgagcgggcggtgccacctcggccccccagcggaggaatttcctccaagaaaacaaaacaggtgaggtcggcggctggtccccacctcgcccctgtcgctcctgtctggcaccggatcagagcc

SEQ ID NO: 10979 - DNA, 2300 bp, Homo sapien
ttggctattcatgaccaacacattattatttaacaacattcacattttattcagatttccttagtttttacctaatgtcttattgctgtcccaggatcccctctaggataccaaattacaataatcatttctcttttgactcatctaaactgtgacagttacgcagactttccttgtttttgatgaccctaacagttttgaggagcaccagtcaagtagtttgtagaatgtccctccgttaggatttgtccgatgttcttctcatgatgagaatggtgctatgggttttggggaggaagaccacagggataaagcatcgttttcactttgtcttatatcaagagtgcatactctcaatgtgagttaccactgttgttggtgactttgaacacctggctgagggagggtttgtcaggtttctccactgcgtggtgaccctaacttttccctcttccatactgtgctttttggaaggaggtcactctgcacacggaagtgggggtgatgccctacctgcctaagggggagtaactacataaattatttggcatttttctgcaagggagatttggcttcttcttcatttattcaagcatttatttgtgttatactttgtgttataatccagtattgctgtattaattttgtggctcaagttccagctttggccattgggagctcctatatcgggcccctatccctttgacatgccccatcgatgcgtttttttttttttttttaatactttctttttctttttggtgctacaaactgctccgggctcatcttgtatattttctggctctgtcttcaaattagccatttctccagggagtcctgcttcctattactggagaatagtattggaaaccaagacttggactctagatgtgttctgtacatttgtttttcactctttgaacaaccccatgtgaactctttatgactttttttgtcttttcacttttcaggaagtctgaaacagcagttggagtgtagtggttaagaggaaggactcaggagtcagattgcttggcttcatctcatagatccataacttatcacccttgtggacttaattcctccatgcctcagtttatcacttatgtaggcttaattcctccatgcctcagtttccctacatataaaatggaaatactaataacacctaccttgtagggttgttgtaaagattaacataggtaagacctgtggtatgtttgatggtgcctgatacctaatccatgctgaaatgtgggtggcagtggcagtggcagtaattattggggaggacagggcagatgctctctctgttcttttaaattaattgacttgcctaagacatggtcaaatggaagttcactaacgggtcttgtgtctccatggtaccctgctacctcctgactgtaatattttattcagcgtgtgagtacatgataaatacctgagatgctgcagggctccatgtggaatatgaataccagcactggagttgagggctcaggagctcctgggtggaaacagttaacatttaaaataaataatgttattaaaacgtgtacttaaaaaaattcatacctaatattcctacatacttatggggtacctgtgatattttgttacatgcatagaatgtgtaacgatcaagtcagggtattagcacacccatcacctttaacatttatcatttctttgtgctgggaacatttcagatcttctagctgttctgaaatatacaacacattgttgtgaactctagttaccctacagtgctatcaagctctagaacttactttttctgttaactgtatgtttgcacccactcaccaacctctcttcctccctctcccacccccgtccagcctctgttaaccaccattttattctccaccttcatcagatcaatgttttcagctttcacatgagtgagaacatgtgatatttgtctttctgtgcccggctaaaatgtgtacttttaagatatgtattgaatattttaagaataggatactgtgaatttaaaaaaaactcattctgggttaggaatgaaaagccattcgattattaaattaactcgaatcctttcttttatctcccttcagtggagtcattgggcgaagctgggccatgctgtttgccagtggaggcttccaggtgaaactctatgacattgagcaacagcagataaggaacgccctggaaaacatcaggtgggccagccggcgctctccagaaggaatggaagtgggtctgtttctctcagttggtcttgtttgtcatatcctcaaggctatgaggat

SEQ ID NO: 10980 - DNA, 2300 bp, Homo sapien
ttatatgggttcttggatccttaattcccacagggttacatagagggccagatgactcctgtgtttgcaacgagcaagggcccagcactttttgctttctttttttttttgagatgatgtctcgctctgtcgcccaggctggagtgcagtggcgtgatcttggttcactgcaagctctgcctcctgggttcacaccattctcctgcctcagcctcccgagtagctgggactacaggcgcctgccaccacgcctggctaatttttagtagagacggagtttcaccgtgttagccaggatggtctcgatctcctgaccttgtgatccgtccgcctcggccttccaaagtgctgggattacaggcgtgagccaccgcgtccagccacttttgctttcttttgagacaaagtcttgttctgttagccaggctggagtagagtggcaaaatcatagctcactgcagccttgaactccagggctcaagagatcctcctgagtagctgggactacaggaatgcaccaccacacctggctaatttaaataaatctgtattttttttgtttggtaccagaaggattaaagttataaatatatgtacacataaataaataaatatataaacacacacacacacacacacacacacacatatatatacacacacactagagatgcgggggggggggttctcactatctcgcacaggctggtctcaaactcctggcttcaagcaatcctcctgcctcagcctactgagtagctgagactacaggcggcaccagcctggataagttttttaattttttggtagagacaggggtctcgctttgttgcccaggctggtcttgaactcctggcctcaagctattatttactactcagcttcccaaagcgctgggatttcaggcatgactttgcagggagcagcaaacaagccagtctgctgcccccatagcctccggtagtgagcagtcacaggatgctcactccctgggtgccttgattattatattggctgcctgtgtaactgactacagaaactgctccatcagaagatggaagctttggagccttgtattctcagccagagcaggcgcggttgctcaggctagcggctgtctcaacaatgtactgtaacattccctccaaaaagtcctcaacatttaagcttgccttctactgtgtgtaagttgcatgtccgaaacactccattacggatatgggaatataatcaatccatgtgacttagccaatctgatgagtgagagatgacttatcttccttgtgttacttttcatttctcttgaggttgaatactttacaaatatttatcgataatttgtgaaactgttctttaaaaaacaaaacaaaacaaaaaaacctaacccctcccctgagatttctctttccacgttcctgactcaggggaaacaaaggaagacttccttttatcatctcagtgttggctgcggttccagcttgagtactgtctcctctgtctaatgactgtgtcatttcccgttcagcttgtgctgtgtggacgcacaccactgtcaggcaatgtgtgatgccccttcctcttggtctgttccgggctccaagaaggccaggagtcagggcacgagggcatttcctttttctgatacataaaccgagtgcagagtgtgctccgtggaggaattcagacgtgtccttccgtagcgcagatgaacgcatcaggtgttctctttcactgctgtcgcagtccctgcgcccagttcgcagttggcggcagcggcaggcgtctttcagagacgaattagcaaaggggacattctctgacagtttctctagggtgctttagcgctagagcccgtgccagcctgcccgtgtcccctcctatagacacggacttcacggtgaatgctgacagtcacaagcgcgtggtcttcccgctttccaccccccgacgtgcccccgcgctggtcctgcccctgcccacgagggtcggcgcgccgtgtgtctcccggtgtctcgggcccgcggcgcgcaccccactcagggaccaagcggccctccccgccctcccggtccgcgcgcgcagccaatgggcgcgggacccgccctccccggagcccagagctcgcagctccgccggcgcctggtcccagcgcccgcggcgccgcgtccccggcccaaccatggcgtcctccgcggccggctgcgtggtgatcgttggcaggtaaagggctccgagccgcgctgctgcccctggagcccggggagacgccggggacgtggtgccctcgcgtggggccctcg

SEQ ID NO: 10981 - DNA, 2300 bp, Homo sapien
gattttaccctacttgcaagctaacaagctcatctaacagctccacaaatgatggcagaaaacacctgagtcagagagaaagggctttatttttcacagcacagccagtagcctgggcttcatattcccttcggttcccctttcccttccaagtcccatggggacagtccaggtggatgctgcacatgtgattggttttaccgcccaggtacaccaagtttaggaaagcccagtcttgaacagtgaactgcaagccaacatgctcagcctttgccccagaaggtgacactctctttattaaactgaacagcaacaaacctgtcttttgttccagaagcagacaattatcttaatcttccaaagctgttccttgaaagggtatattaatcagaattccctacagaaacagatccaataggatgcatattgcagagagagatttatttgaaggaattggctcaatcaattggaggctggtgttagatatgagttctaaatttctcttcgaagaatcaatgtcagtatgttcaattctttgtcttctacttttaaacttaacttctggccagatgcggtggctcacacctgtaatcccaggaggccgaggcgggaagatcatgaagtcaggagatggaggccatcctaacacggtgaaatccatctctactaaaaatacaaaaaataagccgggtgtggtggcgggcacctgtagtcccagctactcgggaggcttaggcaggagaatggagcaaacccaggaggcagagcttgcagtgagccgagatgccgccactgcactccagtctaggctatagagcgagactctgtctcaattaaaaaaaacaaaacaaaacaaaaaaagcttaacttcctcgtaaagcaatctttttcaactacctgctccaccctgactcattctgattacctgctctgccctgactcattctccaccctgactcattccgatttcctgctctgccataactatttttcccaccaaaccacttacccggtcactctctttaaattagtcaatcagaattagtttagcctgtgccgtctaaccttagccaacaggggaaggacacagcagcaggtgccacaagcgtcaggaataaaaaccccttcgcctcccttgtccaggtgtgtgctcaccattgctccatctgtgagggcgcacccttctatagaagtaaattgccttgctgagaaggaaaaaagaaaattttatagttgagtgctatttcttttgcggcaccaaaactttatttataatgctggcaagcctaaaatttgtaggtcaagttagagacccaggaaagagctgaaggcagtctgggggcaggattccttcttcctcagaggaccttagtcttttctcttatgaccttcccttgacgggatgaggccaacccaccttgtggaggaccaactgctttactcaagtctaatttaactgttaatcacatcttaaaaaataccagctatcatagtactccagaacaaaggcagtcagtgtctctgctcacaaaacacgggaaagtgcaggtgacccatggagaattgtcccccaacactatgttttttctttttttggatggagtttcgctcttgtcacccaggctggagtgcaataccaccatcttggctcactgcaacctctacctcctgggttcaagagattctcctgccttagcctcctgagtagctgggatttattacaggcgcctgccacctcgccgggctaatttttgtatttttagtagagacagggtttcaccacgttggccaggctggtctccaactcctcacctcaggtgatccgccagcctcagcctcccaaagtgctgggattataggcatgagccactgcgcccggccaacactacttattttataaaaactcattaattactggtgtctttagactccctctgtccctcccctccatccccaacatttacttttaaaatttaagacaaaacttaaacattaaacaattatgaatttaattcccccatttatattacattgattaagctttacactatgacccaggttctaggtggttgggacacaatggttcaatccctgtctagtaaataaaacggacaccttaagcgctacaatcaaggtgcgcacggggtgctacagaacaatacgcagacaggaggaggtggggggaaaggtgagacttcccaggcaggtgtcatcccagaataacttttacacagggtgactaagcgagttagtgactgcgcggaaaacgggcttccaaggttcacaaggctcgtgctgcg

SEQ ID NO: 10982 - DNA, 2300 bp, Homo sapien
tcaggagatggaggccatcctaacacggtgaaatccatctctactaaaaatacaaaaaataagccgggtgtggtggcgggcacctgtagtcccagctactcgggaggcttaggcaggagaatggagcaaacccaggaggcagagcttgcagtgagccgagatgccgccactgcactccagtctaggctatagagcgagactctgtctcaattaaaaaaaacaaaacaaaacaaaaaaagcttaacttcctcgtaaagcaatctttttcaactacctgctccaccctgactcattctgattacctgctctgccctgactcattctccaccctgactcattccgatttcctgctctgccataactatttttcccaccaaaccacttacccggtcactctctttaaattagtcaatcagaattagtttagcctgtgccgtctaaccttagccaacaggggaaggacacagcagcaggtgccacaagcgtcaggaataaaaaccccttcgcctcccttgtccaggtgtgtgctcaccattgctccatctgtgagggcgcacccttctatagaagtaaattgccttgctgagaaggaaaaaagaaaattttatagttgagtgctatttcttttgcggcaccaaaactttatttataatgctggcaagcctaaaatttgtaggtcaagttagagacccaggaaagagctgaaggcagtctgggggcaggattccttcttcctcagaggaccttagtcttttctcttatgaccttcccttgacgggatgaggccaacccaccttgtggaggaccaactgctttactcaagtctaatttaactgttaatcacatcttaaaaaataccagctatcatagtactccagaacaaaggcagtcagtgtctctgctcacaaaacacgggaaagtgcaggtgacccatggagaattgtcccccaacactatgttttttctttttttggatggagtttcgctcttgtcacccaggctggagtgcaataccaccatcttggctcactgcaacctctacctcctgggttcaagagattctcctgccttagcctcctgagtagctgggatttattacaggcgcctgccacctcgccgggctaatttttgtatttttagtagagacagggtttcaccacgttggccaggctggtctccaactcctcacctcaggtgatccgccagcctcagcctcccaaagtgctgggattataggcatgagccactgcgcccggccaacactacttattttataaaaactcattaattactggtgtctttagactccctctgtccctcccctccatccccaacatttacttttaaaatttaagacaaaacttaaacattaaacaattatgaatttaattcccccatttatattacattgattaagctttacactatgacccaggttctaggtggttgggacacaatggttcaatccctgtctagtaaataaaacggacaccttaagcgctacaatcaaggtgcgcacggggtgctacagaacaatacgcagacaggaggaggtggggggaaaggtgagacttcccaggcaggtgtcatcccagaataacttttacacagggtgactaagcgagttagtgactgcgcggaaaacgggcttccaaggttcacaaggctcgtgctgcggctccgggagttatgtcacagtaagcttactatcatcctttgggcatctgctttacggatgagttcatcaggatttaaaggatcttggttccatatccttccccttcctcacagaggccgccagcccggagcccctctaggccctcctccctcctgcatctactggccgcgagcctttccctccccgcccccttcacacaggccgcccccagcctcccaaccccccggttccgttccacgggaggccccggcctccctgccctctcctccaccgttctacccgcatcgcccggcttcccgcaagccgctggcaccgtcccctcaacaccctccgcccaccgccactcccttccactgagggggaccgggctgccttctctctgacccgccgttctccgcccccacccacttccccaggcctcccgcaccacccccttcccgccgcgctctctcccgcccccgcgcttccggccccgcccgcccccgcgcggaggactgtgggagcggcttccttggattccgcgcttggcaacggctcggcgtcgcgctttggccaaccgctgcgtcgtccctgggcccgaataactgtcgcccgcttccctcagcgtgaggtaggagaaggg

SEQ ID NO: 10983 - DNA, 2300 bp, Homo sapien
attttcaaacacctagagaaatattatataatgttaagtgaaaacatacagctatgcacacttatacatgaacataaactggaagaattgacaccaatataaaacagtagtttctgagctatgagattgtaaatgcttttgaaatattttccagatttttacaaataaaatattggcatactgtatattagtttaaggaaaattgcctctatttgtagataaaaatggtacattttcaatttcacagagttgaacttttaatagattttcttaacagattatattagctgggcatggtggcgggtgcctgtaatcccagttactagggaggctgaggcaggagaatcacttgaacccggaaggtggaggttgcaggagccgagatcgcactattcactccagcctgggtgacaagagcaaaactccatctcaaaaaaaaaaaaaaaaagattataagagtactgtagcatagcagagtataggctctgaagccagatgccttggctctcctactcagctcttactctccctgtgtctcagttcttttatatatgtaatgggattaactattataacctatcttacagggttaaggtgaggattataggtgaggattaaatgagttaatgcatgtgaaatgcttaaaatagtacctggcagctgggcacagtggctcacacctgtaatcccagcactttgggaggccgaggtgggaggattgcttgagcctgagagttcaagatcagcctgcgcaacatggcgaaactccatctctacaaaaaaatacgaaaattagccaggcttgatgttgcacacctgtagtcccagctacttgggaggctgaggtgggaggatcacctgagcccgaggaggtcaaggctgcagtgagccgtgatcacacccctgcacactagcttgggtgacagagtaagaccttgtctcaaaaaaataaaaaattagccagcctggtggtgtgcacctgtagtcccagctactctggaggctgaggtgggaggatcatctaagcccggggaggtcaagggtttagtgagttgtgatcacaacattgctctccagcctggatgacagagtgagaccttgtctcaaaagtaaaataacaaataaaaaaaatatatattagccaggcatggtggcacatgtctgtagtcccacctactcgagaagctgagtgggaagatggcttgagcccagaagttgagactgcagtgacccatgatcatgccacagtgctccagtctgggcaacagagcaagactctgtctcaaaacaaaactaaccaaacaaaaaaaatgtatgtgaaagatagttaagtgctgggcaaatgttaattattatatattattttcatattgagaaaaaataatatatgttgtaaaatcatctgtgtttttaatggggagtagagatatggatcatactaagtaattgatgattgaagcatttatatttgagtttagaattaaagtattacatatttgtactaacaaccccagcttctgtgtacttggtcctaatctttccatcctgatccttttatcagcttcttagaataggttagttcaatggagaatgtgattggtaatcagaaatatgaaaaagaaagttctaatttacataagggaaaatagaaggattaatttactctcccttttttaaaactaattagtagggaggcttattggaaattcaagttcgtggctggacatgatggcttatgcctatagtcccaatactttgaaaggctgaggtgagcaaattgcttgagccaaggaattgaagaccagcctgggcaaaatggtgaaacctcatctctacaaaaaatacaaaaattagccaggcatcatggcatgcccctgtagtcccagctacttgggaggctgaggtgggaggatcacctgagcccagggaggtggaggctgcagtgagccatgatcatgccactgcactgcagcctgggcaatagagtgaggctgtatctcaaaacaaaacaaaacaaaaattaagttcttgctgtttacttctgaattattctttttttcttccattttattttaccaggatgatcctcatactaacttagtaactgaagctataaaaaatgatcacctcaggcaaatggaacgtgaaaggtaatattttaaacttaataacgtagttattaattacattatttaaaatatttaatgtttagtattaagatacttaatatttgaaacttaaaataatttagttttaatttttataaaagggttgaatgtgcattctgtttcttacagaac

SEQ ID NO: 10984 - DNA, 2300 bp, Homo sapien
gagacccggtttcaccatgttgggcgggctgatctcgaactcctgacctcgttatccgcccgcctaagcctcccaaagtgctgggattacaggcgtgagccaccatgcccggcctcaaggacagctctttaaggaagagaaagaggtttgggtagatacgaacatcagtaacccaagattattagtatggaaggagccaaccacacaccggcttttggagttacggtgcctaaggatgatttaaaagattttccccaacagcttgccccatgctaagcagtcttgcagctgtgctggtattgggtgtgctgagtaaaccaggggatgagggactggagaggcttcaaatgaagcttgcgtggccacattacagatatgttggttttaagggaacacgatgagcctgcttttgagtatgttgttccctttttttcacttgtatgtcttaggtttgaacttactaacatgcttattttgcatcttcacaaatatgttgaaatttgaggggaactcataaacatttgcacctatttatgactctcaactgattagtctcacaaatatcaaatttgttctgccaaataggtgagcattttcagtcatttgtgatctttcacaaaatgaaaactgctggaaagtaaatattttccttcccacttccaaggtaatccgggggggtggtgaggaagagagaagctgccatgttaccagacagtggaaaatactttgttgaataacatacagaactaagtctggtaccatgtcacctcatataggaatggatgctgaaatgagacagactgagtatttctatgaaaccctcataatgatactctcttaaaagcctcccacgcttccttttttccaataaaaaataagcagtatttgagtactgaaacctttattcccattttactggaaacaaagaacatgaacaatttactagtcagaaaaaaagtgttttataacccaaaacaaatatttgccaagagctgtaaattgcttaaatcgcttaaactggagatttcagtgagatttttagcagtagattactaagctccttagttatagaacattcaatgcataggaaagtgtttttcctacaaagcataactgaaatgtagtttaactaatggtttacaattcagtcaaataccaaagctgcaaaccatttagggagtcatcaattacatattttgtacactttcaaaaagcttacagctgggatgggttgtttattttcaaagcatgactgctttaaaatgatcatattctttagcctgccacctaggaagcattaagcatttacttgcagaatgaacaaacgagcacgttgtcttgtgttatgaagtatataatatagttcgttttagtttcttcattcgcagactatcaggctcatttcacgtgactgcttgcacttagaactgagttatcacggagtaggaactctccaacatcgtcgtcatagaccaagagatgcccatgaacagccatgaaagtgccagtcagggaagtattcagtgctttgttgtagagttgttggatagaggcacaggatcatttcatgttgttgaggagaaaggagcaacagcctcctcccaccttattaaaaatagagatttaaaaaaacctctaatttcctcgaagtacagaatctcaagaggtagctctaaggagaatccctctgggtttgagcgcattcctcttccagggggcctattcttggactgctttccttaatagagaaatctctctgagccaaaatcggcctcccccaattccatcctgtcggccccacttttctgcttcggagacttccaagccagtccccactcctccttcagccagtcgggcccgcacccgcgcccggcagggccagccctctcctcctcctgcgtggcgcagcacaggccctgagcgcgcgaccccaggccctgggcgccccgccgcatgctcgcggctggaagccccagtttgcgtggcccttcgggttattccgctcaagagccgccgcgtcgccccatctcggcgcgaatctgaaagcgctttcgggggagaagatgttgggggcactggtgagtacactgcacaagtgacaaaatgttttcagctcctggaggcgaaaggtgcagagtcgctctgtgtccgtgaggccgggcggcgacctcgctcagtcggcttctcggtccgagtccccgggtacgaggaaagaccacagggggcttctcgcggaaaagcgggccgcggaccctgcgcgggctggctggggcgggcggatgacgaggcgcaggggcaag

SEQ ID NO: 10985 - DNA, 2300 bp, Homo sapien
ggaagtgctggagagcattgtccaatccatgccccattgggacaccctcctaaaccagagtggctgtatggcttcctccatctcaagtgtcaagactttttttctctttaatttttattttagagacggggtctcgctttgtcacgcaggttggaaggcagtggcgccaccacagctcactgcagcctgaacctcccgggctcaatctatcctcccacttaagcctctggagtagctgggaccacaggcacgtgccaccacacttcgctaatccttaaaaattgtttgcagaaatgggatctcgctatgtttcccaggctggtctcgaactcctggacttaaatcctcctgcctcggcctcccaaagtgctgggattccaggcgtgagggtgaagctctgcactgctgacaaggcggggatccagctcctgcacctgtctccagccttacatcgatgcccaccccacaggcaaacacctcgcctacgcccccccacccccaccgcccccgctcgccttgtggctctccccattttccaagcgctttgttcccgcttgctatcagctgtcccttccctcagcactgcctttgtaggcgacttgctctcctccatcaagactcagctctttcacgaagcctttcttgacctctgtggccctgggaggccttgccccctagggcagctcctcctgctccagctagagggaagacggtcacaggtgcctgctgaggacactgcggcaccctgcctacacgcccccaacttctccagccttccccttctgcaggctgtccctttcttctgaaatgacctctgttccaagaccaaaatactctcgaaactgttcatgtcacttcatgcactgcctgatggtgtggtttctttcccaattatccccactccttccttaggctattaaactagaggggctcagagggcgcttcccagggctccactccagcagcctctggaccacaggggcactcaggaaatatgtggatagtaccgcgcaccccccagcagcacctccccgggccccctgtgcagagtacggtccacatcactgtgtccacatcacggaagggtccccagctagtgccttgcggacccatccaacctggaggagatgaggtgttcaagagatacgtgttgcataggaaatactggagggtaaagagaggaagcaggactccttcaagggaggtggtgggggtgggccttcgcagtttaggaattgccccccagtgctccaactgccccgccccaccccgcctcatcgcagcgcccctcgcaccccaccccaccctaccgtaccctaccctgtctcgccccgcaccaccccacccctacctgctccgcctcgccccgcgtgccacgccccctccgcgtcgccccgccccaaccacctccccttccccgccccaccctccccgcctgcccggcctcggcccggccccacccactctccccgcccagccctgccctccccacctgccgggccccgccaggacgcgcccgcggctcacctgtaggcccagggcgacacgctgcgcaggttggtgggcggccggaagcggcggtcggcgggcctgccccctgccgggcagctcgcgttgcgcgcctgctcacgcggccccagctgcagcgtgtggtggaaggcactgagcacgccggccgccaggcgcccgtacagctgctccagtagctcctccggccggtccgcgcagccccgcggccgcgcggggcgcctgcccgccctcggggcgcccgcggcccagctcggcggcagcgccagcaggaagccggctaccagcatccagacctgagggacaggccacgctcagcgtccgcacgcgccggaggagcccgcctgcgccccgcgcccgtgtcccgcccgcggcgcccggagccggcgggcgcctcccctcgccccgcggagccagaggccggcccggaggatgggagccgcgcgggcgggccccagagcgccctccccgcctgcccgccgcccgcggggtccccggggcccagcccggcgccggcccgcgcgcccccggcccccgccgccgccgccgccccgagccgggggccgcacggggggcgggtgcggggcgcgcgtgcacgtgtgcgtgtgcctgccgggttgctgcgccgcgggctgcgagtgcttgtgacccgccgcaccctcacccccgggcgcgccatccctgctccgccgccagcgagggagccccggagcctaagacgcccggacccgccgcctcgcagacccacccttgcccctgcgcctcgtcatccg

SEQ ID NO: 10986 - DNA, 2300 bp, Homo sapien
acagggtaaaaataaaagcattgtcaggagcattgttatgggattaaagtctctcgttctgaaaataggtatgttcgttttgctttgatagttattttccccttactgcctgggttttactttagcattcttagagtaaccagggatgatgataatatttcattccatcagcgcctcttgcaatgctcctcacctgaataaaatgcatgtgccctaatgccaacagaatgatttgggcaaattcaggaagttccccacatgccatgaagtgaaattcctcatggtgtctgtcttccagaagtgacacatgaaaaactggcaatgagcacactgctcactaaataagaggccaaagagaaaagaatctaccggaaactcttccggaattaaagagtccaggctcatgttgtgatagtgattattcctcataaccagtgttgtggcgacaactgactcactggcggtcgggtggactccccccttggtgcgcacaggcgcctgccccaaggacagacacttcaaagatggctctgaacccagattctgcagcttcccccgggcggagagttaagccaccccgtgggcatgagtcgtgtttttcctttgaagagatgtttcccagctgcaatgaatgtgtggcatttgccatgacaaaataaaacccttcaagaaatgtgggttctcattctcatttctttttctccctttccctctgtaaaacttttttttctgaattatcttccaaattcttttccaaaacattagtctttctctcctcttcccctacctcccagatgaacgaatttccccagaataaatggatttccttgttgtagcctcactgtttaccaagtgcctggctggctgctaaatagccacaaaccgcacaccgcatctgttattaccgtgaggcttaggcagcttggctgtggggggcagtgcgggcggctgggctaacccaggagagctggaagactttggacaagtccgctactctgttggtgcctcagtttcctcacgagtgagaggagagggtgggcaggctaagccttctttttcctaatagccctgagccagctcagttggcagaggagccgggttcattctggagccctgaccttgatgttaagttcaggattgcaccaaagtcaacctcagtacccagacagggcaggactgaccgctagttctccttggcctggggaagccagtggggatccgtgccctgggcagacctcattgctatcccaggctgatttttccatgtcctgtttcatgagaaatgcacgactgatgttttcttgtgggggccagaaaagcatttttcagagcttcttggcagcacatattgaagatctttggctccctggggccttagctcatggaaggagggtggagctgatgggtctgctggccatggcttggcaacagggaagctgtttgtggtctccagttactccctggccagccaccagagccctactatacccggccctggccccacagccgtcctggctgcacatagtgcttccaatgtggtggtcctgccccttccttcccctgtggtctcaaaaccattccccctcccagctgctgggcttgctccaaagggaaagtgagagatcggaaggctaacacaaacctgtcttcgtgactcattacttctcttaaacatagagaccaactggtctataccagggctgtctattagaattatctggggaggttttaaaaaagaccagccccccgctccactctagagcaattgaatcagaatctctgggggtgggggggacactgattactattttttataagctcatttgtgtgcctccagggaagccatcccattggcaacactgattgcttactgggttaataatgaccttatgtactcattagaggaaatgtagaagtcctgggccggtatggtcatgaaattcacacccacttgggaaatgcaatcatccagttgtttgccatcagctgcaaatcgatagatagatccgagcttagccaatggctagctagcctttagggatagcgcttacgttgttgactgtgcagccagaaatgggtttctgctgattcatttgaatcagtgactccccagcttaaatgagtgaaacagatcacttggacagcttgttagtgtggagagcttccgactccttggatgtagtgttaagtctgagaatttgcattaaaaattttttttaacttaaaagttttattttgaaatatagatatatctatacatctttttttgtttttatttttttgagacagagttacactct

SEQ ID NO: 10987 - DNA, 2300 bp, Homo sapien
ccccgtctctactaaaaatacaaaaaactagccgggcgaggtggcgggcgcctgtagtcccagctactcgggaggctgaggcagcagaatggcatgaacccgggaggcggagcttgcagtgagccgagatcgcgccactgcactccagcctgggcaacagagtgagactccgactcaaaaaaaaaaaaaaaaaaaaaggcagtcctttttaatgtatggatttgtgttgttgttgctgtggaccttctggttcctggacaggaatgtgttctagacttaccaccaccagaggatcccttttcttcccccagaggttgaatggggaagtgtagtctgtggagctattcatagctactgctttccattttgaattttttatttggacagtgtggatttgctcagtgatgtgtttttcatgcacaatttctgtccattttagtgggagctgaaagtctctgagtgacccattcatctggatcagaccaaggctgccagtcggtctttctgtggtagctgaaatttgggagtgaaatgcatgtgaataaaggacatttcctggtcttgggggtgtcacaaaagatccaagacattgaccttacctgactagttgatctttctaagaccaaatcaaatctcgatgaatttaaacctcaagataaagtgaagaccttaggtaacatatgatttcctctaacaattagtctggcccatcaagcagaattgagataaatacacacagccagtgtatccttcagcaagcctcttttaatgatttaaaaaagaactactaacttttacaaataattgtgttcagagacagactttcaatctaaagaaaagatcaaggacctagctctcgtggcagaatgcagaaacagaagcctccagattgatctctgcagatgctaacgtggcccactttgtcctcatattcagcctgatcctaaagcccttacaactaagccaatacctgcttggattcttctgacaactggcaaagatgtcacgttccacttcttatctcaccacctcttaaccacaaattggccccagtggctttcaaaagggggaaaaaattgtgcgagtttgagactgtttatgtattcatgactaaaaccaaatctgagatctttggaactcttagctggccctggggcatgcgagccgcctgtgcatccctttggtccacctggaggcccgtgaagaccttcagtggaaggaagagtgggtcagatgagacgtgtccatttcatcagtcagccatcggtgacaggctgaattcagagacccaggccagagtgtaccagctacaaaatttatccaaggattccaattatgctttaaaaaattctaccagaagaagtaaaaaacgatgtttatatgttaagaaatgtaacagagtagctctcatttgataatataaaatagctctgcctctattcaaaacagttgattttaaaagtaggtatatagtcgctatacttattattatttttagattgctttaaaaagcatatgcgtccctatctctttggcaagcacccagcggtgagtcacgccctgcacccgcagcagccgatctgagaggctcctcagggagcctccgtgaacttttccaaaccctccatgcgggccgcacacaggatgcccgtgccgggtcgtttcccatcagcttccagccacgctgcttgcttgtagctaaaagcaagccagggatgcccgtgtcagatgaagctgcttacgagtctccatggaaaggcggcgctggtgctccggcacttggtttgctcggtgcactctcttcagaggtcgccgaccgagccctccaggcggctccagcttgggcgcctcgggatgcgggccggggagacctcccggggcaggaccggcctcaggggccagcgggcgcgtcgttggggcccagcaggagcttggcgccctgtttgtcgatgctggagttgatgctgtctgcgtccttctccggctcggggacgcaggtgcagcccacggggatggtgacgtaggcctcggtgtagacggaacggccgccggcgcaggcgggggtgcggcgcaggacgacggtgggcatgtagacaggggcgctgcggaagcgcacgtcctcctcgccgaacagcccggtcaggcagccccggcacaggcagtaggcttcaggcaggtacctggggtacctcgccgggtcgtaggagattctgcagggagagagcacgggtgaggtcacgcctgggggcagccccgcgccgcgcgctgaaatccctggttagagtcaccggggagggcct

SEQ ID NO: 10988 - DNA, 2300 bp, Homo sapien
ttgttttgtttttttgagacagaggctccctctgtcacccaggctggagtgcaatggcgtgatcttgactcactgcaacctccacctcccgggtgtaagcgattctcctgcctcagcctcccaggtagctgggaatacaggcgtgtgccaccacaccgggctaatttttgtatttttagtagagatggagttccgccatgttgaccaggctggtctcaaactcctgacctcaggtgatctgcccaccttggcctcccaaagtactggcgtgagccctgcacctggtcccaagtctggtttactttcttttttacaccatttctgaagagaagcaagacgaacaaaaatcactggtgaatacacaaaaggaataattcctgaattgaagacatccttcatatccaatttaactggacaagtaatttcccctttaatgagaataagtactcctttgatattttacatgtttatgatttgcaaaaaccattaaattacagtgcataggtttcaccaggaaaatatgaatcttactgtattactctcatgctgtctgagcaatcaggtctagtgaaggtacaaaaaactctgacatctgtggtcactttcatagtaaaaatagtatatagtaaaatacatgaagataacatgtcttacatgctattaaagcaatgtcagctttgaaagaaaatgatctactgtttcagactcaatttgactgaatgtaaacttctgttaaagtagttataagctagggcagtcttatttactgaacaccacctccataaaaaatgcactcataaaagttggttattgtttctcagtttgtgttaaatttcttttagttttttaaatatattttcttcctgttccttttccagaatacacctgatcttgaaatatttggttaatagacttgtcatcaattcaaaacaaagtcaaaatgtagcatgggttattataaactggaaacagttcttaaaatagaaattatagtacacccaatgttataaacctgtttcattaactacttactgaatagcatcatttgccagctgaacagtttatatccttaccttataccagaaaggattttcacattgctcagcagaatatataaaatttagcaagatcatgaaattggtaaagaaaatggaggaaagagagggtagaagcataatacagattgatttcttggggaattggaaacaaatactttgtatcacttataatttggtagctgctaaaacgtaagggaacctttcaataatcagtgcctgtatgtgcaagataattaaggtgttgttgacaaaaatcatacatacttacggcgcttgatgtctaaatacatatattgaccaactcattcaaaactgaagactctgaaagactaacaagttttaaaggttcccccccgctaccgccaatcctgtcaattttaccaaagcctcaatttgatgtcaacatttaaagtcaacgatttgatttaaaaagactgagcagacaatcgaccaatgaagccttgactttgaaaatctacgtgactcagtgcaaaatagtgggtttaactttaattaggatcttaatttttttttttttagatgttgccttgctctgtcgcccaggctggagtagctgtggtgcgatctcggctcattgtagcctctgcctcccgggttccagcgagtctcctgcctcagcctcctgggtagctgggattacaggcgcacgcgaccacggccagctaatttttgtattttttagtagagacgaggtttcaccatgttggtaaggctggtctcgaactcctgacctcaggtgatccgcccgcctcggcctcccaaagtgttgggattacaggcgtgagccaccgcgccctgccagggccttcattttttttgttgttgttgtttttttgctaccattcttgggggcggctgatgagacaagcgaaggaacgactccaggctggagacggccctcagtgttgtaaacgcgggattgagacgctgcggggagatggcctgccttgcgcaagggcctgggcgggagggcctgcgcctgcgctagcgagactggctagccactcccactgcacacggcgagtctgggcgactgcgcacgcgcggctggtgagtggcgggttcgggcgcagctgtagggttggctgcgcgccgccgaggcgttttggactgggttaggtgccttttgtgtgtttgtttctcaccttttttccagggtggtagtggtggaagagtttaattagcagtggctggcggattcctgagggaaggagctggcgc

SEQ ID NO: 10989 - DNA, 2300 bp, Homo sapien
attaaaatgtgaatgttggccgggcgtggtggctcatgcctgtaatcccagcactttgggaggccaaggccggtggatcacctgaggtcaggagtttgagaccagcctggccaacatggcgaaaccccgtctctactaaaaatacaaaaattagccaggcgccgtggcacgtgcctgtaatcccagctactcaggagactgaggcaggagaattgcttgaacccgggaggcggaggttgctatgagctgagattgcaccattgcactccagcctgggcaacaagagtgaaactctgtttcgggggaaaaaaaaagaattctgtgtaatttccacaggtcacaaaatattatttttattggtttccccccaaccatacaaaaatggaaaaaagaaaaaaacacaaccattcttagctcacagccatacaaaaacaggcgggggccaaatttggcttatgggctgtggtttgttctagtccaaagagtatagcatattttaagcatgtcagtaaatcaactaactttgtaatgtttagagattacttagtgttttaaatttcattactagaaccttgagaagttcagagattaaggattaagggactcagtgaacaaggatttattaagtgttcattgtggcccagcataccagtgagtacttaaatgttctgacctgaagtaatttagaaacaatttgcctagtcaaagtgaatatagcctaaaactatgagtttgatgttacacaacatttacaaaatagagagagaactttgtgtgggaaagaaaagggctagttaagtacttcggcaagtacaaaatggtacatccaacagtaagtgttggatggattaagattaataatgatcatattccttcactaaattttccttggctctaatatgtcagattacagaaatgaaacctttaacatctgagaatattaatactataaaactagggagcagtatttcaagagcattcccttcatacaaaacactctaccaggtgtttcatgtccgtattgtatcactgaagtaaaatataggttagctttaaatggatttaagtataatttacatttggtattcaaaatcttttagcatttattaatagcaatgatgtaggttaaactgagattcaaacaaattgtaagcaaactgagaattaataaaagaacgtgctcattatattttggttgaatgaatgcatgaatgtctagggattcaatggtatattgcttttctaagtgcacaactgtttacttccactaaagcagcatctatatactctttattgaacttgtctgctaagtttagcaagaagctgtagctaggcatagttagcataatacagatgactgtcattgttgctgtttttagaagaagcagtatgtctgactggctggcatctgtttctctctttgtcataacatgctggagacagatcaattttcaaaatgtaggtagccctcagttaaaaatcaattgatatgtttaaaataatgacctgtaatgtaaagtggactgagggacaattttcaatttagtttaattcaggaattaattttctagaaataaccagctacagtgaatttttgtcttacctcattcggcatggtagacacgtgacccttacaaaggaagaatttatatttatggattagtaattctttctaacaggtacatcgaaaaatcagagaagattcagatatggcacaagattctctgcagtgccttgcccagttagcttctcttcatggacccatcttcccagatgaaggatcacaagttgattatctagcacacttcattgagggattactgaatactatcaatgggtaggtatacttgccctttgcagctgaaaaaggagctctacgttttgtgtttaacagtagaagaaaaaaagaaactagttattttttcccccttatattttgaagtaaagtcatatgggtaatttgaaattaataaacagagacataccttttaaaatgaatcagtaacgatatttgcttgtttggaaatgagttattatattaataatttttcttttactgccacttaataatactcattccttggttttagaattgaaatagaagattctgaagctgtggggatctccagcattatcagcaacctgataaccgtgttcccacgaaatgttttaactgccattccaagtgaacttttctcctcctttgttaactgcctcacacacctcacttgttcttttgggcgaagtgctgcattggaagaagtggtgagtgactattctaaagtaaattgtgtcagttt

SEQ ID NO: 10990 - DNA, 2300 bp, Homo sapien
ttctgatttgatttttttgtttgtttttgagatggagtctcgctctgttgcccaggctggagtgcagtggcgcagtctcagctcactgcaagctccgcctcccgggttcatgccattctcctgcctcagcctcccgagtagttgggactacaggtgcctgccaccacgcctggctaattttttttttttttagtagagacggggtttcaccgtgttagccaggatggtctctatctcctgacctcgtaatccgcctgccttggcctcccaaagtgctgggattacaggcgtgagccactgcgcccggccttctgatttgatttttaaatggagtgaataatagtagtagtatcatggggattagatgtgttaatatttgtgaaaccagttcatataaattcttgcatatagtaagcattcaataaatggtagctattatttattctaataataattttaattcttgccagtagagatatttaaaactatgtttgtgtacatttgtagtcatagtcttcagctttatgtacattttctagtagtagtcagtgcctatgaaactattctgtccccctaaaagtacagaaattccctttggccaactaatattcttatgcatagtaggatctctgcatttatttgcttaatgagtgaaagataaatggttcaagtgtatgttttgaaggaatgttttttcacttcagtcttgacgatagggagacatatttattcatctgtataaatatctaataaatgcatgttatgcagcaggtagtgtgctttgcatatgctagtgtgcatagagtgggtggctgatctgggagctagtgaaccagtagtaacagatatgtcctgtcatgtgagggtgccgtgggagcccttagtaataactttctggagaaagtgacgtcataatcttgggagagggaatagaagttcagaggcctggaagtcaaaagagtgtggagtgaggaactgaaaggtcaatatgtctgcagttgtgcgtgtgtgtggaagggcagaagtcaaggagaggagcagccactggtggctataggtgggtctccaaactgggacacttttgagagtgaaataaagaacgactaataattatttggggcaacaggtgaattgaggctgtcccaggaaagctagaatggttcccactgcttataagccatgttaaggggtttgggtttattccaggggcacttggtggttgtatctttgtgggattccagaggctagattataaagtttgggattatgttttctgatccttatctttcagaaaagattgtgaaaagtcaattaagtttctgtgcccttgtggtcaaatgggcttggtaaaatgcctccacttgggatgggtgcttctgtcatcacatggaggaacagaacctagatatgaacattttgaatgtttgtgtgtgtgtgttttacaattttatgtttccataatgatgtatctcggatagctagtatgttgccttttcacattaaagggaaatgggatttaggattagattagtagttgtagacgtaggttagatcagaatttatctccagactagtggaatcttaatcttagtgatttttttccctacaaatatttaacagggagctgacttacatctgttgaacacttcctggagcaaataacacttgtatagtgcttagtatgtactgggcacagttctaggaacatttaacccttataataacactagtagtgttattctcattttacagattgaaaaccaaggccctgaatgctaactgtcttgcccagggtcatacagcccgtccacaatggagcctgggtttgaacccaggcctcctggctttggagtctgtacataaccctttggctcttctactctcacatgtaagcaatgttattagtagcttcaggcatagagagaagtttgggagtattcttgtattagatttaggtaaatttttcacaatgatttttatgttttacagccttcaaaagtatgttcgggaacagattctactagcagtagcagtaattgtaaaaagaggatcattagataaatcaattgactgcaaaagcatttttcatgaagtcagccagttgattagtagtggcaatcccactgtggtaagtgtgctatttgtatttataaatattaacaatttatattttctgttacacaaatagcattatagcaagagtaatggatatctacataaaaatagtgaaaaagctatcagtcaagcaattttcatttgttcaggttttcttctagtctttttttttttttttcccttgt

SEQ ID NO: 10991 - DNA, 2300 bp, Homo sapien
caaaataatttgaaaatggaaagacaaaaatacttctagaatatagtttgctgttcagttttttttttttttgaggcagagtcttactctgtcacctaggctctagtgcagtggcgcgatcttgactcactgcaacctctgcctcctgcgttcaagcgattttcttgcctcagcctccctagtagctgggattacaggctcctgccactgagcccgactcatttttgtatttttagtagagatggggtttcaccatgttggccaggcaggtgatctacccgccttgatctcccaaagtgttgggattacgggcatgagccaccgcacccagccctcacagttttattagtaaatttttttttttttaattgagatggagtctggctttgttgtccaggctggtgtgcagcagcgggatctcagctcactgcaacctctgctgcctgggttcaagtgattctcgtgcttcaccctcctaagtagctgggatttacaggtgtgcaccaccatgcctggctaatttttttgtatttttagtagagacgggggtttcaccatgttggccaggctggtctcgaactcctgaccccaggtgacctgtactcttcggccttccaaagtgctggaattacaggtgtgagccaccacactcaaaattctttttaaagaagtgttaaagaatttaacacaattcttttttttttttttttttgagactccttcacccaggctagagtgcagtggcgccatatcagctcactgcaacctctgcctcccgggttcaagcgattctcatgcttctgcctctgagtagctgggaggtgtgcaccaccacacccggctaatattttcatatttttagtagagactgggtttcaccatgttgcctggctggtctcaaattcctgatctcaaattatcctcccgccttggcctcccaaagtgctaggattacaggcatgagcgactgggaccagccaacacagttctttaatggaaatattttcatttttatttagagaactgtagagggtgctatatgattaggaatagtagtctgaactggctttagctaattataagaattctctgaagccagagattcacagtagttaatttttcctgggtgaataacttttttttttattattttgactgaaattagtgactaatgttgcataattgatataatttataatgagtgttgatctaatataattgattgtaacatttttcatcatctagattatttaatataattgaaattatgagttgccctctttattcaatggtttgaataataaaggtttattttcctgccatctacctccagccccctttcccaaattaagtatttgtaagtcttaataggttaaaagttaactaaaccatgtaacaggaatgtacgttttaggtagatctggctcagaagattattatctttagaagaacgattgttaacaccaaaatggtatttaaaaacttggtcagactttagaaattgtttttgttaagagagaagtctagatttttttgagtgattaatttattattcagaaatacatttcataaattccaaactttaactgttcccaaatttttctggtttgatagtgattttagaaaacttgaggtgaaataatatttgatcctgtgtcttaaaggattgcttttggaaactgatttttagtaacttggattcaatatccccagtattgaagaattttgaagttatttgaactaggtcaagttagtccaagtggtatattttggaataaaaggtgataataagtcaactaattgttaaatcccccaaaaaatgttagataagtatctgtttttctaaaatgcaggttttttaaaaacctttaaaggattctgacccaaaccttgccaggaattttttccttttttctgaaaccatgttttaaacatttattatcaagttttatactataattccttaaaaagttaagcaagaatttgttcctcttgccccccaaaagtgaaggcattttctgttcttgtgggtaaaaatattgatattatttaagctttgtcattagataagtgtatctgttcttgtctttaactctcaaggcaccaccttccatggtcaataatgaacaacgccagcatgcagagcacatattcttatcatttaggaaatcaaaatcaccatttgcagtttgcaagcatattttgggtaagtattcacttaaaaaatataaaatattttggcataatcagatctgggtttgctgtcttaaacattagctattttaaattcctttttaaaa

SEQ ID NO: 10992 - DNA, 2300 bp, Homo sapien
gcattttgggaggctgaggcagcggatcgcctaaggtcaggagttcaagaccagcctggctaacatggtgaaaccccgtctctgctaaaaatacaaaaattagccaggtgtagtggtgcacacctgtaatcccagctactctggaggctgaagcacgagaatcgtttgaacccaggaggcagaggttgcagtgagctgagatggcaccatggcactccagcctgggtgacagagagagactccataacacacacacacacacacacacacacacacacacacacacacacacacacagacattctgttgcagtgacataaaacctcaacagtatggctttcttataactaggaataagaaacaggaagatttcaacaaaaaataaacttaaaaatactgaaacgaatttgactgtctgtgttgtttcagaaggctgaataagcaccaaaaagaagttataggaatgtagaccgtagatgtcagctcaaaacgaaacaaacccctgatccgaacaacctaacagcactggtttgaatactgaaacagctgtcaggaccacttgcgtggaatgtcctagaggcaactggagcaccggagggaaggttaattacttgatactctaatatgcctttcaacacggattccacaaacacgacaatgctgatttttgtccttttttttttttttcctgagacaggatcagcctctcacccaggctggagtgccgtggtgtgatctcgccccactgcactctcgacctcctgggcaatccttccgcttcagcctcccgagaagctcggaccacaggcgcaagacaccacaccgggctttttttttttttttttttggtagagacagggtctcacgatgttgcccaggctggtctcgaactcctgagctaaaatgaggcctgccttggcctcccaaagtgctgggattacaggcatgagccacagcgcctggccgacaaagctcatcttactgcatttgagaagccaggtagtcaaggtcaggctttcctgtccctgctttctccctctcctatgtgagccagcccttaaagagtgaaaacggcaagagccaaagacgggttttcctcctagggtctcctagcgacccgctgcccagatacatttggatgattgtcctgcagaaggccaaagccctccattatgaaaacgaagcgttcggccgggggcggtggctcacgcctgtaatcccagaactttgggagaccgaggcgggcggatcacctgaggtcaggagttcgagaccagcctggccaacatggtgaaacttcgtctctactaaaagtacaaaaattagccgggcgtggtggcgggcgcctgtaatcccagatactcaggaggctgaggcaggggaatcgcttgaacccgggagacggaggttgcagtgagccgaaatagggccattgcactccatcctgggcgatagagtgagaccctgtctccaaaaaaaaaaaaaaagaaagaaagaaaacgaagcgttctatcctggaatgttctcccatggcaagaaggaacagagaagcaggagacagagatactttgaaaggaggtgcgctctgaggaggggaaagcgggaagagcgattccaagtttaggaaatcctgcacggcgctggagcgtggaagggcaaggaggagccaggggaggcggtgtgcagggctgagaacggagggagcgaactggcgtcgtggatctgcgggtccccgggcgggctgtactagggtagtggggagagggccgggggcaccgcgaggccggggcgccggacaccacgcatgcgcggggctgggagcttagcggggcgcgcggctgcagcagtctgggcagaccgcctcggcctcgcccggtgccggctgcggccgcccccgccccagcgcggcggccgggctcacactagtcccctcccagccacccggaacccggcagcccggccagacccgccgaggccgcgacgccggtgtcgacagcggctgcgacggccctgggagcgcgtgaggctccggggtcgcggcggcgattggccggccgcggcgcccgctcccagaatgcagcgcatggcgcgtcattgaagagagaccatgatggcggcggcgctggggcccccagaagtgatcgctcagctggagaacgcggctaaagttctgatggtgaggacgccgcgcccctcagaccccgggattcgcgggcccccggtcggccctgccactccaggccttgctgctcgctgggctggcgactggcaagggcctgcagggagcctggaagtggagg

SEQ ID NO: 10993 - DNA, 2300 bp, Homo sapien
ctttacaactacagagctagttcattaacttagctactgtgtatattccatcatttggatatctacctttcattttcctaccccttgactggacatttggggtttttctcaatttttcactactgcaaacaatgctgaaatgatcattgtaactgcaacatttttattaggtattttatgcacaaattttaaggtccattaaatctattttataatatttttcattccacaagtgttttaaaaattatttttacatctttgaaggcagagcaggagcaggatctttaaacacacaacaaaaaaagattagcagccatgtggcttggggttggggtggagaaagtatagtcagcttaagagtgaaaagaaggccaagcatggtggtgtgcgcctgtgttcccagctaccctagaggctgaggcaggaggatggcttgagctcaggagttcaaggctgatgtgggctgcagtaagttatgattgtgccactgcactccagcgtgggcaatggagtgagactctgtctctaagaaaaaaaggaaaaaatgtggaaaagtacataggtaatgccagtagggctcaattgcagaatattggctggagacttattttgctcccagtactgtgcaagatatctgggtagcatacaggatactatcgaaaaattaaattgaattctaagctgcacgatgatggtttcttttttttttttttgcacacttctgctggcaggaagggattacggtttgattatcagagcccaaagaagagagaaaacagagatctgagaagattccctggaagagctgaggccttaagagattgaaagagagggaggggaggaggatgaaccagggactgaaggctgggtgagactgtcaaaatagtgcacagataatgacctttactactgtttcccatgagagtaaaatttaaaaatttcacaagagtttgtcaattaaagaggaaatcgagttgactttaaacactatattgaccctcagcatcacttgccacagatataggtggtaggaagtatgatgttaggagagccagaagtagactgaggatttggcttccagtctattatttctactgtgaatctttgcaccatccctgcttctgtccctgtaccagatccacagtcctcaaatggatagtgaagctgttcaaaacccacgacctcacttgctggtatatacggtactatactattccctacaccataaaatacttctcagaaagaaaatatacatggggaggggaggttgattaaattaaatcaggttaaatttgggtgtgcatcagacgttcttttttttttttttttgagacggagttttgctcttcttgcctaggctggagtgcaatgatgcgatctcaggtcaccgcaacctccgcctcccgggttccagtgattctcttgcctcagcctcccgaagagctgggattacaggcatgagccaccacgcctggctaattttgtatttttaatagagacgggggtttctccaagttggtcaggctggtctcgaactcccgacctcaggtgatccacccgcctagacctctcaaagtgctgggattacaggcgtgagccaccgcttctggcaaacgtccttcttaattgtttgattccactgtcccaatagccgtctgtccttttctgcccctatttttagtgtccagccactagttggtaacttggtggctccttcaggcctgctaacttttttttttctttcaccaagactggtatgagatacttaagaatagtggctttaacgacagttaccaacttttaatacaaatgcagtcgagagggcaaatactcaagtttgggggcagatagcagccagtcaaataggtccgagaggccctggcgagctaccgcaggccagcagggaggccgtgggcaggtggcggtcgaggccggaggcaggaagcacggccgggcggggctgggcggagcggccgcggaggagcaggggccgcaggcgccccgcccggactggtatgcggccgagagtgacgcgggaggcggggtcacgtgacgcccgtggaatgccaacaatgtagcgaatgtcccacttgggtctgcgctttggaaccgcggcgtgagcgccccgggaagatggagcagtcgccgtccacgccaccgccgccgcccggggctcccccgtccctgcggggccagcagcagctccagccaccagtgcccggtctcccggcgcgagaggcccgggagccgccggccaggacgcccccgagggtgtagaccgcgcccctggaggtgagggg

SEQ ID NO: 10994 - DNA, 2300 bp, Homo sapien
cagacttttctggtaattataattacttctccattttctttataattttgtcacctgggaattctcttgaacaatatcttttagtattacctgcttttgaatgttttgaaaatgaattcatacagtaaatacatttttgtctttggtttcttatattcaccatcatgtttgtgagattcacattgtttcatatgactgtagtttgtaaatttgtgttgctttatagtatcccattgttgattggtagttttattgctgtctagtacaccacaattcactgaactgtcctactgttgatagacacttgggctgtttccagctttttgttctcatgaacaatatagctaagaacattcttgtaatgtctctggatacacttgagcaagattttctctagggtaagtactactttctaaagcaggtgttccagtttacattcttaccagcagtatatgagaattcgcagtagcctacaaacacctgctactgtcagagttcctagattttttgtttgttttaagacggagttttggagttttgcccttgttgcccagactggagtacagtggcgtgatcttggctcactgcaggctctgccttcgggttcaagtgattctcctgcctcagcctcccaagtagctgggattacaggcttgtgacaccacgagtggctaattttgtatttttagtagagacggggcttcaccatgttggttaggctggtctcgaactcttgactcaagtgatccacccgtcttgacctcccaaagtgctgggattactggggtgggccaccatgaccagccgtatttttttttttttttttttttgagacggagtctcactctgtcatctaggttgctggactgcagtggcacgatctccactcactgtaacctgtaacctccgcctcccggattcaagcaattctcctgcctctgccttcccagtagctgggatcacaggcgcctgccaccactcttggctaattttttttttttttatttttagtggagacggggtctcattgtgttggccaggcttgtctcaaactcctgacctcaagtcgggagtcaggaggtcaaataatctgcctgcctcggcttcccaaaatgctgggattacaggcgtgagccaccaccacgcccggccagagttcttaatttttgccaatctagtgagtgtggtttaaaaaccaatcaattgaaactaatcgtggttttaatgcatttccccgattcgtaatgcgcttgcgcaccttacatgtttgttgactatctggattttgtcattgccaaagcacctgttcagtaattttatccatttttcgattgggttgtctgtttagatcctatatattctggataattgcctttgtcaatcatatgtgtaacaaatttctactgtgtggcttctctcttatgatgtattttatttcccactcttcagtcgtaagatggtatcacttgtaagttcagtcatatacttggcattttgggttcatcatggagttatgtattttgaaggtcagattatttttgtcgtaacccagtcaaatcaattgcttcaagttagttgtttttgtatcatatattcccacccataagtcctgaagatattctagaacgttatttcctacaagttctggatttgctgtacgcgttcaggtctctaagccacccgaactgtgtgtggctggaaggatcgctccatgaccacgtacgctggcggcccctcttccggcttacctcaggggctggtatcgcgggcctgttctttcatcagaaagatctatattttgctaataaaggaacgctttgtgtccaataaggttttcgtcattacgcatgaaaacgccaccttaagcttatgtcgcctgtgaatatttaagggaaaaaaacatcccggcaaccaactgctaggcgacggacgctaagcacctcctccccgcggacgtcagcacccgccttttcccgaagtcgcaacacgcaggcgcgctccggctcgctcaccacgcacggaagtgcgcctgcgccaggagacgccccgcccagcccctggccgactataaagtgtcgagcttctcctcgcgagagacttagtgctcatgctcgctgcaggggtcggaggtcagggcgagcgtctcgcaggccgtaggaggaagatggcggtggagtcgcgcgttacccaggaggaaattaagaaggagccagagaaaccgatcgaccgcgagaaggtgaaggccccctccgctttggggtccgggaagaggttggggatgagtcccgcagggtgcagag

SEQ ID NO: 10995 - DNA, 2300 bp, Homo sapien
tcatagtcaaataaattgcactaggacaacatggtaagggagagtgatgctgtcgagtggtatttgttattctcaaagagcatttccacataatattaagccttaggtaccaaagcaccaaaagtgaaaaataaactaccaaaacccgagttatttcttctctaagggttattggaaaagcttttgatatgtgtttagtgaagatggttcctgaatgtttatctcttgggtgtacctccctacaaactactgtgggcttgtctttagcgctgcacataactccttggattgacaccataatggctttttagtataagtaaaaggtgtgtaattgaaaaatatgtgtatatactctctctatatatttttgagacagagtcttgctctgttgcccaggctggagtgcagtggtgccatctcggctcactgcaacctccacctcctggattcaattgattcttctgactcagcctcccaagtagctgggattacaggtgtccaccaccacgcctggctaatttttgtatttttagtagagatggggtttcaccgtattgaccaggctggtctcgaactcttgacctcaagtgatctgcctgcctcagcctcccaaagtgctgggattaaggtgtgagctactgcgcccagcctaaaataaattttttattgtgatgaaaagatatataacaagccaggcacggtggcttatgcctgtaatcccagcactttgggaggctgaggctggcggatcacttgaggtcaggagttcgagaccagtctggccagcgtgatgaaaccctgtctctactaaaaatgcaaaaattagccaggtgtggtggcgcagaattgtaatcccagctaattgggagactgaggcaggaggatcgcttgaacctgggaagtggaagttgcagtgagctgagattgtgccactgtactccagcctgggcgacagagcgagactctgtctcaaaatatatatgtgtgtgcctatataacaaaatttgccgtgttaaccatttatttttattttttgaatctcactctgtcacccaggctggagtgcagtggcgtgatctcagctcactgcaacctctgcctcccaggttcaagcgattctcacgcctcagcctcctcagtagctgggattacaggcgcccgccaccacgcctggctaatttttgtatttttagtagagacagggtttcaccatgttggccaggctggtctcgaactcctgacctcaagtgatccacccaccttggcttcccaaagtggtaggtttacaggcatgagccaccgcacctggtcattaaccatttctaagtgtacaatttggtggcattaatagcattcaaattgttgtgcaaccactgtttctacaagtttttatccctccctccaacagaaaccctgtaccccatcctgcctttttttaatttttaaagagacggagtcttgctctgttccccaagctggatttgagctccttggctcaagcagctgggactacaggcacacaccaccatgcccagtgtgccggtaccctgttaaggacactctgtgcctattaataatttcccattcctcccctgccccatcccctggtagcctctaatgtattatctgtccatatatgaatttgcctattctgcatatttcatttcagtgaactcattacagtattcgtcattttggcttatttcatggtgtttttagggttaatgttgtagcatccatttagccttgtcaaggctgaatcatatttcattgtatgtgtgcatcacatatgtactcatctattgatggacacttgggttgtttcaccttttttgccattgtgaataatgctgctgtgaacattggcatacaaatgtgtttgtgtcgctgctttcagttcttttgggtatgtacctaggaggggattactgggtcatatgttaactttgtttaatttttgaggaaccaccaaactttttcacagcagctgcactattttatattccccaaaagatgtataattttaaactatttaagccctgtacactagagctaatcccttgaagattgggaccttacttgtcttatttggaggtgcttgttaaatttatgtagtagtatgatacctgtacttaagcatcactcaagggtaagtgttctaggaaggttgatttagcttatatggaagaactgttgaataatggcttgatgaaaatctcttcagaaattaaagtgtatgtttcttccaacaagagttcctatttgccaggtgctgtgtgtgcttagatcctgagggtata

SEQ ID NO: 10996 - DNA, 2300 bp, Homo sapien
tgttggtaggactgtaaactagttcaaccattgtggaagacagtgtggcaattcctcaaggatctagaactaaaaataccatttgacccagccatcccatcactgggtatatacccaaaggattataaatcatgctgctataaagacacatgcacacttatgtttattgccgcactattcacaatagcaaagacttggaaccaacccaaatgtccatcaatgatagactggattaagaaaatgtgacacatatacaccatgtgcagccataaaaaaggataagttcatgtcctatgtagggacatggatgaatctggaaaccatcattctcagcaaactattgcaaggacaaaaaaccaaacaccgcatgttctcactcataggtgggaattgaacaatgagaacacttggacacaggaaggggaacatcacacacttgggcctgtcatggggtgagggaaggggggagggatagcattaggagatatacctaatgtaaatgacgagataatgggtacagcacaccaacatggtgcatgtatacatatgtaagaaacctgcacgttgtgcacatgtaccctagaacttaaaagtataataattttaaaaaaagaaaaaaaaagtgcgtactgctccaacaacaacaacaacaacaacaaaaagcgcatttgttccacatctttccaaacacttggtaattttctctttttcgttttagctatcctgctgggtatgcaactgtactacattgagatttaatttgcatttccttgatgactaatgaaatttgcatttccttgatgactaatgaaattgatgtcttttcacattcctgatgaccatctgaagatagttttttctttcttagatggagtctaagatcgctcaggctggagtgcagtggcgcgatctcgggtcactgcaacctccgcttccagggttcaagcgattctcccacctcagcctccgagtagctgggattacaggcgcccactactatgcccagctaattgttttgtatttttagtagagacgaggtttcaccacgttggccaggctggtcttgaactcctgacctcgggcgatccacccacctcggcctcccaaaatgctgggattacaggcgtgtgccaccgtgcacggccaaatctttttttctttttgagacggactcttgctctgtcgccgaggctggagtgcagtggcggatctcggctcactgcaagttccgcctcccgggttcacgccattctcctacctcagcctcccgagtagctgggactaccggcgcccgccaccacgcccggctaattttttgtatttttagtagagacggggtttcaccgtgttagccagaatggtctcgatctcctgaccttgtgatccgcccgcctcagcctcccaaagtgctaggattacaggcgtgagccaccgcgccgggcagaaatagacattttcaagtgactggagatcattcattatataattaaagtaaaagtagtctgcagggtgtaatattttaaagcacattacaattatgacatttatgaaataattccaaaatctgaactactttttcaacaatttaaaaaatctctaataaaaaggggaatggtgaattttgctttatttatatacacatatttttttaaaccccagcactgttgagtactagtgtttgtgttggcaacatggtttagcgggaaaaacacagaggtttactgcaactgtggaccacgtgagtgagaaaaaagtcactatatgtgtaaagtattgtgtaaagaacgttaaatagcttgattctaagagaaactgtttaggtttacatggtattttactgacaagcacacatattgtatgtgacgaaagcatatcacgtataaattagtatatgtattatgagctcaatctgttaatttaggttcttattcttaagtgctgctgtctctgtttataacgtaatagtgctactttcattatctcaagagagccgtggggttgtacatgggtctaaaacggacacgcgacaagggttcctaggaataaaccataaacaggcccgggagctacgctaacgccaaacgccgagcagtgagacgcgcagcacccgccctgcgcctcggtggcagccgtccacgccgtcagtgcctggcggttcccgtgggacataccgtccactcgccacgcccctccgcccgcggcgcaccccacgcaccgtgccctggccgcccgcctcacgcaccgctttcctctccgtccagcgctcgctgcagccgggccgtctcgcagtccagcgtgct

SEQ ID NO: 10997 - DNA, 2300 bp, Homo sapien
tttttgtatttttagtagagatggggtttcgccatgttggccaggctggtctggaactcctgatctcaggtgatccttctgcctaagcctcccaaagtgatgggattacagaagtgagccaccgtgtgggcctcagccatacaactttgacaaagttctttgtgtgtcttcccagtcaatagtggtttctcctttattcctgttcccacagacgcaattctgatttttttccccacctaaattttctttttctgtcgcccaggctagagtgcagtgacacaatctcgacttactgcagcctccacctcctgggtgcaagcgattctcctgcctcagcctcctgagtagctgggattacaggcctcaccactgcacccggctaattttatgtattttcagtggagacagggtttcaccatgttggttgggctggtcttgaactcctggcctcaagtgatctgcccgcctcagcctcccaaagtgctgggattacaggcgtgagccatcccgcctggccatatattattgttattttagatagggtctcgctatgttgcccaagctggactcaagcaatattcctgaatagctgggactacatgcaagcaccacagcaccctgccaaaatagctaaaaaatacaccttcctgtaacagctctgataaatatcttttacttcgtttatttttcttttttgagatgcagtctcccaggctggagtgcagcggcatgctctcggctcactgcaacctccgcttcattgcaacctctgcctctgaggttcaggcgatcctcccacctcagcgtcccaagtagctgggattgcaagcctgcaccaacatacccagctaattttttttgtattagtagagacgggttttatcaccttggccaagctggtcttgaactcctgacctcaagtgatccgcccgccttggactcctaaagtgttgggattacaggcgtgagccaccgcacccggcctcttttacttcgcttaaatgtccaattttagtagtaaaatcccggaaaatgtttttaggagtatgtttaactgaaaagctcatattttctttcatttttgggcaattcttaaggtaagcaaactaatgttgcatgataaagcccccatcaagtatctcatacttaagcaaagacctcaaatcattgtggctttattgcagctttccttcaaaatatcatctgtgactgaggaaatccctatcttcctatcagactaatgaaaccacaggacagcaattagacttttaagtattgggggtttagagctctagatattcgatatgcagactactcatgtttgtttgttttaataaagactggtccaaaggctcattttcacacaagctacagtttttcagttccaggaccaggtaaagatggtcagctccgtgatccataaaatccaagggtgacgactcaggattaggaccatttcttggtgacattgagatggtcgagctggtccgcaatgaatctatgcggggggaacttggaagtggcggccgcctttatggcctcgaaggcctccctcctgcgcaccgcggcgtggccgcgctcctgctcccgggtcatgtagggcatgctcagccagtaatggttctccgcctcgatctccaggcggcggatcatgttctgcttggcgcgcaacgacacgaaccgcggccgccggtgcttcccgatccactgacggccgggaatgcggccgcgccagaggagcgcagtcaggaacatggtgcctgcggaagagagggacgggctttgcggaggcgaactggcgcggccggacctggagagagcagcgggcgcgcgctccagctcacgcctacgggagttcccgcaccgcctcccctccagagaagcggggagcccaggtaaggccagcaggcgaagaaggagctccctagagaaccgaattcgcacagctactcacctgccgcgctgctcaagactctgcgtctccgcggccgccagcagacgccgtggcgtaagcgcacccgtctcgcggggtctcctggggcctcggcgagagacttcggctctcgcgagagaggactgcgcctgcgcagagccgaggacgcgtccggcgccgagattcaaactagtggcgggaggctgtgagctgagcggtggggtctgcgtacgcctggagtccttccccgctgtgctcagcatggaccctatccggagcttctgcgggaagctgcggtctctggccagcacgctggactgcgagacggcccggctgcagcgagcgctggacggagaggaaagcggtg

SEQ ID NO: 10998 - DNA, 2300 bp, Homo sapien
acaagaaccgtaagttctctcagggtccgagaagtctgggactgatgggctcaactaacatgcgaaggctaacaggaaaaactgctgcacctggaaacacagagaacaaattttgaaaagaaaaagaaaacatctttaaagataaagagaaaaaaaaatcctctttgtacttcataatttaaaaattgaagcagaaaaaggaaaatgcgctggcaattcattttcttctgccagacttgaaagggtttgtaatttagaattataatgattgaactgccctgcatcagaaagcagcacctgttgactcttctaattgggattatgcttatattctttatattttctcttttgaaacagtatctcaaaaggtatagtaaaactagcaaaatagtttatccaaagtttaccaaatgatcagctgcttaattatgagttcaataaaatctgataattttaatgtttttagtaattttgaaatgagtggttaaaaaagaattctgattttttttttaggattctagatttaattttcatgacaatgaagcaatccttttttagtgagaagggagtgggtgaagagaaaaaaatcattaggatttttctaaaataacttgtctaagtttccaagaaacacaaaaataagtatctctgaaatataatttggtattatataaaaaactaaacaactatatatccagctcttctacgtatatacataatgtaaattccattcacactctaacctaggatcacattcatttgtcttgagtcctattggtttagaaattctggggaataagaggttaatttttctgattatatcccaacattagaactactgattgtccctcccgtaattcagcatcttttcaaactgtgggccaacaaatcaatatcttattattaaaataataagacttgaatctctacttgttttctaggatcgccctaataaagtacacaaactgggaggctttaaacaacagaaatggactttctcacagttctgtaggctggaagtttgagatcaccgcagcagctgggccgtgctccctccaaaggggctaagggaggatccggccttgctgcttccagcttctggcagctggtggcagcatcactccagtccccgcctccatcttcaggtggctgtcctcctcctgtatcagccaaattttcctcttacaaggacagcttccctaatctagtatgacccatcttaatcatatctgcaaactccctattttcaaataaggtcacatttacaggtaccaagggttaggatttcatcacctttttggggagacacagctcaacccgtaacaatccgccctctggttcccaaagttgatttccttcacctgtgcaaaatacattttcgccccatgtcaacatttccaaaagtcttaacactttccacatcaactcttctcaccatctacatcatttaagttacagaggagacctactgtgattcatcctgtggcaaaatttctctccatctgtgatcctgtgaaaccagacaagttaattggcttttaaaagacagtgggggccaggggcaggcataggacagacagtccattccaaaagagagaaaggggaaggaaaaaagggatcatgggtcccaagtaagtctgaaagcctgcagggaaaatcccattagactgctttcactattttccatctaaaatttttaaatgagctatgcaagagtaaaaacaagttatccgacagagaaactagagttagaagtgcaggatgaatttaccaagagagtaggttaaaagggaaacttctccttcaggcctatggtgggcatttcttgtttactcaagaacctaccatctctcacaaaataatgtccactggaattcgattatgtcatgattttgcctgcccccgcgcccccagtcacagcaggagggaagcgcaaccctagcctttccttactctagagacaggaggcgctatgcagcgacggcggcagagaaagcgtgggagcgacgctcttgctctggacgccgacgtgcccacgtcgaggccgcgcccagacccggaggcggggccgtcacgtggggcagcgtgggccgctgccttggaaacgcagagcgcgcgctccaggtaaaggctgctacgcccaggacagggttctcacggtggaggaaaggacttctgcgggataccacgctgtgcgccaaaaagccgggcggcttcggagccagagcagcggctctgcggcgcaggcggcgggtcggggcagccttgaagccgggatccggcccgaagggtgagcacca

SEQ ID NO: 10999 - DNA, 2300 bp, Homo sapien
ggcaggaatatttaccctttttgtccaatgtggatgctgaggcccagatagaacccaaaaagctctgggacctggcatagaccaggtgctaggtaacaagagattggcagagccttgcccagggtcacaaatcaagaggagagattcaaatgcagatcctaaaactccagaccacccctcttttctctctccctacctgcttgctcagtgcaggagactgggagggccctgagccaggatgggtttagactcatggaagaaaattccatgggggaaaaatgttttttccatgagaatctgctctcatatagcagccacacttctccatacagcccagagacagatccttctaacattcaagctagtcttaggtctttgggggagagattcaaagattctgaattaaaaaaaaaaattagacccccagaacagtagaatacgattcatgtctgttatgaattacagttgggtctttatcgtgcagcaaggggtcctcaatggtgcctacatcctttctgaaattgatcttattgggataacatggccaaaaaggaaaacaaaagcaaatagtcatgcgtgtttggaagatctaggaccgagacatgcaagtgtgatgggaaggttcactgctcttggaaatttaattgctggatggaaacagacatagaaatctggattccaaccagacttgagctccatgctagcatatcagactgcctgctggaatccctgtgtggatgtctcaaaggcagataaaactcaacatgcctaaaagcaaatgaattgtttcatgctgcaccaggctcaccaccacaaaaggggaaatcagctgcattctcgactttagttggtgacatcatcatccccctaagcctctcaaatgagacacttgggattttccctcggttttccctcttccttattcctcctgccaatgtgctgttcagttctcctcttcccaccatccactgtccctttgtatctatcttctacctatctttatacatcaacccttaaccggactctctgattgcaatctcactctcctctacccatcactggtttcagagagatttttctgaaatccaaatttgaccttggcactccttgcttaccaccttcaatcacccaccagcattgatgtgaaggttttttttatgtgattaacatttaaatcagtaaactttgagtaaagcaaatgacccttcataatgtgggtgggcctcattcaatcagtaaaaggctttaagagaaaagactgaggtcccctgaagaagtgggaattctgcctccaaattgccttcagacttgagctgcaacatcagctcttctgtgggtctgcagattttgaacttgccagccccacaatcacatgatccactttcttaactctctctctctctgtgtatctgtgtgtgtgtgtatgtgtatacatagcatatacataacatatacatacataaacatatgtatttcctgttggtcctgcttctttgactagccttgactaacagaaccatcagacccaggctactccatcctgtggctccacaatccataatatgttaactctgggtcagagctggctgcttgggcaccagacatggtagctccattccagacagctggagagaggaagggacctaaaaagacatattcccttattttagggacacttcctggaagtagaacatgaccatcccattggccagaacttagtcacatctagttgcaagggaattgggaacatagtcatgattccagaaccatgcgcccagctaaaaatcaggaggttttatatcatggtagaaagggggaacagacatggcgctacagcaggagacagtatctgctacaaataccaaacgaagggcgctggcaatgagcattttagaggttaaggggagatttaatgcgggcagggtccggcagagaggggctgcacagtgcaaggggaccggggctgactttgaaggaagggctactccgcccaattacgagaacacgtgagcacccttgccccagagtgagcatcaacaccgtgatcacggttatcacgtgggaggtctgcccaggatcccggcagtgaggctgccctggaggcaggcttgctccgccacaggcgcgcaggcaacagcagcggagccgagaatggcgaggccagcgggcgaccaggcctccggccaagggcacgcgaccccccgcgcttcccgagtgctcccctgaagcctggtacgcgtgggcaccggcgcacggcggtgccccggaaacgcagccatcgcctcagggcagccactcac

SEQ ID NO: 11000 - DNA, 2300 bp, Homo sapien
tcgcaggcactaggggtggaggtcacgtcgggcagagtcagatcgcaggcactaggggtggaggtcatgtcgggcagtcagatcgcaggcactaggggtggaggtcacgtcgggccgagtgcgctgcagtcagaagaggagctgtgtcccgcatacggtgattgtaagccaggtccatgccaccaagagctggagctgtggagtagtacttggtccccagaaaagccctcagtctgaggtccacatttcttcttaatgtgggcagaaataattgctgatgcttgtggtggttgagaatcctcagctgcagttcctttaacagttgctgtgggaagttttctacatcttgcgccaatcttaggacaggtgtaggtggaccagatgtcttctcagatgatgtccaagttagcagtctgggagtactgtaagattcttccttttaaaatactcttttgattgcttctggggaagacagtaatacccactcatttactgctacaaaaatctttattgttataatattagtagtgttaaggaattcattttccatcttgttatattagtagctttgtaccttagcccacagaaccatttagtaaatattttcagaaataaaaaatcaagttttaaccaataatttgtttctttttttgtaggtgtatgaaaacattatagactggtattttcaattttcatttgcaagaaaatgatcagtggaatgaaataactgaagtataacagaagatatattttttaaaacggaaagcctttgtacagttcctgggattcacagaagcactactccagagcagaatgatgccttaatcttaagtgtccatttgtgcagcattgacttagagctacaaaagtgacttaatgttattctggaaataatacttacctgttatgagttgctataatatgagctgtcatcacattttaacatgcatatgtattttttgatacctgaattacattattagaataagtatccatatacattttcactccaaaaacacaagcttaaaaactttaaagtacatctagggcaaatggtggctgaaagtgaataatattcaaattactgttgcttgtactgtataaggaaaactgcttttttaaattgggtatttgctaatttataattactattttatacttttcaacatttttaataactttttttattgttggctataacagaaggattcagatatctaaatatcatttagaacatagaacacattggtctaattcatcgaaagcttagttatgagcattaatacaaccatgtagtagagcaagtgcccaaggtttaaagggaacttggcagtataagaaatattttgggttctctctgctattttatagctttttttgttgaactttcaggggtatgtacatgggcagagaaacacaaaggtacatgtgctggagaatactggacacagtaggaagaagtataggtgtccagaagaaaatctaagaggaatattgtaatttgttaaaaaaaatagttttgagttttaacagcagttagaataaagcatgctgttgacttcactttcaaatttcagtgtaggtaatgactaaaaattactttgaaactttttacagtaatactgtaatagcttaaacagtgatttaaaatgcaatttaaactaggcaaaaaaaactttagagtaagttttcctcctggctgtcagttggaaattctaacctgagtggtcattttacattcccagtctcttgagaagtggattctactcttagacgcacagtctgaagtctgacttcctaacggcaacccctttatgactagacacatttctcctttttccttttaaaatctaagcgacaggaggtgttgcattaactccaaggaaaagtacagaataaacaatgtagaaatgtcactcctcatttacaccttttagacagacagacacacacacacacacaccccccccaaaataattgattgcttccagtgagtgggtggagatgaatctcagcagcatctgtgagtactacaggttggagcttcctgtctgtaaaatgggactgcaggggagggggtgttgtgaataagttggactggatgacttctaacattctgtgatgcctaattttgcaaaatcacttttcattcacccaataaatttttttcttcttttttccacagagttttgctctgtctcccaggcaggagtgcagtggcgggatcttggctcgctgcaacctctgccttccaggttcaatagagtctcctgcctcagcctcccaagtagctgggatta

SEQ ID NO: 11001 - DNA, 2300 bp, Homo sapien
aggccatagcactagcaaaagcgtctcaggccttcccctgaaggcagacctaagactgttattcaagaggtgccctccctctacccagacaaaggaacatccttatctctgaagacacaggaccacagagatagacttctgccttctcggcagaaggcaaaggggagccagcatgtcacatggcaagagagggggcaagagagagagtgggggaaggatcaggctcttttaaataaccagatctcatgtgaactactagagaaagaacccctcatccaaggggatggcactaaaccattcatgagggatccaccctaatgatccaatacctcccaccaggtcccacctccaacactgggatcacatttcaacatgggatttggaggggacaaacatccaaaccatatccaatatccttgccaacactttgatttgggacacctaccctcctaaactgtgagacaaccaatttctattattccccagttttgtggtactttgttatagtcaccctaggaaacgaatgtgacagttttatagttaggttataaacaaaatgtcgtgaaagatcatttctagcagccctggagcttgtaaaggacatggctttgtgctgagctctagcagcatggttttggtacgtagagatgacatagaggagaaacggctttatgttcttccatgtccatccgaattctatgttgaggtctaaccctcctaagcagcctctctggaaaactagttgaacttgaacctaaacctactgtcaactaggccactaactaatatgacttttaaggcacaaaatcagggagaacagaatcttttatacatgctttattactcaagcagcagtgtgcagtgattaaatacttactcgcttttactacatttctctgacacagcaaagggtgacgtcttcttcatggagactttagtgagcagtagctaatttaaagctcagtgtaggccggtcgtggtggctcacacctgtaatctcagcacttctttgggaggtggaggcggagaggggttgggattccttgagccttggagttcagggccagcatggcaacagggcgaaacctagtttttacagaaaatacaaacatcagctgggcatggtggcgggcctgtagtccctgctactctgcaggctgaagcaggaggagtgctttagcagggaggtcgaggcttaaatgagcccaggtcgtgccactgcactccagcttgggcgacagagcgagaagaccctgtttcaaaaaacaaacacaaaaattcattctaaccaaaactgaatgctagtagcaggaactggtatgaagattgcggtctggaatcccttctaatgcgtctgaccttgcattgtgaagtcttcacagtgatgcttctgggttctatatgattatcgtcattgcttagcaacctctagttgtaaataaattctttaaatttccttagtcgtttgcggggcaaggagagggtcatttacatgccctttccttctcgctactcaatcttaaatttgggttacgaatcaaactgatggaccctacatggcttctacccgaaattacaggtatctaccgttccatcttcaagaaagggaggggttccgccaagatggacgaacataaaaatcacaggaggagccttctaacaatgtgcattcttcgcacactgagtggggaatggccttgtcatgtttgaaacagtgccccaactactcaatgtcccaggaaccccagtggagcgagttctgtacacagagagggccaagatccacaaatcagctaaggaatcatttccatagtctccctcccctattgagtctcgatccacaaaagctatcccctgtccctctcatccatcaagggcgtgtttttcgcctctccttccccggcctcccgcgtccgcccagcctgtccgcatccagccccgccacgccccatgggcggtcccgagctgcggccccgccccctcaccgcctccccggccgcggaaaccccgccccaacgacgcggagaccgggggcggcccgcggcccgcggcgggcgggctggcggggacggacgcggggggaggggggcgacgggatgtggggtgggggcggggcctggctgggcgccgggacgggaggagtcccggcggcgcctcggacttttgctcccacaagtcctgcctcggaggcgggggagctggaccagcagccgcctggagcgtccgagtcaccgtcgccggggctcccgcgctccccagaacggtgggacgcggggctcggcagccgccagcggaacatg

SEQ ID NO: 11002 - DNA, 2300 bp, Homo sapien
catttgacctcattttttattccaatgaattttttaaactgaaaataaacctgtgacttaagatatataatggttagagggaagaaaattggcctcaagtcttctcgtcaggaaaaattggggaggatattgatactgatgtactttttagggctgagtttgttaaaaattctgaaataccaattattagttgaggatttctgagtttcatgaagcgtttttataaattcagaggtgtctagaggcagtggtgtgctagtaaatatgtttaacaatcatctgtctcaggaaaaacagccttgatttgtagtgtttgccaattagtagtataaataaataaatactctaccatgccaatgtcaagctcccctgcatgaagcagaggtgggaagacatgcatgatagactcacagcctgtacgcgccactccagtacaacactgcctaaacaattccaataaggaaaaacagatctctcccattgtttccaattaacccactaatttataaagtatgtaatttgttcacaatgtgtctggcagccttatctactataaattttccaattcatatatgcatgttcagctcatgttccagagtttcatgttataacaagataatatgattttaggcttaaagggaaaagattatcatcataaattgatttatattcattaaaagtagtgtaattaggtaagatgaaagtagcttaatccagacaatgtatagtttaacagcaattaagtttataatatttcagcctctggtagaggctcgcatagagcctgaagaaaaaagggaaaggaacaagttagtaatggttttatgccctatcttctgcttgcctaattcagtgtacactcatttgcaagtaaagcatacatttaacagttctaataagaatcagttgaatgtcattacagtatacagggcaggaaaactcaacaaaataaaaggcaaagtatatcagtaaaatattttgttgctctatcagtccaaatttgaaatacttcaaattttagataaagttctgctttgacccagaaagaaacatggcattgatgaatccgtgtattcagtacattcagaaaatgttttaagtaacaaactcttgcctaccatgtagacagaagtctaagatcaaactcctccttcatgcttttaagatttataggataaatgtagaacttcaagcaagtcattttttaagtgatgatttttctcccactgaactggaatgtccctcttctatcaccccatgtatattttcatttgaatttgacatgacagatagtaccgatcttttcacatgtggaaaagtgaataaagggatctgcagcatattaaaatgcatggagatgataatacttttcacatgatttaggttataaataaatcaagtgcaacgtttctgggttcttgttcaaagaagatatattttcatctgatatcttttcaacgtgtccctttcctgggaagccattgatgacagtttgatcgaagtaccatgttgtttttgtaagaaaggaatgttgagtcatatcgacatgtattattgtcaaaaagattatgtttttagatagagctaagcttttgatgccaagccattgattacactgattaactttggtatttgaaaaatattaggaagtagtaattatgattaacattctaaaagcagtgtcccacctcaattttaaatttatctgattattgataatttttctgtattggaaaatagtttccatggaattgttattttctatggatgtatcaaagcaacatttgacatatttttttaagtctttaggtttatcagaatgtaggttgccaggtataacttacacaaacaagttgagtatagagagttactgatggaagccagtgttggacttaatcagtttctctgcatccttcctctccccacaatccttgcacagcactaatgcttcatcctgcttaccatcaggaggcagccactcagtaggtaatagtgaaggtactttgcagacccatttacaatatttaaggttgaatgccactagttaccttactaattttgtattttaacattcagatttatggaaaatttacaaacagagattcaagaaatggaattccttcagttttctaaaggtttgagtttcatgagaaaagaagactttgcagagtggctactttttttcactaacactgaaaataaagatatttattggaaaaatgtgagagagaagttgtcagcaggagaggttggtatacccttttattatgcatgtgataaagatgaaataataagttaga

SEQ ID NO: 11003 - DNA, 2300 bp, Homo sapien
aatttaaaaaataactaattacactgttttccaagtgggttcaaagatttttggcaaaataaaaagaagcttttgttttgaaaataaagtaccccaaaggaataatatacttctgtattttggatggccaaagcatagaaatatgaacccctgagtttcatttgtgccatttatttattcacttatttactcactcattgaatgtctattacgtgctgggcattgtgctaggtgctagagaaacagggaaaaggaagacatctcacccacaaggatgtcaaattgtgggagaaagacaatgttcttaaatatgctacatgttttaatgggaatctaaacttatcttgggcttaaggcaatactgagtaatagatgccaggtttcattaaatacctagaggaactgtgtgaggcagttagaagtatacacgtaaagactgtggtttctggaaatcaagaataaactacaaggtaagacatccagggtgtccaaaatatcctggaagtcctattatcaccaggaaacaagctagatgtcaatagtccagaaaagcaggacatgtgccaaagctaccagagttagcagaggtgaaaaacagtccagaggttgacaaagtcaggctagatacaaaaaagcaggaaaatctcaggttaagatgggctagtgatctggaatcatggacattcagtcaagctcatttgtgttcacagggcagaagtaaaccaaaccttgaccacagtaaacgcacatctgtcatgagcctaccatgtgccaggcatttggctagtcactttatataaaatatctcatttagcttccccaccccaaactgtaagagggttgttcacagatgaaaaaattgagactcaaagagattaaataccttaccccaaatagcagtgatcatctaccaaatcgtgagttatttacaaatgagaaaatggagactcagagagattaaataatttgccccaaaccacagtgatcatcctggtagagctaagattcaaaccttgaggtctggctcacaagtcggtgaagtgaggctcatctctctacttcctacctgggaaggcacactgaaaagtaagtccagaagctgacggaaaagtgaggaacctctgactgcagattaatttagacaagcgggctaagagaaagggagcaaggattaagggcagataataacaaagggatccacggaacttccactgaatgatcaaattagatttcgtgtgacaggtttttgtttttgtttcttgaagttttgttttgtgcaaaacttcaagacagcagtgattatgtgattaggagtcttggcccctttgatgttggctccgttactgcatgcccaactaaagcttctaatagctggggacatttcagaggctgaacaaagagtttattaaaaagagttactcaggaaaagtgaagaccaaagaatggaggattggaggctgttaaataaaaccaagtagtctgcctcagctacatcacttatcaccaatgcaacagccaggactggaggtatcgttctaaatctgcactggggaaaacctctgggtccctgatgatagagacatggggctggtgtgctgctgtctctgacttttagttctaggtaggataagagctactatcaaaccttttgttgaaactgaatttaaattcattataagcaaatagtgagggactgaaataaacagaatgccttgtctgagagttgttttagcagaaatgaaagaacagtcaagactataagcataggaagacatgaacaacacagatgcagaagagactatttcaaaaaacgtttcacagttttacaaggtgaaaaaatgaaaaggagaaacctgcccacacaaccgagggcactatcttgttttggactaggaagtcatattatactgtcttgatactcttcctgtcatcccatccccacagccttagaaggcagccccggaaccgaaggccacctcttgcggctgcgagcgtcgcctcagcaaccgcacccacggcgcaggcccggtaggcggggcggaagcctgtcggatgtcgcgagagttcccaagcggtaggcggcggcgccgggagagaagcgccgcctagctgcgcttccgcaaagatggcggcggctgcgggtagctgcgcgcgggtggcggcctggggcggaaaactgcgacgggggctcgctgtcagccgacaggctgtgcggagtcccggccccttggcagcggcagtggccggcgcggccctggcaggagcaggagcggcctggcaccacagccgcgtcagtgttg

SEQ ID NO: 11004 - DNA, 2300 bp, Homo sapien
taaggcggatccgacttctcccccataaccaggttttgattcgcttccccaccgcaggggttcagtctctgctttcgactttgcttctcagttgcacgccccgcagtgtggagctgcgctcaagtctcggcaactttcaccatcttgacccgagagtcgggccgtttctaagacaatgtgaacaaagaggagcagggggagggaaggggggccccgcgggagggctgtgggcgagtgtgtgtgtgtgtgtgtgtgtgtgtgtgtgtgtgtgtgtgttggggggcgccgcgctccgcgcccgccgccactggggatccgggcgcaggcaggctgtcccgggcgcagagcgcgccgcctccagtctctctggcgggcccggcccggcagggcccctggcggcccccggaggcgggtttctttgtccctgactcccgctgggcgcgaaggccgccggcggctaacagaaacccgagcccgcgcaacggagctcaggcttccacgtgcggccccgcagggcagagcaggaaggagcggctgcagccccggggcgccccgcaagcatccagtgcccggccctcccagctccgcggcgggcttcggacggtggagtgagacaccagaactcgcctttcgcttccccgagccgatgcacggcttgggatggcgccgctcgtcctaagcagcgtggtttgagggcgagaagacgcctactggagcgctcccctccacccagactcccgaagacgcgcgcccgagtcgaagtcggggacagagaaggttctctggcgcccccctgccgactgctttgcggccgccgggacccgagcagcggggcgggacctaaacatagccccaacccaaagatgcccagcagaacgctccaaacaaaacagaaacggtggccgcatctgcgtgtgtgtgtgtgtgtgtgtgtgtgacgggggagaggagttgatcttacctgaaacatagtttgcgcttctgtgtgtgtggccgaagaatggaagagaaactgccatggccatccgagtccattaaatcaactccccttccctccgactctctcaactcagtcatattctataatacaacgcaaggttacagagccccagtgaaaactagtttcccagtttcactctgaccctccatcaatgtagccagccagctagattgtaggttaccggcttctattctgcaggagaactttgagtctcgggagactcagggtttcttcctcccgcctctcgcagtgcatctttcatttgcttttctttgtaaagccagggctcctcgactgcctcccaggaagtcctgcgctctggcgcgccgcacctcgcctgccgcagagcggcgcgggcagtaagccgggcgctaggaccgcggggagcccgggctgcggcggcgctaccttaaacccagcccaatgccgctgcctgcgccactctgcgcgccggcgggggctgcgcaggaggagcgctccgcccggctacaacgctccgcgagccggcgcggcaacacctgttcgcggcagcctgggcggcacgcgagctcccggacgcggctctcctcgctcgccgctcgccacccgttctaagccaatggacatctgccgagcctctggagaatcctggatactagctttggacgcctaaagtttcttcttctttttgttttattattattatcattttttggaggggggaccgggaggggagatttgtcgccgccaccaacgtgagatttttttttccccttgaaggattcatgctgatgtctgcagagtcggttagagagtaaaaacagcgcatgccttcctggagtcaggatccgtaaattctgacgtagcccgtgcatcttaaaaatccctataataacgcctaggcatttaagttgctatggtcattctgatctcaaaccaaatggagaaactacggattttttttccttattacggtcggatgggatgaagaccttcctgcctgctaagagctggggatctatctatagagatacatagatatgtttatcaatatgtcagtgtgtgagtataaagtggtggtttcttagactatcagtggtttgaccttgaacctgtgccagtgaaacagcagattacttttatttatgcatttaatggattgaagaaaagaaccttttttttctctctctctctgcaactgcagtaagggaggggagttggatatacctcgcctaatatctcctgggttgacaccatcattattgtttattcttgtgctccaaaagccgagtcctctgatggctcccttaggtgaagttgg

SEQ ID NO: 11005 - DNA, 2300 bp, Homo sapien
aatgtcagagggcctgccactggatgctgaccccggcacagggctgcagatggccagctgaccttgtccacatgcttttccaggagggaaagagcgctcgactttctggaacttttgcccctaattgcatcatttttcatttatataagagatcatgtatcaaattccaaatttatttttttctccccatcagggtcccacttcaccccttgtgagccagctgggttcaggagtaaaggagggtccattgcgcagtgtgactgaggggcatagggagaggagggtgtggccacctgtgcaggtaacaagtgcatggggacttagacattgtcatacgcaccagccgccatgccagacagctcaggaagacactcactgcactactagcggctcaaagggtaaaaaacagtgctaacaccgtggggttagcttcttgcaaaccttatcctcccccaaaaaaggtgctttataaaagattccaagcacctgaaacattgtgatgaggccgtgtctgttgcctttagacagcaggaggggcttgccagtgcacctcacaagagctcgctgctctgcgtcagtgctgccaaggagctccttcagggttgagagatgagagagccaagtccgtgattactagatctgaggtggtttgcacaattttaagagcatctcattcttttctatacatagtagtttctctctctaagcccagtgatgatcctgtgtgtcaggaagaaatcgttttcatcctaaggaacagccgcatgaagtgcacacactccctgcacatgacaggttctctttctggactgggaaatgactgctttgagaatttcattttaaagggacttgctgagcttttaagcgttgaagaggcaatgaggtctaagggataataatagttgtcatttattgagcacttaatatttgccagacagtcggctacgtacttaacatttattatctcatttaattcccacatcaacacacaaggaagataatattattatcctcacttttatggatgataaaatcgaggcacagagaatttcagtaacttggtcaagctcacacaagcagtaaggggtgaaggtggggattcggatcccagcccgtctgaattcaaaacattaacctggcgtcacagaacctggattccatcctccactctgcccctggctcctgtttatccttaaacaaataacttccctttttctgtatcacattgctacttaattccaactaagactcacatttgctatcactaccagatgcccctacttgtccagttaaagcatttgtgtgtgtggagaatgttcatcactgctcccctaactgaaatatttaaccaacaagcaaggttctcatctttgctctcgtagcatcactactgaatgctatcacaaatcagagctaccattttggcttattagttaagatccctgattttattgaggacattgaaacatgaatatgttaaaaattgtacccagtgctgctcagcttgtaagtggtggacatggaatgaaacccaagtctgagactcaaaagttgactttgccgggcacagtggtttatttgggaggacaaggtgtgaggatcccttgaggccaggaattcgagaccagctagggcaacatagcaagactccatagcatctctaccaaaagtaaaaaaaaaagaaaaagaaaaaaaaaagctaagggtggtggtgcaagcttgtagtcccagctactcaggaggctgaggtgggaggatcacttgaccaggagttccaggctgcagtgagctatgattgtgccattgcactccagcctgggcaacagagtgacaccctgtctcaaaaaataatagtaggccaggcacagtggttcatgcctgtaatcccagtgagaggtgaagccagggggactttctgggtcaagtggggacttggagaacctttctgtcttacaagaggattgtaaaacacaccaatcaacactctgtagccaggattgtaaaacgcaccaatcagtgctctgtaaaatgcaccaatcagcaggatcctaaaagtagccaatcacagggagaattggaaaaagggcattatgataggacagaaagggaacatgggcagggacaaataagggaataaaagctggccaccccagccagcagtggtaaccggtttgggtcctttttcgcaatgtggagtcttcgtccttttgctcttcccaaaaaaccttgctgcctcttactttttgggtctgtgccatctttaagagctgtaacactcaccgtgaaggtccgtggcttca

SEQ ID NO: 11006 - DNA, 2300 bp, Homo sapien
agttatcttttctgttattgatttttaccctaatttcattgtggtcagagaaaatggtctagataataccaaccctctgaaagttattgagatttgctttttggcccagtgtgtggtcagaattggaaagaacccatgagtgcctgagaggagaacgtattctcttcttgttggatcatgcttgttaattatgatgcccaagtctatatacacttactggtggttttgtttttgttttttgattgcttgatctattactttctggagagaaatgtgttaaaatttctgtatatgatggtagatttgttttattctttttatattggttaattttatgcttagtatattttgatgttaagttttaagattcatgcaaggttgatgctattatatatttctgatgacttatttttcattgtatgtgactctttatctctagtaatgcttttaccttaaagtgctattatatatttctgatgacttatttttcattgtatgcgactctttatctctagtaatgcttttaccttaaagtctgatagagctgaagtttgaaaaaaaaaaaaaatcccatctggtaatctttatctttttttttttttttttttttttgagatggagtctcgctgtgtcgcccaggctggagtgcagtggtgtgatctcggctcactgcaacccctgcctcccaggttcaagcaattctcttgtctcagcctcctgagtagctgggactacaggcgcctgccaccacacccagctaatttttgtatttttagtagagactgggtttcaccatgttagttaggctggtctcgaatccctgagttcgtgatccacaccccttagcctcccaaagtgctgggattacaggcgtgagccaccgcgcccggccatctttatcttttaactgagtagtttttctatttgtattttgtaactaccgatatgttggggtttaaattaccatcttatgttttttattagtcttgacttttgcacttaattttccttttatcgttgtcttctttggatggattgggcattttgttccatttcatttctccctttactcaacaagaaaccatatcttcaatttgtattgcataatatcttaaagagttaatgttactcaatagttttgtcctcctcatgaatagtaaaagaatcacagaaaataacctcaaacaccctctgagattatatgctttgaggctaagaaaggccaaaggaaagaagggaagaaaggaaggaaagaagaaagaaagaggaaagaaagaaggaaagaggaaagaaagaaaaataatctttttttaaagcacaaagcttttaagctttacttaccactttctttgctcaacacttttttttttttccatctgggattacttttattctgcccttaaaatttccttcagtgagtacccattgatagcaaactctcagattttgtttttctgaaaatactttgccccattcttaaaagatatttttactgagtatgcaattctaagttgacaatcatattcttttttttttttttttcagagatggagtttcactcttatgcccaggctggagtgagtggtgcgatctcggctcactgcaacctttccggctcactgcaacctctgtcccccaggttcaagcgattctcctgcttcagcctcccaagtagttgggattacaggcgcccgccaccacgcctggctaatttttgtatttttactagagacagagttttgccatgttggccaggctggtgtcgaactcctgacctgaagtcatccacccacctcggcctcccaaagtgctaggattacaggcatgagccactgtgcctggccgacaaattctttgagcacttttgatacgtaaggaaagtgctgtgagggaaagagcctggtccctttaaatgatatgggagggggggaagggaagtgctgggtagagtagggcgtggtccctagctagggctctacccccatggacctaggtgaggacaggcaattcaggcatttcctgcatttcccaagaccgccctggcctgccacgcccctataatgtgcctttaaaagcccaagaccgtcgctaggcacagacggaagtgactggatgtggagaggagtgtatccgcgaaggaacgcacaagtggcctgacctgcagaagaacgctagctaggcactaggcatgccggcaaggtcagctgagagctgaccccagtgcaacgtggaggagtttggttggggcagtcggaggagcacctgggccgccaagcggccagacttcgggggaaagccat

SEQ ID NO: 11007 - DNA, 2300 bp, Homo sapien
agtgccccctcctcttgggaactgagtaacacactctccaatggtgttgtctcctgagcagttggcctcatcatacctgaataagaatgcaacccccattgtcaaacaggcaagggctttgtcttcttcccatggcaccggctgtcctcacagtgcttgacacacagtaggtgcttagtatgcacttattcagtgattggctggaggaaagaaggaggggtttgaaagaatccaggaaggcttcctaaagggtgtcattcaaatggtgcatcaaggtgaagcagggctctccatgcggggatgcctgggaaggacgtcctaggaggctgcgcagccatcgtctctgcctgggatactgttggcttgcctgcctttcttagctgtccacacctctctgataccttagctgcttgttgtgttcccaagaagctccctgcccagtcaaactgagtaaaagcactcaattatgtggattttcacagcactttgtcactctgcttttggtactaggaacaatttgtaattttatacttgcttctgtaatatgatggctggtcgtgtccgttcctctaggtcattagctctcggagggcaaagacttggctcgcgcctgtaatcccagcactttcggaggccagtgtgggcagatcacgaggtcaggagttcgagaccagcctggccaacatggtgaaaccctatctctactaaagatacacacacacacacacacacacacacaaaattagctgggcatggtggcgcatgcctgtaatcccagctactctggaggctgaggcaggagaatcgcttgaatccaggaggtggtggttgcagtgagctgagatcatgccattgcactccagcctgggcaacagggcgagactctgtctcaaaagaaaaaaaaaaaaagaaaaaattcagtaatatttgttggatagatgaacgcatacatttaggacacagagggtgttttagagtcactgaacaatatggcccccaccggggcatgcaaggaaatgccctggaaaggtaggctggggctgggtgaggtaaccgtgctcgggtttcagtcctgcagctgccattttggaaacaaccatcttataaagagaaggtgagaccattggtgagggtggaaataggggaatgaggaagagatggcagggcattggagagagggaagggtgttctgaagtgtgtttctgcaactctatggaaggagtcgaggttgaaccccttacaaatatctgtcaccattttctggcctcaactccacaaacagtgtgaaagcactcccggttctagtgatgggaaatgtagtttcagggttcattcatctgccccttgtcagcaatttttcacaggccctctttttttttttgtaagtcagaaaagattcacataagaaaatgcagcacattcaggaaaaacacatacaagcttaacgcagatccgttgtttactgagctggtgaacccatggctcccttgcaaggctgcattgtgagtcttctaggagaattgatcctatgcttgtgtgttgctatatgaagcgctcctgtgattaggttttaaacaaggacagtgtgaaaaggagaaaatctgatcccagtttttctatttgtaataaaaaataatgacaaagaaaacttaaacggcaaaatcttgaattcttaagtctctaatcacacacacatagacacaaggtacacattaatccatctccctttgtatgaggaaagaccactatgtcacaatttccctttgctaacaattccatgttatctcttaactgaaatggatttaataactgggagactgagagccattgagctttgatgaccctttagtggcctcaagttataggacaaaaactactgaggaagtatcttctaaggactttggtgatttccgtaaatgactccactttaaattgctgggattgtgtagcctcctacaattactggtgttctaatttcctgggactaattttagagggtggaagattttaatcatggaaaggaattgtttccattgttcagactaacttcagaagcagagttgaaagccagggccagagagagcccccagaacattccacaggggctgggcgggccggcccagggcctgcctatggcctgaaagagaaaacctgccacggagcccgggcttctctgatcctcccgccaaactttgtctctcatttagctttctttgtgtctgaggatttagcaaaggcctcagggtgagtttctgcatatcctttttccttgggaaccccggtggttgacgggggcccct

SEQ ID NO: 11008 - DNA, 2300 bp, Homo sapien
acagaaaatattttcattttctcctggtgactttgttcccacttttacttcaataagactaccgttaatctaatttcagaaaaaaagggctgtagtggcctcatctaaaaattggagatgattgaaaagggcacatttgatttcatattttttattttttatttatttatttattgtttattttttgaggcagagtcttgctctgttgcccaggctggagtgcagtggcgcgatctcggctcactgcaacctctgcctcccaggttcaagcaattcttctgcctcagcctcccgagtagctgggactacaggtgtgtgccaccatgcctcgctaattttttgcattttaagtagagacggggtttcactgtgttagccaggatggtgtcgatctcctgacctcatgatacacccgcctcggcctcccaaggtgctgggattacaggcatcagccactgcacccagcctgttttcatattttttatttgacatattgtaagtttacatatttatggagtacaacttgatgttttggtatacatccatgttgtataatgatgaaatcagggtagttagtatacagatacctcaaatatgtaccatttatttgtgatgagaatatccaaagcctctcttctattttgtaatatacaatattttactgttaaccatagttaccctctggtgcaataggacaccagaatttactcatcctatcaaattgtaactttgtacctattcaccagcctctccatttctccttggcatccttttcccctctccaatctctagtagccactgtatactctctgcttctatgacatcaacgttttctttttgggaggattctacatataagtgagaccatatggtatttgtctttctgtgtctgccttacttcacgtaacattatctcctccagcttcatccatattgtcacagatggcaaggttttattctttcttatggctgaatagtattccattgcatatatataccacattatcaatttatctgtggatggacacttaggctgattctctatcttggctattgtaaatagtactgcaataaacatgggagtgtagatatctctttaatatactgattttatttccttttgatacatacctagtagtggaattgctggatcatatggtagttctatttttaattttttgaggagctgccatactgtttttctttttctttttctttttttgagatggtgtctcactctgtcttgttctgtctcccaggctggagtgcagtggaaagatctcagctcactgcaacctctgcctcctgggttcaagcaattctcctgcctcagcctcccaagtagctgggactacaggcgcccaccaccacgcccacctattttttgtatttttagtagagatggggtttcagcatgttggccaggatggtctcaatctctacactgtttctcataatgactgtattcgtttataatcccaccaataatatgcaagtgttcccttttcaccacgtgcttagcaacacttttcattgtttatctttttaatactagtcattctaactagagtgaggaggtatctcattttggttctgatttgtatttccctgattattaacggcattgagcacttttttaatatatctgttggtctttaaataagacctcaaaagcactggccacgaaagcaaaaatagacaaatgggattacatcaaactaaaaggattttgcacagcaaaggaaactactaacagagtgaagataacctacagaatgtgagaaaatatttacaaactatacatctgacaaggggttaatattcagaatatataaggaagctaaacaactcaataccaagaaaaaaaacacaaataatcttattttaaaatcagcaacatcaatggctgattagatgaaggaactgtggtacatatacaccatggaatactatgcagccattaaaaaacacaagatcatgtcttttgcaggaacatggatggaggtggagcccattattcttagcaaactaacacaagaacagaaaactaaatactggctgttgcatttacaggtgggagctaaatgatgagaacatatggacaggaggaggggaagaacagacactggggcctattggagggtggagagggaaggagagagaagatcagaaaaataactattgggtattaggcttaatatttgagtgacaaaataatctgtacaacaaatccccatgacacaagtttacctatagaatagacctgcacatatacccctgaacctaaaagtttttttaaa

SEQ ID NO: 11009 - DNA, 2300 bp, Homo sapien
acacagggacagaaattaaaactcttcaactccccaatcccagggactactgcagaagaggtgagcacgtgagattgtaagggccaattttgagaaagaaaattagttcagggtttctctataaattaaacattagtatcaaaggtacactgatgcaagaccagcaactgggcccctgtgtcagattaatatggcttttgtggagcattaatccacttttttaaaaaatataaaaggttataaaaaggcttattgaattatatcttttagtcaagttgtttaaaatttagtagatttatttataagatttgagagacatttaattggtcttgacctaatgctatctttattagagcttactgtttgggaaattaagtctcctgtctcaaagtataaagggtttggccatttatttttacatctttgagttatcattttggctaaatgaatgacttatttattttacaatgacctgtgatcctatttcgtgatatcctgtgttttaaacttttcatatttgacaaactttctaaaatcaaatactaaattcagtccttttgacctcactaatgttttgatattaggtcccctgaagtccaaaacagacatatttggcttattttctacagaaaaaaattatacaggaagcattgttaaatatgaaatggtgtttaacctactttgggttatatttacataaatgtgttattagtgtgtgtcctaaaatcatagaatattcctgtgattctgatatgtctcaatatatgttgtcagtagtaattacgattattatgtgtaaaattgtcatatgccacaaaagtaaccaaatttccttgtcagttgtgtctctaactatggctgctctacaacttttgtcatctacaattgttgattactttgatcctttcatagtgtggtttataatcagctatagaactttgtggaattcacatttagagaccgtgtaattgaaatggagagaaaatcttccaggactctcatggagagctgatgttttcatgaggattcctgatccaatattgaccagaagttaactgcatggactgaactaacagacaattgaaataatcttttatgactctttgtttaaaacatttgctgattttgtttttcagagtcaagaaaccttttttatcttttaagctatttacagcttttaacatttgagtaaagtatatatatatatatatatatatatatatatatatatatatatttatattttaattgaggcagagtctcgcactgtcacctaggctggaatgcagtggcacaatctcagctcaatgcaacctctgccacccaggttcaagtgatcctctcacttcagcctcctgagtagctggggttacaggcacctgccaccatgcccagctaatttttgtatttttagtaaagatctggtttcaccatgttggccaggctggtctcgaaaacctgacctcaagtgatccgcccagcttggcctcccaaagtactgggattacaggtttgagccaccatggccagcctgagtaaagtgtactcttatgagcaaaatttaaaacaccttctcctgtgaaagaaaaataacaccttgggaccccaaattcattatgccaaagggaaagttaagcttgggaattgagtcatgcaaaaaactatcttccttttgttcccaaacagatagctgccatttcacatgcttactttattttatgtaacgtgcaggtttactgagcatgagaatagtgcttaagtaactttttcttatactaccttctttgcacatttaaaactgttgggagcaagccccccaaagtctggccataaactgaccccaaaactggccataaataaaatctctgcagcaatgtaacatgtccataatggccataacacccatgctggaaggttgtgggtttacgggaatgagggtaaggaacacctggcccacccaaggtggaaaactgcttaaaggcatttttaagccacaaacaaaagctgagcaatctgtgtcttaagggcttgttcctgctgcaattaatttggcccatcccttcttttcccttaaaggatacttttagttaatttaatatctatagaaataatgctaatgactggtttgctgttaataaatatgtgggtaaatctctgttcggggctctcagctctgaaggctgtgagacccctgatttcccacttcacacctctgtatttctgtgtgtatgtccttaattcctctagctccattgggttagagtctccccgagcgagctggtctcggcaagtggcgtcca

SEQ ID NO: 11010 - DNA, 2300 bp, Homo sapien
tagaagttcaagagactcaagtcataggctacagatgtactttcaagtatataattatgaatggaaggagaaaataaaagcacaaaaatgcaaatattaaacctttagtgacttggactatattccagtaggtaatttattccactaacttcactttaacaaagattaaatccctttattttaatcaggtccattaaatttcattcattaaagttatacatactccagaatgtttataagacatttacaccgatcatgtttacaaaaagcataaattcagtcttaagctgcactacaaatgccttaatataacataatcacagtataaggaaacaaatcagaaattctctgattagatatgctgtagcttcacagaaaactctcagtaataaattaaaacaaaaagacttacaatgtataatgggctatgcagtgcaaaatgatgtcaccggaccaaaatttagttcaatcatttttatttcaagtgtgttttaaaaatcataaacggggtttcataatccaaagctgaaacatttattcttcatagcttcagaattgacaagcaattgtagaccatgctttccaaatccactcttctttgctatttttcaaatttctgagatctagtattaaactgctccattctaaatgtacagttttagataactattgtacacttgttgataagagttttctgaaaacagtctatcaaatacaaagaatggtttctatccaagaatcagcagtgagggaagaaatactaaacacctgtcaagaaatcagttattcattttaaaaaataacagaaccagtgctgctctctgtcataaaaaagaacatgtaaaatttatttttataggctttggtaacattatattccccacagaggccttcaatcctacttaaagatattttacacacggtaaccatcaggtttactgagtaaaaatctcaggtattaaccatgcccctaaaatgtgctgttccaaagaggaacaggttacttttgaggaaaaaagctgccttggtaacttccctcaaatgtttattttaaataaaaatagttgatggaagtattttttaaaccaactttggatataatatggcatactgcccatcaaacaaaaaaggaaatcaaaacttttcttccatttataatgagttttccacctttacttttaagattacaacttactgaccttttatgcttgtttggttttttgactgcctaatccaatatttaaatttttaaaagtctgcatttcaatgtagtaagagttctttttcaaataatcttcataagccagaatacagacaccagagcaacactctcaagtcacactgtttgactataatgaagagatgaaaatgggcggatatctgaagataggtattccctctgctctgaaggtgagcaagcttttaacatgtgagcaacacagaactcctttcctctggggctcctttcaactcagaatgcttcagttcagtaagtcaatatgttattcctaaaaattaaagtttggtcactaagaaggactgaacaaaatttattcccctcccgccaaacacaaccagaacagttctaatcaggcccccttctccccacgaaaacagggaagtagctgggctgaagactttattaagtgtgacatttcagttcctaaaacatcactgctatatgctcaaagttgtaggtctatgtatttccttctccaacacgtccccatttatgtttatttccacacatacaaacgtgcacatgtgtgcacgcacacacgcacacactcactctcaagtaagacacttctttgtgtttgttgataaattatgaggattatgaactaggtgtgtacagggtttcataggtgctttctaaacatcagagtcacttgggtcctttcctccataagcctcagatcaaattatgcaaccaatgaccaccactttcccagacgctgttcacaggctgcataatgacgaagggcagagaaaaagtccccataactgatgtttacatgggaaggcaaagagacaatctcagtcaatctgatgtgccagagaagaaagcctcgtgtgctgtccacaggaccgaacttcagtactaaatcaggatcaggacaaccatttgaactgagtaaactaacatatctacatccacatctgtgggtctcctttgcttctgggctactcactggcaaaagtcctgagcggctctcacaatatctgcttttccatcttccggcaatagcaccttcactgccaaatggcaatttaaaacttgatcatctttgtcatta

SEQ ID NO: 11011 - DNA, 2300 bp, Homo sapien
ggctagttctttgaaacatattaccagttaatctaaagtattttcctagtatatgtaatatcttgtcttcctcgcagataatttctagtaactggcctttttttcggtgtatggattatcctttcctgtttcttcacatatctcattttttttcttaaagactagataattttaaatatgataatgtggaaattttggaaatcagatacttctcggcacttttttgttttgtttctgttctggttttactttatttttgttgtttatttatttagttgtttgtgttgcgattgttgttgctgctgttactgtttgtttagtgactttctgtatttgtcatgggtagcactgaaggcttggcttggatagcttagtggtcagctaatgttttgacaaagattttcctaaatattttagaccagttagtctcccatcctttgcctaggggttcagtatgtgtgttgggacatacctccaatgcaccagcacaccatttgcaactatgtatttgtttttacttcctatttgtgcagatcctcaaagccataaagtggtgaaagatgagaaccgtggccgggcaaggtggctcacgcctgtaatgccagcattttgggaggcagaggcgggcggatcatgaggtcaggagatcgagaccatcctggctaacacggtgaaaccctgtctctaccaaaaatgcaaaaaaaattagccgggcatggtggcaggcacccgtagtcccagctactcaggaggctgaggcaggagaatggtgtgaacctgggaggcggagcttgcagtgagctgagatggcgccactgcactccagcctgggcgacagagcgagactccgtctcaaaaaaaaaaaaaaaagagtgagagccctttcatgtgttacttggccgtgtacacagtcctgcacatgcatgtggccttttagattccaggaatgcaccagagcttttaaaaatcttctatgaaaaactaattcttcattttttcattttaacttcctttctctctccctccctccctccctcatttccttcactttcctttcctttctttcttgcctagagcttccttttctttttcttttaatttttttttttttttagacggcgtctcactctgtcgcccaggctggagtacagtggcgcgatctcagctcactgcaagctccgcctcccgggttcacgccattctcctgcctcagcctcctgagtagctgagactacaggcgcccgccaccacgcccggctaatttttttttgttttgtattttcagtagagacggggtttcaccatgttagacaggatggtcttgatctgctgacctcgtgatccacccgcctcggcctcccaaagtgctgggattacaggcgtgagccacagcgcccggcctcttttctatttattttattattattattattgttattattattattattattactattttgagatggagtttcgctcttgttgcccaggctggagtgcaaaggcacgatctcagcccactgcaacctccttctcccaggttcaagtgattctcctgcctcagcctcccgagtagctgggattacgggcatgtgccaccatgcctggataattttgtatttctagtagagacagggtttctccatgttggtcagggtggtctcaaactcccgacctcaggtgatccacctgccttggcctcccaaagtgctgggattacaggcatgagccaccacgcccggccttcattttcttttctatttatgggttggggacaggtagggctgtatgagtggctactatgtgctagttgttgaaaatgaagagatgcgtaaaatattatctgttccatcttggaatcctactctcaggtctttgtggtacaaaaaacaatatggaaaacaattcaaaattgttcattttgctctatgtaagggaaagtatcaatagaattattttaatctgacaacttgattttcagttaagatgaatccctgttacctgaaagttagttttttggtaatatttccaatgtatatggtactttttttctccatagcattatcatattacattgcagatttcttttatatgatataaaattcaataaaaatgtaatatctaatataccttataaattacaaggtttgtgagacagagcttgatatacagatttgaggtgggtataaaaaatttcataacaatccaaagtgataataaagaaaactcaaagtacatgtcagataaacattattttacatttgattgccacagaatggtcaagaaaagaaaaatggcac

SEQ ID NO: 11012 - DNA, 2300 bp, Homo sapien
atgcccaaactgaaggaagagcttgatgagatggtgtcaggaagaaaggtcagcgctaactgatgactgcagtagtcaaaaatggaagcagagggagaatgagggggaagccagaaaggtccccataggttcgtaggaccatggttggagcacgtttacagtggagcacccaagcaccaaattaggcctaaggactttcaaagtcacttctacccataggcttactagctttgtaatctggaacaaattattttacacctaaatgactgttagactagatttctttaaggtctcttggagctttaaagtattatgattcctttgagaacatttcaaaatgtgtgtgtgtgagttacaaacttaagctgcctacattacaaactgaaggtcttgctttaataatttcaactaactgataaaatcaaaggcttctttatgtgattcttctgccctactaaacataggtgtggatagtattaaatgaatctgtaaatatgagtggggatcaaacacatcacctgactaacatttttacaaagcagttcccaaaacactgaaaagttcattgcaacaaaaccaatttacgattgatgaagaggtatctcaattgtaacctttacatgcatgacatttcaatcagaatattgagttagcagtttcagactttgacttttcagacatacactcatacaaaaatacatttcatatcattattgtttaatatattatttttgtttaaaattgatagttgtcctataattttatgtctagctgaattcccaaagtagaagtactaatgtgcagagaattcatgaaaggttttaaaatgtcttacaaatgtaagattatttgaagctgtatcagcttgtaatttaaggcctgcagctgctggtatgatagaagtatcaaatttcaaaagaaattatggtagagtataaataagcagaatgaagagaaaagtctcctgagaagaaaataaaatgagaatgaagcatatgcattgttattgcattgctcctttttttcttcattttttatttcaggttcgaggggtacatgtgcaggtttgttacacagataaattgcatatcaccaggatttgatgtacaaataatttcatcgcccaggtagtaagcccagtacccgatagacagttttccgaaccccacctttctccctccctccttcctcaagcaggccccagtatctgattgttcccatctctgtgtgcatgtatactaaggcactgcttcttatattcaaggtttagtactaaaatgcaaatatgaagtatataatttagtaagttttaatcctgctgcaaaccaggtcacataaaaataatgcaaaataaaatattaaaattattcagaagttcgatatttattctgttgtctttacaccttataaaatggaatgacctaattactcttaaataaacataaagacaatttaaggtcacatttgttacattcacataatttgttaaacacaatagaaatgttagtttactagaaaagaactgtcataattttaacatgcagagtttgtttaccttctattatggtgatctttgtttaagattttctcctcagatgttaaaagtttttcacttaaagaggcttagggaaagtgatttttaaagagtcactgttacatggtaatatgccgttcatttggatgagactagtatataggtaatagtcacaagttctaacttgcatgttaatttgaagagatttttcgtaaaattttatcaacattagtttctaatggaaaccagtcttagaagttttctgctgtttgtttgaggtaaagtttttttaagaaagttataattacattaaactatcatgctttagggtttaaatgttggaaagttggttttgtaagaagaagagtttggtttcttgtttgtttgtttgttttggtttgtttttggcatgcgaagagctgtgtcctggaattggtgcccaaaaaattttaagtgtggtatgaactgtttatgtcactgagtaaaattagacacgtctgttgctaatgtgaggggatgaaacatgagacagggcgaaactcgtgagagccctttctccagggacagttgctgaagcttcatcctttgctctcattctgtaagtcatagaaaagtttgaaacattctgtctgtggtagagctcgggccagctgtagttcattcgccagtgtgcttttcttaatatctaaggtaagtgctcagttttaacttagattttatatcagtacaaagtactacctaaaaaccaaacgcttaagaggtttct

SEQ ID NO: 11013 - DNA, 2300 bp, Homo sapien
gctatcactgtagccaagatgactgtatactttattattcatactgggacacgtgtgagagtgaaggagggtggtactattctcagactactggcctgaattgggactgccctgggcaagtgggaagtagggtcatcccaactctagccaaattttagtaagcctgttgcatttacattcatacatatatattctattaaataatattgactaaattacaaatcatataatcaaaattaaattatatattaaaatatgactattatctatgaatattaatactcgtgtccacctctttgtaagttatcccacaagtctgtgccatgtagtagtttgtaaatgttgtgggacacagatgtgagtagcaaaagcctggaggcttaagcaggaatgaactgtggcgtgagagcccagctaattgcccagcacctgcatctcagtgtggttttgattgctcattgagaataagcacatttgtgtggaacattaactggaggactcttctctaaaccaaggatttgagaaggtcataggtcataggtcatgcttttatcttgtcaggagccacctggcctgatttcattcatgggggtgcgactctgtgccttgggagcagggttgagcattccctagaccccactgtccatggatttagccatgtggttggtggacataacatttgctaacttaaaatacccacaagcttgggagttggtgattgtgacagctgaagctgtgcttgacgaccgtaggtattaaagattgacttcactggagttgcatcttgcaggaaacccaggtgctaagtaagcatgtgaggcaagcatacatcacatcacccttgggagatcttcaccaaagcacactggggaggaatttctctcatcacagtgggtctcacacatctggtttttctgccagtttttgaatactactctgtccttggttgaggaacaggtgaagcagctggtatcaatttagaggccatgttatacaaaagatgggtatctttcaatactgtaattaggctccacgtggtgagatgctcccagcaagagaagtgcttccgctccagaggcagagaggttaagaccccttgagggaatgtacctcatgagcttcagggcaggcactcactgagcaacacagtgggcagagtcacctgcattgtactgctctctgtctcttcttacagagtctatgctgaatttgtaaagttgagcataggatgcagtcctgttctgtcgaattgggctcacatggtggtgggggttaagtgtatatatccaaatactctgcccatcttttgtgtagtgagtttttgaagatgtctcctaggttttcacagtaatcatgcaaagtctctatgcctggcatttgttattggattgaatcaaaagagaaatcatttttcatgttcagagaattacatttctgaaggtaaattaagtttgtgtttagataaatctgttttagtcatttaatggctcatgctttttcatatatttattataattgtaatcataattgtccctaaaatttcagagttgatcatgacttaaatttttctttacagatgttccttgtatctttagtggtgaccaaatcgggatgctagatcctcatcaaacactttttggcccacatgaatcaggccaatgttggaatctcaaagatgacagcaaagaaattagtgaactttcagaccagtttgcaccatttgttggcatttttggaagcaccaaggaaacatttataaacggcaattttccaggaacatttttccgtttccctcttcgcctacaaccttcacaacttagtagtaacctctacaataagcagaaggttcttgagttgtttgagtcttttagggcagatgcagacacagtgctgctctttctgaaaagtgtgcaggatgtttccttatatgtccgagaggctgacggaacagagaaactggtgtttagagtgacttcgagtgagagtaaggcactgaaacatgagcggccgaattctataaagattctgggaactgctataagtaactattgtaaaaagactccaagcaataacatcacctgtgtaacatatcacgtaaatattgttttagaagaggagagtactaaggatgcacagaaaacatcttggttggtgtgtaacagtgtgggtgggcgagggatcagtagtaagcttgactctttagctgatgaactgaaatttgtcccaatcattggaatagccatgcctttatcaagcagagatgatgaagcaaaaggagcaacgtctgatttctcaggaaa

SEQ ID NO: 11014 - DNA, 2300 bp, Homo sapien
caagctaatgggaaggaaaatgcataacaactggtctactttgacaattaaggaagtttcttattaaacacaaaatctaatttttgcagtatctcccattattgctttctttgatgattattggtttttctttttttgttgttttattgtttgtttgttttttgagacggagtgtggctcctgctgcccaggctggagtgcagtggcgcaatctcggctcactgcaatctctgcctccgggttcaagcgattctcctgcctcagcctcctgagtagctaggattacaggcagccaccaccatgcctggctaatttttgtacttttaatagagacggggtttcgccaagttggccaggctggtctcgaactcctgacttgaggtgatccacccgcctcagcctcccaaagtgctgggattacaggcatgagccactgcgcccagcctgttttttaaagagtataatcaaactaaaaaaacatattacaaaaagaaataagtaaataaaataattatcctattaaataaaccctcccaaaatagcaaacctctaaaatcaggagtccaatgggcatgcattcaagcctctaatcgtagaatgtatttggctggccggttggctggctggctggttggttggttggttggttggttggttgacgtgtaaagccctgcacaatgatctacagagaacattcccggagcgacactgctgattacagcacccagtagcttagcgcatttctttgccccagaaaacctcacatatttatatcaattccattctcaaatggagctatacactgctatacactgcagccacagaggtataatacagctatttgaatctagacaacattttaaaaatttaaacactaataggactttcaagtaaatttacttcatctcatttttatcaaagtaaataacacatgaacacgacatgtgccccaccttaagaatctgtcctccttctggatatcttctcaaaatgtccttgagaaaatcaacaagtggtggcgttgtctgaccaaatcgacctaaaatacggagcacattttaagtgagttagaaaaaaaatcccatgaattgtcaccaatgtgtgacttgaatctgagacatcatataactatacaagttatggttgcatatatctcactgcagcaccctggtacagaaatctacctgacgaagcaattcagcagaaagtaaagcagattcaattgtatcaaatctcaagttgttttgttttgttttgttttgttttttgagacagagtctcgctctgtcgcccaagctgaagtgcagtcgtgtgatctcccctcactgcaagctccacctcctgggttcatgccattctcctgcctcagcctcccgaatagctgggactacaggtgcccaccaccatgcccagctaatttttttgtatttttagtagagatggggtttcaccatgttagccaggatggtcttgatctcctgacctcgtgatccgcccaccttggcctcccaaagtgctgggattccaggcgtgagccaccatgcctggcctcaagatttttaactgaactacaaataaagtctcaaaaaatgttcaaaaatataataactattaattcaaaaacaagaagcatggtgcagtggggaggagtgttgatattttccaaagcaaataaaataaatgatgttattttgtggctgctttgccattaaataacaagccagagacagaggtgcctattatcacattcttaatattctcaaattcaaccagtgttctgattgttctgaaattcagcagtcactgtctcaatggctgtccacttcaagtaccttcaagccttgcctaaactagatattcttagaccaactgaccaggtcaccttcagacaagtgacagggctgtaggaagaacaagaaaatgggaagtaatgcctcaaatacacagcatttcaaaaatctgtttatcagtataaagaaacctctgcttaaaaaagcaaaattgtcactataaatttatttgcgtcattttggtacaaccacatactgagaccaagctcaaacaagactctgtttccacagacttctatcccacccattcttttttttttttttcagacggactctccttctattgctcaggctggagtgcagtggcgcaatctcagctcactgcaagctccttctcccaggttcacgccattcccctgcctcagcctcctgagtagctgggactacaggtgcccgccaccatacccagctaattttttgtattttttagtagagatggggttttaccgt

SEQ ID NO: 11015 - DNA, 2300 bp, Homo sapien
aagtttgctatatgaataaagaagatctggagatcttctatacagtacagggcccatgaataacaatactgtgttgtattcttaaaaacttactaagtgggtagggtagatctgatattaattactcttaccataaaagtttaataaagcacaacagaagagatgggaggaaacttttggagatgatggataagtttatggcactgacaatgatagtttgatggtttcatggtacgtacttatctccaaatgcatcaagttgcaaaataaatatctgcagtgctttgtatttgagttgtactcaataaagctgttttaaagattatgttttaaaaatgaaatgaaatcatatcccattgggatagagtgaggggacatcagggccagaggaagacaagcgtggatggagctagttataagaatgagtgggggccgggtgtggtggcccacacttgtaatcccagcactttgggaggccaaggcaggcgaatcacgaggtcaggagatcaagaccatcctggctaacacagtgaaaccctgtctctactaaaaatagaaaaaattagccaggtgtagtggcacgcacctgtactcccagccacttgggaagctgaggcagaagaatcgcttgaacctggaaggcagaggttgcagtgagctgagatcgctccattgcactccagcccaggagacagtgcaagactccgtctcaaaaaaaaaaaaaaagaagtgtgagtgggataggctgggcatggtggctcacgcctgtaatctcagcactttgggaggctgtggagggcggatcacaagctcaggagatccagaccatcctggctaacacggtaaaaccccatctctactaaaaaatacaaaaaattagctgggtatggtggcgggcacctgtagtcccagctactcaggaggctgaggcaggggaatggcgtgaacctgggagaaggagcttgcagtgagctgagattgcgccactgcactccagcctgagcaatagaaggagagtccgtctgaaaaaaaaaaaaaagaatgggtgggatagaagtctgtggaaacagagtcttgtttgagcttggtctcagtatgtggttgtaccaaaatgacgcaaataaatttatagtgacaattttgcttttttaagcagaggtttctttatactgataaacagatttttgaaatgctgtgtatttgaggcattacttcccattttcttgttcttcctacagccctgtcacttgtctgaaggtgacctggtcagttggtctaagaatatctagtttaggcaaggcttgaaggtacttgaagtggacagccattgagacagtgactgctgaatttcagaacaatcagaacactggttgaatttgagaatattaagaatgtgataataggcacctctgtctctggcttgttatttaatggcaaagcagccacaaaataacatcatttattttatttgctttggaaaatatcaacactcctccccactgcaccatgcttcttgtttttgaattaatagttattatatttttgaacattttttgagactttatttgtagttcagttaaaaatcttgaggccaggcatggtggctcacgcctggaatcccagcactttgggaggccaaggtgggcggatcacgaggtcaggagatcaagaccatcctggctaacatggtgaaaccccatctctactaaaaatacaaaaaaattagctgggcatggtggtgggcacctgtagtcccagctattcgggaggctgaggcaggagaatggcatgaacccaggaggtggagcttgcagtgaggggagatcacacgactgcacttcagcttgggcgacagagcgagactctgtctcaaaaaacaaaacaaaacaaaacaaaacaacttgagatttgatacaattgaatctgctttactttctgctgaattgcttcgtcaggtagatttctgtaccagggtgctgcagtgagatatatgcaaccataacttgtatagttatatgatgtctcagattcaagtcacacattggtgacaattcatgggattttttttctaactcacttaaaatgtgctccgtattttaggtcgatttggtcagacaacgccaccacttgttgattttctcaaggacattttgagaagatatccagaaggaggacagattcttaaggtggggcacatgtcgtgttcatgtgttatttactttgataaaaatgagatgaagtaaatttacttgaaagtcctattagtgtttaaatttttaaaatgttgtctagattcaaat

SEQ ID NO: 11016 - DNA, 2300 bp, Homo sapien
gccacacaggagagctccgagagcgaatgtgatgtgctggagcctggcaggaaatgtggtgggtaggaaagtcaagtggagggcactggatggagggcatggacaggataagaagattttattttatcctgctgatgtatctatttgggagcaaagatgtctgttctgaccactctggtagtggactgagtacattgtaggaagagagtaaaatgaacaaaccaaccaccaggctccacggaaaaaccgaggtttttcattccatgttttcattcaaatggttttgttcccagaggtggtccaggaaaagcctttgcattcacatcagctacattgtgaatttttttcaggtataactcacataccataaaatttgccattttaaagtgtacaattcacctggttttaaggatgttcaaaaaattgtgcacattgcactactaattccagaacatttccaccatccccaaagaaaccccacacccattagcactgcctcctcgttccctccccccacagccccactaatctactttctgtctatgggtttgccaattctggacgtgtcatataaatggaatcatacaacatgtggtcttcagtgactggcttctttcacttagcagaatgtctgcaagggtcacccatattgtaggatgattcactactccatcaaattctatgatgagtttatagtttttccaacaagaaaaccaggtgtgtgccaccacacccagcttatttttgtatttttagtagagacagggtttcaccatgttggccaggctggtctcgaactcctgacctcaagtaatccacccgtcttggcctcccaaagcgctgggattacagatgtgagtcactgcacccagccaagaagtacatatttggcccttagggctttctggccttgtctttatactgaatcaccatattctcctccaattgatggagcatacttacttacctctcccaagtaggaagaggcatgcatgacttctatcattccctttttaactgtggtaagagagatggaacagctgtagaacattctctgtatttactactgatgatgagttctgagtaataattttttttggggggaagggagaaatggcaatttattatctattttttggggcaactctaaaatttaattctgttccattcaaggtatttaaaataaggagcacacaagtttacttgttcatgatgtagcctttgaattgccttaatagatgtcactttttttttttgcaatgtgtatcatatatacctaagagaaataagccaaaggaacagcctgaggttcccccaagcctctaagccccacacactttcaaattacatggcaactttacttatcgtggggcgatttcatcaactcttaagactcatgttcctgctttcaaggagcttgcggttgtgatgggaagacattcaggctaccaacaatataatattgccaaaataagttacaaatatttttaacgtgtcataggatacatttatgtgcattctgatcttactttgctgctggctctctttcctccagcaaactgagccactgatcctacttctgtgcctcaaaaaccgagcacagaacgaaaccgtggaagacacttgtgttctgtaaccagcacgttcccttctcggaggccactatagatcttactggagatgcttccatggaatgaaagtcattagagttcaaggagacacaggccctagaaatgcctagttctgcatttcaatgcactgttgagctctaaaagggacaacgcacctgtcctctagctgtacgctctgtatacccttattgggtttgccttctggcagaggcgcctctgcaggcggggcggggcctggcaggcggagcctggtgggcgagtggggcggggcggctccttcgctaactgtccggattgggcaagacagaacttgactgggcggggcctggatgggcgttccctgggggcggggcctggcgggaggggcggggcggatccccagctaacggtcccggcgggtgggcgtgtccccgcgggcggcgcctgcagggccgggagtgggccgggagcgcgcagtccccgcccccgcctgctcctcggccgccgcggcttcctctagcgtttcctcctcggcgcgggctgctgcgtacgggactgcgccatgcggatcccgccctcccggcccgcgcggggcctgtggacgcggtagggccggccgtgatcgggcgccggcgtcaggggcgggcgctaggggcgcctgccgcgccgcgatgtgggagaggtaacgcg

SEQ ID NO: 11017 - DNA, 2300 bp, Homo sapien
gggggcagccagaacaagacagaaaaaacaaagaggaacagggaggaggggaaggaagaggggaacaaaaccatcactattcatggatagagtattcaaaaaaattcatacaaactgacaatgttaataatagattttttcaagattactgatataagttaaattgcatttctacataccagcaagagtttaagagaaaagtatgtgttaatgatagacatttatcaagcaagaaaaaaatgttaccttggaataattataatgaaagaacttacataggaattttaagaagaaaatctatgaactttaatgaaagacattaaaaagaccctttaaaaatggagttatgtacatgatgaaccagaaaattaaatatcattgaaatgtcaactctcctcaaattgatcttgtaattcaaagcaatttgaatcaaaaccccagcaaccttgcagaataaaaacacaataaccaaagacactacttaagaagaagagggaagacttgctctagaagatattaagctttaacatgaaaccataataattatgtggcattcgcatgggaacaatcaaagagagtaaaaggctcagagacagacccttgcattaatgagaacctgatacatgagagaggtatcagcagggtttagtgggggaaagctgggccattccaaaaatgttactggggcaagtggttaactatatggaaacaagcacgaaaatttatctgaaccccatactgtgcacaagtatcaattctagatgattaagcacataagtgagaaaatcaaaccttaaaaattttagaaggaagtggaacacaatatctttatggcttcagggtaaataagaattcctttaaaaacaaatagaaagcagtaaccctcaaggaaaggattgttaaaatcaaactacaaggccgggtgcggtggctcacacctgtaatcccagcactttggaacactgaggcaggcggaacccctgagctcaggagtttgagaccaacctgggcaacacagcaaaaccccatctctacaaaaaatacaaaaattagccaggcatggtggcacgcacttgtagtcacagttactagggaggctgaggtgggaggatcacttgagcccaggaggcagtctgcaatgagcttagactgcatcattgcactccagcctgggagtaagattctgtctcaaaaaaaaaaaaaaaaaaattcaagttacattaaaattaagaatttctgctcacctaaggcaagctatataaaatagaagatatttgccacacagcaatcagcaaaagttttgtgttcagaatatagaaagaactcttgaaaataaaaaaagaaacaacctaagagaaaagcagaaattggggaacaggctctaatttatatttatctttcatatggataataccttcatttaaatataatacaaagactatctctgcttgtaatgaaatagtaatatacatttagttcaacttaatttttactgttttcaactacagaagtgctttttgttccttaataattatatgcttaacattatacaagatttttagacatatatgtttgtttcccttgtatataaattctcatctgatgtttccacatttgagtgcttcagtatagcacccatttcttttttttaccttacatggagtcttgctctgtctctccagctggagggcagtggctgatctctgctcactgcaacttccgcctcctgggttctagtgatttgcctgcctcagctgtctgagtagttgggcttacaggcacctgccaccaagcccagctaatttttgtatttttagtagagaggggattcaccatgttggccagggtggtctcaaactcctgacctcaagtgatccccctgcctcagcctcccaaagtgctgaggttagagacctgagccagggtgcctgaccagaatatcattttttgatctagcattgcatttgtgactatcaaggtgcccatgggtttgtctccatgggcgccgccctcttcctaggagagtaggtggggagtttctgtgccccctcccccaccacgggaaacttgccctcttgcacacgtggtgcggaaggcgccattttggcccagttggtgctgagtaagatgttctcgcttctctgctcagggcatgaagatctggggcaggtgcaggacttggggccccagagagtgccacaatcgactgcccgtgggagtgggctggtgcctgggagcaagagcgcggccgtccggcgcctgtgtgagccgacagggcagctccgccagggaaccagggg

SEQ ID NO: 11018 - DNA, 2300 bp, Homo sapien
atgtttgctttcacactcatgttcactgcagcattattcacaacagccaaaaggtggaggcagcccgagtgtccatcgatggatgaatggatacacaaatgcgctataaacagacaatggaatattattctgccttaaaaagaaaggaacttctgacacgtgctacaacatgagtgaaacttgaagatggtaagttaaatgagccagacagaaaaggacgaatactgtaggatcccacttatatgaggtacctaaaatagtctaattcatagagacaaagtacaaaccatttttaacgtaagatggcttgacttatggtttttttactttacagtggtgaaaaatcagtatgcattcagtagcaactgtactttgagtacccatatgatatggtttgaattctcaccttgaattgtaataatccccacatgtcaagggtggagataactgagtcatgggggcagtttccaccatactgttctcatgatagtgaataagtctcatgatatctgatggttttataaatgggagtttgcctgcacaagctctgtcttgcctgcctgccttgcctgcctgccgccatgtaagatgtgactttgctcctcctttgccttctgccatgattgtgaggcctcctcagccatgtggaactgtgagtcaattaaacctctttcctttataaattacccaatctcccatatgtctgtatcagcagtgtgagaacacactaatacaccatagaaccattctgagcatttactgagcacttactattagagcttctcacttttagtacagtatttaatacattacgtgggatattttgtactttattggaaaataagccttatgttaggtgattttgcccaactgtaggctactgtgagtgttctgagcacgtttaaggtaggctgggctaagctgtgatgttcagtaggttaggggcatggaatgcattgtcaactttctgtgggtttatctggacctaaccccatcataagtcaaggagcatctgtagaatggtggtttttcaggagctaggggaaggggaatgggaaaatgttgtttaatgactgtggagtttcagttttacaagatgaaaagtgttctggagtgtggctgcacaatggtgtggatgttcttaacactgctgaagaggacacatacaaatgattaagatggtaaatgtttttatgtgtatttttaccccaaatacttttcaaaaaatatcttggctattatttatctccttatatatatgtctttttttgtttgctagcatataaatctctcggaggcagaaaacatgtctgaaatctacagcatgtagatttcatacagggcacagtggttgaccagtaatgagttcctgcaggaggggacccttccagtgaatgtagacctggaaaatgagattgtcctatttattcctctgaatattccccagcatctatcacagtgctctttataaagtaagtgctcggtaaacgttcattcgtggtgatgctaaggaccggaagggtctttaaccttttctctccctcctagctcagccctcacggaaccctaaaagctggctaaggggccattctcctcgccacctgggcctgcgtctgccgaatcgcttcctaaggactttgactagaaaccaaaggtcccatttttcatctgccatttatttatcattgcataacttaggtaagtccctccgccttcactgtcagttcttcactcattgttttgcatccaaggagtctggaaataagcgggaacaccctgcacgtgagaggggccctgaaattcacgaggggctggggctttgcgtttattcctccagttccgcctgcagcaaccctgacgatcgagcagggcccgcgggggagcgagcggaagcgggcagcgtgcgctgctgtcccgctacccagcccgctaggctgcgcagctgcgtctgcgggcggggagccggggcggccgtgggcttcctccgggcgcgggctgacggctgccgcctgtgggcgccccagccctgcagccgagcgggaggggcggaccagcgggtgtcgggagcaggctgcagcggccaggcctctgcggcttctcggagtactgggtccactggagagcgaagagccgcggccgccaggattcccagcagcggccgcgtgttgagagcctagaagtggccccgaagccgtgcctttcccgatagccaagcagaagtaggacttgaagcaccgaggctgggatgcccatgctggtgacgccttggggctcgcagttatacttggtgaccggtctac

SEQ ID NO: 11019 - DNA, 2300 bp, Homo sapien
gaagggcttaattagtagcagctgtgcggggtgatgcacagagtgccccaagggtgtcctgagtgagggtggatgtcccctgccctctggcttcgtgaaggcttcgtgaagcctgccgggtcacccttgttttcatggatagcttctttaggacactctctccaccagtaattgacaaagtctgcttctgttgagtgtctgataaaggattgagtttacatgattgttaagataggatcatgaaagaagacagaagacggatgtgagtggccctcagaaaaaaagcatcaaaggaaactgaggagtctgtgttccgagttataacatcagtcctgtgtgtaagtgctgagtttcagctctgcccaaggctaggggttgcctagtcggcttcaactgtaagctcctaagggacagtgctgccccttgagatgactgggcagccatcagcttcatgctagaggctttaaagcaaacccaagatggagtctcagtactgattatttgggccagtgcctttcttaacatttcacggatatattcctttattttatttgttgtattttagtacagttttgctctattcagtcatggtcattcttagttgctgttgtctttgtaaacttatttaatatcttttaaatattaaaagattaaataaattattttctaataaattcttttaatattaaaatattaatttttgataagaaccttgtttactctcaagattaatgtagtaaataaagaagactaaaaacttcagagactgaaagctgctgagaatgtgtaagagaaacctggttgtcaaacgcaatcctgatcttttatcaggcatctgtatcaatgtggatgatctaaccgtggttaacttcatgaagaaggaagatatttgattttcatctgtttaaagaaacaatctgtttcttctaaaagtatatactctaaaacacaaaccacttggctgggaaataaaagatggttatgctttatcatttatataagcctggcctttctccaaaatgattttgatatagcttacaacaaaaaacgtgttaggcttaataaaagaagaatggaaatggaaactaaggatcaacagaaaagagtatcacaaatacggtaatactagcatatggtaatattatttctgtatttgagtgtaaaacgtggctgtgagcttcctggaggccaaggcaaaaatagagacaagagcaacgtgcataatatcattagcagacagaaagatcatgtgactttttaatttttttcccggaaactgaatctaaaaagaatcgctctatataatgactcatatatatggttttaagtgaaaaaatgatgaacactgtcctccatgagagttttggcacaaattgaaggaggtaagaactgatattgaagcacaactcagtgaagttaatcctgtcaggctaggttcacacaagaaaacttctgacaaaatcctagaattccggcaaatgcaggcatggaatgagagattcctattccatctgcctcgttgtgcctggggccaggcctgagtgttgaagacagcttgttccaatgtaagatcaaatgagattgttcataacaggagtctgcaggaatatggcacctctgatttgaaatgatggatgattttcatcagccgtgtatctgcttccttggcagcaccccaagtgcagaccccaggctgtttcagtgtgtcatctggcaggcccaaacagaggatgtctcaattgtgcatgtgtaacacagctttaattcataatttcatttctggatggaattttgagcagatgggcattgctgtcctttttaatggtaaaaaatcaatgaaagacaccgtggttttgaaattaatgagcacttgaaaaataccagctttgtttggctttgcgttttcttttttcctctcctcctaagttgtttgcagcaaaatattcaattgaaaactcaacatgtccactgcctcccaaaaaaaaaaaaaaattctgtggaaagtctccactaacaggaagagagaagttcttcacagtttggttttatttttcaatgatagtcattgcctcatttttaaagcatttataataaattaagcaagtaacacttgtgtaccagtttctaatcagtttctaatgtgcctggaacttgctgggctacaaagaaaaggatcaactattttttttcctgcacccaaagatattgcaatcttatcggagaagggaaactgaggcatgtgttacagttagaggactaggaagcactaatctgtgtcagactccaaagtgcaaattcaa

SEQ ID NO: 11020 - DNA, 2300 bp, Homo sapien
tgaataaactcttccactggagatggtattgcattgttggatgtatcttgaactacaaagcttgcttggggagatttgtataaattgaagatcatttgattggttttcattcaagtccctgctttcaagtgcctcctgtatgtttttcagtggaacacaagaacccgaattcagtccttcacctatttctactggtgttgaaatctataaagacataaaatctacttgcttagccaatgagccttacagagtgtctagttgctctgatttaatatatcagtgtatcgggaaactttaatcctgagtgcaggctgttggcatatggattccatgctggtggtaggtttggactacctcagaaaagaaatgggcacatgccttcttgtaaatattttgtctttgtaaatattttctttgtattcatgggttcaagatgcccaggaaacgtatgtgaagcccagatgtcacaggaattttcctggtctgctttaaggaagtccttaagcatcacacctgccagttcaaatactatttgagccctgtgcatttttgagaaatgatgtataagtagaaaaattatacaagaaacatggaaaaatcaacaggactatttaaatgttatacagaacttatgaacagttcaaactaaatattttgctattaaaattattcaagaatcatagaaatctggaaataaacacttcataaataacgttttcaaatatcgcgtcaggaaaaattagacaaaaccagttaaggagggaagttacattgaaaaagactgagttctactatcccctaagttttgcaaaaatatttttaacttactttctaaaagttagtgagtttccattataaaatagaaaaattgtcttcattccatgaaagaactgtctgaaaatcagaaaagcaccatatcctggatttcaaggaagatgaaacttcttcttatcttctattttactaaatactcaaaataaaataatcatattgtattgaatctgacattgttaaggaaaatagcttaaaatttttaaataatgagcaatatatttaattttaaaatacgaagaattaggctaaggtggtaattttttagtgagttgaaagtccaaactatgagttcggaagaaacagccctaaaaggcaaataacatggctttggaataatcacagggcaaatgctttgttctacataattcttcttttgtgaattttaaaatgctcaacaagtattaatgaaatatgtctaagaagtagatattgctttaaaatctaatttccagagtcccgaactaaggcaaagattgagattaagtctccgcccaaagtcttaagtgagccagtggaagatggcagtttattcatgaattgttggttatctgctgcttaactacttaacacaacccggtttgattggtaatcagatcctaataatgtatgtttcaaagaaagggcagtttccttaaaatccttaaagacttgtcactttgaaaactggaatcaaaatgtgaaaatgttatcggtccatctggcagtgtccttgggtgttttttagagtggtctcatagtgctatttaactatgctgaatatttgacacccagtctctgtaggaaattgtgatttttatcagcgaagaggcaattaaatgctgtcatttggcacgtccatccatcagggatcttatcacccaagaagcatccagcagcagttgctgtcctttccagctggcagacagataacagaaactgtcctgtgtgaggcacaatagtctaacatgattagaaatcagccaaactctggcttctcttgagctatactcccccacaggctgaattatagctctcctaccagtcccacggcgctgaatgatgtcatgggatctgcagttcagcgagatgaaagggataaagcagaacccgctggcactaggaaaagcttccaacacacagtccacaacacagcttgggaaccaaaaaagctacagatccagccactcagcccaagcatgggagaactaccagcattgcctcattgcaaaaaagaggaggaaaacaacgtgatccatgtttaacaaaagagtctgtggactaggaggtgggagggtaactacctgctgaaagtgaactttctttgatatccatgcatatatataaactcagccctgcctttgatgttcagcaactgattcactgatcagattacaggcatttcatctccctgctcgtctgcctttgatctgcatggttaattttattttcctggatttgaagtttcgtctgggcttgtgctgacatac

SEQ ID NO: 11021 - DNA, 2300 bp, Homo sapien
tcaaaacacgtaaaatgattcaagaactaatgaactgagtaatgtgttactactgtctctaaggacaaaaggaggtcagagagaagaagaacatttggttgaagtcagagaaggtagttcctgagctggcagattcaattccactcagaaagctttggttgaacatttatttgaatgattgatactgtcagagatacaaatcggaacaaaatatgccccttctctgaaagtgtttttaactccttgaagaagaaagttagtacacagaatcttatgatacaggacacaatgggcaagtgctaaattgccacaaaccttggagcaaggaaatacataggctcagaattgagggaaaactcgtgagagccgtggcttttgagcgaggtgctgaaactggagtaagacaagtaggtaaagctcagaggtaagatgggagagcacgaagaggaagtagagagcaaaggaagggccacgcggcgcagtttataaagcctgctccagaggcgaggcaaggctggaaataggtgtagggctgcacctggacatctcggaatgctaatctaaggagcgcagaatccattctttacagtgaggaacctcctgtgactcttcagcctgacagtagcagtgatgaaaggcgggaagcggggttgatgaccgaggcagtgctgtggtgaggggtggggagggtctgcatggtggtgaaggaggtggtgggcaccaagacaaagagaggacgatgggggactgcgtgagaccttgcaaaggaagatgcagtaactcagcttagaagtgctgagtatccatcgtgtgctaggccccgggatatcaaggaattaggagatgccctcgggagatccaggtgtagctggggaaggaaacagataaagaagttcagcgggatgtgggaatgaatatggtagtgatgtgcactgagggctggagtctgatcgggtagccgctgggagatgggacagggaagcacacacttgccttgaggttcaaattagataacgtacatcatttggaaatcgtttaccaataagtcgttattgggatctatattctggatgtgttagatttgaaatatacaacctctatcaaggtgtgacatcgggaataatatttttaacattgttcacaagtacctagtatagtgctacgccgttggaagcctgggatcacaagctgtgcttttgggcaattaaatacaacaacctattcactcattcattcaacaaatactgatggaggggctccagtgggccttggggtatagacaagaaacagggacttgggtccatccacacagtgcagttgagtgggaagtcaaaaccaacacgtgagaaacggtggatgccttggtaccaaagtcatgcaccgtatcttgggtgaacgaatagaacaatactgcttgcacttttacagcattctactggtggaaaagtattttacagacgcgattctcttaaccctttcagcaaaactgcccagtgagtccccggccctggccccgcctcgcacgcgctggtgctacagctgtggtgcagacgcccttccgctgcgagggtgcggccgtctcggggcgagtgcttcccggcctgcaggaggcgaactcgggcttccccgggaggcgtccgtgggaacgcgcacctgcgagtccctgccggctgaggagccgaggtctgcgacctctgccgacctgagctcaggcgcagcagcgcagacctggccgccgtatcccctctggctgggatgcgggcccacgcgggaaaggctgaaaggtggggaacaccccggcggaaaggaaccctccctctctgctctgaaggaaagtttcccaacacagccatgttcttggtggtctccggtcccccatccccaagcccccagtcagcctcacactcatccgcttcagtagccgcggagtgggggcctccaaagaacccagctgcagagcaagtccggctgacgcagtgtgcgctgggggcggggctctggacgggggcggagccacggcgagagccgcggtgagggcggggcccgggtgggcggtgccctgagcggggctcctagtgggcggggctctggggtggcggccgttgccgggctacgggagagcgcggagccctgcgctgggaggtgcacggtgtgcacgctggactggacccccatgcaaccccgcgccctgcgccttaaccaggactgctccgcgcgcccctgagcctcgggctccggcccggacctgcagcctcccaggtggctgggaaggtaggtgcgtcgctgtccccggcgcgcgg

SEQ ID NO: 11022 - DNA, 2300 bp, Homo sapien
agaacctaagagtggccgcaaagattaaatgagatcatatatgtaaatatatatatatatatacataaagcagtgtttggcacagagcatttatagatgttagccataattattattagcttataaccctggtcatgttatttctcctcctaggagaaatatttttttcatcatgtacaatgggaatgacgatacataccttacagcatggatacaggtaataagtatatgtaaagtactaacagcagcagctgacaaggtgagatctcagtacatagtaccaattattctataactatcaaatagggaggatgagttgactatgaagcaatagatattttagaaaaatgtaatgaacatattaaaatcataggctgaaactgggagcaaattttatacgttacaaagacatttcaatatcttgataaaaacaaaaatcactgatctaatggtaatgaccattctcttgttacctattcaatcacacttgttagcacactcaggaaggcagggggaaaaagcatttaatatgcacctactgcataccatgaagtgtgcctgctactttacataggttctcatttaaatcacacaatcctacagaacagagtatcattcttttacagatcaggccacatgctttaagacgttagaaaaaacttgtttgaggtcacaaattaatattgggaaagacagaactcgaacccgctctgtacatctgtaaagcccacacttttccatacttctctattacaatttatctgtttgaaagtcttctctcctgaaaaggtgagcttccagacccaagagccctgcccttcatttctttaaccagctatccaatagaatgtctaacacatgggggaactcaatgaaagaaacaagtgaccggagcagatgctaggctttgttaattcactttgtaggtgcttaacgcatagattttcagaaatacgaacaggtaaaccttcaggcctgacaagccctactgtttctacaagaagggatggatgaagttaagctagtaatctctcttcaaaatatattacaagataaaaaataaaataaaagaaagtcagtgggagacaaaggaaaatcaggaccaaaaacaaatgtcatctttatactgatttaatttgattcaagcacagactacttccacttcccagtacaacctgcccatattgctctcgggaattctaactatcggattaccagtgaccataatgctaaaaaactgaataaggctttttttttttcaaggcaaaaatcaattctaaaatttgaaaatctgctatcagtgccgaatatcatgatacaaaaagggaaaaataaaagctaaaattagttatatctcatccacccaaaatcaggcttcccctcacgtctttctgctcagcgcctacaagtaggtctcttcacaccaactatgttaataccaacactacatacccttaaggaaggtggtgtagcaaatttcacacaaaataatttttaaatagacaaaactgataatggagataaaacaagaatcacacactttagctcagtgcaacaataccctagacttgtctttataaggcaatacagtataacgaaattttaaaaggcaaaaataaaagtaatccttaacctaaaacggacaaaatgtacaaactccaagtagaacaggcatcaggtaagtcctttccaaccttgccttcctctcacctttcactagacaacgcaggctagtgacttcctggggtaagaaatcaaagtgaccaattccatggcactatgggaagtgagactcgtctcaacagagttttgtgttttaaaacaagaaagcccaaagctttgaaataaattaattaatagatgatggaatttcaggtattaatgaaattaccattactcgactgcaggcagccgtgtccttgcaaaaagaccatgtgatgccgcctgtgaacgcacagggataggcctcttaaggcaggactgtagcgctggagctaaagggctttagcaggggtgcgcctgagtgtatgcagagggcgggtcctggcaggacgaattcaccgccactgccagaacgaactattcagattcacgtggagcaaggggctcatgcagaagcagttcccggacccgacactctgggtaggagaccactaaacccggcccctcaaagcagaggtgaccttgccctcatcgagagcgcacacaagacgccactgtaaaaggtgggttcgctgctcgcctcctcccaggcccaaacaatctcgccctgattgttgctggccgcgcggagcaggggt

SEQ ID NO: 11023 - DNA, 2300 bp, Homo sapien
tttctccaggaatgttcaggtgtctttggtcaaaaacggagtaaaaatactgcacaccagagatgcttacgtgagctctgaggaccaggcctctggcagcattgtcctgcagctgaagctcggggatgagatgtggctgcaggtgacaggaggagagaggttcaatggcttgtttgctgatgaggacgatgacacaactttcacagggttccttctgttcagcagccagtgacagaggagagtttataaatctgccagaccatccatcagaatcagcttgggatgaacttattcagatggttttactttattaattcctccaattattacaataatcataaaaaggtgaaaacggaaaagttattcccaaaactgattctatgtaacttactatttttccaggagtaaatatttaaaatagctgcatggtttattctaatttatttcacatttcttattcctattatctgaagaatcctttgtctgtgcatttcttgtgggaagagtgttttgatatcattttagtgctctgaggagtcatatgaagatgtatccctcatctgtgtttctgaggacattaaggggaaattagagggaaatgtttattccatttagtactagtaacagctttaagctggtgatgctgtcacactccagaaagctgtagacactgctcattttgtctttttttaaaaaatgtatttttaagttctggaatacatatgcagaacgtgcaggtttgttacataaaaatgtgctgtggtggtttgctgcatctgtcaacccatcacctatgcaggtattaagccctgcatgcattagctatttgtcctggtgctttccctcccattttgctcattttctaacctaggttttaatcaccattctatccaacaaatcattgtttgatcattatttgccagacatgaatctctacttgttttctaggatcgccctaataaagtacacaaactgggagtctttaaacaacagaaacggactttctcacagttctgtaggctggaagtttgagatcaccgtagcagcagggccatcctccctccaaaggggatacaggaggatgcagccttgctgcttccagcttctggcagctggtggcagcatcactccagtccccgcctccatcttcaggtggctgtcctcctcctgtatcagccaaattttcctcttcttacaagaacagcttccctaatctagtatgacccatcttaatcataattgcaaactccatattttcaaataaggtcacatgtacaggcaccgagggttaggacttcagcatctattttgggagacacagttcaacccaatctgccctctggttcccaaaattgatttccttctcatgtgcaaaatacattttcgcaccatgtcaacattaccaaaagtcttaacactttccgcatcaactcctctcaccatctacatcatttaaataagctacagaggagacttactgtgtgattcatcgtgtggcaaaatgtctctccatctgtgatcctgtgaagcgagacgagttaatccacttctaaaagaccgggggttggagggggagacaggcatagggtagacaatccattccaaaagagagaaaggggaaggaaaaaagggttcacgggtcccaggcaattctgaaaccctggagggaaaatcccattagacttctttcactatttcccatctaaaatttttaactgagctatgcaagagtaaaaagttaccggacagagacaccaaacagagaagtgcaggataaatttaccaagagagtaggttaaaagggaaacttctccttcaggcctatggtgggcatttcttgtttactcaagtacctgccgtctctcaaagaatatctaatgtccactggaattcgaatatgtcatgattttactcgcgcccacccctagtcaacttgggagggaagcgcaaccctagccttttcttactctggacacagggggcggtaaaccgggagggcggccgagaaggcgagggggagcgacgctcttgctctctggacgacaacgtgcccacgtcctgaggccgcgcccagacccggaagcggggccgtcacgtggggcggcgtgggctgctgccttggaaacgcggagcgcgcgctcccagcgaaagcagcagggcagggatctgcgttggaggaagggactgctctggtgctagaatgctgtgcgtcggaaggctgggcggcttgggagccagagcagcagctctgccgccccgccgggcgggccggggaagcctcgaagccgggatccgggccc

SEQ ID NO: 11024 - DNA, 2300 bp, Homo sapien
tcaagaccagcctgggcaacagagttagacccagtctcaaaaaaaaaaaaaaaaaaaaagaaagcgagaaagaaaacgaaagggagggagggagggaaggaaggaaggaaaaaagaagaaaagaagagaagagaaattagggccagtggcattgggtcatgcctgtaatcccagcactttgggaggccaagacgggcagatcacctgaggtcaggagtttgagaccagcctggccaacatggtgaaaccccgtctctactaaaaatacaaaaattagccgggcgtggtgatggcgcctgtaatcccagctactcgagaagctgaattgcttgaacctgggaggcggagtttgcagtgagcagagatggcactccagcctgggtcacaagagtgaaactacatctcaaaaaaaaaaaaaaaaaaaattagccgggtgtggtggtgcatgcctgtagtcccagctgcttgggaggttgaggcaggaggatcacttgagctgggaggttgagactacagtgagctgtgattgcatgactgtacttcagccttggtgatggagcaagaccttgtctccaaaaattatatatatatcctaagacatctcccatgatgatacattaatttcattcaacaagtatttgttcaatctgctgttccaagtttaatattgagtactgggaaggcaataatgaggaaatacagtcaggcggggagtcagattcttcatcctacaattatgtaaacaagtgtcaagcccctgccatgacaagcgccatgtgggagagtaacagggtgctccacagccctgagtgggagcgttgctgagtcaggaggcccagccatccacgtttcatcttccttccaggccttgcgtttgctgctccgtttggagcactgcccaagcgttgtcttagctcctgctgcgggggaaactgcatggataacctggggtgggggcagtgtctacagaggaaaggacttgaaaatgcacttctcccgaactaggtgatgttttctgtgtgtgtggcccttcttcacagtggcctcctagaaaaacaagaccctgactcaaagaatacctctcattacagtaagactgtttggaatgctttacttttttaaaaatttaatttaattgtttaatgtggtaaaaaaaatatataacataaaactaaccagcttaaccatcttaagggcacagttcagtggcattaagtacattctctttgttgtgcaaccatcaccaccacccatctccagaactcttttaaaatcttcccaaactctgtacccatcaaacaactcccatttccttctctcttcacctctggcaaccatcatcctactttttctttatatgagtttgacggctctaggaacctcttataactgaagttatccaggtctgtctgtttgtgactagctagtttcacttagcataatgttctcgaggtccattcatgtaacacatgtcagaatttcttttctttctaaggctgaagaatattccattgtatggacctaccacattgcatgtatctgtttatccactgagggacccttgggttgctatggaaaataatgcaactacgaacatggacatctgttctagtccttgctttcaattattttgtgtagatgcacagcagtggaattgctggatcagatggtaatgctatgtttgcttcactatttgtcatgtgcctttatgcatattgtgataaaatttgatttttacaatagtcctgtgagataagtaagcattggtctgtggttaagagaagtgatttcttcaaagtgaaatgatgaacggaagagtatcctgaccttaaacttggcttttttttattgcccgttcagcttgaagagtggttccaatcacaagtgttaccttccaaggacaatgtcatcctggtaataaccagcttgctcccctgccctgagtcttctgccaagtctgtccaggtgtgggtctggggcaggggacagctcatccatttcccactgcacagaacggaggctgtgtccagggccccagcaacaaaggtttctcctctgggtttctgtttccctctttcagttcagtctgtcatctgaaccatgaggatctggtggcttctgcttgccattgaaatctgcacagggaacataaactcacaggacacctgcaggcaagggcaccctggaatccctgggaaccccggtcacaatggtctgcctggaagagatggacgagacggagcgaagggtgacaaaggcgatgcaggtactcacctgacggcttcggctgcctttgagct

SEQ ID NO: 11025 - DNA, 2300 bp, Homo sapien
cagcagaaggactgggttcaaccgcccctgcaggagcagctccttggcctcccaggcaccagtggttgggggctgcatcctctgtgagcctcaggtcaagcccatacagtgccctagactcctccctgctctgaccctgggcccaggagaaaggccgagcacctggccctctggagacaaggacatggccattcctcagaggtccttcccctgacaagctgggccccctgttgtggggcgcaccactggacatggtaggggagtggtggcggccttgcccgaaggcaggctgcgggaggggcggggctggctcaccacagttggttgattcaagtgaggcctggggtcctgctctccttccagcttccatctcaggatggctctcagccccccacattgaagaccaagaaggtgaggggcaaaccaagggccctgcctatggaagcttcctgtgatgggctgcaggtagcaggggctggagagggctgtggttggggccacaccaggctcccccaacctgagcatcctggaaggtgacagctcacccttggcagtggcaacccccaggccagcagccccatctgaggacagttgtcttcagtgccattggctgtggcagcacagatggggggtgtgaagacctgaggccctgcgactgtagcacctacagccactggagccagctctgcacaactcagacctgggtggcgaggacatagctttgcaggtgggcagccacatcccagggggagcctgcaggccagtggcagggtgggggcaggcagagcagggtctccccactgttgccgctgggctcctgcggcttgtggagaaagatgggtgggcccacacatattgctgctccctggatctgagcctcggtttccctacctgtgaaacgggtacccatggcagctcagaagtgtctggcagtggggctgctggggcacagtcatgggggacccgagtcctgctctccatgtgctcgcttccctcagtggtccctgatgccagcagaactttctcccaaaaagagaagggcgttcctgtgagttcttgtgtggggggtgggtcacagagcctctccaagtgcagggcagggtgaagggaggctgaggggtggttgaatggccctgggaagagctctcttgggctcctcgtgtctgggtggcctggggagcatgcttttgggcaggcggctggcagggctggtggctgagccactgtggctcaggatccccagcccaggcctgaatagggtaggcagggagaggggagggtgagtgcatggtgcaggacagtgtgtctcctggacagaaacagccctggtcactcacggccatggcatagccatggctacaggaaagtgctgctgtgtgttgcagcccctggggccggctcccaatggacacccagcagcatctcccccactgtgctgaggggagttgtgccagtggggtgctggcagcagtcctgggaactgggggaagagccttggcaagcccatccctcctcgggcatcagggatgggctcacgtgaccaatttctcccatggaagatgtttggggtgtgcccagaaaatggggagggccctgtggggcaggattgtattattaaatccagaaagtctggggttccatttttagcacaaggcaggcagcccacgtgccccagcccagtggccagcctgtgtgggagaggggagtgggggccagagggagtgaggcttctgttactgcagccagccagggtggccagtgtggactggacagcgggcactgcaccaggggcactggtactgaccttgggccatgcacctgatgcctgtgagagtgatctctaggaaccactgcacaagggggcagatgagggaaccctgacatgggacagctgagggttacgccaacacgggggggaaagctgtgtccaggctccaccggactccgccgaggacagagcactgccctgactctagggtgcggggtcactgagggttaggacagtctggagttgggagagggccatgctgcagctggggcacatcccacctgcacctctctagatcttggagatgggacccccacccacatgctccccaggtgggtcccatcctggggggtgcaggagggagctccatgtgcccctgctgatctgcccatctgagcctcaggggtcctgggcactgagagctgggctgggctcagcgggggtatgcattgacattggggacagagaggggatgctgaagcgggtgctgtctgggtggggcctgcctgatcgacccagcaggtgcacccag

SEQ ID NO: 11026 - DNA, 2300 bp, Homo sapien
ctcagtgattccaggaccgtgggaccccagaggctcctcagggagctgaagaacatgatggcaggaaggggtgaggtgccaggagctaaaagaacacagccagtgggctgaggcataaaccacgagaatgcagggaaggaggctgtgggaggggcagcagtagagatgggagagagtttgagggccatgtctcagaggatctgccctgggaagccactgctatggagcaggtgggcacagtgtcaagcccaggtacctctggagagggtggaaaggctcatggggtggaattctggggagggaccctgggaccagtcttctgcttcacctgagggcctggccttggctgcgggctgggcaagaggggaggggaccaggagtccacagcatccagcctggggtggccaagcagaaggccttggctgcaactgaggcatgagaaagagaggagggaccgaccgaggtgggctgggtcctgggccccgcccccacgccgggcagggactctttcatcaggctgccttgtccttgcagcccagagccctgggacctgggcctggcctggaaggggctcagtgttactggaaggggctcagtcctcctgggggctggccctgggactgagtgtttcagagaagcataaatctagtcctagtataaagctagggtccctatcctagcttgtacccaccacagggtcccaggagagaggacttggcttcccaataagccatcttaaatctttctcttgggccctcagtttccccaggggccattggattgaccactgtggctgtgtattggttgtggggtgcctaatggggtgccccagggctcttcccactctttccaaggtgcctgagggcccatagccaggtgccctgaaattcatgccgttgctcagataagtgtgctcagctctcatcactcctcttgtccacagcctgggtaaagccctgaatcctggcctgcagcacacccagacccaggcctagatgaggagggggaggaggtggccagaaagcagcacttcttgctgctctgggccttaggacacaggggagctgttctgcagcccatcccgggccagggcccaggcccaggctgccgcctggggtaaggatggtatccggagcagagccccatttaggggatcagcactaggagggaggctgggaggatccaaagtgactcaaggtcacagcatccacagaaacggctctaaaaccctcagagcaagtccttctgccaagtgttttcagagcgcacatccctctagtgaggttcactgggaggacatgctccagtgttgtcctggagggacctgcagcctaggggtcaagggaaaggctgggaccagtcgcctggttgagtcacctgtcgtcctggcaccccctggctgcccagcacccccagtgctatgagtcccccttccagcatagcctgactgcaggtccccttcagcctgtctccatccatggtgagtggccagcttgtttctcataaaagctgtgacatccaggggaagacagacccttgcctctgggccaactcggagcagctgaaggagtcaggtctgccccagaagggaacagaggcagctccccagccttgttggcataggatctgggccagcggcttgcctgagcccagaaggtgagggatgaggcctgagcactcatccttcagagaacaagttcccagctggcccccatgtccaaagagcgcagccttagcagagatcctgagagatccagcctttcccagtgccacgaggttggccttgcaccccactggcatgggcagtgagggggctccacagcccaccaacatccacatgcactttctctgcccacgtgggcactcagagaacaatgcccctcatccagacaaggtcctgaggccgggctcccattgcccccatttctgaaggcatttctggctctgcaagagaaaggacgatgccagggcagtgaatcggcacatccgaggcatttcttcttcctgggcttgtttccaaccctacctgctgggaggcagcaggattacctgggtaagcaagattagttgtgttcaactcacccaggaatcatattaagcaaattgtttggaaaacaagccttggagaggaagagcagttgggcaggtggccttagaagcagagacagacgtccctgttgataccactgttgatggagaagcactcggctctcctccatcaggggaaaccaaacctgccaccccacctgggatgtggcctccccagggaaagagtagagaggctggagctctggcagaac

SEQ ID NO: 11027 - DNA, 2300 bp, Homo sapien
tttttttattcccttatctggccccactcacatcctactgattggtccattttgcagagatctgattggtccgttttacagagagctcattggtctgttttgacagagtgctgattggtgcatttaccaacctttagctagacacagagtattgattggtgcatttacgatcctttggctagacacaaaagttctccaagttcccaccctaagattagctagacatagagcccggccctgattggtgtgtttacaaacctttagctagacacaaagtgctgattggtgcgtttacaatcctttagctagacacagagcgctgattgctgcatttacaatcctttagctagacagaaaagttctccaagtctgcacccatcccagaagcccactcggcttcacctctcactggcactcgtagcgggactttgcggcacctagcctgggcactctggcagcccagagggagctcatcccccgatcaagcccagcaggtgcttgccggctgtgtggagtgcggggcctgcccagcctgtgcccacccggaacctgtgccagctgcgagtgcctgtaggcacagccccagctcccgccagtgtctctccctccacacctctctgcaagcagagggagctggctccagccttggccagccccagagaggggtccccacagcgcagtggcaggctgaagggctccttgagcatggccagaatggacggcgaggccaaggaggcaccaagagcgagagagggctgctagcactttgtcacctctcaccaccacaaccaagtcagacccagccagccctctccacccaagtgcccattcccaacaactccatctgcagggccctgtcccacaccccagccacctcccctccccgcattgtccgctacttcatgcctgggggtcccaggtggtctctgcaacatagagtgagaaagctcggcccgggaaccatggcgggtgtgggggccctgctgtgctcagcattcccgagtaaacactgtttgcctgctgcgctggaccacgagcagaaagaagtcgccctctagagtagggagtccaggaagaggagaatggccccttctttggaggccactgctgtttgctgccacctctgctgcccaccaccacaccaccagcagtgcagccccgaatagctccccgacccgtccctgccatgggcattccagtgcctgttagtgcctcaaactgccccctcccaggcagacagtgcagccccatagcacccccaacttgctccctactgcagcccagacagcccccccaaactgctccccccgccggccaccactcactgccagtatcgtagccccggatagctcacccaacccatctccccaccactggcaatgctcaatagcggacacaacctgcttccctgttcccccgcactccaccggcagtgtagcccctcatacgctgctaacccgccccactgccagcaatgcaaccctggatagggtcccaaaccagcccccccatgccacaggcagtgcacacatgggcggtgcagccctaacagcacccaaacccgcactccgtggctgcccagataacgcgcctaccccgcagcctaccactctggctgagctgaagtctccgtcactaccaaccgcagcctccgtcgccacaaaccacagtgaagcaagctacagtggtgcaggctccagcctccagcatgctccctctacacgcgttttctaagccgagcacgcagcactcagtccagcagacgccgaagaggctggaacgctgggaggccccctcagcataccttgtatactgagattatgggaatgaggttcctggactctatgttcagattggatgagagaaaaatttctaggcctactctgattggactttattttcatgctctgattggttgttctaagacctgctcttatccaatcagaacatgataataaagcccaatcagagtaggcctagaagttttctctgatccaatcagaacatgtagtccagaaacgtcatttgcataacctcagtatatatatgtaatgctgaaggcagcccattctctgctttgccttgtcttcccgagtagctgctccattcccggcatagaggatcaggagaggggacgccacctgccacacgctggatgctggggtccgcacgactgcggcttgtgtcgctgtggttggtggtggtgatggaaactgcagcgtggctggagtggtaggagcagggaaatagttttggggtagatggaggagtaagggggtgctgagtgccaaagggaaaag

SEQ ID NO: 11028 - DNA, 2300 bp, Homo sapien
aggctgctgtgagccatggtcaggccactgaagtccagcctgggcaaaaaagtgagacactgtttcataggaatcgtaatagtaatttgttgtagggcaatctgggtcttctgggtttttgtgagtctgtttttgtaatttctgtctttcagagaatcttttttatctaaattattgaactttttggcatagtgttgctcacaattttttttcttatttttcttttgataactgtaagaactgtaccaataattctctcccatttctgatattgataattttttctttttcttttcttttttatttatttatttatttttttgagacaggttctagctctgtcacccaggctggagtgcagtggtgcagtatctgctgactgcatcccttcacctcctgggttcaagcaatcctcctgcctccgactctggagtagctgggattacaggcacgcatcaccacacccggctaatttttgtatttttagtagagatggggtttaccatgttggtcaggctggtctcaaactcctaacttcaagtgatccacctgtctcggcctcccaaagtgctgggattacaagcgtgagctactgggcacctggcctgtggccattgatttttaattgaccaggttggctaaaagtttatcaattttcagagagcaagcttttgattccattgacttttgagtgtgtccgttttctgtttcattgatttccactgttacctttattatttctttccttctacttactttgggtttatatcattatgagatgatcttgtttatctctagcaccacttttttcttaaaatctctttgtggtaatgcagctacttcagctttctgatgctttcttatgtttccatggtatgcgttttttcattcttttactttcgactcatttgtacttttgcatttaaatagcatcttttgtagacagcacatacgttcttgtttttattaatatattccacctgctaatctctgtcttttggttcgactgtttcatctatttatatttacttttttttcagggatggagtttctctgttgcccaggctggagtgctgttcacaggtctcctaacattctctatttgtctttttttgtttgtttttgagacagggtctcattttgtggagtgcagtggtacagtcacagctcgctgcaacctcaacctcctgggctcaagcgatcttccctcctcaaccactggagcagctggagtacaagcatgcagcaccacacccaactaattaaaaaaatttttttttttggtagagatggcggtcttgctatgtctcccagctgctcttgaactcctggcctcaccttggcctcccaaaatgctgggattataggcatgaggcaccatgccagccctctgtttttcaattgaatactttctattggtctatcttcaagttcaccaatgaattctgtcacctacattctgctactgagcccacatagtgatcttttatatattgttactttctaatttcctttgtatctaatagtttaacaattgattatcttgggatataattatatcatcttccagtcatgataattttaccacctgctatggtttgaatgtatctgctaaagttcacgtgttggaaacttgattcccacttcagtcaggatctctttgaaattaagaagtgtgtgtgtgagtgtgtgtgtgtgtgtgtgtgtgtccttgctgcctgagggtggaggaagaaattgtgaacaggaatcctgtatttgcttgtctgtgtcaggggaaaagaattataccccaattcttttccgctgatcctcaagcctgggaaattttaaaggagatgggaaacgaccccgccttcttatgaatatgcaacagtaaggggttgggagaagggagagaaaaggcctgcaagaaattcaccccaggtcctcctgctccgggctcagcccgggccccccaccgtcctacccacgaagaacagcaaacaatagcacagccccggccctggaagccgagctagccgcagagggtgatgcggaactgctcatcgccagggaaacgcggcattcggacagccgtccagagcctgtctgagttctgctgggcggggagccagagactgattcgctgcggtcctgggcccagcggctgggaggtcccgccctggccgaggaaatgaagagggcgcagggcatgggggcggcgcgcacccgggacagtttccagtcggcttctccgtgaccttcctcccccttccagctcggagcgggatgctgggatccctccaaggaccctctga

SEQ ID NO: 11029 - DNA, 2300 bp, Homo sapien
tatcccaggcgctcaaaaggttttcactgaaaccctgaaaaaaatattttttaaaactcacaaacaaacaatcagcaagcacctgtatgtgctaagttgatagatagtaagagtcttacatgggctaaagttttaattctccacccaatgcagagtgaggtcccactgtcaccggctcactgacgaggaagctgagattcagcaaggtccagcactcgcccagggcttgtacagggcctcaaggatgcgggggtcttcaggtctagttggtatcactccacagaaatccattcatctgagggccaggcctgtttcccaaggacatagtttcaaatatagtgctttcttcactataaaaagtattgcatgtaaatgttaatagtggtttccaagtaggcagaaataaccttttgaaacacaatttttttaaaagaaaaatcaaaatctgctcctcagatttgtgctaattctaaagagataataaaaaaaccctcaatttagaccgtgatatttttttttaaataatactaacatagatttcattttagcatttgtgagtgctttgtgcagattttttatagagtagaaataaaatggaacagtcaatgatattagcctcacatactatgtttctaaaattttccaaggtttggtttttatattttttcagctttaaaaatacatggtcattgttaaaacttggggtaatttcaataacaattcaaagaattaaataaaatttgcccatatttccaccacccacagataattatcattaatcttggagtgtgctttaattaatagactatttttagagcagttttaggtttagaaaacaggaatggaaagtacacggagttctgatgtactccctcacgcccctccctccacacacagctgcttgtactgacatcttacattcgagtggcacatgtgttatgattgatgggcccatgttgttacattaagatgaactaagtccattacttacaggaggctcacgccgcatgctgttcattctgtgagttttgagaaatgcataatgacatgaagccaccattataatgtcatacagagttttttcaatattttaaaaaacatacataaaattaattttcacttttcattgggtaatataatttttgttttttattttacagattgtgggtattgttctttgattataaaagacaatagacatttataaataatagtgctggccactaaatgaatcatctaaaaaactacactggtagaaagcatgcatttattttatgaattccattagctgcctatcagggaacatggagcactggggcacagatcccagcacagaagggtttgcttctcttctgtggttttcatgtcaattaatgattaggccttgagcctcacaagaaaggtgataggcctttgagtcggtttactgcaacagtctactcaagacttgccccaggccctgggaaacatgtaggtttaaaaatccctaccctgcgttttcctttcacagggagtgaacttctggcccaggcagtgggcagtggggcacggttgccccggagatgagactcctcttcccgccctggggggtgggggctggctggtggctgagggaactatttttgtttgtttctttttttaaaaaacggagtctggctgtgtcctccaggttggagtgcagtggcgcgatctcggcacactgcaacctccgcctctcgggttcaagtgattctcctgccttagcctcctgagtagctgggatcacaggcgcctgtcaccacgcccggttaatttttatttttattagagacggggtttcaccatgttggccaagctgctctcaaattcctgacctcaggtgatccgcccacctcggcctccaaaagtgctaggattacaggcaagagccactgcgcctggccggggaactgtttttgatgggtggggtccccggctgtggttggtagtgtgggggcgtggccgagggtgtggcctgagggagtgagctaaccgggggcgtggcctgatatggggcggggggaagagccgggctgggggcgtggcctggtggggagcggggctggggcgtggcttggctgagtgtgctgccgcggcgcgggaggagagtgtgcgttgcgctttctcccgcgatcgccctgccggtcgctagctccgagggcgcgcactggatcccaggctcctccgagagtgcggcgacctcggggctccgccggcaccggaggtggctctgagggcagggacgtgttggacacgctgactttgtaggctccgccaagagg

SEQ ID NO: 11030 - DNA, 2300 bp, Homo sapien
tctctactagaaatactaaaagttagccaggcatggtggcgggtgcctataatagtgccagcaactctggaggctgaggcaggagaatggcatgaacccagggggcggagcttgcagtgagctgagatcacgccactgcactccagcctgggtgacagagcgagactccatctctctctctctctatatatatacgtgtatatatatatataatatatttaatattgcatacatatttatatttaaatatatagtatatttaatattacatacatactatgtatgtaatacaaatataaatataaaattatatttaatttattatataaatatatatatttatatatatattatatattatatatttatatattatatatatttatatataatatataatatattatatataaaagcatatataatatataatatattatatataaaagcatatataatatataatatattataaatatatttataatataataaatatatatttatataatatattataaatatatataaaatgatatttaatatattatattaatatatcatatataatataattatatatcataatatatattatataattatattacataatatatattatataattatataatatattacataatatattatataattataaaatatatattatataaataattatataacatataataatatattattatataacataatgatatacaatatatattattatataacatataatgatatactatatatattattatataacatataatgatatacaatatatattattatataacataataatatacaatatatattattatataacatatatataatatatattattatataacatatcatatataatatatattattatataacatatcatatataatatatattattatataacatatcatatataatatacataatatatattattatatataatatataatattatatattattatatataatatataatattatatattattatatataatatataatattatatattattatatataatatataatattatatatataataaggctgtagttaccatggatggtgattcctctgatggatctgggcaaagtaaagtgaaaaccttctggaactgattcaccattctagatgccataaagaacaggaggaggtaaaaataccacccttaacaggaatttggaagaagtggattccacccctcatggatgactttgaggggttcgagacttcagtggaggatgtaactgcagatgtggtggaaacagcaagagaactggaattagaagtggaggctgaagatttgatggaagtgctgcaatctcatgataaaaatggaatgaggagttgcttcttgtggaggagcaaagagagtggtttcttgtgacggaaactacctctggtgaagatgctgtgaacacggttgaaatgacaacaaaggatttagaatattacataaatttaattgataaagcagtagcaggatttcagaggaaagattccagttttgaaggttctgctgtgggtaaaatgctatcaaacagtatcgcatcctgtagagaaatcctatatgaaggaagagtcaacaaatgcagcaaacctcactgtcttctcattttaagaaattgccactgcagccttcagtaaccaccacccagatcagtcagcagccactaccattgaggcaagaccctccaccagaaaaaagattaggacttgctgaatgcttggatgattgttaacattttttaacaatgaagtctttttaaatttattaattaaattaattaattattattttatgtttgtagagacagcatctctcgatattgcctaggctggtctcgatcacctggcctcaaacaatcctcctgcctcggcctcccaaaatgttgggattatagacatgagccatcttgcccagccatattttaaaattaatgtatgtacatttttttcaaacataatgctattacacacatggtagactacagtataatgtacacataacttttacatgcattgggaaaccaaaaactttgtgtgacctgctttatttcgatatttgttttattgctgtggtctggaaccaaacctgcaatatctcccaaggcatggctgtatctcctctttctcactatacattgctttcttttttttttttttttttttttttttgagatggagtcttgctctgtcactcaggctggagtgcagtggcgtgatcttggctcactgcaagctctgcca

SEQ ID NO: 11031 - DNA, 2300 bp, Homo sapien
aggtggaggttgcagtgagccaagatcgtgccactgcactccagcctgagtgacagagcaagactccatctcaaaatgaaataaaatttctgtaagagaaagattttcagctgaactggtcataagagtttgtgtgatcgtgtgtgtttttcacttgtagtgcgggttactaaggctatgagtttcccagaaaactgtccttacctggatttgagggtgggatgctccagatcaatagaaatagccacagatatttgaagataagagaagcctacgatatagtatatagtcaacatgtgtgttattactaatcatacagctttccattctgagttcatgctgtgatttctctgggaactagcatgttattaagggacctcaggttttttggagcgacagcagcagcgtgacggctaacatttattaacccccaatgaagagccagtgcttctctaaacactgcaatatgttctcgagtaattctgtgaggattattgattggtgctgcagttatccccactccgcagatgtggaaagagagctgcctagagacttggaaactttccctaattttgttatgggaaagcagcttttgaacacaggcagtctgactccaaagctcatcactataaagcatgcattttactaattggcactatcacttgtttaacatgtatgtatgtatgtgtgtatgtatgtatgtgtgtatgtatgtatgtatctattttagagacaggatctagctctgtaactcacaacactggagtgcagtggtgtgattatagtttactgcaacctcgaactcctgggctcaagtgatcctcccatctcagactcctgagtaactaggatgacaggcatgtgccactctgcccagctaattttttatttttatttttagagacaggatcttattctgtcaccgaggctggagtacagtggtacgatcatagcttactgcagcctccaccttctgggctcaagcaatcctcccacctcagcctcctgagtagctgggaccacaggcacatgccactatgcatggctaatataaatttttttttttttttttttttttttttagtagagacaggaccttgctatgttgcccaggcttgtctcaaactcctgggctcaattgatcctcccaccttggcctcccaaagtgttgggattacaggtgtgagctaccttgcccagacctaattttttttttttagagatagggtcttgctatgttgcccagactggtcatgaattcctggttttaagcaatcctcctgcgtcatcctcctgagtagttgggattacaggcatgagccagcgggcccagcttaaacccacatttactaagagatgactgtgaggtcactactttgcgtatatattacctcattgttcataaagttaaaaaggccgtgtcttctgcttatggggaaatggaaggaagctcactctttgttaacagtcattttacaatatgaaagacttgctcattgtagataatttggaaagtatagaagagtatagaggaaataaaaacaacccagaatatattacctggagagaacttacatgtatacctttacatgtatgcctttacatgtataccttttgaacaaaatcactcttttaaagtgatttcataaatttatagctaacttaatgtaatctcataactcaaatttttgtcataccacagtgtgaaatcctaactgtatttttgaactaagtgacccctgtgcttttctcttgtgaaataaataccttttgaaaagctctctgaaagtttaactcaggttttggttttgtagttaaaagcagcacacaccatttctcctaccttcactgaaggctctcggcagcacctgatggcttgtgagtgtgtttgtctttggtgtatataggttttgccttagtttagaattctctcctgaagtcccccgcaatgtcactgtagccactaacccttggtcacacggagtgtggagccagctgtcagtttctgggcaggctctggccgggaacgcatacaacgtcaaagcagtgaataagcgatttctgcagttcccgtagctgccagcctgtgcagtcctctgtgatgcttggggaccggctcctcggtcacaccccagtcctgctctgaaggttgccgttttccaaacagaaggatggtagctagaggggagatagcaagattctggagtctggaaagccttcacttgggtatgtgtgcaaagaatggattgttgtactgtgacatgttgccgattcagctctttccttcccaagttgcagtt

SEQ ID NO: 11032 - DNA, 2300 bp, Homo sapien
gaagggaggagaggcataaggggagcaggaggctaagcatgatggtggggggtgggagtctggggctggacgtgtgtctgccgagcacctggcacatggccagtgcaggtaagatgaactgtgcatagaaaatgcaggttagattgatccgaatataaaacatctccccaagaaagaactcttcagtcagaaaccagacccatccttttctagtcaagtaactagaaacgtggatttgccaagtccttgaggaaagcaagcccatggagcaccatcccagggcgaccttcagccagccctctgtccttgctggcacaccagcttctccctcaggcttctgctttttgttaaatctccagggaacttggaatttttccaaaacatccttgactgtatctctgttgctgcaggcatgagcttggcctcccaacatggatctcagttcctgatgccatttcctcgggcagctcttgttgctgcccactcccactaacctgtgttctccccagctggcttccctggccccaggctctgccccaacagctcttcctccacgtcgtagcaaagtctgtcattagcccagccctcatcgtgcgggacaccatcaccacagtagcactctctgtggagttccagctacttgtcaaggatgctaaaagtttcacctgcattctgtggcctgattcttcaaaaagaaggacatgaagctcagagaaatgcagtcacttgatttaggtcccatgcccacagaagggcaggaccagaattcagacgagactctgtgaccctaaaacctcttctctttctgtcatatgaggggactctacttaggtcctgtggcttcctttctccaaaccctggaacagcagcccaggatgaactctagcctgtgagacccttctgtgtgcccccgatctttgcagtcttgtctttcatgagatgtgcagggagtctgtggagcatgtgcttcgaatcaagccacctgtgatttgcaatcgggccatcgcactgttctgagtcgcctgctcctcttccaggaagcctttccctgactggggaggatcccttcctctttaaaatcctgccacttgcttcagactctccctattatatttccacttcctggctgcagtcatcagaattcgggttttattgcatccccttaaagacaagggtcatctgttgtatagctttctgtccccagcacctgacagtcattccgttggaaaaaatactgatagattgcttcttggacttttggctaagatcaagtagagaaacagtgatggagacatccctgaacttgcacaggaggactgaggccatgagtctgaaagaagagactgctcagtgacagattgttggctttgccaagggtggctcattttcccaagaaagaaaatctgactagcagggtggccaatctaaaaagctgcaccatccttaaaagatctttctctctcttttctggtaaaagtactatataattcctcattctcatattttgagttccaagcctttcaaatatgtacagagagtaagaatgatggcacttttctactcaagacactgttgggatgtactggttttagtaatactgttgccttgcagataaaggatggaagcagaatattggatcatctttttcatcttttttacctcctcagctttccagcacattgcttggcagcattgttatctatatttatgttgttaatatccagtttggagcacagacttccaactaaattacacataatatcctgatggtcttcactctgcaaatggtattgtgttggcaatacactctttaacattccacctctcacttaatgtcacacttaactgcagctcttaactttggagtaatgtagacattttctaatagtttcttattctgagtaagatgcagatgattaccttcccttgggagtatgttaccaaattttttcatcatatgaaaaaatcttgttagctgtgtcttttaaatcatgcctttgttttgtatgttttagtttcttcagatggaggtactgagccctctgccttagtggatgacaacggtagtgaggaggacttcagctatgaagacctctgccaggccagccctcggtacctgcagcccggcggggagcagctggccatcaatgaggtactggaattccacacgacagtagtggatacgggatacctgattttcagggtccacaaccacttctgactttgttccctagttcttctttactaagcatgtccgaaaacctggaactctgattaaaacaacactgtgattcactttg

SEQ ID NO: 11033 - DNA, 2300 bp, Homo sapien
ccaccccccgcccccccatcaggctcccacatgtatgctcatttctccgcctctgctgtctgcactgctaagtctgagtgctgcggctgtcctagctgttggtggaggttttttagagtcagggtctcttttcagagacaaggcttttcttagagatagggtcttgctctgtcatgcagactggagtacagtggcgtggtcatagctcactgcagcctcaaactcctgggctttaagcagtcctccctcctcagccccccgagtagctagggctacaggcatgcatcaccacacccagctaattttctaaattttatatagagatagggtctcactgcgttgccgaggctggtcacgaactcatggactgaagcacttttcctgccttgatttctcaaagtgctgggattagaggcgtgagccagtgtgcccggcccctctcttaagtgcactctgcaactatctctatcaggacctaattcctgagattatttgaaaagaatggctttcatagaaggcaacaccctcacttgattttacaaagagtcaaaggtttgtcactatctgcaaccccgctgcatctaatcaccaactgacagatgagatcctgagtcatttagacacagatgggaaaaaatgctggttttatattggtcatatgaaaggctatattctattgtcatgctattctacttggcaacaaattttattttatagttttatcctgatttcagagaacttgtcattagtagaggtgcacctgaaaggttttgtcttcctgtggtattttgtgcttctatggattgtgtacgagcatcacactacactgctgttcgccctgtctgctcattacggctctcctagctgtaaatgctgatatctgcactatcagttcaacgctgaccattcagtgctgaagacaggttgaagtcagagaactgcccgttctctaatcggattagccagctgtgtggacatgccagtgtttagcttctttgtgccagccatctcgttctgtatgagtgtgtggcgaaagaagcaggtctgcagtgccatttagggaaataagaggaagtgcccatgattattgagcattgactgtttgtcacccctcacctggattaactcagctaccacagcattccccctgagcaggtcctgttagcccccattgcagatggggaaacaaaggcacagagaagttaagtggtgggattggatttaaacccaggcagtctgccccagaacctatccttttctgaactattacattatattgttttcctgttaaaattcataccaagtagtcattggtatgtgttttactccatggtcagtttattctactgaatgtcatgataactctttttgagttagctgttacatgtatgtacagccttttcttcttatcccactagctcctacctaagccatagtatagccatggtgttgcacatagataattagtgcaagcctcagattaaagacccacagattgatgctgtccatagaaaggcggtgctggtggaatccttgggtaagaggaatccttgccctgatgaacagtgcacagagctgcatgggctattcagcaagcagtgacattctgcatttgacaagtctcctgggctgtgaaatggaattagggttgggagaatgattacctgaagagtttggaaaaacacgtgacgacaccaatttttgagctctggtatttgaaacttgtttctggaaacattatatggtttattggatcctaaatccaaccgcatgagcctttttgctttctttttattttaaaacacctatggcaaattgcagtcatggaagtacgatgacctcatcagagactcatagagtctttttaattaaaattcattccaagttcatggctttaggcctacaaaagctgtactattcaaataatttatttggatttccaaataaaaagtattacttctgtattttgcagggctatatccgacagtgccgcaagcacacaggaatgttcaccgttgcgcagctagccactatttttggaaacattgaagatatttacaaattccaaagaaagtttctgaaagaccttgagaaacagtacaacaaagaggaacctcacttaagtgaaataggatcttgctttcttcaaaatgtgcgtcaccctttacttcattattaataacatctgcttacataattttgaagtgcatctccacagaaaacaggagtctcttttgttttattgtttgtttgctagatgaatcttccatagaaaggagatgtttcttctatcttatatg

SEQ ID NO: 11034 - DNA, 2300 bp, Homo sapien
aaatattacctacctcataggctaccgtgagcattttataaaacagtacaggccaggcacagtggctcacacctgtaatcccagcactttgggaggccaaagtgtgagaatcgcttgagcccaggagtttgagactagcctgggcaacatggcaagaccccatctctacaaaaagtaaaaaaaatcagccaggcatggtggcatacacatgtattcctggctactcgggaggctgagttgaaaggatcacttgagcctaggaggttgaggctgcagtgagccgtgatcgtgcccctgcactctagtctgggtgacagagcaagactccgtctcaaaaaaaaaaggaaagaccacaaatacaatgcctgtaataatggtccaacaaattctcactctctctctctctctctctctctctctctgtattcataaaaacagtgacaatagcacctgtatgtgtttaccacatgtctgaatggcactgatctgagccatttgtacatatatgaactcatttaatcctctacaccatcctatgaagtaagcactattattatacccatttaacagatgggaaaactgaagcacagaaaggttaaataacttgcccaagaccacacagctcaaaagtagcagagctggattcaaacccaagcaggcaccctggcttcaaagtccgtgctggtgatcactgtgctctaccgccattaaattaagaacaacaagcagatgccattcagattgtttttagaccaagctacattgattttacatctattaattggtcagaactcactctcccagaggactgagaaagtttggagcaagaagttaggtttttaactgaaataggctataggtggtgaaaattggagagaaacacatacatttcaagggccttatagacttctggagtttgggcaggatctctgagaacactgagtccaactcttttatttcatcagtgaagaatctagggcacggaattgctctgagcaagtaaatagaagaactattttggagtcaggctcttttgcctccaaaaaatattgtgtgtgactgggattaagggagaatcaaatcttatttaacaaaggccattgtcataccaaataccataaagtaacattggattagattcaacctaaatataataaaagtgtgtttttctttttgattttggacgctgacatttaggggataatttgtcagaagttaatttcttgctgacaatttatcgtctggccttttgtttctatgaccctgaacaagttgcaattccagggagctgccatatactcaacgcaaataatgtcaggtccataatcacgatactgtgtcccctgcatgaatgctttctcccatgtaagcctgcgtgctctcactcttggaggctccgtttgggtcagctgctgtttcagatcttgactgggttccattaattcagcatgcctcttaccagaggcttcaggctaggaagacccctcagctaacacagaggcactgtcacatttttctagtaagcaggaaaaaaaaaagaaaaggaagaaatttcaggcaccaggagaccaataaatccaggtttattacaaataacctttgaggccctgcccacctgtgaatggggacaggtggtaggcagcctcaggtacctagaaagtctgagaaagattctgtgttaggagtctcttccatatcctaacacctgaaggaatccaaattgggagtttgtttttgttgttgttgttgtttgtttgtttgttgttgttgttgtttagagagaagggtcttgctctgcccctcaggctggagtgtactggcgtgatcaccattcactacagcctcaaactcctgggctcaggggatcctcccgcttcagcctcctaagtagctaggactacaggtgtgtgccaccatgcctggctaatttttaaaattttatgtggagatggggtcttgctgtgttgcccaggctggtctcaaactcttggcctcaacgatcctcccaccttggcttcttaagtagctaggactacagctgtggtagaattggaaggtcttaagatgtgttttcatccttccagggactggatatcttagaccgaagctcagaattgattcattctggggagctgaccaaaatcactaagcaaggcaaaagccagcagcggacgttcttcctgtttgaccaccagctggtgtcctgcaagaaggacctgctgcgcagggacatgctgtactacaagggccggctggacatggatgagatggagcttgtggacctgggggatgggcgcgac

SEQ ID NO: 11035 - DNA, 2300 bp, Homo sapien
ccttctccaacagctcagaagagctaagtcaacagcccattgtttgctgtggctgtaatcagaaaaggattcctatgaaggctgccaagtggctactgcccactttttgtttactcttaatatccacctgcttcccaaagtgatctgctcctcccaaccttgggctgcactggggaagggcggtcgctagggtggggagggggcgagccccagaacccatagggcagagcatagtggctccatgtataggacacagtgaaagagatgggggtggcattttcttccaggagagttgtggggagatgaccgttaggtcataagcgcgcccctactctgcactggcgagaccagcaaagctggagtgaacccagctgaacctgggccgcagcagccccggaggctggaggcgctgcagtcgggaaacaccaggaggatggagcccttttccctgtaagcaggaggccaggatcctgattcctgagccggcttcccacggaccccaggccccggcagggtcctggcgggaggaagaacccacggagtgagtggggtgtcagcaaagcggggccgcagggcaggttctggaagcctctccgcgtggctgggctggagtgtgcagacgtgggagagcccggaatggggagcgcgtggccggtggaggcccgaggctgtgcttccgtcgctggctctgaggcagaggtccaggccggcaggctgcccaggtggtcctgtctcagagctctccggggcgcagaggcgcgggaagcggggaagggccgggcagcgagacgggtgtccccagcaggaggtcggggacccgtcgcgcgttccgtcggggccgcctgcggtgcaggggtcagagaccagccacgcgagcaagagggagcccggccagaactgctgagagcccccagcggagctgggactcaggggctccttgcgtttagccaccaagagtgggggcaggctgcggggtgccggggagaagccagatctcactcattttacaccgactaattagatcccgccgcccacctgggaccacggcattgtcatgtccgctgcactgacggggaaattgaggcacgggggcgagtaaggcgggagagggagtcggcgccgccgagctggggcgagccccgcacccacccgtacactcggcctctgcccctgctctgtgcgtgggctcctgctctgtgcgtggcctcgccgccgagctggggtgagccccgcacccacccgtacacccggcctctgctcctgctctttgcgtggcctcctgctctgtgcgtggcctctgctcctgctgcgtgcactgcggcatctcgggaaaccgggctgggctcctctgtcctctggaagctactgtaagttttagataaatgttactactagacacgaggaaagtgagtccatgattactggcattgaacaaatggttgcaccgcgttctccgtggtaggtggagtgtgtgattgtgagaggggaatggacactgaatccttacctacacaaatgcctaaactcgtaaggcattacgacacacccatctgaaaatctaattaagcggtaggaattctaatggtccgggatccaaatgagacccagccacttaacagttagcagccttcagttttgtcctgttgcccgtaattaccccaaggtcagggagaagcactgaagcaaaggcatgaacatcactttgaaaaagaaaggagttaatgggtgcagcacaccaacatggctcatgtatacatatgtaacaaacctgcacgttgtgcacatgtacactagaacttaaagtattatatatatatatatatatatatatgaaagaaacctgcctggggcactccttccttcagactccccttgaaagtattccctcatttcattcaaaaggatttaacttttctaaactaagtggtgctggtagaatatgctacctgatttacgtgttgctgtaattcttgaagctcttccaagacatcttggccttcctctgttccctccccttcctgctattttgcagacatatccactggggaattgtatggcaggaaggctgattttatttagctggcccttgattcttggtttgcacagtatctgggtccagcctgcagccctagggtccaggtaagttcatcaggaaaggatttctttacattcaatttaagccatctaggtcctaaaacaacgcttatattatctgtgggataatcctgcttagttatttgcaaaatagtcagatgtctatacagttttgggtaggaaaggggtaagccgctttcaaaatt

SEQ ID NO: 11036 - DNA, 2300 bp, Homo sapien
ttaggaactgaaatgtcacacttaataaagtcttcagcccagctacttccctgttttcgtggggagaagagggcctgattagaactgttctggttgtgtttggcgggaggggaataaattttgttcagtccttcttagtgaccaaactttaatttttaagaataatatattgacttactgaactgaagcattctgagttgaaaggagctccagaggaaaggagttctgtgttgctcacatgttaaaagcttgctcaccttcagagcagagggaatacctatcttcagatatccgcccattttcatctcttcattatagtcaaacagtgtgacttgagagtgttgctctggtgtctgtattctggcttatgaagattatttgaaaaacaactcttactacattgaaatgcagactttaaaaaatttaaatatgcggcctggcgcggtggctcacgcctgtaatcccagcacttgggaggccgaggcaggcggatcacgaggtcaggagatcgagaccatcctggctaacacggtgaaacctggtctctacttaaaattcaaaaaattagcctggcttggtggcgggcgcctgtagtcccagctacttgggaggcttaggcaggagaatggcgtgaacccaggaggcggagcttgcagtgagccaagatggcgccactgcactccagcctgggcgacagaatgagactccctctcaaaataaataaataaataaataaataaatattggattaggcagtcagaaaacaaaccaaacaagcataaaaggtcaataagttgtaatcttaaaagtaaaggtcaaaaactcatgataagtggaaaaaaagttttgatttccttttttgtttgatgggcagtatgccatattatacccaaacttggtttaaaaaatattcccatcaactatttttatttaaaataaacatttgagggaagttaccacggcaactttttttcctcaaaagtaacctgttcctctttggaactgcacattttaggggcatggttaatacctgagatttttactcagtaaacctgatggttaccgtgtgtaaaatatctttaagtaggattgaaggcctctgtggggaataaaatattgccaaagcctataaaaataaattttacatgttctcttttatgacagagagcagcactggttctgttatttttaaaatgaataattgatttcttgactggtgtttaatatttctttcctcactgctgattcttagatagaaaccattatttatatttgatagactgttttcagaaaactcttatcaacaagtgtacaatagttatctaaaactgtacatttagaatggaggagtttaatactagatctcggaagtttgaaaaatagcaaagaagactggatttggaaagcatggtctacaattgcttgtcaaattctgaagctatgaagaataaatgtttcaactttagattatgaaaccccatttatgattttttaaatacacttgaaataaaaatgattgaactaaattttggtccagtgacattactttgcactgcatagcctattatacattgtaagtctttttgttttattactgagatttttctgtaaagctacagcatatctaatcagagaatttctgatttgtttccttatactgtgattatgttatattgaggcatttgtagtgcagcttaagactgaatttatgctttttgtaaacatgatcggtgtaaatgtcttataaacattctggagtatgtatagctttaatgaatgaaatttaatggacctgattaaaatgaagggatttaatctttgttaaagtgaagttagtggaataaattacctactggaatatagtccaagccactaaaggtttaatatttgcatttttttgcttttattttctccttccatttataagtatatacttgaaagtacatctgtagcctatgacttgagtctcttgaacttctaggaagaggcaaactacaaactaccaggattctgatttcagatataggcattccagaatcttctctttatgagttcacctgctagtacaatctccataacttgaatggcattggttgttctataattgctgccaaaatcatcacaagctgtacgtcatcaaggctccctttgcactcccaagaagaactgttcattttaaacaaaagtgtatgtctttatttgtattggaaaatattgtctttaagttgtttcttgttgacactcccctcagtggaaaagttaccaaattaaacctgttttatggatggcagcttggagca

SEQ ID NO: 11037 - DNA, 2300 bp, Homo sapien
tcttagctcactgcagccatgaacttcttggctcaagtgatcctcctgccttagcctcctgagtagctagggccacaggcatgcaccaccatgcccggttaattttgtaatttttttgtagagaggggatctccctatgttgccaaggcaaactcttggtctcaagcgatcctcccgccttggcctcccaagacactaggattacaggcatgaaccaccatgcctggtcctattgtactttttaactacacaatttctttttggttcttttcagttccaaaatgtgtttggttccttttataatttctatctctttattaatattccttatttgttttttaaataatttcaacttttattttagattcagagggtacatgtgcaggcttgttacctacatataattcgtggtgctgaggtttggggtatgactgagcccctcacccggggactgagcatagtacccaatagtttttcaacccttgcccctccccctccctccctgtctagttgtccccagtgtctattgttgccatctttatatccatgagtacccagtgtttagctcccacttacaaattagaacatgtggtatttggttttctgttccttcattaattcacttacgacaatggcctccagttgcagtcacgttgctgtgaaggacatgattccattcattctttttatggcttcgtagtattccatggtgcaaatgtaccacattttctttatccagtccattgtcgatgagcacctaagttcattccatgtctttcctattgtgaagcgtgctgtgacgaacatactagtgcatgtgtctttttggtagaatgagttctcttgttttgaatatgtacccagtaatgggatagctgggttgaatagcagttctgttttcagcactttgagaaatcttcaaactggtttccacagtggttcaactaatttacattcccactgacagtgtataagcatttccttttcaataaagccttgccagcatctgttgttccttgactttttaataataaccattctgactggtgtaagatggtatctcattgcagttttaatttgcacttttctgataattagttatgctgggctttttttcatgcttgttgaccatttgcacatcttctattgcatattctctatttattgagactttgttctcctggttgtttctttcagttatttttctatgtttcctttcactttttgtccatgtttaagacagtttatttgaagtatttgtctaataattcctatgtctgtgcttcctcagctcagggacaatttctgttcatttcttttttcctttgaattggccattttttcgcctttttttttgcatgcctcataattttttgttgaagattggacattttgagcattacgatgtggtaactctaggaatcagtctctctcctcccccagaatctcttgttgtttcttagacaaccctatagagtaggttgtaatgatgaaacttggtaaattaccttgtccccagcccccttggtaataaattgtggagtcaggattcaaccccataccctttccactgtattctctactctatcctttctattctcattttattcagtatcctaaaaatctgaatcttccccattgctttattcccatttcagtgaatctcagatctgtatctccagccccctgcctctcttgaatggcagataaatatatttccaactagttacactgtcacgaatttcaaacgcaggaaggcttaaagtaaatttattatctcactctcctgtttccacgaactttcccgaaattttcttctttcccggccttgtgaatcccttccatttctcagttaaaggacagcaccatccacccacctctctcaaagccgagctttgtattaatcctcattgacaaaatccctcctgaaatatgaaactgaaagccctgaaccctccggctgatcttggaagagaaaccccgccagaggccggggacccgctccccacctggcggacccgattccgggcgcgttccggctatcgtccctgcttgggacgctgcgcccgcctggtgcggggcggggttccggcgcagtggcgcccgcccagccccgggggcagggagagcctagattacggaagtaccgcgagcaaggagcgcggaatcggggagcgtccggagctagctggatcctctaggcaggtgcgtgggcgctgcggggtggggggctgcaaaggtccctgtagtcctagccaggaagtggcccgcgtactactttcccgccagtggctgcaccc

SEQ ID NO: 11038 - DNA, 2300 bp, Homo sapien
acacagtttatcaccttgttttcatgaataacaatttactaggaatactagtttgaaggaaggtggtgtcattaaaaataacatgaaaatacattttaattttactaggacacataatctgttgaataattgcatctaatatgtgttctactttatgtcccagttaaattcattgtctttaataaggtatacgatcagatctatatagtaataaatcataaaatatttttgcaccccaatagtttcatttccttttttacacggcaaaacccagtctcttgaaaaaatacaaaattagccgagcatggcagctgcctgtggtcccagatactcagaggctgaggtgggagaatctctagagtctgggaggcagagattgtagttagctgagatcgcaccactgtgctccagcctgggctactgagcaagaccttgtctcaaaaaaaatgacacaaaagaaaagatgatttgaaagattgtcccatacagtttaggacaaaagggatagacatgcatagaaagaatgtacatttcaggtggtaaatatacactaggaaaatcaatgcagtgctaaggcagccccaaggaaagagatgcctgtttttctgaggaaagatagcaagaatcaaggaatacttcacacagcaatgtgagtgatgaaaaagaaatggttagaatagtagaggaaaacatttctgatatcgagaacaggatgtacactggtaaagtataaacagttacagtaattctggaaatcattgattataggcataatgtgttgttaagaatggcactactggaccgagcgcggtggctcacgcctgtaatcccagcattttgggatgctgaggcaggcagatcacctgaggtcaggagttcaagatcagcctggttaacatggtgaaaccccatctctactaaaaatacaaaatttagcggcttgagccacctcacccggctgaaaatttttttaagacaggctctcactgtgtcacccacactggagtttgagtgaatgcaatcttaatggccacaatcaatattcttttttaggtcacagtcaaaattctttattgataaagacctctcatgtttatctcaaaagaagctttaaggattgtctaggaatcaccacatgctatttaggttctatgtctcaaaaaaagaaaatgctaaaataatgtagaacatttaaattcactattactaattacacagttttctgtgattggaaatggtcatcaaaccaaagggaaaattgcaattttcatacgttatcttgagtaatttcacttagagatttcattgaagttaattcttcgtcactattgttggtaaattaagagtttttaggaagcagtttctgtaatgaaatttcagatgttttgaatatttctgttttatagttaactgtgcaatacttttattgaggttttcaaatacaattactgtgcagttaaagaaagcaatgttatgtccagctttcagtaattgcttgtatgggctatctgtagtccctggatgaaataatgcttgagtagatgaataaaaatacatgaatgaattataatatttagacaatgaagattgcctataaccttatttttagcataattccctaaagctatttgtgttatatgtttgaatgcatttcaatatgaacttggtaactgtcatttctattttaagacttcagtgacctgggaggagaaaataattgggcccagtggttattattactagattttcctttgcttgaatctaggcttgtgtctttcatctattggaataaaagcattaaaaataatctgtggtatattttatataatctgattcattggtaatctaatcttgcaatataaactgggtgcattaagcacttgtagtatattaagcctgggagactgaagtttcttttcagcgttcctattaagtatatggtgatggaaatttttcaaaatttttaatggaaaatgatgtcccaattcactcttttctttttgattttagatgggaaatgtaaagtcataagatcaataggttgactgtgacaactatatttacttacagagagaacaggaaatgagaatgggtgatgtgggtccccatgaagcaataaacataggaggtagggatttgaagcaaaaggcttttgtaatttatcatttttggggggactgtttatgctgtttgtggtatctatatatcagtaagaaactaaaatacgggaccaacatttctaaaggtgaaatctcttacatccattaaactggaatgcaatacaattatattaaaaaata

SEQ ID NO: 11039 - DNA, 2300 bp, Homo sapien
aaatttctttaagttccttatagattctggatattagacctttgtcagactccacctcctgggttcaagcaattctcctgcctcagcctcctgagtagctaagattacaggcacctgccaccacacctggctaatttttgtatttttagtagcaatgggttttcaccatattggccagactggtctcaaactcctgacctcgtgatccacccacccgcctcagcttcccaaaatgctgggagttctttaggtttctattaggtccaattggtcaagtgttgaatttaagtccagaatttctgtgttagttttccgtctttatgatctgtgtgatgttatcagtggggtgttgaagtcccctgactattgttgtgtggctaagtcttttcataggtctagaggtatctgttttattaacctgggtgagccaatgttgggtgcatatatatttaggatagttaaggcttcttgttgaattgaactccgtatcattatgtaatgctcttctttgtctttttttactattgttggtttaaagcctgttttatctgttttaggaatagtgacccctgctcttttttgtgttttgtttgtgcgatagatctttcttcaaccctttactttgaacctattggtgttgttacatgtgagatgggtctcttgaagacagcagacagatgggttttgtttttttaatccaatttccactctgtgacctttctttctttctttctttctttctttctttctttctttctttctttctttctttcttttttttttcagaatctctctctgtcatcaggctagagtgcagtggcatgatattggctcacagcaacctctgactcctgagttcaagtgcttctcctgcctcagcctcctgagtagctgggattataggcatgtgccatcatgcttggctaatttttatatttttagtagagacagggtttctctacattggccaggatggtctcgatctcctgacctcgtgatctacccaccttggcctcccaaaatgctgggattacaggaatagccaccgcacccagcccactctgtgacttttaagtggtgtgtttacattcaaggttactattgacatgtgagcttttcaccctatcatgaaattgttagctggtttttttgtaatttctattgtgtggttgttttatagggtctgtgagctatgtacttaagtgtgtttttatgatagcaggtatcattctttcatttccatgtttagaactcccttaggcatcttttgtaagactggtctagtggtaatgaactctcttggcatttgcttctctagaaaaatgtttttatttctccttcactcatgaagcttagttcggcaggatatgaatcttttgattataatttattttcttcaagaattctgaaaatagatacctcaatctctgctggcttgtaaggtttctgctgagaagtctgctgttatcctgatggggctacctttgtatgtgatctggcctttttctccagtgcctttagggctttttctttgacagtgaccttggacagtctggtgagtatatgccttggtaatgttcattttttatagtatctcacaggtgctgtctggctttactgtacttagatgtctatctagcaagattcaagaaattttcttgaattattccatcaaatatgttttccaggctgttttctttttctctttctctctagggcatgccagtaattcgtaggtttgatcactttacataatctcatatttctgactttcttcacttttaaaaaatcttttttctttatctttgtctgactggattagttcaaaagaccagtcttcaagctctgaaattatgttttctactttgtccagtctattgataaagctttcagttgtattttgaaattccttaagtgagtttttttaattctagaagttctgattgatttcttattaagatgtttatctcttccttcatttcccggattgatgtagaagtttctttttgttgatttcaaccttgaatctcattgagcttccttgcaacccaagttttgaaatgtttattgttatctctgagttttcattttggtacgaagcattgccagagagctagtgtgatcctttggtagtgtcactacattcagatttctcatggtgctagaattcttgtgtgggtccttctcatctggagatgctagcacttctaatttgtgtaattatttttgtttgggtaggattttttctttttctttccttttctataatattattgttatttttttcttctttccctttc

SEQ ID NO: 11040 - DNA, 2300 bp, Homo sapien
tcactatgtcgggtacaacacattcccttagtctcatttgaaagccatgatgaacagagaggtgtggaaaatctaagatcacaaatatgccatgagaaagtatctttgtctctactgctactttacaaaaccacgtctctaactgctaacacttcaaattccctcaaaataagcttcttttcccaattgtccctcaccaccaactatagtcatgctctgaaattattatggaaatttagcatctgaaaggaacaggaagttataattaattcctaattagaattgggcacaagcttttttttcttattttttttttaatttttttattgtgacagagtctcgctctgtcgcccaggctggagtgcagtggcgcgatctccactcactgaaagctccaccgtctcccgggttcatgccattctcctgcctcagcctcccgagcagctgggactacaggcgcccaccaccatgcccggctaattgttttgtatttttagtagagatggggtttcaccgtgttagccaggatggtctcgatctcctgacttcgtgatccgcccgcctcggcctcccaaagcgttgggattacaggcgtgagccaccgcgcccggccgggcacaagcttattgtttttcttctaccttttctaaatgtacccaatgctcttcatgttttctgccagatgttctagtcactgcatgatgggattgttacttttgctgcttctctggactcctcactcttagtcattttaaatatggtcaaaatgacaatctttcttaccatatttgatatataactttcaaaaagaataaaacttagcaccctcctattagtccttatctaaatggaaacttattagcagagcatcaagggcccaataaagtgccccctcttttgaaacttatctctactccctttcatatatttcaatcatgtcaatttcttattgttcttctaaataggtgctgattactaaactctattcgtgggttttattttttatgttcctctccattaattaatattcttcactgactttaagacttcacgattcattcttttaaaagaacgtgtttgatttcctccactgttaactgctaaatatctctctgatatattgttttcaggctatctttctcatctggagtaattatgtttcaagtgtcagggggaaaataccttttctatcctgtgcaaaaactcatgctgggcactaagagcatggagcatgtcccagttatctattgctgcataacaaaccaacccaaacttagcagtataaaacaaccactgctttagtatgcacatcaactttcagggtcagaaattcttttctccttcatgtatagagtctcagctgggagtgacataaataggtggagacagacctctccagcccagtccagccaacagcctccgctcctgcgcacccgcagcctggggccccaggttcctgtggtctcaccgaccctaatcctctcatctctcctccccattccctctccaaattgtttcagaattccaaattcttatctggatccggcaaattaattcagctactcttcagagtctctcagttattcccaaattctctcggaagcttgaatttacctatctaaatccattctcaaaaacacattggccttttctagccgggacatctccaacagtagttgctgttagaaactgcaatttccccttctctgcatacacatttttataaattgatttattggtaggcaaattacatttttaaaaaaaggcatgtgtgggttttcagggaagcctggacaggacgtgggcgtgccgggagctcgccggagcagctggtccggctctgggcgcccagcggaaccagggctgtactcacctggatgccggacccgccccctagagaccccgccccctggcgttcggctactaaagggaaggggattcccagggggtcctcaatcctggactctcccgacccctagctgtcggtccccctccctgcgcgcgcgccggcgggtttcctaccctccgaggcgtccgctggcctgcgccctggcggggacgtgggcggggcgggcggcatttaaggctggtgccacctccccggtgcagcggctggcgatcggccgcggaggtgcgtgcagggcccgcgccgccgccggtatctccaccgccaacacctcagccactgccactgccacagccacacgaggccccccaccgtgcgctccgccgctgcggtcccggatccgcgctccacgcccgcagcccgcggcgccaccagcccagcatgcaccaggtgc

SEQ ID NO: 11041 - DNA, 2300 bp, Homo sapien
tccaggaaggataaggagaatatgggccggacgcggtggctcacgcctgtaatcctagcactttgggaggcctaaggcgggcagactgcctgagctcaggagtttgagagcagcctgtgcaacacagtgaaacccagtcaatactaaaatacaaaaaatcagctgggcgtggtggcatgcgcctgtagtcccagttactggggaggctgagacaggagaattgcttgaacccggagaccaaggttgcagtgagctgagatctcgccattgcactccagcctgggcgacagagcaagactccatttctaaaaaaaaaaaaaaaaaaaaaaaagagaatatgaattgatgaagagtgaacagtaggtattccagatgaggggaatagggaataatactcacaaaactgtagaagagtcaacatgttacatgagaatattggcttgattagtactcagttccatcatggattagtagtggaaactattggatgagtagtagaatgagggtaatttagggaagcagtacttttctctcgaagacaacaaattacaaagatttttgagccgaagtgagcctttcaagagaatacttacttcacagtttctagttacccacacacagtgtagagagaaaagaaaatgaggaatatgggcaggctttattcttagcagcaaaaggcaaccgtgccacctccaggtgttttgtttgaaatacacctgccacctttctactagattacttcattccttgctcacaaaacgtctcatgcactctactgcttaaagagtaaagtccaaactcctcagccttacactcgagattctccgaaattcttccctgacacacctctccaaagaagcttactttaaggaaactcatactctggctaaatggtctttaaattctcaagaagtcactgtgtcttccatctaccttccctcacatctaccttccctcgctgatgtgttctttattcttggaatcccttagttcttgtttactcctgtaagtactacctaggttgtaaggtctagtgcaaaccctatatcctctacgaagagttttcataccaccgtagaccatattgacttcatttcttcattgctttttgtgaactatgcttggacaagttgcttcaactcttttttttttttttttgagacgcagtctcgctctgtcgcccagactggagtgcagtggtatgatctcggctcactgcaagctccgcctcccaggttcacgccattctcctgcctcagcctcccaagtagctggaactacaggcgcccaccgccacgtccggctaatttttttttttttttttttttgtatttttagtagagacagggtttcaccatgttagccaggatggtctcgatctcctgacctcgtgatctgcccgccctggcctcccaaagtgctggcattacaggcgtgagccaccgcgccgggcccagaaggctaattcttactgtctctaacacaggtccggtacataacacttattttggcggaagttactgggtttttttaaggagttatgtatctctcaagcagaaacctgctagttcataaattcttagcatccccaaccactcttggcacgctgccttgtatattattaggctcaacagcagttagtaatgatgaacactccttaattcgaaagcgttcactgaatctaccccaacgatagcttctcattagcttctccactccagctgctattggccaagccctggatgcccgaagcacacaggtttagggcttctggccctgacacgtaatagggaaaggggattgtttcaatccaaatgattatctataaagtcactcacaatgtaagtaataatatgcgaaattttaatttgtgatgactaaaagcactaaagtggtgactctttgggtagaacgtaaaaacgaacggtcctcaacggccacaaggcgccccttctaggagtggtacctcccaggataacggaaaacagccccagccccatcaggagcgagcttgggggcgggctttaatctcccggcccactgtttggctatctgcaggggctggcctccaatgattggtcgctgccgcgagggccgccgggactcgcactcggcggttgttccagaagaaagagacagcgatggcggcagaggcttcgaagactgggccttctaggtcttcctaccagcgaatggggaggaagagtcagccctggggtgccgctgaaatccagtgcaccaggtgtggaaggagggtatccagatcatccggtgaggagcccaagggcccacctagcggg

SEQ ID NO: 11042 - DNA, 2300 bp, Homo sapien
actccacttccctccttgaaggcaattacttttcattctttcagctgtttcgttgtttacttgtgttccttcttctaatatgtaatacttcagttgacacttcagttttagatattacctgttattctgtcagacaaattttggatctccatagcccttttgtcctcctttttctcttttctatagttgtatcacaatttttcattaaattcatactctgtgtaaataaagccataaagtatactttttaaaattctattgtgagttcataattatgttcacttttcactttattttcttttaatttgtgagtgtatttttaatagttcaaaaccattttccatatgataaatgttagtttgattttttttttttttaagcatgaaaacatcctttttgagatggtcttactctgttatccaggctggagtgcagtggaacatgatcatggttcactgcgacctctgcttcctgggcttaagcagtcctcccacctcagcccccagattagccggggctataggcacttgccaccacgcctggctaatttatatattttttttgtagaggtggggtcaaactcctgggctcaagtgatcctcctgcctctgcctcccaaagcactgagattacaggtgtgagccatcacatgtggccaaaaacatcctttatcttctccaattgggctgcttaccccctaggccttactacacattttttattctggaaatgtatttcagttggctatacacttcattgtcctccagtattggatcccttgttttctggatgccatgtttacctcttgagtttaattccctttttcgcatggagccatcttcccatagtttctccagagaacataaatggggaaatttgagaccttccatgtctgactctgttctcatgtgataatttagataaaacaataacattctttaaattactttccatatccatctatttgtttaaaactacatttccattcagagactttaggaagagtaagaatctaatggcattggcagaattgagaacatccttctagcaaggggattccagtggaagttgggagaggttcccccatcttttggctttataataacacttatcttctcaattatcatggatatctcctaccatagggcctatgtttgaagtgtcatcttgaatgagtgctagtgctgtgccacttgcttctacttctcccaaggagcagagaatactggatttttttgcatattgaaatgacagatactgtattagtctttaagtttgaaaactatgtattttgagtattttcaaaaaggttagtgtgtgatacgtcttttttaaaaacttctctgtgtttgaaacttccagagatttctttaaagtatagagaatagactggtacagaggtctctctctacttgtttttttgcaatatgccccaagtacaatattttttcaaaatttcacagatactgttatatgaatgaatctttgttgaatcttttgccttgttttatcacctatgttgactcacagtaaacatgtattaagtgcttactttgtaccttgtgctttttaaataggcgaatcctccaaaaacatctcatgaagttagattatattggtatacccgttttacagatgaagtaatgaggcttagagagaaaaagtaacttgctcagggtaatatcttagagatattaattagcttgctttaggtcacatagaattttagtgacggagctagtgttcaaaactggtcagtctgactcaaagcctgattcttaacttttaagtcataccacctgccatataattttgttatcctgattttggctatcctttgaatatttaaagcatactagtttttcattcttataagtctgcactatggatgatttcggggttcacatatttgaaatattttttacattttaaaaagtattaagtttgtatattgaagctaaaagtattctaatctagttggccataaaccaatctaaatttttctagataattctgtttccaagtttgtaatttctaatttcataatttttcaaggattgcctggacatcaggaagttgaagttaaatatgtggactttggtaatactgcaaaaataacaatcaaagacgtgcgtaaaataaaggatgagtttctgaatgccccagagaaggtaatttatttattatgaattctagggctagaatatcagcacaaatatggaagtatttttagaagctattgtcatcatagaaatgttagtgtccctttttgtctagttgctgatacagggactatagat

SEQ ID NO: 11043 - DNA, 2300 bp, Homo sapien
tgaaaccccgtctctactaaaaatacaaaaaaaattagccgggcgtggtggcgcgacagtgtctgtagtcccagctactcgggaggctcaggcaggagaatcacttgaacccaggaggcagaggttgcagtgagctgagatcgtgccactgcactccagcctgggcgacagagtgagactctgtctccaaaaaaaaaaattgcctcatttactatattttgtgacatatttctttccccaaactttcttaatggttttacagaaattctggaagataatgtgctcttagttgagcttttcgattctcttggtgctcctgaaatgactactactagtattaatgaccagctagttaaagagggcctagcatcttatgaaatagggtaagtagatatgtaaactttcattgttagttcatgttcttatgtaacattgtaatcacaagaagggaaactggcatatcattccccattggagatgagcttagactgtagacctgagaattttccctgtcctggaccagaaaaaatagaaaataactggagtcattaatgaggactagagtgacttttccctccattactaaggaacccagaaaccaagagaaaggctccttgagagtgcttctaaggaaaggagactgccgtcttatttctgcttaggaagccccttgtgcctgattgagaaaggaattgggaagagaaatggcaggatggagaataagcatagtggtagagtagcttacatttccatttgtagaaatgttgattttcctggattcaagtggatactttgaatgataaccaggcttgagccattgtgctaatactcacccaggacaggctagtggttagggtgaccccagaagcagaagaatagagtggtggcaaggacaggtgggagggttttgaggtcaagacaaagaattcttgcacaacagggacttgtgcagtgggagtggccctggaggaggctgagatgggcggatcacttgagaggagtttgagaccagcctgtccaatatgttgtaaccccatctctactaaaaataaaaaaattagctgggcgtggtggcgtgcgtgcctatagtcccagctactcgggaggctgaggcagaagaatcacttgaacccaggaggcggaggttgcagtgagctgagattgtgtcactgcactccagagtgtctgacagagcaagactctgtctaaaaaaaaaaaaagaaaaaagaaagccagtattcagatagcacccacatgtgatgcctgtcagcataagccaaagaagtagtgacaccccatagaggcctgcagtgactcatactagtattaatgatctgtggacatgctttcctgctcactcccatgctggaggagctagaatcaggagcttttccactataggtctcaaatgagagcggaaaagaaatgagaataaacattcaaattaatgttgaactgggccgggcacagtggctcacgcctgtaatcccagcactttgggaggctcaggcaggcggatcatgaggtcaggagtttgagaccatcctggccaacaaggtgaaaccccatctctactaaaaatacaaaaaattagtggggcatggtggcaggtgcctataatcccagctacttgggaggctgaggcaggagaattgcttgaacctgggaggcgcaagctgcagtgagccaagatcacatcactgcacttcagcctgggtgacagagcgagactccatttaaaaaaaaaaaattttttttggattgaatcttctcctttctttttaaagtgagggttattgaagtataacttatatacagtaaaaagtcacctgttttaggtccacagttaaatgaattttgacaaaatagtcatataagtatcatcacagtcaagatacagacctgagcaaatgcaaacaaatattttgcatacagttcttttcattaacttttgttgtttttcagatacatcctcaaagataattctcaaaagcatattgaagtttgggatccttctccagaagaaattatttcaaatgaagtacacaacttaaatcctgtgtctgcaaaatctctacctaatgagaattttcagtcactttataataaggaattgcctgtgcatatctgtaatgtaatatctcctgagaagatttatgttcagtggttgttaactgaaaacttacttaataggtataatatatatatataatatataaggaaaatattgcatatgattttatcctttattctgtttcaaagatctagaagtcataaatgtagattttactagcaaaatt

SEQ ID NO: 11044 - DNA, 2300 bp, Homo sapien
agataggaaaatgagggaaaaaattgtaaaaataatacgaatccatgtttaaattgttttttttactacatatagttggttcaaactatgagtgtatctgtgtgtaaatatagtgttttttgtatatttcaatattgtatgctatttttataaaacaagttgccactgttttctgttgtagaccagctggtgggagtgacaagtggacagcaacagcttgtgactgtctttcattgtacctgactggagctgtagcaactataatcttacaggtggatagtgaggtaacaagttacaagagatatgtgctgatgatctcattaatgtttccatcgattccatttattttctttcttgtagagaaaatagcagccaactatttggattttgttacaaattttgtcggttttatttcaaagtataagaggcatatatcttttcagaccacttcaaaaatattctttgctttcttttttctaatttaaatgttttattacattgagtagaattttgtaattcattttattactatttatgtgctttctccagttttatacctttttccatatgaagcagaatatatgttttgtagttcttttgctttttgtaggagaaaaaaggcacaccttggaaaatatattttgattctctaatttacgagaatgcaaaagaataaagaaacttgttaactgatgttgtattcctcacttcccaactccccattctgtgactggaaaaaaagtttccagtttgattttttttctttaatttcaccttgacattgaggttttcctgatgcatttcacaaaataactctctgttccactctcttccatgctgtttgctttttttaagatggagttttgctcttgtggcccaggctggagtgcagtggcgcgatctcggctcaccgcaatctccgactcccaggttcaagagcttctcctgtctcagcctcccgagtagctgggactacaggcatgcgccaccacgcctggctaattttgtattttcagtaaagacggggtttccccatgttggtcaggctggtctcaaactcccgacctcaagtgatccgcccacttctgcctctcaaagtgctgggattacaggcgtgagccactgcactcggcccagtgctatttttggatgtgtttagatatcaaaataacttgactcagctgggaatatttcttgcttagagaaatgtagaagaactgcctgtgaaatgcacattgtttatatgaagatttcattttggtgtttcatatttactctgctcttaaatcactacaggaaaacaacacaacatggccattacctgtgaaaattttctgcagagatgaaaaaggagagcgtgttgatgtttctaaatatttgattaaaaagggtttggctttgagagaaaggaggtatagacttttttaaaaaattttgacatcagtttgtgatggatgcctcagttgcgtgtgcaaatcttatgtgtgctttcaagtctgaattgcatcttgtttgctcttaaagatttataagctgaccctgaggagccagctcagaaatagattccttcagaattgctcatttcatttttcaggcatgtcagttcttgcacacttaagcctgtttactgacatacttgcttttgtaatttcccctctcctttgacatttacactgtaaaccaaagaaaaagagaacaatgtagtggataccagatctgagccctttggtatcctttacttagacataaatgtttaggctttattttagaaattctggtaggtatatacctactagatgtatttatatgaaatgtaaatgtatttatatgaaacaggatgagtagcaaataaataattgaacagtatttacgtttaaagatcctttcgggttctatgtttggagtttaagcacctttggtccagggacaggatcaggatatggttgtggctctagcttaatcttttctctctctctcttttttttttttttttttctgagacggagtctggctctgtcacccaggctggagtgcagtggcgcaatctcggctcactgcaagctccacctcccaggttcacgccattctcctgcctcagcctcctgagtagctgggactacaggtggccgccacctcgcctggctaattttttgtatttttagtagagacggggtttcaccgtgttagccaggatggcctcgatctcctgacctcgtgatctgcccgccttggcctcccaaagtgctgggattacaggtgtgagccaccacgctcggcctcttttctctctctttctagag

SEQ ID NO: 11045 - DNA, 2300 bp, Homo sapien
atatatgaagagtaagatgccaggccatgtcagctggaggttttccctttgctctgcaacatggttgtaccagttttttttactgtcagcagagtatgctcttcatacttgcaaacacttgatctggccagactttaacattttggccagttgatgtaaaatggtggttgattccgtgagctggtaaggccctgtgagcatgttttcttacatttagtcagcatttgaggttccccttttgtgaactgcctgttcatttcctttgtccatttaaaattttggatgtgtgtgtgtgtgtttctccttataaaatattccgcatagtaatcctttgtcagttacaagcactgctaatattttctcccaatctgggtttggcttttcagtttgtgttttttttaatgtatgtttttccttgtaatgttgaatttactagtcttttaaaatagtttttggttttcatgactttaattcttctcaatcctcaggccacaagtacaccattttcttctatgcgcttttgcattcacatcttgagtttttaatctggaattttaaaaaattatttttgtgaaataaatttagtaaagatatatgcagtttgacaattagaaagcaaatactcgggttaccaccacctacgtaaagacatagatgagtggcagcccggaactgccctctgtggagcccgtggcttttcttgatggcactctcattttctcatgctctgctttactgcgcctcacacaaactgtggtttttggagacagaagacttgcagcaactctgcactgagcaagtctgttggtgccatttttccaacagcatgtgctcactttggtagtataccttagcagtccccaacctttttggcatcagggaccaattttgtggaagacaatttttccatggactggggtaaggggcatggctttgggatgattcagcaccacattaaatttattgtgcactttaattctaatattattacattgtaatgtataatgaaataattatacaactcaccataatgtagaatcagggggagccctgagcttgttttcctgcaattagatggtcccatctgggggtgatgggagacagtgacagatcatcaggcattagatactctaaggagcgtgcaacctggatccctcgcatatgcagttcacaatagggttcttgctcctatgagaatctaatgccactgctgatctgacaggaggtggagctcaggtggtaatgcgagtgatggggagctgctgtaaatacagatgaagcttcgctggctcgcccacccgctgctcatctcctgctgtgtggcccagttcctacaggccacagaccagtataccgtggggtttggggccccctggtataagtggtatacttataatctacataaattgcaaatcagtatcttctcctagttcatggcttgtctttttgctctttatagtatcttttgatgaacctaaattcttaaagtagttcaatttcagtttttccctttgggcagtgcttcttaattctttccctatcttggggtcataaacatccctcccctagtatctacccagctattccagcactgtgtattccctagcttccactgtccccagttttcctgttgtaggtatttttaaggtgggttcacacagtcctctagacagtgtgcttgcacctggagcctgtctatgcccacggtcacctctcgttatcctgcccagttggtagatactttgggggttcaagttaatgttagttcataatcagcctgggaagaattaaacttgatatatagtgggtttgaatcctggttctgccttttattagttgacaaccttagtaggttatttaaccacttagccttggttttcttgccataaaatgggaataatattctagtcttttctctaaaggtggttatgagaaatgatgtcacacagctttagttatagtttagtttgcacacataacctgtgggggtgaagcatgacattcttgtgtcatcccaaacagagcactcctgctatccccagagccttgtctgccatctgcccctttgctcaagcctaaacccctgtgtactcccagtactttttctgttatccttcaccatccactcccagtagtccctagactgatccctctgatgttattttctggatctattagttacattgaatcatatgaaattgctgatgtgtggcagtttgggacctataaatcagtgatttcccatggtgtaatggaaccattcctgtctcacaggcacagcacagccgcctcacacgccc

SEQ ID NO: 11046 - DNA, 2300 bp, Homo sapien
cgcacccaaacaacttcattcattgtcctcagctgatgaattgagggaacagccttgtaaaatcaggaaagccgtccaaaagagcacttctgaaaatcagactgaatggaatgcacgtgacgatgaaggtgttccaaatagtgacagtagcactgactctgaggaacagcttgatgttaccataaaaccatcgactgaggatagagagaggggcatcagcagcagagaggatagcccacaagtctgtgatgataaggggccttttaaggacaccaggacccaagaagataaaaggagagatgttgatctggatttgtctgataaagattacagtagcgatgagtctatcatggaaagcataaaacataaagtgtctgagccctcgagatcctcatccctaagtctgagtaaaatggactttgatgatgaaagaacttggactgaccttgaagagaatttgtgtaaccatgatgttgttcttgggaatgaatccacttatgggacgccgcagacatgctaccctaataatgaaataggtatcctggacaaaacaataaaaaggaagattgcaccagtcaagaggggagaagacttgagcaagtccaggaggagcagaagtcctcctacatcggagctgatgatgaaattctttccttctttgaaaccaaaaccaaagtcagattcacacttgggaaatgaactcaagttaaacataagtcaagaccaaccacctggtgagtcagagcattataaaatatgtatcagaatgttagaaatttaacattaatcagtatgctgtcagaatgcttaaaatcctaactttccttattgctcaatagaattaagtcaaattaatgggtgatttgtaaaaatttgatttattttatgggtctatatgaggctttaaaattaattagtttttaataaagtgagataacatcaaagcttctacgtttcctttcttccccagacctggttcaagtaccccttcctagaggtaccagtattaccatttcgtttgtgtattctaaagagtccgtgcatataaaagcatatgtgtcagtttgtatataattacctttctatacaaatgaaaagactctttttgtatactgtcctgcaccttgcttatgataaattttgaagattgttctaacgcatgtacacacctacctcattccatttaacggatgtgtagtatttctgttgatgtaacggactttttaaactcaccctgaaagattcctttccattatattatattataaactagcagagcataggtgctttaaaatagaaattaaaatagaaattataacgttaattttcaaaaattctgattttaaaagtaatttttttgtacaaagtttggaagcttaaaaagcatagaagcaaaaatatttacaacttaactacccaaaagtaactgctatgccattttgggatatttcattccagtcattttttctatgtagttttaatatgacagagttgtataacttagctcatttctttagccttgtggatcacatttagtttctaaaaaagtactaattgataaaaatgcttgaaggacagaagcactggctattttacattttaaatagcaaatttgataaagggaaaacaatttgcatttatttgattaatagtaggggtaaactttgattttggtgttgattagctcttcagatctcttgtggattacttattcttaagctatttatatatattcgtctttgaaaaattgatttgaatgatttctttttatgtatcatgttgattccttgtcaggtcgatactcttttgaggtagattaattcttccataaattcccactgatttcctcaggaaagttaggtttaattttttttccttttcatgtttgaagcattgtttctaatgcattttaatagcacagatgtttgccatattcttggctcttagtgttactagctagctagtgtttttgctgcagtaatgccttttttgaagttcagtatttatggcctatttcataggtgacaatgctcgatcccaggttttgagagagaaaattattgaattggaaacagaaatagaaaagtttaaagctgagaacgcatctttagctaaacttcgcattgaacgagaaagtgccttggaaaaactcaggtacgtttgggtctgtaagttgggaaaaaatatgcagtgactcagttatacctttaagaccatctataaacagtctgaaacaatttaaatcagtcaaacaaatataattgaaaaggaggtgaaatctgtatcatataagttttttt

SEQ ID NO: 11047 - DNA, 2300 bp, Homo sapien
agtacaacagaagaagcaggaacaattgaagaggcaacagttggagcaactacagagactcatggaagaacaagagaagctgctcaccatggtgtctgggcagtgcacacttccaggtatgctttgcctacacagggcctcagtataatgcacatttcttacctgtagttgtttgacacgttatttctatcgttcctgtatcatgtgttgtgaactccagtttctttaaaggctagcccgataaatgtgaaatggtagagttgtaatacaactggaacaagaaggagctgccgcattctggtgtgcgcatgccctgctttaaggcattgatgtttattcattaaaaaaaaaaaaaaaatgagctgggtgtggtggtccatgcctgcagtcctagctactctggagactgaggtgggaggattgcttgagcccaggaatttgaggctgcagcagtgagctataatggcaccactgcattccagccgggcaacagagtgagaccctgtccccccaaaaaaggtccaatagaagaaaagtcagatttggcctagagctgctgctggtatccaacccctgcctgatgaatgaaaactgttgggtgtcatgaaggtaaatacatgtaggagccactctgttcagctgaagaaccataccaaagatattttctgtggtaggagatgacagtattctgttgtgtgacccatcagttaacggaaagcgtcacgtgccaatcaggaaagaaaactggaaatgtgacctggagcagtggtttgaaagtttcttgaccacactctgtagtagtaaaaatgtttaaaatcgtgactcataatgacaaagcaatttcatgtcatcagtccttattggtgttcctggcatgtagtgaggacattttctgtcttgtttattctagttctatatcattttaaaaaatgctacatccgataataaaattattatagattgtgtcccatagtttgaaaaaaactgaggttggagccatgtgtttgcttcttttaagaaatatactttactgacccaggaaagcacctgttctgctcagagattatgctgggcattgagaatacaaggaaaaaaagacttggcaagtgagtgaggctgggtgcaggggtcaggtggggtgtggtcatgagaaattgtagcacataaacaatggtttagggaatttggatgtttatcttagagaatatagaaaacatttgtgtgccttaaaatagttgaatggcttagggtttctttatggaatacatacaaagaataatcaagatcacttaaataacagctgtgatacttttaaaggtagaaccgcactatgacagaatgacagggaagctgatttcaaagttatttacataagaactagcctcatgcagtcatggagcagtttgctttggagcagtagttttcaaatattttggtctcaggatcccttaggattcttaaatatttgagagccccaaagaacttttgttatatgggctgtatttaccaataacttactgcattagaaatttaaacaggctagacatagtggctcacacctgtaatcccagtactttgggaggccaaggccggcagatcacctgaggtccggagttcaagaccagcctggccaacatggtgaaaccctatctgttctaaaaatataaaaaattagctgggcgtggtggcacacgcctgtaatcccagctactcaggaggctgaggcacgagaatcacttgaacccaagaggtggaggttgcagtgagctgagatcgcaccactgcacttcagccttggcgacagagcgagactgtctcaaacaatcaatggttttgttaaacaccatttcctaataaagggaaaaaatactgttgtcactgtggagaagtctttgtggggtgggggtcactactggggataaaagagaaaatgttgaaggaagtcatcagctttgttgcatttcttaattgtaaggtttgagtttactgcctgatgatcagagccagaagcacaggtctccaggaaataccaccactggagagagagccacatgctgcttcccatcatatgtctacccggacccaacccaggaagaaacatacccgtccaacattttatcccatgagcaaagcaacttctgtagaactgctcatggagattttgtcttaacttcaaaacgtgcgtctcctaatttattttctgaggcacagtatcaagaagcacctgtggaaaaaaataatttaaaagaagaaaaccgtaaccatcctacaggtgagctacttatgtttctctcttctgt

SEQ ID NO: 11048 - DNA, 2300 bp, Homo sapien
ctatgtggaggttttttgctactttttcatacatagtctttcttttaatgtaatcttcttgacagtcctatgaaggtctcattattatccacccctgttttgcagatgagaagactggtttcagaaaagttgagtgctgaagactacaaagctgtttgtaagttatcaagctaggatttgatcccaggtctgcctgataaatcctggactcttaaccatgacataggagtgccctcttgactcctatgatggcataaagaattgtatcagaacgggtaatctggcattaaaacccctgtgccacaaccgttagtctaatttttctctacagcaccatctgaagatgcaacaaggataggaaccactgataaggtagaacattttattgtctggcagagtagaagatggaagttcctccccactagcctttccaccttgtaatggatttgaacccttgaagcttagtgggcagttttgagaattacatgggctacaggtgaaaacttacacattataaccttaatttaacagccagttaagacttgagtgtggtaaaagattcatttatttattcaatcaacaaacaatgtggcactacatactatattaaaataaaaacatacgaataaaatataggcacaaaaatagaggatattgcgactatccttaaagatacacattttaggaagaatgatgagacttttgggcatgctttcaagccaaagggctatcataaatgaaaaggaagattgtttgggtccttgtctggcatcttaagtagctgtgtgatctcggaagtctcgggctttagcttcctcacccacagtgaaaattaaaaagaaaaattgggccgggcgcggtggctcacgcctgtaattccagcactttgggaggccgaggcgggcggatcacgaggtcagaagatcaagaccatcctggctaacacggtgaaaccccttctctactaaaaataaaaataaaaaaattagccaggcgtggtggcgggcgcctgtaatcccagctactcgggaggctgaggcaggagaatggcgtgaacccggcaggcagagcttgcagtgagcggagatcgcgccattgtactccagcctgggcaacagagcgagactccatctcaaaaaataaaaattaaaaaaagaaaagaaaaattgaaaaaagaagcaaaaccgaaatcttgatttagagaagtagactctttttgaagtagaaagcaaaacaaattttggaggaccaaatttctgtgaaatagttttgtctttagcagtcgtttgtttcagttataacggttataaatggcacttcatttgatttctttaaacattttacttggcctgctgtttaatcagacatggaagccaggtatgtagtactgtggtaactcacggtgctgtaacttcctagattaaagggccgtggcagttaaaacgaaacaaaacaaaaaaatttcttgaattctgcactgtcagtattcaaactagtttcagaatctaatggacacactctgccaaaccaccgattagccatttgaggagagatgaaagatgcctatttttggagtgaattctcatagggttattttcgtcttacgaaatggtgtagcggactgccctttttctcctttactaagtcacctcagccaaagcggaaaacaaagaaaaaaaccaaaccaaaccaaaaaaacgacaaaatagaccgtacgcaaatagaaaaaaaaaaaacaaaacccaaaacacctcctttaagcgtcggttgggctctatgttagctttgactctccgtgctccctgctttgctgggaacacggagatccatcgctccgttaggcgttccctttagttttctaagtgtgggagcctggggcgacgtccaccacggaaggtctctcccggaaacggttttccgccccgccacgccgcccgcctacgtcgaccactggcccgctgctggtcggaaggcggcgcgcagtccatcccccgccgggcaacgcccgtcgctgtggcgtcactgggagttgtagtttcactgggctcagcggtgcctgcgctttagcgcagacgcgcgggtgagatcctcacttcccacaggacctcgggacgggggcggggctccgacagaggcggcgattgtggcggcccatttgtaaatgctgcggagattgaggtgtcggttcgtgctgctgagctgcccaggcttcacggagcggtaatttgtgggcgaaaagagcggaggagctctttgtccgccgccctgcgccggagatggacggcggtgggcgggcagga

SEQ ID NO: 11049 - DNA, 2300 bp, Homo sapien
attattaagtctaaggagcagaaagtaaaagaatgaagaacaaagtccaaaagatttgtggacaccatcaagtgtaccagcatatgcatgatgggagtcccagaaagaaataagagggtaaaaagggcaggaagagtgactgaagaaacagtggccccaaagtcccaatttgataaaagacataatgtaacacttctaataagctcaatgaacttcaagtatgataaactcaaagagttcacaatagcattatattataatcaaactgttgaaagccaaagacagagaagcttaaaagcagcttgagagaaattatcagtacatacaaaggaccttccataagattaacagccaatttattaccatggaggccagaaggcagtgggatgatataaagtgctgaaagaaaacaaacaaactggcaaccatgaattctgtatctgtcaaaactatcctgtagaaatgatggagatgacaggcgcagtaactcattcctgtaatcccaacactttgggaagctgaggcaggtggattgcttgagctcaggagttcaagaacagcctaggcaacatggcaaaaccccatctctacaaaaaacaaaaattagctggatgtggtggcacatgcctgtggtcccagcttcctgggaggctgaggcaggaggaacacttgagccctggaggttgaggctacagtgagttgtgattatgccactgccctccagcccaggtgatagagtcaccccatctaaaaaaaatgtgtaataaaaacctacagaatgcttgaaaaaccatcaaactactatgtaattgttgttatttttaaagaaagcaaaaatacaggtgtgaaaactattatggtattgctctgcagttatcacatcaaagattcaagctagaaatcctttacagtctattcaacatcattggtcaggcattctagaatatagtggatgtgatcatccctttgttgtacagacccattaggtttccaggatcttttgttgtaagtccaatacaccagcaatagatttaactatatcaaaatgccaagattaaaaaaagtctctttgcacccaacattgttgttagaatcttctttactggccaggtgtggtggctcacgcatgtaatcccagcactttgggaggccgaggtgggcagatcacctgaggtcaggaattcgagaccagcctgaccaacatggagaaatcctatctctactaaaaatacaaaattagccaggcatagtggtgtgtgcctgtagtcctagctactcaggaggctgaggcaggagaatcacttgaactcgggaggtggaggctgcagtgagccaagatcacgccactggacaccagcctgggcaacaagagtgaaactccgtctcaaaaataagaaacttctttactgaagtaattctagaaatctgtttcaggccttggtgaagaactccttcactcttcctgcaggtaaaggagggtgtggtttttcttgggtttgtctagaggccagacacatgcatctccccaacctgctggagttcccctttctagcccggatcacctgggcttggggatctgccaggtctgtcctgcagactctggctgagcaacagatgaaaggagtactcagacacaggtatgcagtgtttaagagcagctagaggactgctgggcactagtggctgaagagtgagtagtcttgaacagctggagctgcctgtttttattcagtacagacataatgctgaaagcctggagaaaacacaatctgcaggtaattaacattattgttcccccttcagggaaggggtcacgtgtgtgaatgatcaacggtcagctcctggtcaacataagtaaacaagcctgttgttagtattcgatttaaccttctgaggtcttactgactgggatgttagtatatatccaagatatttccaaggagaggacatctgtaccttttcaggtgctatgattaagcctgttaactgtgtattctttttgacagaggcatataaattcaaaagtattggctccgttggggctgccagtaagatgtcatccatataatggattatcttgcaattaggaaattcttttctactggggagcaaagccttatttacacgatactgacacatggtaggactgttcagcattccttggggaagtactttccagtgaaatcagggagctgggccttcattattgatagctggtattgtaaacgtaaatttttctctgtcctgttttgcaaggagaatagtatgaaagcagtcttttaagtcaataatgactcaaa

SEQ ID NO: 11050 - DNA, 2300 bp, Homo sapien
gtatagtaaaagatggtataatctcatgggaccactatcagataaaccatccatcaccaacagaagcatggttatgagacacaggactgtacctgcagccgccaccatgaggtcaatggcagcctggatagtggaacccactcttctgctggtctcatggaaggcagctctctggagcttatgacaggcaccacatatccctggggggaggcaagagttcaccattagtccaagtctgcagcctcccattgtctaggcctgcagccaaattactgaacctaaacttctgggagccatgaactgggctctacgttgttccaaaggaaatgggctcaaggtatcagtgcggcttagcaattgtcccctaaaaagctcacagatcaaaaacctccactgtgtatcaatgctacagccaccagcagcacttcaagtgacctttctgaaaactgaaaaaatgaacaccaaataagtaagccaaccacagatgtactaacccacatcaggcttgcttttttagaggcctgtgctgagccatcaactgaacaggctcagttctaaattgagacagcagcctgtgctgggtgcctaaggggatgtctttgagatacagttggtctggaaagaagcatccaggcagccaagggtgggagctgtaccccgggatcacaaacaccttggggaatgcctgctctacctgcagtttggcccctttgcctctacagctgggagtcttcatctgtacaaggtgaataataaaaatattataaaacaaaggcagtcacaaatagccccaacaccatgccatgggggctacaaagtccggcagagtcaaaggaatgagacaagacaatagtacataaagtgggtccagggcactcagggctgtgaaggccctgagctctgggagcccacactatttattggtgataaaacaaagaagcagggggtgaggatgtgctggtcaaaaggaagtggtcgcatcaagtgtttaatttatagctgtgtcggtttagcatttcctttgaagcatatggaacatgttctgctactcgagataatgttgaatatgtccttataactcaagatacaatcaatttatgatcctgggagagcaagaagcaaggagccagcaagtctgggcacattccagaggccacgaggggttttatgtcctgagtcgtggattccatccaagccatgaggggttttatgccctgggcttaggttgtagtgcagcggggcagccttccacccttaagcacagaggctggtgttgcacaggccacaagaggttttaaactctggacccaggacatgttccaagactctttatattatgtcagatagcaagtgttgcctcagcttttctcccaacaattggactgatgggatgctccactgtgcacaagcatcatgggttcttagaacaaggccctgcacaagcaccaaatatgttcctgtcaccacagtccactagcccttcaactataatcgtgcacaggagtcgcctgggggccttgctaaataaaaatgcagcttctgattcaatagtctcaaacaggaccagagattctgcctgtcttgatgagttctcgagtgaggcagacaatgccagttcacagactcacactttgagatacagcacctgggccattgtattctaatgtgcttgataacctggagcacctattaaatatccaagttgtcaggactttcttctggaaatcttgattcagtatgttttgtttggagccttagatgtttgggaaaactagaatttctttctttccctttagacaaaagtcaactactgctgaggcatgggcttaataaatgttgactaaaatatccaactcaacaaccaatcctgtataattttcaaactgtgtcagtaacttgccaggtccaacctgcagaccctggccacatgacgggtgaagaaatgcactcagacacaggtatcccatgaaacagcaggctaggggaccggcagctcccagacaccaaggagggtgctgtaaagagtcagcagccacagccctgacaggctggggctccaggcatttattcagtacagatttaatgacaaaggtctcaagtaaatacgactagagggtaattaacatcgctgacctccggagtagagagcagtcatgcacctgcaaatgatcaaaggtcttaggaccacatgagtaaacaagctatttagataaaatcctctacattcctatgtatctatgccctaagcttttaagagagttcagctgtcttcagccaaaacttttactgaagctacgcaa

SEQ ID NO: 11051 - DNA, 2300 bp, Homo sapien
cataaatggtctgtgctgaggaggattagtgaaagaggaaggcctctttgcagttgagataagaggaaggcatctgtctcctgctcctccctgggcaatggaatgtctcagtgtaaaacccgatcgtatattccatctactgagataggagaaaactgccttagggctggaggtgagacatgctggtggcaatactgctctttaatgcaccaagatgtttgtgtatgtgcacatcaaagcacaacacctttttcttaaccttgtttatgatacagagacatttgttcacatgttttcctgctgaccctctccccactattaccctattgtcctgccacatccccctctctgagatggtagagataatgatcaataaatactgagggaactcagaaactggtgccagcgtgagtcctccctttgctgagcgctggtcccctgggcccacttttctttctctatactttgtctctatgtctctttcttttctcagtctctcatcccacccaaggagaaacacccacaggtgtggaggggcaggccaccccttcaaggctggtctcaaactcccgacctcaggtgatctgcccacctcagcctcacaaagtgctaggattacaggcatgagccaccattcctggcccatttttctaatttctactttgcattattgctggtctttttccctccgtttggactagagtctattttcagagctcttcttcgtttatctaaactgcttcatgcccaattcaatttctacctccttaatgaaatttttgcattctgtaccttctgttaactagcccctaatagtgcataacagcacacccagtctttatcatacagattaagttatgtaccattctactattgtttcttatgtgtacagctcccaaaaggggccaactgagtctgcacctccttttgtgttttccacagggcctagcatagacctttcttactgtgggtgcctttatttatatgagagtgagtcaaagaaatagtatcttgagctatctttggtcactccatccagcagcctgcattggtcaagttcaaagatcccattgacaaacacaagagttctgataaaacatgatgagcagggggaccccaccctccctctcccttgggaggggcatgcaggcccaacccccaagtgttacagacccccgttgttatttttaaatttagaaaataaaaaaccatgatgagttacgcattgctttttgaatgtcaatgctagctttaaaattgagcttcttaatatattctcaaaaaaggccctaacacatgaaaatcaaatgacacacattaaatgataatatttaattgattaaagtctaatagaaaattcaatacttttgaaaagtgcctcatgaccaggcacagtggctcatgcctgtaatcccagcactttgggaggccgaggcaggtggatcacgaggtcaagagatcgagaccatcctggccaacatggtgaaaccctgtctctactaaaaatacaaaaattagttgggtgtggtggcacatgcctgtagtcccagctacttgggaggcggaggctggagaatcaattgaacccaggaggcggaagttgtagtgagccgagatcatgccactgcactccagcctggtgacagagtgagactctgtctcaaaaaaaaaaaaaaaaaaagaaaagtggttcatgataacactcaaacatgttggcctttaaaagacataaacaacaggccgggtgcagtggctcatgcctgtaatccagcactttgggaggcccaggcaggcagatcacttgaagccaggagtttgagaccagcctggctaatatagtgaaaccccatctctactaaaaattcaaaaattagctgggtatgatggcatgtgcctatagtcccagctactcgggaggctgaggcacaagaatcacttgaacctgggagacagaggttgccgtgagccgagatcacgccactgcactccagcctgggtgacagtgagactctgtctcaaaaaacaaaaaacaaacgaaaacacacacacacacacacacacaatagtattgcaactagaaaagattattaataattatttatgcatgtagtgattgggctgtgagaccaaaagtacttgataaatataggaagtcatgataagtgaaaaggaccttttgttatcgttatctaggtttgtagttctcaattccatgtgttcattcacagatactgcatgacattgaaacagccggtgtattaactaatgtatatgacagtccacctctgtatgatgatgtg

SEQ ID NO: 11052 - DNA, 2300 bp, Homo sapien
ggagcgcctctgccccgctgccccgtctgagaagtgaggagaccctccgcccggcagccgccccatctgagaagtgaggagcccctccgcccggctgccaccccgtctgggaagtgaggagcgtctccgcccggcagccaccccgtccggaagggaggtgggggggtcagccccccgccaggcgagacgccccgtccgggagggaggtgggggggtcagccccccgcccggccagccgccccgtccgggagggaggtaggggggggtcagccccctgcccggccagccgccccgtccgggaggtgaggggcgcctctgcccggccacccctactggaaagtgaggagcccctctgcccggccaccaccccgtctgggaggtgtacccaacagctcattgagaacgggccatgatgacagtggcggttttgtggaatagaaaagggggaaaggtggggaaaagattgagaaatcggatggttgctgtgtctgtgtagaaagaagtagacatgggagacttttcattttgttctgtactaagaaaaattcttctgcctttggatcctgttgatctgtgaccttacccccaaccctgtgctctctgaaacatgtgctgtgtccactcagggttaaatggattaagggcggtgcaagatgtgctttgttaaacagatgcttgaaggcagcatactcgttaagagtcatcaccattccctaatctcaagtacccagggacacacacactctgcctaggaaaaccagagacctttgttcacttgtttatctgctgaccttccctccactattgtcctatgaccctgccaaatccccctctgcgagaaacacccaagaatgatcaataaaaaaaaataaataaaaaataaatttaaaaaaaaaaaaaagaaaaatgtttttatttctccttcactcatgaagcttagtttggcaggatatgaatctgttgattataatttattttctttaacaattctgaaaatagatccctcaatctctcctggcttctaaggtttctgctgagaagtctgctgttatcctgatggggctacctttgtatgtgatctggcctttttctccagtgcctttagggctttttctttgacagtgaccttggacagtctggtgagtatatgccttggtaatgttcattttttatagtatctcacaggtgctgtctggctttattgtacttagatgtctatctagcaagattcaataaattttcttgaattattccatcaaatatgttttccaggctgttttctttttctgtttctctctagggcatgccagtaattcgtaggtttgatcactttacataatctcatatttctgactttcttcacttttaaaaaatcttttttctttatctttgtctgactggattagttcaaaagaccagtcttcaagctctgaaattatgttttctactttgtccagtctattgataaagctttcagttgtattttgaagttccttaagtgagtttttttaattctagaagttctgattgatttcttattaagatgtttatctcttccttcatttcctggattgatgtagaagtttctttttgttgatttcaaccttgaatctcattgagcttccttgcaacccaagctttgaaatgtttattgtcatctctgagttttcattttggcacgaagcattgccagagagctagtgtgatcctttggtagtgtcactacattcagatttctcatggtgccagaattcttgcgtgggtccctctcatctggagatgctagcacttctaatttgtgtaattatttttgtttgggtaggattttttctttttctttccttttctataatattattgttattttttttcttctttccctttccctcctctctagggggtgtggctgtagagcatgctgggtagggtcttttggctttgcttctgtagccctatgcacttctgccagcaggttttatattgggtgtgtggtttgacctacaagccagtagatggcgccatgggtaagagctggctgttgccagtgctgctggctgtgtacttgatccttgtttattgggaggagctctctgctgccccaggaatgggctgatttcctgagtacacattaatctgagctccctcagccctaggggtagggggattgggggcacaagatgggtggagccagatagggaagattcccccagtgttgtcctgctcccagtccaggtttgggacaatgccggcagcgtttccctgtgtctttcccccacaaagtctccaagtctttcctcaaa

SEQ ID NO: 11053 - DNA, 2300 bp, Homo sapien
ctaactgcatcaggattttctctaaaccataatacaatcggcagattagttgtccagtggaaataaccttctcctgtatggtctaggcttgttttaaatgctctaccatcactgggcttgggattgcaatcctcaaaacttctgggaaatctgaaaatgaagttacaaattaaatcataggtctccaagaagcctggaattttgatacattcatcccggttttcttccacccaagtgtatattccgtgggctgtatctgtggggaatctgctttcctgcccatgaacacaccgaaatggttctgcgaagatgcctttctctggaagagcattttgcttttgttaatgaggcagaaaatcgatctcatattgttgagtaaccacacccttcctagcacttggtttttacaagaccacattgttgaaatgatggacgtgctcctaaaaagctgtgtatcaacttcatttttaaacttttaattgaattttatattagtggcaaccactatttaaagaaaccctctactctaggctaggcgcggcggctcacgcctgtaatcccagagctttggcaggcgtaggtgggcggatcacctgaggtcaggaattctagaccagcctagccaacaaggcgaaaccccgtttctactaaaaacaatacaaaaattagccaggcgtggtagtgcctgcctgtaatcccagctattcgggaggctgaggcgctagaatcccttgaacccgggaggtggaggttgcggtgaaccaagatcgcaccactgcactacagcctgggtgacagaacgagactctatctaaacaaacaaacaaacaaaaaaccctaaaataaattatttgtaacatgaacagaatgaacagatcctcccccaaactgatattttttgtgggactggacctttcttaaaggattttcttaaatagaattatttcagatcatcacttacttagatgtgtagctatattaggtcacaagattgtgtacttataatcataaaacgtatacttaataatgaatcccaacctgacctcaaaagactatatcatataatactatattaacattacatatttattggtcgggcacggtggcttacgcctgtaatcccagcactttgggaggccgaggtgggtggatcacgaggtcaggagttcaagatcagcctggccaagatggtgaaaccccgtctctactaaaaatacaaaaaattagccaggcttggtggtgggtgcctgtaatcccagctactttagaagctgaggcaggagaatcgcttgaacctgggaggtggaggttgcagtgagccgagatcgcaccactgcactccagcctgggtgacagagcaaaactccgtctcaaaaataaataagtaaaataaaaataaataaatgaaaaataaaattacatatttattatgttttatattgttatataatataaaaagtcggtttttcggggttttttgtttgtttgtttgtttgtttgagatagtctcgctctgtcacccagactagagggcagtggcgcgatctctgctcactgcaacctccacctcccgggttcaagcgattctcgtgcctaggcctcccgagtagctgggattacaggtgagcacatcaagcccagctaattttttgtaattttagtagagacgaggtaaaaagtagaaaatattttataaaaatatatttgtgtaaagtagaacatatataaaaacatactaaaggagaaaggagaaaaaaattctttcatttatttttttcccaggcattttaaatttggattataaaaatcattttagaaaaatcattaatgctcttttacaaaataacccggtgaagcagctgagcccgagccgcccgccagcggccccgcagcagctccaagaaggaactaagagaccaaggccttcctgctgcccggacccgacaccgctaccctggctccccgccggcagccggcagccagcggcagcggatcgaccccgttctgcggccgttgagtagttttcgatttcggctgatttttgtccctctgcgcttgcccccgctcccctccctccggctacgcccccggccccggcacgcgctctactcctgtaacggaaaggtcgcggcttgtgtgcctgcgggcagccgtgccgagaatgaaccccagcacccccagctacccaacggcctcgctctacgtgggggacctccaccccgacgtgactgaggcgatgctctacgagaagttcagcccggcagggcccatcctctccatccggatctgcagggacttga

SEQ ID NO: 11054 - DNA, 2300 bp, Homo sapien
attattcattgttctatcccaagcacctagaaaagtgatagccacatataagattatatacaggtatagcccttttttttttttttttttttgagacagagtctcactcttgtcacccaggctgaagtgcaatggtgcgatctcggctcactgcaaattccacctcccgggcccaagaaattctcctgcctcagccccccgagcagctgggattacaggtacgcaccaccatgcccggctaatttttgtatttttagcagagacggggtttcaccatgcttgccaggctggtctcaatctcctgacctcaggtgatccacctgccttggcctcccaaagagctgggattataggcgtgagccactgtgcctggcctagtcaccgcaccaggtctagtcttctaatatctatatagtctgcagatacacacacacacacacacacacacacacaaatgaatatgaagactctctccctctcagaattcaaaaaggttttcattgatcttcttcgtgagctttctttgttggagtccatatgtcaccagtgctccagttaggtggtgagcatggtcacagttctgtgggctctgagcctcctgacatttgacaagtgctccccagcttgctgcacttggcttctccagtttgactctggtctaccaggttcatggcccggccctatgcactgcttctgtccctgatcctgtgtccccaagcccaactaggaaagagtgcctgattcttctttgcttcacctcgatatattcctttcagcctccaaatagtagctgacagggacatcactgacttctgatctcttccaagcatggcagcatccttactagcttttccttggtgccaatggttgatattcgaccatatgccacccacagctctcagagaacaaaatcagctgctggagaagtccctttgcacaccaaggcatgggcagcaaaggcaagactggccacaaggctggggatgggctaaagtgacgggcttgctgacgtagtagctcccagacagatgacccctggaggcagtcactaaaccctgcttttttctctttgaaagaattacatacctccctgagattatcaggcctgagcacaattatgtgtttgctgggaccttggagtagagaggctgagaaggcactacagaaattgcaacaaggcgcctgtgatcccagcactttgggaggccgaggcgggtggatcacgaggtcaggagatcaagaccatcctggctaacacagtgaaaccccatctctactaaaaatacaaaaaattagccgggcgtggtggcaggcacctgtagtcccagctactcaggagactgaggcaggagaatggcatgaacccaggaggcagagcttgcagtgagccgagaccacgccactgcactccagcctggggacagagcgagactccgtctcaaaaaaaaaaaaaaaaaaaacaacaacaaagaaattgcaacaagaaactccatgagacgtgggtggatggtggcaatgcctgtctctcccaaaacctgccctatctcccacaaagtgaggctgataggacccggctggtgtggaccccctgtgaggaccctcactcctctacctcaatagagtattcacttctgtccagcgaagaaacctaagaacagagatatttgagagtctgccctttctcagtaggcagtttgatggagtaggtcagagtgccagcttacagcccatcacagatggacttcaatctctgctctgctacttactacccgcttgatcttgggaaagttgcgtaacttctctaagcttcaattcccgtaactgtaacatggcggaagcagtcacctacctcataagttgtgatgaggactggttgctggtgagcctggagtgtctggtgcttaggaagcccctggtgactctgttcccactcttgtgatcatcaaaacaaccccacatgagcagcctctgttttctcctgtgcccaccctgagcaggctcagcatctggacccaactcccatctgtggctaaccaactccatgatgcaatgatgggaaatccatactttattcaagatttcatgaggattccatagagaggactcacaacacctaacccacagtggaaacaacaaaattccccattaaacacctacttctctcttccaacatgttccttgcctgtcaaccgcacaccttctccttatctccccacaagacagaatctaaatatcttgcttgatgctctgagcagtccagtccacaccttcagcttcaaaccccatactgaaaaacacag

SEQ ID NO: 11055 - DNA, 2300 bp, Homo sapien
aagctgcaatggccaacatacgtcatttataaaacgccaacttatgtggatggggattgggatttattggcctaatgcaaagagcatataaaaaatgagtagggaaaagactactgtttgtgtatatatgtaattattacatatattcttaaatgatatttaataaataatcaaatgattaaataatatatactatatatacatgttatatttatatatgtatatgcttctccaaatttctttttgctaaaaagcactcagctgggattatgaaatcagatgtcaagattagaatattagcagtcactttttaaatcagaacacagaacagatccctagactgagctgttcccagaaaaaaggttttccctctccccagaccaggcaggtaggaatgtctgcagagatccctggacacacagggacccctgccaagcttttcctgctctgtacattggggaaggggactacaagtcagccctggtggtatgggggaggggagtggtaccgcagtgacaggaataatgccactgtcctgctgagtgggaaaggagagggcagaacccggactcgaaggcccacctgtggagtgggtctgagattcccagcctgtgtgtctcggtcagcttgtctattgttatcagatgtgggctgtgccgcagcatctgtgacttcatcccgtggtggctggagtctgggataaaagtcatggttgtcccaaaggtgcaggcaaactccaccccggggagctgttgtgcttgcattgctgggctgctgatagactgattgagtggtggcgtgtacttttgtcacaagaaccataaccacaatgacagccacacagcatggacctagcgtgtgctcagctctggacaagacatggatgtaggcagacatgcttcctgcctgctgggcttagtgcaccaatgctaaggacagacatgaagggcttgggaaaggcatgaagatgcagggagtctaggagagaggataagaaaaacaagcattttgtggtgggttgaattgcgttgtcgtttttagaggcatttcgtgatccatggttgcgctcccgtgaagagcgagtctagagaaggaatccgaaggtgggtgagagttgagggaatttgaattccataattacgactcgaatttctgcaatcagctcgcggctgtgttgcctgctcctgccacaaaaacgccatgcagcgccgagccaagtcggatggaagtgggttagggtattatataagcccttgcgggagggaagatggtcttttatgtgtgtttcttttgcagcggcggcggcgagcgcggctcaggttgatttagaatacgggtgacagtggcctggcgcgagcccactgctgacgaaagcggcttatcccgcgcggtttccatggagacgagccggagccgcggcggcggcggggctgtcagcgagcgcggcggagctggcgcgtccgtgggggtctgcaggaggaaggcggaggccggggccgggaccgggaccctcgcggcagacatggacttgcattgtgactgtgccgccgaaacgccggccgccgagccgccgtcggggaagattaataaagctgccttcaaattattcaagaagaggaaatcgggtggcaccatgcccagcatttttggggtcaaaaacaaaggggacgggaaaagctcgggtccgacggggctggtgaggagcaggacccacgacggacttgccgaggtgctggtgctggagagcggcaggaaggaggagccgcgcggcgggggcgacagcggcgggggcggcggggggcggccgaacccggggccccccagagccgcagggcccggcgggggctccctcgccagcagctcggtggccaagtcgcacagcttcttctcgctgctgaagaagaacgggcgctcggaaaacggcaagggagagcctgtggacgcgagcaaggccggcggcaaacaaaagcgggggctgcgggggctgttcagcggcatgcgctggcacaggaaagacaagcgggccaaggcggaggccgcggaggggcgcgcgcccgggggcggcttgatcctacccggctcgctcaccgccagcctggagtgcgtcaaggaggagacgcccagagccgcgcgcgagccggaggagcccagccaggacgccccgcgagacccagcaggtgagcccgcagggggagaggaggtgcccgcccccgccgaccgcgccccagcgcggagctgccgagaggcagagggcctcgcgcaccccggcgacaccggcgcccggggagaggacgccgcgg

SEQ ID NO: 11056 - DNA, 2300 bp, Homo sapien
gcagcctctacagctcccatgcccagtgccttcagattgttccaggggtccctgctttcttctatctcagggccagtaactcacagtgagggcaccttccgcaggctgaagacagctttgtctctttctctttgtttgagtgttgatgtcccaaaagaatgatatccatcccaaagtcctctatcagatttctcccaggaggcccaaagattctcatgtaaattagagtcacatttgacctgtcctgatgggtgaataagcagaccactttctcccagtggagaaagggagattttttaataggcgacttacttttccttgatcccagtcacaaactcttccaaactgacagagctacatagtaacccacaaatctaagcaactgtatgggtgtgtgtgtgtttgtgtgtgtgtgtgtgtatgtgtgtaaaattgagagactttctattgttcttcaaaaggttgtaaagacgtaacaaatgggtttctctttacagttccttacacgtggtctccccagaaagcactgaggactctgattcatcatgtcaagcggtcaattagaatccgggaaagcctctctctggcctcaccttacttcctgtaccaggagagatgctcatcaatagtgagaaagagttgatgggattagagtctggaagtgacaacctctcctgaacctgaactcattgatttcttcgttttacaaaacagtgttcttgaaaaaaataaacaaaaaaaggaaataatacaactaagaactccaaggtctaaattttaaccagctgtatctcataacaacagaagctgcaatggccaacatacgtcatttataaaacgccaacttatgtggatggggattgggatttattggcctaatgcaaagagcatataaaaaatgagtagggaaaagactactgtttgtgtatatatgtaattattacatatattcttaaatgatatttaataaataatcaaatgattaaataatatatactatatatacatgttatatttatatatgtatatgcttctccaaatttctttttgctaaaaagcactcagctgggattatgaaatcagatgtcaagattagaatattagcagtcactttttaaatcagaacacagaacagatccctagactgagctgttcccagaaaaaaggttttccctctccccagaccaggcaggtaggaatgtctgcagagatccctggacacacagggacccctgccaagcttttcctgctctgtacattggggaaggggactacaagtcagccctggtggtatgggggaggggagtggtaccgcagtgacaggaataatgccactgtcctgctgagtgggaaaggagagggcagaacccggactcgaaggcccacctgtggagtgggtctgagattcccagcctgtgtgtctcggtcagcttgtctattgttatcagatgtgggctgtgccgcagcatctgtgacttcatcccgtggtggctggagtctgggataaaagtcatggttgtcccaaaggtgcaggcaaactccaccccggggagctgttgtgcttgcattgctgggctgctgatagactgattgagtggtggcgtgtacttttgtcacaagaaccataaccacaatgacagccacacagcatggacctagcgtgtgctcagctctggacaagacatggatgtaggcagacatgcttcctgcctgctgggcttagtgcaccaatgctaaggacagacatgaagggcttgggaaaggcatgaagatgcagggagtctaggagagaggataagaaaaacaagcattttgtggtgggttgaattgcgttgtcgtttttagaggcatttcgtgatccatggttgcgctcccgtgaagagcgagtctagagaaggaatccgaaggtgggtgagagttgagggaatttgaattccataattacgactcgaatttctgcaatcagctcgcggctgtgttgcctgctcctgccacaaaaacgccatgcagcgccgagccaagtcggatggaagtgggttagggtattatataagcccttgcgggagggaagatggtcttttatgtgtgtttcttttgcagcggcggcggcgagcgcggctcaggttgatttagaatacgggtgacagtggcctggcgcgagcccactgctgacgaaagcggcttatcccgcgcggtttccatggagacgagccggagccgcggcggcggcggggctgtcagcgagcgcggcggagctggcgcgtccgtgggggtctgcaggaggaaggcggaggccgggg

SEQ ID NO: 11057 - DNA, 2300 bp, Homo sapien
cctagagaaaaaagcctcaacaaaacgacaaatacttcctggtgccaacaaagaaaagcccacacatgtcttccagcaaaatccacttgctgtttgcatttgtgatacgtcttattgttttggaatggcttttccctgaaatgtttcccctcggtcctgttctctattcctttctactctaattttctattcactcccaagctggggcaggatgggggaaaagaatgaaagaagaaactataaacaaaaatgggagtgcttacggtaaaattatcttcactgtcatgttctgtctctcagggaaaaaaaaaatcaccattttgctttctccactcttgactgtgaagtttaatataaggtatggctcagtctttgtgatgattcataacctggctctaaccaacaaaccattggaccatcctgcgcctcatctctctcccctacagagtctctccttacctgtctggcttttggggtaagttcctttcagctgacttcaccctcgtttttcccactgtctctgtaacaaggactttgagtaggacgctggagggtcctcactcacaccgcagcctctacagctcccatgcccagtgccttcagattgttccaggggtccctgctttcttctatctcagggccagtaactcacagtgagggcaccttccgcaggctgaagacagctttgtctctttctctttgtttgagtgttgatgtcccaaaagaatgatatccatcccaaagtcctctatcagatttctcccaggaggcccaaagattctcatgtaaattagagtcacatttgacctgtcctgatgggtgaataagcagaccactttctcccagtggagaaagggagattttttaataggcgacttacttttccttgatcccagtcacaaactcttccaaactgacagagctacatagtaacccacaaatctaagcaactgtatgggtgtgtgtgtgtttgtgtgtgtgtgtgtgtatgtgtgtaaaattgagagactttctattgttcttcaaaaggttgtaaagacgtaacaaatgggtttctctttacagttccttacacgtggtctccccagaaagcactgaggactctgattcatcatgtcaagcggtcaattagaatccgggaaagcctctctctggcctcaccttacttcctgtaccaggagagatgctcatcaatagtgagaaagagttgatgggattagagtctggaagtgacaacctctcctgaacctgaactcattgatttcttcgttttacaaaacagtgttcttgaaaaaaataaacaaaaaaaggaaataatacaactaagaactccaaggtctaaattttaaccagctgtatctcataacaacagaagctgcaatggccaacatacgtcatttataaaacgccaacttatgtggatggggattgggatttattggcctaatgcaaagagcatataaaaaatgagtagggaaaagactactgtttgtgtatatatgtaattattacatatattcttaaatgatatttaataaataatcaaatgattaaataatatatactatatatacatgttatatttatatatgtatatgcttctccaaatttctttttgctaaaaagcactcagctgggattatgaaatcagatgtcaagattagaatattagcagtcactttttaaatcagaacacagaacagatccctagactgagctgttcccagaaaaaaggttttccctctccccagaccaggcaggtaggaatgtctgcagagatccctggacacacagggacccctgccaagcttttcctgctctgtacattggggaaggggactacaagtcagccctggtggtatgggggaggggagtggtaccgcagtgacaggaataatgccactgtcctgctgagtgggaaaggagagggcagaacccggactcgaaggcccacctgtggagtgggtctgagattcccagcctgtgtgtctcggtcagcttgtctattgttatcagatgtgggctgtgccgcagcatctgtgacttcatcccgtggtggctggagtctgggataaaagtcatggttgtcccaaaggtgcaggcaaactccaccccggggagctgttgtgcttgcattgctgggctgctgatagactgattgagtggtggcgtgtacttttgtcacaagaaccataaccacaatgacagccacacagcatggacctagcgtgtgctcagctctggacaagacatggatgtaggcagacatgcttcctgcctgctgggcttagtgcaccaat

SEQ ID NO: 11058 - DNA, 2300 bp, Homo sapien
gaattgacttaagttagatatataagaaagaagtactcacccagctaaatcatgacaatttcaagattacccaacatattttatttggcataatgttttctcatcaaccattaatgttcctgaacacatcctttatctgtaagataaaggacttgaagcagacctaagtggcttattaattattgaatggactgcttatactaccttcctgcctgcgaattcaaagctggaacatgaggcaaagccactctgcctccctgcccagagagggactgtcccaacctccccagtgcaggggcgaaaaggcacaaagacacagatctcacttcactcctctgcagcttctgagaacacttaaaacaaaacagccccaatgtagcccctgaaatgcagaggttcaagaaaggagaggtaccgatttcttcaatagttcacaaaggaatagggaggtctgaaatggaaatctttctgcctgtgacagtctcataaagtgtccccagactgttcccaagggccctgggcaataacaaccctaaaatcacttgtaattcagctgaatatttcttaccaggtcagtctagggcagggctccagatagggacagagactcaggagagcagtgcttctgggccagacaggggtggggccccaggcttgcttcctgtgctattcagtttctccacactcggacatcaaagacagtgatcttctgactctaaatgagggcagactgacccaagaaacagggacaggtggttactttgctactcactccgaaaccccacatggggtattttaatagtgttctccatctgtccaacctcaggggttaatcccttcctaatctgagctgtaataattgggtaatcagacaagacactccaaaaagcccaggccatagttttgctgttctttttggctagacttttcttttattagagtgaagtatagctgacctagaaatttcctgtttcagcttcagtcttccactaaacaaaagcagacactgctaagaaggatgcatgtttagaaagcacagccctccttcttggggggaatttcagtcactgctcactgaacacacaggaaggagagctgctatgcgcaaatcacatgatcctgctttttgctacaaactgaaaaaaaaaaaaaaaaggaaagaacagaaaaagcccccaaaggcccatagttagcctgggctaatgagctcactggtgtgagtccaggaaacatcccagaatgaatacatctgctgagatttctgtcttttgaaaaaagtaaccttgctgtggtggatagcaaatgaaacatcaatgaaagctgcatgaaaccggatcagggacttaacctaaaacccacgaagaaaacctggtaggtggttaggatccgggacagaagtaagcctgactatttgaggattaaccatcatggaggaaaacatagattttttttttttcaaagaagaagaagaaaaaactaacacccaagctgctgaggcctgatcacactgacctacaatccgggatggaacaatggtactgtcggcctgatgagctggagagttcacaccaaaccaagtctcacactgacgagcctcctggtcaccgtgcagggcaggcattatgatttattcatggtagcacccagcacacgggagagactctataaatgctcacggaatggaatggacaccatgggggtcctttctaagctactctggaggtgggaataaccacaatcaggtttttaatctagtgtatttcaaacattttctagacgtgtttgctttaaccaaaaaatacattcccctaagggaaggctgaagggtagggagagagctgggagcaggcgatagagattggtacagggaggtcttgagaggaaatgcactgtcttgcgggagggggaagcgtggaggaaagtgaacccactagggagacggaatgcttcctttccccaccacagctactgagtaggttgatttgtagcacattctgccagctgcctgctctaatctgttctctccttctgtagtaataggaatgtggccaggcacgtggttagaccatatttcccactctctagtagccagatgtggccatgtgactagatgtcacccacagaagtgagaggaagtgatttgttccatgtcggagtcaagcttcttagaaatggacgtgcttcttccgggatctctttctccttccaccagctaaatgcagatagcaacaaccacacagtggggacacagagaagtgaagcctggggccctgaatgatcacatggaagagactcaccct

SEQ ID NO: 11059 - DNA, 2300 bp, Homo sapien
tgagacaaaagtttttaattttaccaaactaaaatagtaacacacaagtgaagggggaggtgatgggttccagggatgtttagagagtagagtcagtggctgggcgcagtggctcacgcctgtaatcccagcactttgggaggccaaggcgggtggatcatgaggtcaggaattcgagaccagcctggccaatatggtgaaaccctgtctctgctaaaaatacaaaaattagccgggcatggtgatgtgtacctataatcccagctactcaggaggctgaggcagaagaattacttgaacccaggaggcggaggttgcagtgagccaagattgcgccactgcactccagcctgggcaacagagtgagaccctgtctcaaaaaaaaaagaaagtagagtcaggaagaattgatcatggattggatgtgggatagaagagaggagtcttcctctgggatgatttccaagtttctgaattaggtgccaggatggatggtgctgctctctggctcttcactgagataagccaaagaatacatttagtgagaaagatattgagttatgctttaaacatggttttgtagaagaatggcagagagaccagaataaaatctgtggctccagccacaaggtcacacaaagtggtgaagctgggattggagcctgtgcctgagctccagcgactacatcctcagccacatcagtgtatagccttctgcggaaagcagaggcttgagacaaaatcagagaagctaaaaccagcagttttgacactatgaaaataatgtgcttggtgactgtatagttaagtgataaagtgtactaaatactacaaatatgtgtttagattagactgaaaaagttagaaatctgtttttacagtggagtgggtaagtagagaagctgtggcaaggaaaacataaagtcagtccattcaagaggatagatgttaacacttggatctgaacatgaactcaagtaagatgatttgattaaaataattggtctttttatcattagtttttttttcttaaaaaaagtagtatataaataatataaaaaatgtacaagtaagccaaaagttttaaaatatccacctcagtctaccacctagagttatcctttgttagcagttttggtttacatttttctagcctttttcctatgatatatcatcttcatacatacaaaaacttaaatgtaatactgctttataacatgtacttttcacttaaaatgtaataaattcaacggaaataatttaagtcacgaaactactctatttctttttatgcatttttattcttctttaaccccacctcgaatcaaggttttggcattcttttgcctgtggttttttgtgctgttttgtttataagttaaaagtgtacagtaaatactgtttttaaactaataagatttaatccagcctaaacaaaataattgaaagtagtcagaaagtgaattttactttttctcattaaggttttaatagaaaaggattggatctcttttggacataaattttcagagaggtgagtcacagttacacagtcatatattttataaaattagtaaaccaagtttagaatgccaaaatgtttctgttccttatgaactcacatgcgtgatgggaggtaagagtgtcatggtttttactgtattttacgtaaagacatttaatttttttctgtaatttctttcaattctagtacgcttgttaattttcatgactatttattaccttccttttgggctgcattttatttagagatggtaacagatcctttaaagctgtggtttaaaaactcataaatggtttcaataaaaattctagttttgcatgctaatgtaacagtgctttaggaatatttttgtatgtttaagattaacaatacctgaacaatggacctttcagaggtgtttttaaaagcttatactttctgtggggttaggtgtggccagttggatggtgacccaaaggaagtctcaccagtgtttactcagttcttggaatgtgtgtggcatttgaccgaacagtttccacaagcctttgaattcagtgaagcatttcttcttcagatccatgagcatattcattcatgccagtttggaaacttccttggaaattgtcagaaggaaagagaagagctcaagtaagatgattcaattaaaagagtctccttttccccctacttagccgaggtctaacaaaaatcatgtttgaaacttaataaaatatcttgacaatttgaaagtttattgtaaagattttattttttgtatttctaaagctgagta

SEQ ID NO: 11060 - DNA, 2300 bp, Homo sapien
agtgcaaactggagcaaaaggagaaaaggctcctagaagcatctggagacctctaaagagatgtctcgaggaaagataatggaactgagtgattgccagatttaaccataaggaatattctatctagtgcaagagtattcaactcaagagtcaaagaaacgtcatttaatattttatctgttattttactttctttctgtaaagctaggtaattttctagcctatcatattaacataaatagaactttaatatggattttgagaagcaaatcaatgtaaaacagttgttaagaatacagactctgaagtcagcctgtctggctttataacatggatcttggctttatctgctatgtgatattgggcaagttacttcacttcattgtgtctcgcttgtctcatctctaaaataaagaaagcaatagcattttcctcagaatacccgtaaagcactcagtacatttggtcacctgacatcattatgattgcctctctgtgagaattggtaaagagaggacacaggaagtgaggagatgagaagagggaggataatctgtaggggaatggggaaggaggaagttgtaaattgggaggaaaatgatataaaaagttttgttaagaaagtcttgctgtatgctatacaattcacctctttctgttttctcaaaaagcaatcctcagtaaagacctacattacttttctctctctctatatatatatatatgtgtatatatatatatatgtatatatatatatatatatatgtgtatatatatatatatatatatttttttttttttctgagcaggatttgtggggttttttttcggggggagggggtggatgtgatactgtactaaggttggtttctaggtggtttaatgtaactcttattacatatttagcttagaggagtcagcaactccaccgcaaaggctgttgtgtttaataaccatctccattgctttggcaatctgtctgaaacatcgtaggcactcaaaacaaaacaaaccaagacaacttgaacaaaatgaaacaaataagtgaaacaaaatttttaattataaaagaaaatttagatgttaggcttttctaacaccaatcacagtatgaaagatgaagattacaaaccttaaccggcttagtacagaatacttacaaaacgtagagcagagtttctcggactctaactcctgacctcaagtgatccgcccgcctcagcctcccaaagttctgggattacaggcgtgaaccaccgcgcctggcatagagcagggtttctcaacctctgcactgttgtcatctgccggataattccctgtagttggggggttggtctggtgcctagtagggtgttcagcagccgacttgtgacttggcctccacccaccagttgccccccgccgccacccccccaccaccaccatttgagacaaccaaaaatatctccagatgttaccaaatgtcccccggggagaaaactcactccaggctgagaagtaccacattagacgtgttctaacaaaaattacctgtaaccctcacctagaaatgtaaactttttgtttacataaataaaaattacagagcacggctacattgaacttattgttccatagtcagttttttcttcactcagtaatgcagcattaacattttcgttatgtgatatccctctacaggatgagttttaatggatgctggtgctaacatcgtatgaaattgaggtaggaggcgggactctgacaccagaccagattgaggactagctaatcatcatactttacataaggaatccgtaggattggagagttgattgtttcaaataaggctggtttccttatttggttatttccttagaataataactccaaatctgattatttccttagaatacattcttatgagtagaactgcagctcaaactaaatttggtgctgtccagtggtatggcgatggacttcagaacatcctccactcttgccctcaccccacaagaaccctttactcgggatccattctcacgcagtcttcctccccgaccgccccgcgcgtccgctcggcgggatgacaaagaccgcctcgggtggggtggtgagcagtaccggcctcctccagcagggggcgctgtgggatccgccgctgtccgggacgaaccagcaagccgctctcggtccacacacgctctgtctgcctgccccgagtcccccgggaggccgcggggtttggggaagtgtttctaggagacggcgctcaccggctgcacctgcgccgttgacgccaccggggccggcagaca

SEQ ID NO: 11061 - DNA, 2300 bp, Homo sapien
gggagtgcctttctatcttcccataaaaatcatcaggatctttttttttttcagtcaaaaggaagtctcctagactttatgtgaacaatcctcttactgaccaccctatagccatcactgaaaatagctttctctatatcaccgaagctttaaaactcacaacaatcttttatttttgcctcctgttcgataactatgaagtttttatttatatcttaatccaaatatatcccttttttcttttttatcattcccattatgacttctatgacgtttaaaatgttatggccgggcacagtggcttacgcctgtaatcccagcactttgggaggccgaggtgggcagatcgcttgaggccaggagttcaagaccagcctggccaacatggtgaaaacccatctctactgaaaaatacagaaattaaccgggcgtggtggcgtgcgcctgtgatcccagttacttgggaggctgaggcaggagaatcgcttgaactcaggagacggaggttgcagtgagccgagatggcaccactgtattccagcctgggcaacagagcgagactctgtctcaaaataaagtaaaatataaattaaatttaaaaaacaaaataaaatgtacgtttctttttaattatacaaacacagaggtggtgtattagtctgcttggctgatacaacaaaataccatagactgaggtggctataacaacagacatttacttctctcaattctggaggctaagtcccagataaagatggggcagtttgggttccaggtgaaagccccttcttgctctgtcctcacatggcacacagaggagaacaagctcttcgttgttttttctcataagggcactaatctcgccatgggcgacccaccaaggtgacctcatctaaattgaattacctcccaaaggctccatctccaaataccaacatattggggtggggtagggctttaacatatggattgggggaggagggaaatagttcagtccacagctggtggcaatgcccaagctcaacggaagattaaagtactgaattagggagaactgtgagatgaggttagaaagactaatcatacggaggtcatcaagtgccaaactaaagagccactgggctttttagatcataaatccgggggttgcttatgggatggattttgttagagatcacgagtaggaaaaccatttgggggagtaatgtaacaatccctgagggaaaaataaaaactaacactatgatgacaaccctcgaatgcaccaccaccaggaagcctttcctgatgcttcgccagagaggttctctttaaacgcgaatttttcttgagttatcctagaaatgtaagttacacctcacatttcgccttctttcgtacatgttcctgtgcgtttcctaatccttccactttgtagttcctccagcaccggttgtgtccgagggcccttctggcggagccacactcgctcggcccaaggtcccgccctccagcatcaggatgcacggacagtatttgtggacttgaccgcatcccaggaaatccagcgggcctggccacttctgggcgccaggaccacagccggccaccccacggacgcctgggacgctcttctgggcccccttcggggctgggcgtcgggctcgcaacaactgcgaccaactggctccgcgaggcctggggcgcaggggtggggctcacgtcgtgggacggttgcatggattattttcgattgatttccgaaccttcaggaagcagacacgctccccttccttcttagggatggggcggcagccaacgaaagcccgaagccgcctccttttctgagtggggagcttagagatgctcaggagggacctccccgattctgcgattctgagcatcaattttggcaggaggctagatagaagtagcaattgacattcatcaccctaaagtgcggattatgtcagtacagatgctacgatagaagaactaaaaaatgacagaaatggttttactgtttttaaactctgggagcctactcctttaagagattaggcagtacgcctattctcgcctggtcccagcgtaccttgcgcggctcgccgtcccccactcacgtaccagggctcattgcgtgacggttacacttccggcgggctacgtgcgcgcggcgagcgccgggcgtacttttgcgtggttgctccaccccctcagccttgccttcgccgccgttggggctggaagttcccgccaggtccgtgccgggcgagagagatgctgcccggcccgcctcggctttgaggcgagagaagtgt

SEQ ID NO: 11062 - DNA, 2300 bp, Homo sapien
cttttaagttcctttcaattctggttaggtcctcaaggtgttatcatagacagaagatttactgaagcatagtgacaagtttttgacaaatccagtcctaggattagccccagctttaagatttatcctcagcagcaatgaagatccactgagaaaacctctcccactctgaagcttagctcaacaatttagaaaattttattttgattcatcttcctgataaagattcatttcttatcagaaaaattttttgagggcccagaagagacaggtaaagaatcctacctgaagctacatttagtgtagattcttgccagcctgcagttttcagtgtaagttgcctgtccctttggatgttgttttttgttttgtcttgttttgtttttggtggagtcttactctggcacccaggctggagtgcagtgacatgatttccgctcactgcaacctccacctcctgggttcaagcgattctcctgcctcagcctcccgagtagctgggactacaggcacctgccaccacacccggcgattttttttttgtatttttagtagagacggggtttcaccgcggtagccaggatggtctccatctcctgacctcatgatctgaccgcctttgcctcccaaagtgctgggattacaggcgtgagccaccacgcgcggcctggatgtttgttcttaagaaaattagaagcagaggccgggggtggtggctcacgcttgtaatcccagcactttgggaggccgaggcaggtggatcgcctgaggtcaggagttcgagaccagcttggccaacttagtgaaaccccgtctctactaaaaatacaaaaattagctgggcgtggtggtgggcgcctgtaatcccagctactcgggaggctgagacacaagaatcacttgaacccgggcgacggaggttgcagtgggccgagatagcgccattgcactccagcctgggcaacaagagcaaaactctgtcaaagaaaaaaaaaaagtaaaagaaaataaaatcagatgcagaggccaggcaggaggagctcaggccgcactgctgtctttgctagcacagattctttttgctgaactctgtactactccttgtcagtccctaatgttaatttaggttaaaagaaatgtaatgctcgcatcagtaaaagcaaggtcagactttcacctgaacagttttatttttgttttgttccgtttttactccgaggtcagaatgtcatcaggcacaataaagatagcttcttatcttcatgggattgtgcccagaaagaccaagcacagtctaaacattacgcgataagaaaaaacaaaaaatagatcaagtgaccttggacaagtcatcttacctctcgatggttttgttttatgaaagaaggtgtgtgtgtgtgtgtgtcgatgggtgtgtgtgtgtgtgtgtcgatgggtctgtgtgtgtgtgtgtgtgtgtcgatgggtgtgtgtgtgtgtgtgtgtgcgtgcgggggttgagaaggttgctgttaaggttccctagggctacctgcagctttaatatgcgtagttagaatgtcaggcaggttgtggagagtggggggctggagacccccgacttctctgagtgccaagccacacatcagacaccttggaaataacccttccacgaagtccctacacagatcccaccaggctgggcacggaagaacagaaactgcgaaaagaaagggactggatgagtcctggggaatcacagcgcctccacttgcacaggacaagtgacaggcaggtaaataggtagcagacaggcagagactccgagtcccccaggtgcacccctctcctggaagagcccccgaaagtacaggcccaatctcccaccccaccaagccctccccatcgccttccccgacacctaaaagccccggtcctgcgtaatattgcggatccctcccagcctcccgtccgctcctcctcccgcggggctccgctcagggccggtcccccgcccccacgccgcagcccgggccagcggggcccgccgcggtggcgttcgcggatgctgccgcattggccgctgcggcacggacggcgcagcctcgggcgcggcccggcacaggcgccggcggtccccgccagctagcagcccggcgaggcgctggcccacccatggtcctcgggcggcggcccctgcgcccagccctgcgcgtagcctccgtctctcgcccggggccgccgagcccccgacacgggcgagatgctgaacggcgcaggcctggacaaagctcttaagatgtccctgccgcggaggtcga

SEQ ID NO: 11063 - DNA, 2300 bp, Homo sapien
cattgtggaagctgcattggtaatactaatgcacaggggaactgagagccgctaggtgagcaatgaaccactttgaccacgcactgttcagtgaacccagcctgtccctactgtcctggagcttgggcttctgggtgcagtgagacagagcatccataaataaaatcaggtaatgatgatatctggtactgtggaggaagacaaggcagggttagtgggcagagagaaaagcagtacttccatataggctagcttcaaaaatattctccatctgtcttacatcagcaaatgctccaacacctggccttccctgattgaagtccgggagccccagctggtgggccagacagtctggaagaagggattcttgctctctgctgccgcttgttgatgagtagacgaccaagcagtgtcccatggggagccagaaagaccccagagagtgggaggttggagggaaggagatgagggatcctgtctgagtgaggaatagccagggtgctgtgggcacacgcaaaaagcaagaggaaaactggagtgtgcctggcctgtgaccagggacctggcttgagccccggagcctgcacccactaggcgtccccatctaggtgaagggagaagccttagcccacttcagacttaactcttacttaatattcggaataatatgtcagctttcagtaaacgagtttacatttcgcttgtccctttcttaggataaggattatcatccttctaatcactttaaaaagatgatgtagcgaaaactttctctttaaaagtgtttctctatgacagtgaaaagtattctttgtaacagggaagtgaaggtttacttgcgtaagatgtcagtttttttttttttttgagacgagtctccttgtcgcccaggctggagtgcagtggcgcgatctcagctcactgcaggctccgccccccggggttcacgccattctcctgcctcagcctcccgcgtagctgggcctacaggcgccctccaccttgcccggctaattttttgtatttttagtagagatggggtttcaccgtgttagccgggatggtctcgatctcctgacctcgtgatccgcccgcttcggcctcccaaagtgctgggattacaggcttgagccaccatgcccggccaagatgtcagttttttaatggtgtgcaacgtccgtttctttgatagttggaaagcgtggcaggtattagagggcgaatgtatatttaagaaaaacaagataagtcttcatctgtagagtattaatttttctgtgatcctttatctcagacgcctctcctctgaaggtcactgctcaagctgggcagccccttctaagaagggatgctgccttggagttggagatgaggttaagatctacgtgcgggtaccagtttcagtaataactggatccttctctaggtctaggctggaacgtctcaagtgaaggttattggggggcaggggtttgggtccacccaaaaaggcttgacccataggactgaaatcaaatcttgagctaggctggcttgccacgtaaccacagaaacagtaatttaagcaataaaatgaaagctcgagcgctggtccagagctggggttgggacagctactgcactcaggtctccaggtgcatgtagggagaagagcagcggatcccttgcagacaatggtgggagcgagctcttcaccctggggtctccgaagcccatttttagcgtccagaggtgtgctttcgccatctccttctgcggtggctgcttgcagggcgcattcccattgctgctgtctctgttcctaaggaagatcaaaggatcccagaaaacccagttccagagctcagttcccgggactagagggtacgctcggccagatggctgggggtgccgctggccttggcgcccccgccgtccccgcgcggtcgcccaccccggcccgacaagcagcttgggcgtccagcccggcccggtccctgcagggagggagcgcaggagctgggggcggctctcccggggcggggctcgctccacaagcgccaggggccgcgcggggcgtgggcgtgggcggggccgggggcggggccggccttggctgccgcggcacaggcggcggcgtctccagggggagccaaggtacgtaggcggcgtccgcctcacccgagcatccttccccgccggtggccgcccgcccgcggcccgcgctcgcagcctcccgcctggcggttgacttctttgtgtcgtattctctgcctgcgccctgtctctgcaggacctgttcgttcttctttgggctataa

SEQ ID NO: 11064 - DNA, 2300 bp, Homo sapien
tggttatttttaaactctgtgttaaagtattttcttagtggttgccctaggaattacaatgtatttcccaatttatccaaatctacttttgattaatactaacaattctagtcaaacacagaaatgtcactccagcgtacctccatttcctctcctgcttggtgctgtcattgttatattccatttatctgtgttgtcaactccaaaatagtgttataataatttgtgtctcttaaagaagctaaaggaaaaaagaaaaaaagtatattgatagtgttttttgttgttgttgttttgagacggagtcttgctctgtcgcccaggctggagtgcagtggtgtgatctcggctcactgcaccctccacctcctgggttcaagcaattctcctgcctcagcctcctgagtagctgggactacaggtatgtgctaacatgcctggctaatttttgtatatttagtagagacgggatttcaccatgttggacaggctagcctcgaactcctgacctcaggcaatctacccgcctcggcctcctgaagtgctgggattacaggtgtgagtcaccacgcctggccagggttgttttatattaacatatttacttaccatttccaggtctcgctcttcatttcttcctttggatttaacagctggtgtcatttctttgcttcatgtatcttcattctctcctcactcctttgcactgtcatatatattacatctgtatataagttcaacaatgcaattttatgatgcttttagcaattgcttttttaaaattgggaatatataattatactatcttttataaatcctgtagaattatcattactagtgtcctttgtttttgtggattttaattactgtctggtatttctttcatcctggagaacttctttagtatttcttgtatttgtaattgtcaggtagatatttgtttataccttacagatatttgtaactattggaacttagagatcctatttagaaactccttaattctacaggagaacaagagagcaaagtaatatgtcaggaagaaaagcaaccagcaggaaaagtggaagggttggtagtgagtaggaagtgaagggattgtggaaaggtaaaattactggccagcatatgcctgctccccctgtaccttcccagctccttgtctttccatcacagccacgcttcaaaactctaaattggaatcagactaccaccatttgatgtaatttcctgggaaaaaacctagtaactatggtttggagccattacaaattatcagtctccctccaatcccagccttctgctatctttattctcattctagttcccttcacagctttaatatcagttaaacgctgttgcaaccttctccttaagcctcttgctaagttaagaagatctcactactttacccttcaagcagaagatcatggctgtcaaggaaagaactttccctttgatacccccagaccttgtccccctctccctcccccattctctgttcctcctggagctgatgctgcctctgctgtggactccatcccctagggtcctgttccatccttagggaacttgttccgtccagatatcccttctcttatctttagctgggctcaagccttctctctctttgtctgcttctcttgttcacacttttgtccatctttccagctctttggagtatccccaatatacacgtaccttagtgagcttgtaggtgttccttacaaccatttcaaaggcctgtcttcttttctacattctttcaagtttgcttcttttctctgttcttcaaaacttgaaagcagcatttcttcttctggatggccttcagtgaccatgccttcccattagaaagccttctgtgttggttcccgctacgtcctgtgagcctctctttagcggatgcatcctgctgtgcagtcgcattgtggggcctgtgtgcctcctacagaaagcagcctttgaactcacggttcctgacatgcaggaggtgctcaataactattttaacatgaatctctaaatgagccaatagactttggttgtgaacacctttcagatactctggtttccttccacagacaccacctcagataattttggatacaacctactgacgttcatcatcttatacaacaatcttattcccatcagtctgttggtgactcttgaggttgtgaagtatactcaagcccttttcataaactgggtgagtattaaagcagagttgaatcactattttccaatgctatttcagagcctttggcatttaattgagcactcaaaaaagaagaact

SEQ ID NO: 11065 - DNA, 2300 bp, Homo sapien
agaataaggtgtgtgttggggagcagggacatagggtagggttttttttcttggatttgacattgttggggcaagtggaagaataatcaacaatgtctgaatcttcacattaaccaggcatacacaagcatccaatggctgcttgaacctgagtgtctttgctgtgaataaaactgcctgtgttctgaagtcatggacttgaaagggaccttagtgatcgtcacatcctatgctccactttatagatgaagaaactgagaccagaaaaacgcagtgattccctgctagtagggctgggtctagaattcaggtctgctgactcccagacggtgtgggaaggggcattcgttcctttaaaaataagcactgctgctttaataacatcagcacctgttgttccagcttctgcaagagagaagctattaatttctccttcatcaaagctgaatttctggtctgtctgaaccttgttttcttcctgactgcagctgtctaaaccactaaggccacatgttggacggaggcactttcctgctggaatccgataaatcaccacacccaaatatagaaagaaaaagggacacagatcatccacaccgtggccgaatgtgtgacatctttgctgaactctctccgttccaccttgtggtggaggcctccagtccaccaaacacagccctaggcgtgtgaaccctgccacaaacatcggtgctcttcctgcacagggcctgggaccaaccgtggccaggacatcagctgctggaagccgagagagttcatctgagtggcgattttatgatctgcagagtggaaagtaatcataatcccttgagaagtttgcagaatcgaaccgaatgttgaatgccaaagatcttcacaaagcaagttgagtttcttccgttattattgttatttgtgttagcgaggcctggattgcttaggttgggtttcctcccgcgcctattccagcaggcagaccccgcccttggccacacctttctccttgcccggggtaggaaagtgaggggctgcccggcgcccgcgggcgtccctgaggtcgggggtgggggggagccgcgcagcgcgcatgcgcgccggggagccgccggcctctataagagcgcggctcagcgcggcagcgagcggagtcggagctggtctggcgccgggcggggcgaggcgaggctgtgggcggctgctgcgctcggcttctcccgtagcccggaggaaagaaacttccgtgggaggcttccatcggtgcgcacacctcccgagggcgaggcagcgaccgggagagggagagccggccggaggctgccgggctcctgtgggaccgcgctgcagccggggaggcggagaaggggaaccggggcgagccgcccgcctggatccgcgcccagcagcagccgcggccgccgccagctgggcaggctcccgggactgcggctgggggcgcgcaggaccctcgcctgcgtcctggacgttcccggggtcaggagcgctccctcggcgacgtgctgggaagattggccgtcggccccgccgagtggagcgtcggggctgcacccccgtgggctgcccgggcggcccggccggagccatgcggaccaagttcggggcagaggaggctgagcgcggccggctgcgtcacttgctgcccagagccttgcgtgcactgcccgccttcgccccttctacccgcccgaggagggaataaaggaggggagacgggccctgattcgcgcgcgggaccctgaggcttaaaccctgcgcagagccctggctccaggtccgcggcggcgcgcccagcggtcattcggctcgagtgagcatcccttcggggatgctcagggagggtccggttgccagtgaaacctccagaggcttccggacgacagccccgggggccttctgactgcatcccgagatttccatcagcgagtgcaactcataaggcagtccctaaggggaccgggccaccggctgaggacggggatggcttaggagctcctggacctagggcccggcgtcgtcgcctcctgggcgtcgcggcagaggggagtggcccgcgcggaaagcgccgcgggacagtcagtgacgaggcccgggggtcgccggggccacgacttctcggagaccgtcctgcgctctctggagacgcgctgtccgcgcccagggtggtgccatgtggggcgctcgccgctcgtccgtctcctcatcctggaacgccgcttcgctcctgcagctgctgctggctgcgctgctggcggcgggggcgagggccagcggcgagtactgcc

SEQ ID NO: 11066 - DNA, 2300 bp, Homo sapien
agacctaaaaacagaaaatcatcttaagtatttgctcaatggctctttttccatgggaaaagagggcaaggacttcattctatgaggacatgactgtctgattcacggctgtcatcaccagcacctaatacatagtcacactcactatttgttaaatacatgaatacatgctaaaatagggttttatatatagagggagtatgggagcccccaaaagggacatttgcttagttttatgtgtaaatatcgggctggagggtgaggtaagggtgttatttcagaggtatcaggaaaaattccttaaagatgagaactgagctgagttttgggagacagaggaaattaggtaaaagtggagttgggggttgcttaggagttcccatatcttgtggcggaacttcaagcagtttcggagtgccaagacaacagcctgtaaatgtaagcagaagaaagatctggaagggctttctaggctgttttatatatttccattttagtatccatatccatatgcttattttaaacacttgtccatagatccttactacactggtagctcattgatgctaaggactgcatgtagcttgttatccaggtgcccagcataataatggggatatggtagttcctcaaaagttaatgcagaaatgaaagaacaaacggaagaataacaagtaacggcattgtgagcactctccagtgatgaagtcatcagatggtagggatgtcaggaaaggggactataccaggttagacagagacctactcagcatcttaactaacggtgaggtaagtttagtaagcctcacatctcagaaataaaatcagagggaggaatgttgggagtttcaaactgctttcctagcgggaaggtgaaaaaacacaaaatatagtggggtgcggtgcctcatgcctgtaatcccattttgctgaggtgagaggattgcttgaggccgagtacgaaaccagcctgggcaacatagcgagacccccgtctctacaaaagaaaaaatgtgaaattaatggcaagcgcctgtagttccagctactgggatgaggagggaggatcgctggaggctgcagtgagctacgatcgctctagcctgggcgacaggatgagaccttgtctcaaatagagatagacagacagacagacttcagaatttattagggtttgtaatttccaggttccaaagcacagcaagggaaagggcctggctgggtagtacgttacacccggaagtaaagagacgcatacaccgttgggtgcactttatagtctggctggcaaacgagcgacaccgacgcgcagagttaagtgctgggacttcccaagcctggaaagcagaccgtgtctctgcaactacgcggctgccacgagcgctgagcggccgggcatttggcctcgaggaggaggcactgtaagggcggcgcaagagggcggaacgcgggacgccaggcaccctagctcccgacggacgcagttttcagttgcacgggcgagctccgggccggctgcggagcgactccccgccgccaagtgggcggcgtggctgtcgggaaagaagggctggggcctgccgttcttcctcccgagtatcccctccagctggacgaccccacgctgcagcacgggcttccggcttctctcctcagtggccaattcgagggcacagcgggctccggaggcgcggcggcaagcctatcccgcctcccaaccacagcctccagcacccgagagaacggccgcccacagcacacgttctccggacaggagggcgaaggcccaagacctggagaggtgggctcgagggaaagatctgggtcccaccactacttcctggagacgccggggaaagcaggccatccttcgagccacccatctcttctccgattggttaactgccttcttattgcgctccgctggctggtgattggttgggatgcaccgtctatcacctgcttccttgtgagaatctaggtctctaagggaagcgttacttgaggctcggttgggaagaggttggttgggcctcttgagcccactttatttatcgtagtggggatcgtcccccggcgcgagcttccgtcgcaacggccgggaaagaaaccagtagcgggacggagggcgggggtggcaagaaagtcaaggtttagaagtaagccggagacgcctaaccctggtaacatccgaatgggaacgggataggaaggaaggcctttgagagaggaggcgtaaacccaggaacagtgacagtgtaggacgaaaggcctaagtttgttgcggaaggtaggggcct

SEQ ID NO: 11067 - DNA, 2300 bp, Homo sapien
aaagattgcatttttctctgctcatctatgcagtaggctgaggagaatgttctgccaagtgctgtgctaagttctgggattacaaaaatgaattagaccatttgatcacacttaagcagttcagactctaggtagtaaagacctaaaaacagaaaatcatcttaagtatttgctcaatggctctttttccatgggaaaagagggcaaggacttcattctatgaggacatgactgtctgattcacggctgtcatcaccagcacctaatacatagtcacactcactatttgttaaatacatgaatacatgctaaaatagggttttatatatagagggagtatgggagcccccaaaagggacatttgcttagttttatgtgtaaatatcgggctggagggtgaggtaagggtgttatttcagaggtatcaggaaaaattccttaaagatgagaactgagctgagttttgggagacagaggaaattaggtaaaagtggagttgggggttgcttaggagttcccatatcttgtggcggaacttcaagcagtttcggagtgccaagacaacagcctgtaaatgtaagcagaagaaagatctggaagggctttctaggctgttttatatatttccattttagtatccatatccatatgcttattttaaacacttgtccatagatccttactacactggtagctcattgatgctaaggactgcatgtagcttgttatccaggtgcccagcataataatggggatatggtagttcctcaaaagttaatgcagaaatgaaagaacaaacggaagaataacaagtaacggcattgtgagcactctccagtgatgaagtcatcagatggtagggatgtcaggaaaggggactataccaggttagacagagacctactcagcatcttaactaacggtgaggtaagtttagtaagcctcacatctcagaaataaaatcagagggaggaatgttgggagtttcaaactgctttcctagcgggaaggtgaaaaaacacaaaatatagtggggtgcggtgcctcatgcctgtaatcccattttgctgaggtgagaggattgcttgaggccgagtacgaaaccagcctgggcaacatagcgagacccccgtctctacaaaagaaaaaatgtgaaattaatggcaagcgcctgtagttccagctactgggatgaggagggaggatcgctggaggctgcagtgagctacgatcgctctagcctgggcgacaggatgagaccttgtctcaaatagagatagacagacagacagacttcagaatttattagggtttgtaatttccaggttccaaagcacagcaagggaaagggcctggctgggtagtacgttacacccggaagtaaagagacgcatacaccgttgggtgcactttatagtctggctggcaaacgagcgacaccgacgcgcagagttaagtgctgggacttcccaagcctggaaagcagaccgtgtctctgcaactacgcggctgccacgagcgctgagcggccgggcatttggcctcgaggaggaggcactgtaagggcggcgcaagagggcggaacgcgggacgccaggcaccctagctcccgacggacgcagttttcagttgcacgggcgagctccgggccggctgcggagcgactccccgccgccaagtgggcggcgtggctgtcgggaaagaagggctggggcctgccgttcttcctcccgagtatcccctccagctggacgaccccacgctgcagcacgggcttccggcttctctcctcagtggccaattcgagggcacagcgggctccggaggcgcggcggcaagcctatcccgcctcccaaccacagcctccagcacccgagagaacggccgcccacagcacacgttctccggacaggagggcgaaggcccaagacctggagaggtgggctcgagggaaagatctgggtcccaccactacttcctggagacgccggggaaagcaggccatccttcgagccacccatctcttctccgattggttaactgccttcttattgcgctccgctggctggtgattggttgggatgcaccgtctatcacctgcttccttgtgagaatctaggtctctaagggaagcgttacttgaggctcggttgggaagaggttggttgggcctcttgagcccactttatttatcgtagtggggatcgtcccccggcgcgagcttccgtcgcaacggccgggaaagaaaccagtagcgggacggagggcgggggtggcaagaaagtcaaggtttagaagta

SEQ ID NO: 11068 - DNA, 2300 bp, Homo sapien
aggagttacatgaggcatacacactacaaaggccaggtaccaatccaataaacagaaattaattagaccagagaccttggcaggttctgagacctggagtagatatccagaatgattcatctgtctgttccagctgttgtatctaagcccctctttgtagtcattttgtcttggactacaaaaactgaagcaaggtgttggattcaagttacatacattacctgattctctactcacaaaaacctgcaacttcctacctggtaaatcacttgattggatttttatttagacatttttataatagttttttttttattcttagggtatataataggaaataggaaaaataggaagagacacatatgtcttttccactcaacatgtaaaaagtatttgcacttggattattgcatttgattgcactctccaaaattcacagatattaaaaatgatttctacttgttattttctatgatgtgtgttcacaatatctgaagtcgttgtactgtgtgcattaatcccgtttgccaaaagattgcatttttctctgctcatctatgcagtaggctgaggagaatgttctgccaagtgctgtgctaagttctgggattacaaaaatgaattagaccatttgatcacacttaagcagttcagactctaggtagtaaagacctaaaaacagaaaatcatcttaagtatttgctcaatggctctttttccatgggaaaagagggcaaggacttcattctatgaggacatgactgtctgattcacggctgtcatcaccagcacctaatacatagtcacactcactatttgttaaatacatgaatacatgctaaaatagggttttatatatagagggagtatgggagcccccaaaagggacatttgcttagttttatgtgtaaatatcgggctggagggtgaggtaagggtgttatttcagaggtatcaggaaaaattccttaaagatgagaactgagctgagttttgggagacagaggaaattaggtaaaagtggagttgggggttgcttaggagttcccatatcttgtggcggaacttcaagcagtttcggagtgccaagacaacagcctgtaaatgtaagcagaagaaagatctggaagggctttctaggctgttttatatatttccattttagtatccatatccatatgcttattttaaacacttgtccatagatccttactacactggtagctcattgatgctaaggactgcatgtagcttgttatccaggtgcccagcataataatggggatatggtagttcctcaaaagttaatgcagaaatgaaagaacaaacggaagaataacaagtaacggcattgtgagcactctccagtgatgaagtcatcagatggtagggatgtcaggaaaggggactataccaggttagacagagacctactcagcatcttaactaacggtgaggtaagtttagtaagcctcacatctcagaaataaaatcagagggaggaatgttgggagtttcaaactgctttcctagcgggaaggtgaaaaaacacaaaatatagtggggtgcggtgcctcatgcctgtaatcccattttgctgaggtgagaggattgcttgaggccgagtacgaaaccagcctgggcaacatagcgagacccccgtctctacaaaagaaaaaatgtgaaattaatggcaagcgcctgtagttccagctactgggatgaggagggaggatcgctggaggctgcagtgagctacgatcgctctagcctgggcgacaggatgagaccttgtctcaaatagagatagacagacagacagacttcagaatttattagggtttgtaatttccaggttccaaagcacagcaagggaaagggcctggctgggtagtacgttacacccggaagtaaagagacgcatacaccgttgggtgcactttatagtctggctggcaaacgagcgacaccgacgcgcagagttaagtgctgggacttcccaagcctggaaagcagaccgtgtctctgcaactacgcggctgccacgagcgctgagcggccgggcatttggcctcgaggaggaggcactgtaagggcggcgcaagagggcggaacgcgggacgccaggcaccctagctcccgacggacgcagttttcagttgcacgggcgagctccgggccggctgcggagcgactccccgccgccaagtgggcggcgtggctgtcgggaaagaagggctggggcctgccgttcttcctcccgagtatcccctccagctggacgaccccacgctgcagca

SEQ ID NO: 11069 - DNA, 2300 bp, Homo sapien
tctgaggccaggtatgtggctcatgcctgtaatcccagcactttgggaggttgagacaggaggatcacttgaacccaggagttaaagaccagcctgggcaacagagcgagactccgtctctcaaaaaaaaaaaaaaaaaaaaaacttagctgggtgtagtggcacatgcctgtagtcccagctactcaggaggctggggaggagaattgtttgagcccaggagttcaaggttgtagtaagctgtgatcgcatcactgcactccagcctgggtgacatagccagaccctgtctcaaaataaaaacacaaaaagacaaacaaaaaaggtctgagaccttcagtgttccagaatagtgtgtataattggtacaggaggtggggaagggggacccgatacagtgtaggggcaagctgagtcccatgcctcttcacaacttttcctccagtgtggtagtttgatttctcaagatccatgagtaaatatgtgcacaaaagacacatccctcaaaaaatacaaaatacattgtctaaggaagaatcttttaaatccatattcagaaaatgatgtaattctttaaggatgcaaatgagcagttctgctagagagttacccaattttcatcactgaatggaaacaaataatatgccattaatgaaagcctacatttgttttgtgctttgcactttgcaaagaaaaaattctaggctccaagaacacattagtaaatgacaatgcaggattcaaacccagtatagtaaaatactcaatacttatatagtatgctaggtaaaaacaatttaattttacacagtggtgaagtcactaattttctccaaggaaaattatataagagaaagccctttggaggctttttcacaagatgatatcatcatcatcatcattggtatatggatctttttgagataaacatgtttattcattcattaatttaacaagtgtttactgtgcatcattatcaaggcatgacactaggttttacagaagatgcaaatatgacttcctataacaacttaggatctagcaaggtagaggaaataaaagatgaaaggaatttgataaatatcacaggaaaggtgggaaaaaaagtgttaaaaagttcacattaaaactgcaaagttcatattccctttgggaagtggggagctttagtggaaatggtaacaattggaaaaccaaaaattaaaaatagacaaggggggtaagataaaatgatagattagtatcaagataccaggactcctgaagcaggacatattgctaccttaagattattaacaaactagttcccatggatttagatcctttctgtaatcatagctagaaactggtgttcttataggtagtatcgcagaaggctgtactgtactcaatacttcctgtatatggataggaaaggtttggatggtcatctgtcacaagagtaacaatgtttaggagtagcttggacactggtcattgattcacttttattggtgcttgtaatgtcagtatgttgacatcattgtgcagcccttatcagattgtgaacaccaagagtaccccaactgctggcccgcgagctgtttacaaatatcataccggcttttatcgatgatagtggcctttaaaatctggagttcagagtggcacaaaatgtgtttctaatgcaaacgactctccttcccacgtgcacctctttgatcaagtttgtggctgaaatcagactctagttagatcgctgtaaaaataaaaataaattttccccaaatgattgaaacgaatttcaccctagactacgagtcccatcatgcaacgctcccatattcccaccgtgtggggcggagtcgtagaaggggcggcagcggcggcggcctgtgcattctgggtattgtagtctggggcccggccaccgctggggctggttccacgtggtgcatttggcggcagctttgggcagtggctcccctgctccctccacacggtcctcagggtgccagcgccagcaggggcggccagccaccgcgggagcgggctagagtgtggcccggaggcagcccgaggcttcgcgacgtttttgcgacagccgcggccgtgttccgcgagtgccctccctcctcctctctttgaggaggtaccggctgttgtgcggctctgcccttctgtttgagtgtatgggagagtgagtgagtgagtgagtgtgagcgtgtgtgtgagagcgtgaggcgtgagtgcgcgtgtgagaggacgagagcccgcctggccgccccgccgctcccgccgcagcaggagcagaacgcgcg

SEQ ID NO: 11070 - DNA, 2300 bp, Homo sapien
aaatacattgtctaaggaagaatcttttaaatccatattcagaaaatgatgtaattctttaaggatgcaaatgagcagttctgctagagagttacccaattttcatcactgaatggaaacaaataatatgccattaatgaaagcctacatttgttttgtgctttgcactttgcaaagaaaaaattctaggctccaagaacacattagtaaatgacaatgcaggattcaaacccagtatagtaaaatactcaatacttatatagtatgctaggtaaaaacaatttaattttacacagtggtgaagtcactaattttctccaaggaaaattatataagagaaagccctttggaggctttttcacaagatgatatcatcatcatcatcattggtatatggatctttttgagataaacatgtttattcattcattaatttaacaagtgtttactgtgcatcattatcaaggcatgacactaggttttacagaagatgcaaatatgacttcctataacaacttaggatctagcaaggtagaggaaataaaagatgaaaggaatttgataaatatcacaggaaaggtgggaaaaaaagtgttaaaaagttcacattaaaactgcaaagttcatattccctttgggaagtggggagctttagtggaaatggtaacaattggaaaaccaaaaattaaaaatagacaaggggggtaagataaaatgatagattagtatcaagataccaggactcctgaagcaggacatattgctaccttaagattattaacaaactagttcccatggatttagatcctttctgtaatcatagctagaaactggtgttcttataggtagtatcgcagaaggctgtactgtactcaatacttcctgtatatggataggaaaggtttggatggtcatctgtcacaagagtaacaatgtttaggagtagcttggacactggtcattgattcacttttattggtgcttgtaatgtcagtatgttgacatcattgtgcagcccttatcagattgtgaacaccaagagtaccccaactgctggcccgcgagctgtttacaaatatcataccggcttttatcgatgatagtggcctttaaaatctggagttcagagtggcacaaaatgtgtttctaatgcaaacgactctccttcccacgtgcacctctttgatcaagtttgtggctgaaatcagactctagttagatcgctgtaaaaataaaaataaattttccccaaatgattgaaacgaatttcaccctagactacgagtcccatcatgcaacgctcccatattcccaccgtgtggggcggagtcgtagaaggggcggcagcggcggcggcctgtgcattctgggtattgtagtctggggcccggccaccgctggggctggttccacgtggtgcatttggcggcagctttgggcagtggctcccctgctccctccacacggtcctcagggtgccagcgccagcaggggcggccagccaccgcgggagcgggctagagtgtggcccggaggcagcccgaggcttcgcgacgtttttgcgacagccgcggccgtgttccgcgagtgccctccctcctcctctctttgaggaggtaccggctgttgtgcggctctgcccttctgtttgagtgtatgggagagtgagtgagtgagtgagtgtgagcgtgtgtgtgagagcgtgaggcgtgagtgcgcgtgtgagaggacgagagcccgcctggccgccccgccgctcccgccgcagcaggagcagaacgcgcggccggagagagcggcggagccggcgcccagggagcccgcggggacaagggcagagacaccgctccccacccccagccctcgtccctcggctctccttcgccgggggatcctccccgttcctccacccccggccggcctctgccccgccgtccccctggatgtccctggcgctttcgcggggcctcctcctgctcttgccgcatcagtcgggctggtgctgcggccggcgggcgtagagcgggcgggttcccgggggctgcggctgcccgtgcttccccggtccccacccctgccccccggccccccgacccagctctccggcctcagaggctgtgacaatggactatgactttaaagtgaagctgagcagcgagcgggagcgggtcgaggacctgtttgaatacgagggctgcaaagttggccgaggcacttatggtcacgtctacaaagccaagaggaaagatgggtgagtgtgtgtgtctgggccggtgtccgcgctgggcggcgctcccgca

SEQ ID NO: 11071 - DNA, 2300 bp, Homo sapien
attgtaggggaaaagtctgcttcccactcaacaacagcactgtgtcctgagaccttctctgaactgtcttgtctgccttccatcttctaggtctccacatggccagtttcttcttctcattcagaccttagtgaaaatagtaccttttcagagagaacttcccggattacatagtctaaaatagcaccctacctccgccttcacaccttcttttaccttattgtcttcattgactcaaagggtatctaaactccactaaaacaggtgtacctcacctcactgttcaccgttgtaaaccagtgcctacatagtatgtagtgagaactcagttttctttgttggatacttgaatgaatcttgtctctgacagtctcctcctgttcttgttactgtgcagttacacttgtatgactttgctgtcaattaaatgtagattcaagaagggaaaaggagcaatgtttgtgatcttcccccatattaatcttcaatccaatatatcatttccaaaaatctttatgttctaatcttcacacatgctttaagatcacattttattttacagaaaaataagtcagttagatatgggaattctctatactatctttgtaacttttctataaatataaaattattaatacaatatttagttaagtcagttaaaaggaaaaataaggatgatttattctagtcctattttggaatacatgttattacctaaatacatatctgggtatcttctttgcaagtgtactctaaaggcatttaaggacatatataaactaatgtgatacacagagatttttttccactcagaaaatgaatgtttaaaagcagtgttacttttggtaaagcatattaacaaactatacaaataagaaagtgattgcctaatcttatttcctattcactgaacacctgagacttgaatttatttaaattgagtaaaaaatatactatcacagaaacttgtgactctggctcactgtttattatcttgttatttttcctgagaagcttatgtcttattggaaacattaagatttatataaccttttactcactaggatattctacagtctagcagttctaatgcagggagtgtgccacaaatctaaactaccagcacttagggagctagattctcttgtcccaatggctgtatgatttgggagagaggcctttcttcatattttcctccctcctcctcctcaccaacataagcatttattgggtaactactatgttaggaggaccaaatatgaattcaaatgatgggccttaccctgaagagatttacagtccagttgagaagacagtatgaatatatgcatacaataatttagtcatctttgaacaacggaagtaacaaagactaccagccgaagttgtagtcttacttctatcactctggggtgtgtttacgcatttagtgctttagcctcagtttctgaaaatgagaatttagcctgagtcgtctctttgatctctctaaattcaaaagttctgtgcttttatttatttatttagagacagagtctcgctctgtcacccaggctggagtgcagtggtgcaatcttggctcactgcaacctccgcttcccaggttcaggcaattctgcttcagcctcccgagtagctggggttacaggcttgtgccaccacacccagctaatttttttatttttagtagagacagggttttgccatgttgcccaggctggtctcgaactcctgacctcaagtgatccgcctgcctcggcctcccaaagtgctgggattacaggtgtgagccacgacacccagccaaaaagttttaagcttttaaataaaaacagctgccttctgaggccgggaagttacagagggaactgacttgggtgcaaaggattgaaaccaaggtaagtgccattttctcagcagtggtgattccaacccacaccgtcgtctggtgtacacctgcttgcccaagatcagtcttggggaacactttcttctattgaaacattgattcaaaatttataatatacacaaaccactttcaatttaagtttctaaaaataaggtcaggcacggtggctcacacctgtaatcccagcactttgggaggccaaggtgggcagatcacttgaggtcaggggttcgagaccaccctcaccaacatggtgaaactccgtctctactaaaaatacaaaaattagccaggcatggtggcgggcacctgtaatcccagctgctcaggaagctgaggcaggagaattgcttgaacctgagaggcggaggttgcagtgagcagagatcac

SEQ ID NO: 11072 - DNA, 2300 bp, Homo sapien
taccattttcctcaatgtgatgcaatgcttacaagggaagcaggcatcctgtgaggatgaagacagagatcacatgacaaggatagcagagacaatggctagaaagagcctgagacacaacgacaccatagaagagatattacagaagccctgtggctgtctccaggtttctggttttgtgataagaagcactcctatttagtaggcacttttagtcaagattctgttacaggtcaccaattcactccctgatgcagcaacattttattaaggatgaggcacttattagcggtgggctctaatcctctaacaagactgctctaagcagtttttatttaaaggactggttcacacaagaccatatttgaaataatttatttgtaccatgaaccacaacactaggaatagaatcatatttaccacatgctcagcactgtactaggcattataaaaggaggaaagaggactgtaaaataagggccttatcctcatggaactgatgatctaattagagaggtaagactgacctatatgaaacaaacctgaacactttgggatgatgtgtttaagggctaacagtgagtgcaaactaagtgtagcagcggtttataaggctggggtcaccgaagagggaagcagccagggaaatatgattagcaaccttgaaaacactctgggtatctatactttcatatttttgagttctaaattaatgacctaaacatagacatggaagccattcccctgggtaagtgaagatgaaatgaaggaaagtcattttaatttgaatgccaatttagctttcaattcagcagacatttgtcactctagtatcaatatttaaaatactgggtcactgtaattattcaccaaaatcctgtttaccttgttaattaccagcaattttttaaaatgatggcactttatggaaactgaatatacgtcatctttaaaaagagcttttaaaatccctcctttggaagtaatgcaggttaatagattagacattttatgaagagggctgcatgatttttctactgcatttctggtgttgcaaactttggtgaaattattaactgctattcattttttccaacttttagttgtctctagctagatgttgatcattattacacatctgtaaagaaaagagcaaaccaacttgaattagtgtttcttgaactattcattagaatttaaaattttttcctaaaagtttttcaatttagtgatcctattggtaaataaaaagaataaaggcatgcaaattaaaataaaggtaacatttctattagatgtttttaaacccctttcctttgtgacctagcttttctatcttggcttttctatcttttcttctcttcctttcctttcctcctttctttttcttaagtttgtttatgcctcagtcatctggtcgcacgtggctatgttccactgtggcagggcttagctggcagtttcagggatatcttagttttaataagtattgtggatttcctcacatctagggtggagagagattggttatagggtgataaaaacagaagaatctgtgttgaaggagatgggaagattttaagaatgctaacgaatttgagcagggcataaaaccaacccatgaacagggctacagtcctctcagggttgcctgaagcctcagccctggaggacgtctgacaccttacaggtagaggacctctgtgcaggagccctcaacacccagggaggattaggatataagcgcaaactcaaaggtactgtaatgggcacctagcaatcagaggtgatacaagggtctcttggcccgaagtatccccacctctcctcgctggaaaggacgctgcctaagcctcatcccgagctgggggcggaggaccaagggtgagagccaccgcctccgcaatcccccgcccctcggcaccgtcgctcagcgcgctcgccggctccctattggccgaggcactcgccaatcctggtgaagcggccccgtgagttggccctggttggtggagccggcactgagcccccctcctgctccggccgagcccccccgccgggagggggcgtggccgcggccgtggacgggccggaggcggcgtcgctcgcgccgctgcgtgcggtgtggtgcgaggcgggtgcgccgggcggccgcggcgcggcgggaccatggagctcagagcgcagccccggcgccggcggcgggaccgcggaccggtgagtgagggctgcggtcgccccggctctccgctgtaggctgctgtggccctctcggctccgggccgggcggctgtcggggg

SEQ ID NO: 11073 - DNA, 2300 bp, Homo sapien
cagaaactgattgatggaagaagggaaggagaagcgggaagaaagtcaagggtgattgaggctccgaatctgttgggctggggtagagaagacgtgagcaccaggggaaggcaggctggtcagctgatgatgcccctgtagggtcccttgcctgcagaccatctccattcatacaagagcccctgggcaagtggaagaaaagcagtgggaaaaccttcacctctgacagggcaagacaagactatcacactttttccttatcccatctttaaactggaggatcatcttggaacttaagatctatgaggtgctctggtttttatatccagaggaggcatgggatcataaaagcagacagctatcaggttcttcatcttagaatccattgatgtggcaaaatgaaaaaataaattaatagtgccacttcagtatctaaatgaattggggtttggccaatgtctgcaggaagcttctacaagaactcagtaaatgatttccatttgaaaacacagctcaaagagcgcttaataagtgcaatttggtgatgataatgatgatccacagagcagcagcatctatccagtcaagcaaatgttcctggggaacagtgataatgaaccaggtccaggaccatgggcaattctaaaagagcgtgcggggcattttgttgttttaaagatctgcttccctaacctgtccaccccgcatccctgctgctgatcgtgaatatcatcctaagcaattcttttggccctgaatgtagtggtttaggtaaaggcgtggaaaagccaggactgtagagacttggagctccccagggaaaccacaggaacgaaataggtcacagggctccaggcagcgctcccctgccccgcccggtgcaagcccggggccgccggctggggtggggcgcgcagcgcggcaggcaggcagggctaccatgcagttctcagcctcctggctccttcgcccctcgccccgcgcccctgggccgccctcgcctgcccgcaccctagagcagccctgacccgtgggggcgcgcggcctcgcggggatcccgcgggcgggcgggcggccgggcgcgcgcggggcgggggcggcgcgcgcgcggggagcgtgtgggccgggcgggcgcggcggggaaagctgggcgcgcgagccgaggctgctgctcacctgcagccgcgccgctcacctgccgcggagtgcgcgccccgcgccctcccggcccgctccggagcccggccgccccccccttgccacagcgggcaactgcgccgacatgcgacacgagtagcccacgcgcttcggaagcaccggaggagccccctcggcctgggcgagccaaggtgaccccctcgatgacccccccgcccccgcgggccgcctgtccccgcaccctgtctgtccccctcgcgtccgactcccgtccccgccgccagggaatcggcagcagtgcatgggcatctgtctgtctgtctgtctcggtacttccattgcacacacctccctctcgtggccctcccgactgccccgtgcgcacggggggagtctggagcccctctttgttccggtcgggggtgcgtttgaggatgtgcacgcgcgcgggggatgcgtttggagggtgggagttcgatggaaataggcgatttaaatattccatcgaggatggcggcccctggctcgagacctgccgctgccgcgtggttttctcggcagcagcccagatgtcaaacagttgttcgttttcagcatgcaagatgtgattttccaatgtgcattcccagcgctgttgcaaacagaccgccgcgagtccgtgtgtgcctgcctcgctcacgctggtgttttgaagtcctaccctgtgttttccccaatgccaaacggcatttttgttgtggggtttaaaccacagagactttggcttttgtttcatttcccaacagttcctcattcccgaagcttgtggcatttggtactggtatctgagcaggggctggctttctgtttgtctgtgtgttttttgcatgatcttggattgtcaccctgctgtatttaaacattaaaaagcctgtcttttcgttgaagaggacaggggttaaaatgaatgaagacctgaaggtcaatttaagcgggctgcctcgggattatttagatgccgctgctgcggagaacatctcggctgctgtctcctcccgggttcctgccgtagagccagagcctgagctcgtagtcaacccctgggacattgtcttgtgtacctcgggaaccctcatctcctgtgaaaatgccattgtggtcct

SEQ ID NO: 11074 - DNA, 2300 bp, Homo sapien
gacaaggtctcactatgttgcccaggctggtcttgaactccctggtctcaaggaagttggaagccatcctcctgcctcagcctcccaaagtgctgggattacaggcctgatccactgtgcccagcctagaaatttatttatttatttatttttgagagagtctcactctgtcacccaggctggggtgcaatggcacaatcccagttcactgcaatctccacctccaggatccaatctattcttatgcctcagcctcctgagtagctgggattacaggcgtacactgctacgcctggctaatttttgtattttagtagagacgggatttcaccacgttggccaggctggtctccaactcctgacctcaagtgatccacctgcctcggcctcccaaagtgctggaattacaggtgtgagccaccatactcagcctagaaattcattttagaaaggccttgttcttatataaacttatatgtaaagccagtggcttttgttcctgtgacatgttcggattaatggacaaggaggcatatgggtggttagcgggatggaggcaggtctaaaattctggcacatcagacctgtttgctggaatagaacagcaagtgggaaggacaggatgaccacagctatttatcaggacgggcacacagatgggcatggtgacactcggacaaggcccaggtaggccctagaggtctaagatgtagaaacccttgtccaaacagggggtagaaaagagcaagaaagaattcaggtgggtgatgcttgcaagtatagagaggaaagcccctggctggggtatcagggctcttggcttccatggaggcaggcgcttggagatccagtccggctaccatggggcttggctatattcaatctgcattccccccccaagcaagcttataatggaatcactatggaaacagtattcatgtaccagaagtctatttttcacttaaattttgtttgaatgctttttgtttttgagtgctttgaacccttgaggtgaggcatttctgattttacagctctgcctgaattcagatcctcaaccccactgaattaggggaacccagaaaagtaccccatcacgagttcaatcagaaaatatcacaagctttctaacataataatttatgaagttattctactcacttgaactactttctcaaataggaaaaaataaagctgagctgccaggcatgaagaacagggtgcaaatatgaattttataaaaggagaaagaggaactacccatgccagtagccagcactgcctaaggatttctcacagggcatttttcttgcttgcgggcttcctgtctctggtaatatcatcatcactgctggcttgagatcctccctattttgcagctcaatgtgcagatatttagaagcctattataaatttatcgccaacaggccaacaggtttcgctcctctccttcccccattacttatctttcttcttaattcaaagagttaaacatgtgtaatttgttctttgcctcttcatttttgtttaattattttgtctttttctaagttgtgtttgactccggtgattcatccaatatacgtaaaaagaaacaaaccaagtgcttgggacgcatacccgggttatcttaactgtgcagagcaggtttcctcccactccgcccgtagttacccagatcatcgcctccgttttctgtttaggcagcgggggctcgccgtcccctcgcccgcggtgggtgtcgcagctggtcccctccagggttctcccagatcgccgccgccacccccgcgcctccccgccgcaccccttcctacgcgggggtctctgggtccccggctctaggaccgcagggacgcgggcaggaggtggcgcccgccttcggtcctgccctctgccgcgcgcggggtggggacggaccggagttccccggctcgcgcacaagggccgcggaggggttgccgaggggtgggcggggctgcgccgcctggccgcgccgctgcctggcaggccgggcattagggcctcggcggagcccgctcccctgtgcgctgggcggggtgggcggagggcggcttcgcgtgcaggcgcgggcccggaggcagcggctgcgccctgcgccggggcggagccgggggcgggccggcggccggcaggcgggggctggggcccgaggccgggagtgcctgagcgccggcggcgacgacggcagcggcggcccagcgggctcggtggttgggtccgcggcggctcggggtccgcccgcgggctgcggtgcgagcgggcggcccggctcccct

SEQ ID NO: 11075 - DNA, 2300 bp, Homo sapien
cgcctataatcccagcactttgggaggtggaggcgggtggatcacctgaggtcaggagttggagaccagcctggccaacatggtgaaacctcgtcgctactaaaaacaaaaaaatcagccaggtgtggtggcgggcgcctgtaatcccagctactcctcgtgagcctgaggcaagagaatcgcttgaacccgggaggcagaggttgtggtgagtcgatgtcgcgccactgcactccagcctgggcaacaagaacaaaattccctctcaaagaaagaaagaaagtaatgggaaaggaaaagtgacctgaggaagtgagtgctaacagagtgactgtaataatgaactacagaaaattaagttaaagacaatctagaagccaagggctaatggttacagtgaaagtctggaggagtcaacgtattgaaggaatcaataccaaatcctattcctcctcaagttcttcagcaaatgatgttaagtgctgatgacgatggtcacagaatgtacacatttaaaaaatggtgctgacgcagttcttagaaattacaactttcaggtgcatcaggagagtgagtcgaagacatgcaaatttcaaaagcgactggacgatattatttatattcagtctgataagggattttgttaacttagctgactttttaaaaatgcatcctaaaaatacatacaatcatgagaaaaacatgagacaaattccatgattaggacatcctacaaaatacatgaccagtactcctcaaaactctcaaggtcaccaaaagtaaggaaagtttgagaaactgccacagccacaagaggcatataaggagacatcataactaaatgtaatgtggtattctggatggaatcctggaacagaaaaagggtattaggtaaaaccgaaggaaatctgaataaaatgtgaaccttagttaataacagtgtaaaatattggttcattaattgcaacaaatgtaccatattagcatgagatgttaataataggggaaactggatgctgggtatatggcattatctcaatttaaataaactacattaagaaaataatatctatttttaaaggtgtagtgaataaaacaatggccacccatatatttaacacccggtttaataatggtcaatacagttaaagcctccctttattgtcccctccttaccagatatgactgcttttctcaacttgattttcattctcttgtatttcttgacttctttaactacatatgtatgcataactaagcaatatatagcattgttttacaagttttagagttgaatgtatatgaattgtcatactatttatttttctacatctttctctttttgcctcatcacatttctgagttcagtcttcttttattggcgtataatactacatcctaacatcccataaggtatttattctgttattgatggacgtttctaattttttgcttctacccacagcgctgttacgtacatccttgttcacttaccaaagtttctacaagacatataggtaggagcagagtgctggggtttagtaattgaaaacttttactagattttgccacattgctttcccaaagaggttttaacatttgcgcacctactagcaggtgcgtatgtttagacgtgtggaggagaaactatttaaagacatacaaactagataatatacttgcttcattctcgtttgaccttcgtacccaagcaattatttctgcaaacaaacaaataaacaactactaatagcacttcccgcaccgccagccgcagttttccctgcggagacgcggatacaaggcagcttccggcgaaggcggtgacgcaaaggatggcgtaagcacgctcgggacgacggcgtcctcttgatcgcccttgaaggcccctttccgggctgtctgacacgatgcaagtgtcagcttgtgttggccggttgcctttctttcgcaagaggggaaaatatcctcacagactttctgtgttctcagagacgatcttcttccctagaaagaagtcgcttacggttggcgtttccctcaggcagcgccgtgggcagcccacaggcccttgtaaggcgcgcgccgcggccccgcctctttcctttcggccggaaccgccatcttccaggtagggcctacgcgtggctcccgggcgctaggtgttcgacagacttgaaccgcgaccttgtggcctcagaggtcgttcattgggaccgtggggagactctctaacctgtttgaggtccattggcatgggcgggttaaaccatgttctgccagacggggagcagcgtgcg

SEQ ID NO: 11076 - DNA, 2300 bp, Homo sapien
ttgggaccgtggggagactctctaacctgtttgaggtccattggcatgggcgggttaaaccatgttctgccagacggggagcagcgtgcgccgggtcgggtctgggccgtgggctgagaaccggactgcgatgttgcggccctgcggggggacatttgcgagaaagacgagactgagtcgcttggggtgaggcgactcgagttaatctttaaaagacttcgttttatgttcccgtggctgcatctccggtactgtgggtggcccctctcacataggctgtgtgggggccgcgtggcctgatgcctttctaactcctttcagtgtggcttttttattccaaatcttgcgatgatgttgggtgaggacttaaggggtagtaggaatgggtttaaagtcaggcgtcggctttaatcttctgtgaagcctacaggtgtgaaaacccgggctctcggtcggagagtgggtcccggagtcgtcctgggtgatgaaccctcactgcccttagttaatgcataagacgatttccgactgtttttaaaattttgaccccacatggtgatcggacgaagggaaagtgttttgaggttgcaacaccaatatttgcaccaagaggagatactgttttgcgaattctagggcagcatgctttgagtgaagggaaacatttagccatagttcatcattttgtctagtttgtggacgtcaacagagtcgagcaaactgcaggttgctctttatggtggatcctagttgccatgattttaatactcttacaaactgtaaagcatcgttttgaaaagtgccttcagttttaagtgtatggggtccatgcttaaaatggattccaaactcagaaagatggatctagtggaggattatgggctctggaatcaggaatgagttaactgattatgccacttggtgattccacaaagtgacttgaatctacacagtatcaccctttgtgtactaacttagcacaagtttttggaactttatacacatctaaaggctttggggattggaacagagtacctggcatttaaagggttcatccattgtaacaatggtttgactttggtgagttaggtgaaacatgtcttcttgctatacaatttttataaaaatggtactttgggagccattcttaaaggattgttggtaaacttagaaaccaaattgtgttagaatattgtcaacacgtcaagcctgactgctgtattttaccttatggtaggagtaatggccaggaatggcatttctgccctataatgactaaagagctatcaaaactattgttttggcctttttgggaaacaaaggaaaggttaatttctaaatgcctgtaggtgaattcttagataatgataaattagctgccggttactactgagcactttacacgggccaagcattgctgagttctttgtagacattacctcagctacgaaagtgttcacccctattttacaaatgaagatgagagatgaaatgtgggtgtcccagctagtaagtggcagagcctatgtcaaatttaggtcaatgattataaagcctgggttcccctctcttctaccctatatacgttcgtagtaaataatcagaaatgtgaagtggcttgagatttctgatagttaaatagatgatgtttgagatacaccatcacggaaaatttggttgacaagaaaggtttaattcacataaaaatgtaaggctgttttattgtgttctccactaaattatcttctagttagtaattacatgcccttggcattctaaattgggttctacagatagagtgtggtagaagtcctgttgtgtttttatattctcatagagaaagggtactagtttggattctcgtatcaagttctgctccttaagagttttgatgttatagaacttgggcagttttgccaaaagaccttacttgctaaaataatgattttttaacctttcaacagaactaactgcttggtgatccagctttcagtttgcagttctcacttcgctactgaaatgtgaacatttgaaattacaggggtttggggcaaatgccagttttcagtcgtatttgactgttctgctttctggtttcagtaattcgccaaaatgacgaacacaaagggaaagaggagaggcacccgatatatgttctctaggccttttagaaaacatggtaagtaggtttaccttccttgagagaagcatggcacacatttgtgttctgttgtgttcaacatgtgttgtagttcatagaatgtgtatcaatagaattaaataactagcgtctacccagc

SEQ ID NO: 11077 - DNA, 2300 bp, Homo sapien
ctgaagacagcattcattcattcatttggaaagtcagccagtgaacaaacatttattaaggaccttgccagtcccaggtgccactatgtgctgggtactagagtcacaagctagagtccctgtcctcctggagacagacatgaaacaaatattccaccagaaagtaatgatagttgagatcagtgccctgagagtgagtaactgcaagataggggtggggacagtggcagtgatcagagacggcttctccaagggaggaacatgtaaactgaagtcaccatctagtctagattagtttacttcaggattattcagaattctgcagataagaaatgaggccgggcgcggtggctcacgcctgtaatcccagcactttgggaggccgaggcgggcggatcacgaggtcaggagatcgagaccatcccggctaaaacggtgaaaccccgtctctactaaaaatacaaaaaattagccgggcgtagtggcgggcgcctgtagtcccagctacttgggaggctgaggcaggagaatggcgtgaacccgggaggcggagcttgcagtgagccgagattgcgccactgcactccagcctgggcgacagagcgagactccgtctcaaaaaaaaaaaaaaaaaaagaaatgagagcagtagggatacagagggagacaccaagaaatataggaggagaaatgatggaacttggcgattaatcaatgtggaagtgagagagtgggtagagtcaaggatgtctcccaggcttgggccactgggtggatggagacacattcattagcatggtcaattacaaaaatggaccccattctccatcactctctgcttccttgccctttcacacgtgacttttctgctgtttccacaaaggggcggagtgtatttccctactccttgaatatgggctggccccatgacttgctttggccaacagaatgcagcagaagggatgggttccttctcaaggcctaggtctcaagaggccttatccatttccacccactctcttggaactctgctcagctaccatgaaggcaggccctggccaacgtgctgaatgagaagagacatgtaactcagtcactaccctccctcatcacagccaacagctgccagacatgagtaaggctatccaagggcagccagcccccacttccagaacctggaagctccctgcagatgcatcaaagggctcaacaactgtaagtgattgttgttctaagccatctagtttggtgtggcttgtcatgcagcaaaaactggtacaaccagggtagagaaaggtatgaattagggtggggctgtctaataggcgattaggcaagtgaggctggaacacaggaggtcagaggcatgaaggtcttctaactgttcaaggttaaagtcctgaggcttctgctgtgctatttctggtgggctccagaaatccaagaaccagtctatagctctgtgtcctgttcctcacactgccccccaccccaccctagaccccaccatgcacctagaagtaaatatttggatactgaagcaaatgcatgactcaagcacataggatagtattaatgatggacacttagtgcagggccagggcccccagccagtggagtgctcatgagtgttcaggaatgagccagtgcaacccctgcctgcagaggaggggctgggcatggatactgagatgctaaccatcactgcccctaaggggacttcatctatccctagcaaggtcacagtgactgcagttgcctccactgatactaattcagagctcttgccccccgccccccgcccttttcccatattaatgttaccccttagcatcttttcttttctttcttttttttttttttttgagacggagtttcgctcttgtggtccaggctggagtgcagtggtgccatctcggctcactgcaacctccgcctccctagttcaagcgattctgctgcctcagcctcccgagtagttgggattacaggcgcccaccaccacgccccgctaatttttgtatttttagtagagacagcgtttcgccatgttggccaggctggtcttgaactcctgaccgcagatgatcttgcccacctgggcctcccaaagtgctgggattacaggcgtaagccaccgcgcccagccccttagcaccttttaaaaataaaaagggcagcgttttacagcaatctgtcccattgttgcagaaacatccaactgattgcactttttcttcttctctcgtcaactcgtaactcctatctcaagttcacccacaggtctagtgactccggct

SEQ ID NO: 11078 - DNA, 2300 bp, Homo sapien
aaaacacattgggggccaggcgcagtggctcacgcctgtaattccagccctttgggaggccgaggcggatggatcccttgaggtcaggggttcgagaccagcttggccaacatggtaaaaccccatctctactaaaaatacaaaaattagccacgtgtggtggtgcgcacctgtacttccagctactcaggaggccgaggcaggagaatcatttgagcccgggaagtggaggttgcagtgaaccgagattgccaagattgcaccactgcactccaacctggacaacagagcaagactttgtcaaaaaaaaaagaaagaaagaaagaaagaaaaacacattgggaagtaaactgcagagagaaaggaggtggagctgtggatcacagggtgagaaagaacaaagaaaaaagaccaaaagtttttgagtatacagagtgacctggatcctattagctgctttacgtggagagttgttggaagagctgtagattggtggtaaatgtgtctagcataggggatggcacataataaatacaactattggttaatagaatttcatttaattttaaaaatgacccttactggtgggtattaacagtctcagtttaaagataagaaactcaaagagcccttatccaaaatcctagttagtaaatttagagttggaattcaacgtcaggggattgaggctgaaagccagcgctcgcctgctataatacatcagcgcacagggctaagcaccaacctaaaaaggtggaagaacgattgtccaaggagacaggacaagtcaggaaggcagggggaagccatgagtatggctatgctgcatggggtcagtggccaagaaaggccaaaagaaaggaggatctcagagatttaccgtgcaccctggccctgggcatgaggcatggggaggagaaaaccagaactggcgcaagagaaaccattttagaattccggagttgtgggagggatgagtgtagaattctcccatccatggacaggggctagagtggcaaatgaagaaagcaacaggtggacccaaggcatagacactctcacagccccgttatcttgagacggaggatgacacaggcgttatcaactttcccactttcaagatgagcagactgaggcaaaggagtgtttatgaactggaatactcagttcataagcactgatgttaagccctggcttgtttccagaactgcactgctgtgcagggacctgttcatcacattccgacaagggcttaatgattcggaataatgcaggatgtgaaaaatatggatctggcgaacatcccccaagtcatcctgccagttatctgtatccaaggacattttttaggcatgtggtcctcataaactaagatactcatattcattcaggcctctcaaaagtgcttctcaggttttgatatgcactgaatcacctggagatttgtttcaagtaggtcatcaaggctctagggcagtgttcccaaacttttcctttttttttttttttttttccaaccacctggtcagtttgccggggtggggaagggtaggatggggagacatctgtatttattcttttagagctcggggtctcactctgggctcaagcgattcgcccgcgtacctgggactacaggtgcgcactactgtgccaggatagtggttcccaaacttttctgcgcattgaaatcacctaggaagtttccaaaaatactgatgcctgtttcctacccccagaaattgtgatttaagtggtccaagtatcctctaggcttcgggattttgtaaagctctccacgtgaatctgagcttaggaacctctgaactggggcttgcagcagaagcacgtaaagcacgcaaagaaacgaaaccacacaggtcacactagtaatgtggcaacaggctaacttaaattatgtaaggctagtgctttccagagtgtactggaggacgggaaacaagccccatttaagcagtgcctcgggatttgagttgcctgtgaaacgcagcagccttctgccgaggacgcagaaacccccgcctctcatccagggctgacagggcacgggccgcgagccgcggcggggcctcctggcgcatgcgcgatctcccggagcatgcgcagcagcggcgccgacgcggggcggtgcctggtgaccgcgcgcgctcccggaagtgtgccggcgtcgcgcgaaggttcagcagggagccgtgggccgggcgcgccggttcccggcacgtgtctcggcacgtggcagcgcgcctggccctgggcttggaggcgccggcgccctggat

SEQ ID NO: 11079 - DNA, 2300 bp, Homo sapien
ctcagagatttaccgtgcaccctggccctgggcatgaggcatggggaggagaaaaccagaactggcgcaagagaaaccattttagaattccggagttgtgggagggatgagtgtagaattctcccatccatggacaggggctagagtggcaaatgaagaaagcaacaggtggacccaaggcatagacactctcacagccccgttatcttgagacggaggatgacacaggcgttatcaactttcccactttcaagatgagcagactgaggcaaaggagtgtttatgaactggaatactcagttcataagcactgatgttaagccctggcttgtttccagaactgcactgctgtgcagggacctgttcatcacattccgacaagggcttaatgattcggaataatgcaggatgtgaaaaatatggatctggcgaacatcccccaagtcatcctgccagttatctgtatccaaggacattttttaggcatgtggtcctcataaactaagatactcatattcattcaggcctctcaaaagtgcttctcaggttttgatatgcactgaatcacctggagatttgtttcaagtaggtcatcaaggctctagggcagtgttcccaaacttttcctttttttttttttttttttccaaccacctggtcagtttgccggggtggggaagggtaggatggggagacatctgtatttattcttttagagctcggggtctcactctgggctcaagcgattcgcccgcgtacctgggactacaggtgcgcactactgtgccaggatagtggttcccaaacttttctgcgcattgaaatcacctaggaagtttccaaaaatactgatgcctgtttcctacccccagaaattgtgatttaagtggtccaagtatcctctaggcttcgggattttgtaaagctctccacgtgaatctgagcttaggaacctctgaactggggcttgcagcagaagcacgtaaagcacgcaaagaaacgaaaccacacaggtcacactagtaatgtggcaacaggctaacttaaattatgtaaggctagtgctttccagagtgtactggaggacgggaaacaagccccatttaagcagtgcctcgggatttgagttgcctgtgaaacgcagcagccttctgccgaggacgcagaaacccccgcctctcatccagggctgacagggcacgggccgcgagccgcggcggggcctcctggcgcatgcgcgatctcccggagcatgcgcagcagcggcgccgacgcggggcggtgcctggtgaccgcgcgcgctcccggaagtgtgccggcgtcgcgcgaaggttcagcagggagccgtgggccgggcgcgccggttcccggcacgtgtctcggcacgtggcagcgcgcctggccctgggcttggaggcgccggcgccctggatccgccggccgtggtcgccgagtcggtgtcgtccttgaccatcgccgacgcgttcattgcagccggcgagagctcagctccgaccccgccgcgccccgcgcttcccaggaggttcatctgctccttccctgactgcagcgccaattacagcaaagcctggaagcttgacgcgcacctgtgcaagcacacgggggaggtgaggggggcgaggctgccaaccctgggcctagggatggcgcgtggccccggggtagccactgcagtcgtggccagggccgcaggccccgctgtgcagcgcgttcagctttgacatccaggacttggggaaggagctgaggaagtagacaggaagttgtaggaccttcgttctgcgaccttgatatccatggcaggggctcgggatttactaagcagtcattgatcgtgagtctcggccagccaagtgcctcccgtaatctgcaaataagtgtgaggtttgagggggcccaccgctactagacacctgccaaacactggcccctggagctggtacagaagatgggttacatgtaccaggggtcgtgaaagcagcatgtgctcatttcttcgtaactccacactggagagagcagtgagcaaaacaggcaaacccaaggtttctgctgccatggacctttgttcctgggtcgagccgaccacaggataggtgggaatgacatgcagtgttgtggtcaggaaaggcctctctgtgtgagccgtgtaagaaggaaggatctagccatgcagacatttgtgctaggtagagagaacacaaagggagcctgtgacccttggggtgggaggcaggtgggtgtgtttgggtgcggagatcaccatatgaggtctgaga

SEQ ID NO: 11080 - DNA, 2300 bp, Homo sapien
tagttattttgtttgcttgtttgaaaaaaatcaaattttgaaattttttatattttaatatgttgataatttattaaacaaggcactttagctcttattcataactactaagggaaaaagatagccagtactgagttagtattaaagcttaattgcagtgaactgttttgtctactgtatatatcaagaatattagaatttatatctatctatttagtaacatgattttacatgtgataacttctacatcattgtcgctaatacagactttggaaagaaacaacactgattttagacataaagtttatagagcaggcttgtgagcaggaacttaagagtcccctagcagaatacctagtgacatttgggactggatgctgctgctagttttctgataagtgaaaaaaaaatcttctgtgatcttttcagatttttcttcttttttggtttgggggcttcctccattcacaaaagatctgactttttattaaacagtatgtcagtgatttaaaatcactttgctcccaccttagagcctttacagcatctacagctggagccaccagctgggtaataaccataaatcaatgcatgtcatacactgtggatggagcatctggccacagatactcaccattactgacgggcatctgaaatgccagctagaaatgtgaagggtgtagtttgtaggcattcgtgacacatccgaaggtgtagaggttaaatgccagcagccctgccatagctccttggctgtttccttcggcccgtgcattcattcgacatgtgcatgctgagccaggctctgagctgtagtgccggggaacacagcagtgaacaaaatggacaaagtccatgttctcatgaagctttcattccagtgaggaaagattatgaacatatatgcaaataaatatagaatgtgtccagcagtgatgaatgcagtaaagtttttaaaaggcaaggtaatgggtttgagagtgttggggtgtgctcttttatggaagggtcagggaagggctcgctgagtaggtagcgtttgagcagagacgaggtaaatgaaccatgaggctatctgagggaagagtgttgcagggagagagaacttctgggtgccaggacccagaggaggggtgtgttcactgttcacaaggaacagcaaggaggctggaacagagtgagccagaagaagtacggtcggcacaggccagtgggcatggtagagagcttagcttttacttggagtgagatactagccaggggagggtgtgggcagaggaggaacgtgatctgacttacgcatttttaaggattgctctgtgtgccctagcagtaataaactccaggctgtgagggcagaggcaggaagagcagtcgggaagctgttactgtgatgcggttttactgtgatgcagttgagcggcgcggcggtttgggagtgggatgatagcagtagagaaggtgagaagtggttatactggttgaacggtaggttttgcggatgggttgctgagagaaaataaagagtcaaggataacgttggtatttttggcctgagcaaccagaagaatgtgttgcaattacatgagacagggaagactgagggaggagcaagttttgcatggaaggcaaagcattgaactttgaacacgttaatcctcaatgactattacatatctaagtggagaggttgggtaggcggttaaccctacaggtgtggaactcaagagaagagactggcaccagagctataaattagagtgttgggtgttaccaaactaggtaaggagggtgttgagaatatgcatgtccatcactttctgttgaatttaccatatttttttgcatatcactcttgaacatgacaggtgagagataagtgggttgtacagcccagtgggctcaaagccagggaccagagggaacttccagttttaaacaccccaggagattctgggaccattctttgagaagcaccctgaagacaccttctgttttcctctttcatctttgacaagtcacacctctccaagtttgtgattctctaatgattcctagcatgccctagatgagatgaatgggtcctctcagcactctttcagcctgtacttctaagatttaccaaatacatgaatggaaggacagaaaagcaattaaaaaatcaatgtgccatttgtaagtgcttcaaattcagtctcataaccatgaagtaaaaccactgtcaccatacatgcctctgttaacatttggtagtaattaacacctgccttaccttgagaatgatctttatagtttatgag

SEQ ID NO: 11081 - DNA, 2300 bp, Homo sapien
aaagatgaaaaaaatggcttctctccatctgtgggcatgtctgtaattgccaccccatctctgcatgtctcctcccaggaacactaaagcaccatcttctaggcgtggagacatctgacaatggaagtctagaaagcttcctaaaccacctgctctggacacagctgccttcaaagacggactgcaaatggatgctggccggtagcttcagttaccagtgattacttggtgtgaatctacctgtgctattaccttagcaaattttaagtctttagtttgggcattaaatgtttcagttacttgtacatacttcacatccttttaatgttttcatggactcgtactgtttactgtttctctcactacttcagtctagcaatgcaaggaacatttaaagtttgcctgggtttggggttttttggcttttttattcttgattctgctactagttgtgcgaccttgggcaaatttgtttcagttccctcatctgtaaaatgggtaataataataattggctcataaggttgtcctgaagattgaataacttgagatatgttcagtgcgtagaacagtgtctggcacataggcaaaagcaatcacaaatgtgggcaattataattgctgagcacctaacttttcccaggtattgtgctactcagtctgtccccgaatctacgtcacacaaaatatcttggcattgagaaataattttgatagaataaaatgaatccttaattcttcttgattaacttggaaatggccaagatgcacacctggactttcggtctcacacaagagttgtttcattacctccctattttaacagtgagcgtcgagctaccagcagctaaaaaggaaatggagatttcgtctttgctcccaaagaactatttaaagctttagtagttgtgtcatctgtaataaaagacgtaatgctgactcaaggagttaatgagaaataagacaacgccttccagtggacaagtagccaataaatgttagtttttcttcgtaccaggaatccaaacattccaggtatgaagccagattaggtggcttcacgactgtggactcgcagtctgcccttgaggaatttcttattgaagaagaaaaagaggggggacacggggcccagacccccagcacccggctttcgagcaggctccacgggtccgggtccgggtccgttttccctttcgccagctggggccccgttcgaacctctcccaactacaacgcggaggctccgacgccccggccccagctttgttttgcctccgggagccgcgcgccaccggggacccgcggggagccgttctcactccgaagctgtctgctcacctgcaaatcggagacagcgccctttcacttacgatccttataaaagacgcttataaaacattttattcagtgttacattaaaaagacgtttatgaaagcaatttataaagccctagtgggagaccgagattggtgttaatgtaactggagtaagggctgctccgattgctgcagaaattcgacattagccttcaccgcacctgcggagcagcgggagccaggtgagcagcaatttcccctcagggacttcctccgcgttctccgcattttctgtcggcggaactgaatcccaacagtagaaaaacgtggctccgcccatcacctttcctttaaaggacgcggggtgaagccccgcccactacggagagcgaaggggactcgccgcagatccgctgtacttgcgtccgctacagtatgtcaatcgcttgccccagcacaggtaatgctaaatatgaggcgtgcggagcggtgcgcggaccggcatcgggagggcgtggccttagggggcgcccctgtggaggaggcacccggaaggtcagggctaccccgtcccgccggtaccgagggcggagaggctccgcaggtcctgctgcggagtcggagggttctgccgggctgtaaagccattttcagcgaggccgctgcacgaacttccgagggatgttagacctagagttgccgccagccccactgagcttttctagttccgtcccgacatgcgcgccctcgtttgtgcgcacgcacgcacgcagtacgtcgctacgtcccgtctctagccctggcgctccgccggtcccgttctgcaggtgggcgtcgccgccgacttaccaacaaccgggtcgggggctcccggaagtgctcttgcggcttactgcctggcacaggtggggcagagcgagccaggcgaagggcgcctgcgcaggacatgctggacaaatgcgttgttcttgctgcctgct

SEQ ID NO: 11082 - DNA, 2300 bp, Homo sapien
ccaagtggccgggcgtggtggctcacacccgtaatcctaccactttgggaggccgagtggggtggatcacctgaggtcaggagttcgagatcagactggccaatatggtgaaaccccgtctctactaaaaatacaaaaattagcccgacccagtggcacgcgcctataatcccagctactcgggaggctgaggcaggagaatcgcttgaacccgcgaggtggaggttgcagtgagccgagatcgcgccactgcactccagcctgggcgacacagagagactccatctccaaaaacaaaacaaaacaaaacaaaacaaaaaaacaaaaaaccccacaaaagctgccaagctccatttcggctggaggtcaaagaagagttcaagggaaaagatgaaaaaaatggcttctctccatctgtgggcatgtctgtaattgccaccccatctctgcatgtctcctcccaggaacactaaagcaccatcttctaggcgtggagacatctgacaatggaagtctagaaagcttcctaaaccacctgctctggacacagctgccttcaaagacggactgcaaatggatgctggccggtagcttcagttaccagtgattacttggtgtgaatctacctgtgctattaccttagcaaattttaagtctttagtttgggcattaaatgtttcagttacttgtacatacttcacatccttttaatgttttcatggactcgtactgtttactgtttctctcactacttcagtctagcaatgcaaggaacatttaaagtttgcctgggtttggggttttttggcttttttattcttgattctgctactagttgtgcgaccttgggcaaatttgtttcagttccctcatctgtaaaatgggtaataataataattggctcataaggttgtcctgaagattgaataacttgagatatgttcagtgcgtagaacagtgtctggcacataggcaaaagcaatcacaaatgtgggcaattataattgctgagcacctaacttttcccaggtattgtgctactcagtctgtccccgaatctacgtcacacaaaatatcttggcattgagaaataattttgatagaataaaatgaatccttaattcttcttgattaacttggaaatggccaagatgcacacctggactttcggtctcacacaagagttgtttcattacctccctattttaacagtgagcgtcgagctaccagcagctaaaaaggaaatggagatttcgtctttgctcccaaagaactatttaaagctttagtagttgtgtcatctgtaataaaagacgtaatgctgactcaaggagttaatgagaaataagacaacgccttccagtggacaagtagccaataaatgttagtttttcttcgtaccaggaatccaaacattccaggtatgaagccagattaggtggcttcacgactgtggactcgcagtctgcccttgaggaatttcttattgaagaagaaaaagaggggggacacggggcccagacccccagcacccggctttcgagcaggctccacgggtccgggtccgggtccgttttccctttcgccagctggggccccgttcgaacctctcccaactacaacgcggaggctccgacgccccggccccagctttgttttgcctccgggagccgcgcgccaccggggacccgcggggagccgttctcactccgaagctgtctgctcacctgcaaatcggagacagcgccctttcacttacgatccttataaaagacgcttataaaacattttattcagtgttacattaaaaagacgtttatgaaagcaatttataaagccctagtgggagaccgagattggtgttaatgtaactggagtaagggctgctccgattgctgcagaaattcgacattagccttcaccgcacctgcggagcagcgggagccaggtgagcagcaatttcccctcagggacttcctccgcgttctccgcattttctgtcggcggaactgaatcccaacagtagaaaaacgtggctccgcccatcacctttcctttaaaggacgcggggtgaagccccgcccactacggagagcgaaggggactcgccgcagatccgctgtacttgcgtccgctacagtatgtcaatcgcttgccccagcacaggtaatgctaaatatgaggcgtgcggagcggtgcgcggaccggcatcgggagggcgtggccttagggggcgcccctgtggaggaggcacccggaaggtcagggctaccccgtcccgccggtaccgagggcggaga

SEQ ID NO: 11083 - DNA, 2300 bp, Homo sapien
tctttaaaataaaacaataagaatttgctattttctgagccacctgactcgtgggatacatttataacaacaactagcatttatatagtgcttcaaggcgctttgcgcatagtgggtgagaagtggtctactcgtgcagtggctgggcagcacgttgcagacctcagagcttgtctgcacctctaatgatggggcaggcagagagcagcagcgtcctggagaaacttggtccctagtgcttcctttaattttccttatctgatataccagtctagtttggaggttggcacattgacctctttttttcagagcattttctggtgtgccaggcataatagcaaagattttagatgagaaatacacagtatagtaaaatctgtttttgagcccacctgtgttgaaagaatacctgtcgataaaaggctactattcaatgtgtgtatggaggtctctgttgaatgcaaagctatattcaacagccatgtgtcctcctcagtgggtgcaggtggcccctatatgcaggtttcacacggcatagtgtagcagctctgctctgcttttcgtgaaaagggagattcttccactgcgatttgctggggtatacaagaaagctgtttgtttcagaagatgcagcattaggaaaataaccaacactgtccctttaaatccaggccagtgcatgggaccttgttccatcccagaagcctttcttatcagtgagctaggaaactagataagatgagaagttctggcatggtaaacattgctttatagaattggctttattaagaaataataaaacaggatttttaaaattaattatttatattatgtatatttattattttattatggatttaaaacaggaaaccttgccttccgtgcatttagatccagtttcacctaaagatgaaagatatttatttattatgaagagtttttttttccttatcatttaggtgtgctttttttgtttgttttgtttttaagattttactcactgcttgttcccaaatccatagagctatggaaacataagtacattttttttttctccctctctggacacatcctgcaatctggcagtagcattctaactgtagtttctcagtgtctatgatacatttatatatgcatgtgtgtgtatagatgtgtatatattttctttttttttaaagatggggtcttgctctgtcacccaagttggcatgatcatagctcactgcagcctcaagctcctgggcacaagccatcctcctgtctcagcctcccagtaactgggactacagacacatgacgctgtacccagcttgtctatgatagaaaaaaaaagaaaaagattttttgttagtgtttttcagattgatttctctattttggcaattagagtctcccttaaaatgaaaacatcctaagtaaaggagaaaataacaaataactcctcatgtagactaaaagcctataggacctttagaaaagagagataattatctgccttcttttcggaagctgcgttcctaatctttttcttctttcatttgcatgctgggcttggcagtactagacctctttcatcccacattgtaattcctcttgtagataaaagtgattagtagaattgaggactttgttgacaatgcagtgagctgatataggtacatgacctttttgtacaggttactgaggtgtaatttgtaaccaggttctctacttgtgtgtgtgtgtgtatgtgtgtgtgtgtgtcttcacttgggaagactgaaaaaagttggagaaatttgagtctacctaggactgtgtctctgctagaagatggattgtcaaaataatctatttattaatagccctttttcttttttccaagagtggtaaatataacatggtatggggttataacaaaaataagcggctataaaagcctccatgttaattttttctttatttttctgtttgtttatagcacacttcatagctgccacgatatagttttacgaagaagttacttgggaagttggggctttagtatcgttggtggatatgaagagaaccacaccaatcagccttttttcattaaaactattgtcttgggaactcctgcttattatgatggaagattaaagtgagtcttgttctaattaatgatgtgattcatgttgatgacattggacatgatctagaccaggggtcaggggtcagcactaaatccagcccattatctttttgaaaataaagtttcattgcagtgcagctacacttactggtttatgtactctctggctcccacactacaccagcggagt

SEQ ID NO: 11084 - DNA, 2300 bp, Homo sapien
aagcaacagaagaaaatatagacagactggactttaaaactgcaaacttttgtgctacaaagaatacaaccaagcaaatgaaaaaataacccacagaatgggaaaaacatttgcaaattatatatatgacaaatgacttgtgtctagaatatatattcttacaactctaattaaaaagacagaaaacacaacataaagatgaggaaagaatctgaatagacatttctctaaagaagataaataaatggccagttttcccatgaaaagatgctcaggctgggtgtggtggctcacgcctgtaatctcaccactttgggaggccaaggcaggtggatcgcttgagcccaggagtttgagaacagtctgggcaatatggcacaaccttgtctctacaaaaaatacaaaaattagctagctgtggtggtgtgaatctgtagtaatcccagttaggagctgaggtgggaggatcacctgagctccagaggtcaaggctacagtgagctgagatcatgccactgtactccagcctagcatcagagtgagatcctgtctcaaacacaaatcaaaaccacagtaagatactacttcacaaccagtaggatgacaataatgaaaaagacagccaataacaaacactggcaaggatgtggagcagtggaaaccctcattaattgctggtgggaatataaagtggtacaactgtttttggaaaacggtttggtagttcctcaaagagttaaactgattcctcatatagtttccatatgaccagcaattccacttctagagaaatgaaaacagctgttcatacgaaaacttgtataccagtgttcatagcagcattattcacaatagccagaaagtggaaaccactcaaatgtccatcagctgaggaatggatcaatggaatgtggtctacccatacagcaaaatatgatttggccatgaaaaggactgaagtactggcacaaattacaaggatgaaccctgaaaatattatgcaagtaaaagaagctagatataaaagaccatgtatgattccatttacatgaaatgttcagaagaggcaaatctgtagagacagaaagtagattagtagttgcttagggttggggaagggaaatgatgggtatagagggagtgattaaaatgttctcaaaattactgtagtgatgattgcacaactgtgaatatattaaaaccataaaattatgttctttaaatgggtgaattgaatagtatgtgaattatttctcaagctgctattaagtaaaggttatttgtccagttgtagtattggggtaattttatttcctttttgttcttttattgtgttttctaaattttctacaatgagaatgatttgctttaataatctgaaaaactgatgataaattgggagagataaatttctgtagactttgtagcacaaatgtctgcttcctacaaaactaatcctttcctaacctttgatataatcctcattgccattttttattatattacttagcagagcaacagttcttttcttcctgaaacagggaagacattcaaaccgcaagtttcatttcttcatgtgggcccagggatagcttctttgtacatattctgatgtttgccctgaataaactatacagggctgtccttatgtatagaactgtgtaaatataaagcagaatacattaaagatttatttctaagggcaaaggatcaagtgatttttgattggacagaattgtagaaatctctgaaactcttaagaagagaaatgaacctgcccagggcctgtacacagctaaactcagactgatgattcgaacttccaatcatgtcaaggtgcctcaggccacacttttttctatgtattatgacattattttaaaattatggaatgttttctgtgtattgggtttcttctcaatattataaaaattacaaagaaataataaatgccatttattattataccttatctcatcagagttgggggaactaacttttgttgcttagtttataaacaacaagatttgcaggtgaaaactcagtggctcagctcatttttcttgtttcttcatctgaacaggtgatgtgttgctaaatatcaacggcattgatttgaccaatttaagtcacagtgaggcagttgcaatgctgaaagccagtgccgcgtcccctgctgttgcccttaaagcacttgaggtccagattgttgaggaggcgactcagaacgcggaggagcagccgagtactttcagcgaaaatgagtatgatgccagttggtccccatcatgggtcatgtg

SEQ ID NO: 11085 - DNA, 2300 bp, Homo sapien
attttagtgcccaatgtaagcaagaaaaggtgccaagtgttctgaaatgaataatacatgtccctgactactacctccacctcggacactgggtccttcggccagacaagcccatatgcaaagctcgtaatacaacagcccaaagacacatacatttatttttaagtggcctgcgtgctacgtgcctacaatgtacgaaatcccaaaccaatctgaagactaagtgcctacgtaacacctattcttacaggtctccaggcagaaatgctccctaagttcaaattacttcagggtaactagtgggataaaggcatggatcagtttccaaatgagaaaactgggcaagaagcaacccccgccatcaatggctggcatgcagtaggtactttatcagtggctaaatgaataaataatgaaaaaatttcaaagttgatgagagaaacaagatatatggagaatgtaacacacaagtgggccgaattaaaagtgatgttattctactttggttctcatttggcctacttttaccccatgggaaaactcacatgtgggactcggacaagctaaaaagccaaaactttgttattcatggctcaacaaagctttgacaagccaaaaaggataccagattcccgcttccttctttacctgccaaagtccattttctaaagaggtgtgggggtgggaatcaaatctagcaaagtaaataaaattgatctactgagatccaacttcattagtgctgcatcgaagtacatgcaaaagaaatatcaaaacctgtcctgggaagaaggccaatttacaagtaagtactattgccgcaagaatgtgaaattcttaaaggcagttccaataagctggagctcacaagtgttcctcctcctgcaccgccaccgcttttcactcaactttgtttctgatttctgtgattttaaaaagcataatatacacagcaaagcccatgcataagtgtactttagctcctggtacaaacgaacgtctggattcataaacttaacgtaaactgaaatactaaaagaaacactacatgagtcaaaagtccttgtttaaaacgtggcatacagctttgaaaagcgagtgatgtatttcctgaatgatgctttgtgtgcaactgcttccaaatcaagattcatatttttaaattaccccctggaagatgtcaaatctctctcccaccctctccagcctaaagagaaaggtgagaattcacaggcaacaggctggggcggagggaatgatctctccccatccctttccagagaacaaaacccgataaaggcagctagtgccactctcattgccgacaccacacacacacagaggaaatttaaacactcaccccacctctcccttcccttaagaagcaaacgacgccaagctctgcaccacggtggccggaaccagcaaacgctaacagccggaggccgcccgcctcccgggcgcctgcaggcggcgggcaccgggcgccgactctccctcctggaccagacccacacccgagtccacgccagccccgcagcccgggcgagcgaagacagccgcgaaggaccaaggctccggggcgagctgtggcgccgctccggccgcctcccggggcgcggcgctgacccacacccagctgacgcccgcacctgaggcggctgcccgcagccagcgagagggcgcgcagcgaggcgggcagggcaaagttactcactgggaaagcgcggctgcccgggccgcgcacgggctcctggcgccgctgctcggcaccagctcccgctctccgcggcccgctgagggagcggagagcctgcccggctccgctccgccaggaatcgccgccgccgccgccgccgccgcggatttcctggcaaaaagcaaactccggccaagacttcacttctcaaccgcccctgctgccttcccgggggcagcgccaaggccgagcggcccaacccgcacccgggccaatcggaggtagcacagggcgggaggtgggcggaccagagggcggctccacctatccgagagctcgggaggcgggccagaagggacccgtcactcccgggttagagtgagaccactccgccctcgccgcccgcctcccccactcgccccgggctgtccccgccgcccgcctgattcccctgcggaagccccgctggctaggtgtctgcgcgcacccccggccgccgccaagagtggcacagctggggaaggagtgaacatccagaggaatcgcggggcggggtggggggaggccaggagaacaggtggcgcagggaagcagaaacgta

SEQ ID NO: 11086 - DNA, 2300 bp, Homo sapien
tcctgaatgatgctttgtgtgcaactgcttccaaatcaagattcatatttttaaattaccccctggaagatgtcaaatctctctcccaccctctccagcctaaagagaaaggtgagaattcacaggcaacaggctggggcggagggaatgatctctccccatccctttccagagaacaaaacccgataaaggcagctagtgccactctcattgccgacaccacacacacacagaggaaatttaaacactcaccccacctctcccttcccttaagaagcaaacgacgccaagctctgcaccacggtggccggaaccagcaaacgctaacagccggaggccgcccgcctcccgggcgcctgcaggcggcgggcaccgggcgccgactctccctcctggaccagacccacacccgagtccacgccagccccgcagcccgggcgagcgaagacagccgcgaaggaccaaggctccggggcgagctgtggcgccgctccggccgcctcccggggcgcggcgctgacccacacccagctgacgcccgcacctgaggcggctgcccgcagccagcgagagggcgcgcagcgaggcgggcagggcaaagttactcactgggaaagcgcggctgcccgggccgcgcacgggctcctggcgccgctgctcggcaccagctcccgctctccgcggcccgctgagggagcggagagcctgcccggctccgctccgccaggaatcgccgccgccgccgccgccgccgcggatttcctggcaaaaagcaaactccggccaagacttcacttctcaaccgcccctgctgccttcccgggggcagcgccaaggccgagcggcccaacccgcacccgggccaatcggaggtagcacagggcgggaggtgggcggaccagagggcggctccacctatccgagagctcgggaggcgggccagaagggacccgtcactcccgggttagagtgagaccactccgccctcgccgcccgcctcccccactcgccccgggctgtccccgccgcccgcctgattcccctgcggaagccccgctggctaggtgtctgcgcgcacccccggccgccgccaagagtggcacagctggggaaggagtgaacatccagaggaatcgcggggcggggtggggggaggccaggagaacaggtggcgcagggaagcagaaacgtagttgcgctggacagctggagtcgggcagggtcggggccagcggcgaggggacaagaagggccgattcgagaggaagcgcacctgagggagcacagcgaaggccgggacgcagggagctggatggagagcgagcctgggcggcgaaaggttgccgaggcgggggctgggcgcctgggaacaaaggtgagggcgggttccgcaggtgaggaggtttgaggagccactggggagaaagggaaaaggaagtctacagccggagaggacgcgctctgggggtagaaggaatcctaggacggaaaggataaggtgggaaacagttttctcccaaactctcactcccccaaaagagacatttctttcttgccctattttgacccagttgaaaatgcaactgcaagctccccggtgaaacaaataccgccttcaaccttcgtattctgtggtgactcatctcgcacgtgacccccctccctcttcaaggtgtgttgaccgactacagtttaagcctgtcgtcccacaaaaggcccgggagggccggggtcccaggaagggccatcctgggtcaacaccgccccagttgggaagtcgggccgctttcggacttgccactgggaagggaagtgatttgggggcggcaggtaaggccgcgccccttcgccatcacctggggaaaggtaccagagttgagccggggcgcccgcaggcctgtctgggcctcggggtaaggcggcgctggccccgccccctgcccctcccgccgcgagtggcctcgcgtggtcgcccaggtgagccgcggggccgcgagccaccgctcaccccgcgtcggggcgggggctgggggtggagcctcatgccccgccccgcggctgggccctgccgcgccgctgcggctcctcctccctccttccgtcctccgcgccttccgtcggtcggtccttgcttcctgcttcgcctccgcgcctcgcgctatgggacagagcccccgatccgccagcaccacctgaggatccagaaaccgccccagcgatggaagaggatcaggagctggagaggtaacggccgaggaggaggcgggcggagcgggccgcgcccaaggggagcgggtggc

SEQ ID NO: 11087 - DNA, 2300 bp, Homo sapien
gtataaaaatagaggatacagatgatcaatgtgcaggcccaactacggcttccattttgcaagagaaggaaactaggagaatggaaggttcaggagtcaagcagcagggagaaaaagagctcagcgcacagagtggctttaggagcagtctgcacatagaaagaaggtgagccgtagttacagggacagaggcacgagtaccgtcctcaggagcagaggcccggggcgtgatttttacacactgctgttgtaacgggggtgggcagttcggatacttaactctggtctcccaacttgtcttccctccttgatagctagtgtacctctcagcctctcaactgaaacacattcatgtctcctccccacttctctctccatgcttcttctctgcgccccgagtcaggccccggctgccaggccaggcagcgtgcccctcggccacccgctccccttgggcgcggcccgctccgcccgcctcctcctcggccgttacctctccagctcctgatcctcttccatcgctggggcggtttctggatcctcaggtggtgctggcggatcgggggctctgtcccatagcgcgaggcgcggaggcgaagcaggaagcaaggaccgaccgacggaaggcgcggaggacggaaggagggaggaggagccgcagcggcgcggcagggcccagccgcggggcggggcatgaggctccacccccagcccccgccccgacgcggggtgagcggtggctcgcggccccgcggctcacctgggcgaccacgcgaggccactcgcggcgggaggggcagggggcggggccagcgccgccttaccccgaggcccagacaggcctgcgggcgccccggctcaactctggtacctttccccaggtgatggcgaaggggcgcggccttacctgccgcccccaaatcacttcccttcccagtggcaagtccgaaagcggcccgacttcccaactggggcggtgttgacccaggatggcccttcctgggaccccggccctcccgggccttttgtgggacgacaggcttaaactgtagtcggtcaacacaccttgaagagggaggggggtcacgtgcgagatgagtcaccacagaatacgaaggttgaaggcggtatttgtttcaccggggagcttgcagttgcattttcaactgggtcaaaatagggcaagaaagaaatgtctcttttgggggagtgagagtttgggagaaaactgtttcccaccttatcctttccgtcctaggattccttctacccccagagcgcgtcctctccggctgtagacttccttttccctttctccccagtggctcctcaaacctcctcacctgcggaacccgccctcacctttgttcccaggcgcccagcccccgcctcggcaacctttcgccgcccaggctcgctctccatccagctccctgcgtcccggccttcgctgtgctccctcaggtgcgcttcctctcgaatcggcccttcttgtcccctcgccgctggccccgaccctgcccgactccagctgtccagcgcaactacgtttctgcttccctgcgccacctgttctcctggcctccccccaccccgccccgcgattcctctggatgttcactccttccccagctgtgccactcttggcggcggccgggggtgcgcgcagacacctagccagcggggcttccgcaggggaatcaggcgggcggcggggacagcccggggcgagtgggggaggcgggcggcgagggcggagtggtctcactctaacccgggagtgacgggtcccttctggcccgcctcccgagctctcggataggtggagccgccctctggtccgcccacctcccgccctgtgctacctccgattggcccgggtgcgggttgggccgctcggccttggcgctgcccccgggaaggcagcaggggcggttgagaagtgaagtcttggccggagtttgctttttgccaggaaatccgcggcggcggcggcggcggcggcgattcctggcggagcggagccgggcaggctctccgctccctcagcgggccgcggagagcgggagctggtgccgagcagcggcgccaggagcccgtgcgcggcccgggcagccgcgctttcccagtgagtaactttgccctgcccgcctcgctgcgcgccctctcgctggctgcgggcagccgcctcaggtgcgggcgtcagctgggtgtgggtcagcgccgcgccccgggaggcggccggagcggcgccacagctcgccccggagccttggtccttcgcggctgtcttcgctcgc

SEQ ID NO: 11088 - DNA, 2300 bp, Homo sapien
cccttcctccccgggcacgcggggcggctgccagtggagctccacgctggccactcgcgggctcccagctccgggtgcagtgcccgccccttgcacccctgggccccgcccgcccttgcgcccctccagcctgcctctgcccagcggaaagcccctctccccgcccgggtctcgctcttcgcttcctctcagcgacccagcccagctcaaatttcccagagagcaattagaacgggaattaggctgcattgatgcgttccggctggtttgcaggcaccaccctagagtgggggagccttggcgctgagactctgtctcagagggcagccttgccccccactccatgccaagcaaccaagaaaacattgaacccttactcctgctagatgccatgccctccatgcaggttacttctcccattgtcctattcccttttacagaagcagttattatctcgcaaaacaaattatctttgctttttaatcagttataatctgttgctgttgttattgcaaagatgttgccaaggataaaagcccatgcagatgcttcgggtttgggcaatcttattcctgcgcactgcttccccagacccctaagcttccccctccatttctcacaattccattcagggctcagagcaggtgactgcagcgatttggttccaataaaatcgaaagtaaacgtctcctgtgaaaagtcccgggctgtaaattagaaatgtttatgctgatttcccattgtatggaaaaagctcctgggcgaaacagctttgagcccgagaacgatttaaaaagctggagctgtgtacacagctctgagcgtttgaagttgtttaaccattgtgtgaccagaaagaagagtgacgcggcaggaagaagaagccgggtcttggggagagcggaggcgggtcagggtgggcaaaggcagccgatgccaggaatacaaccgcccttcgcgccgttccaaactaagagatggcagcggtttcccagcgcactgctggaagtgtgctccagtagacagggtgtgggcaagatgcgcgggcagacagtccgcactcgccacatgtgctggggtgcgagatctagatctgcgccatctcggctttcattccccattccctgtctctgttcgtaacgctcagagactgtttttcctcttttacatccacggccctgtcatttgaaggaaagggctggttggccagcatctaccgaacaaagactgggcgtcgtaggcagcaccaaaattaagactatttgagaaacttagagaaaaccgagggacagcgatgggtctagggctggataaggaataatgagcccttctcctccctccccacagacgcctccttcacgcgggaacccggtcctccttcttccgacgcagagagagaagcgattccacaggtggaaaatctgagaccggctggagggaggttcgggggtgcacggcactgagctgacagggctgactggagacagcatacttttggggtgtaagggcgataatagaaagaaggggaccaggaccaagtggacagaggatatgagggtgtgcgcccatggggatctgtagaagagaggccgcgggggtgcaaaatcagtaaggtgaacgggctgatggccaatgcaaagccaaaggggagtaagaaataaagagaaaggaaagaatattaaatcgcgggagaatgagaaaataaacccgcaaaagggagaggagggggcgagggcgcctgttacggcgtgggtggggttgacaagaatagagtacattatgcagttcatttagttaacaagtgaaataatgaggaagcgtgcagagtgaatgccaagagaaaaggcacaaaaaccctattgagaggccccggccgctcctggcgtagtccatcacatggcaatagtcctatttaagccgcgccgccggcgcctttcagcaccactagcgctggccagcaccccgcgctctttgggcggtgcccacggcagcagaggctactgtttcagcctaggtctcagccgcgcgttcagcctcctgggcagaggcagctgcgggataccgcggccagggaaagcgcgtggagagccgaaaggtgcggtgggcgcagagggcgggctggctgcggggcgaccgcgcgccggggccatgccgcgctccttcctggtggactcgctagtgctgcgcgaggcgggcgagaagaaggcgcccgagggcagcccgccgccgctcttcccctacgctgtgcccccgccgcacgcgctgcacggtctctcgcctggcgcctgccacgcgcgcaa

SEQ ID NO: 11089 - DNA, 2300 bp, Homo sapien
ggcaggcgaggcagggagcaggggagggagagtggggcgcagactgagtccagagtgggtgtaggggtgcccagggaggaggggaagggggaggaaaaggagggggaggggaaaagtggccgatctttgtcctgagcggagcttgccgtccgctcataaccgcgtcgccaagtcaaccctcggcgactcggcagattatctccaagggtcaacacgccgcggccaggcaaccccctccagcctgccctcctgatcgatgtggtcactcgcggccagggtgatagggtagagttctccgcggccgcagacaatggactcattgacgcgggcgcacagagattaggtgcccgggccccacggcctttcactctctgcccccaccaaaactgcaggtggcacttttccctgaagaaatcaccgaaactctccccgcccgccgccgtgcttcccttggcctgtcttcggtgacagcaagggcatctacaagccagggagccacacatcagagccacacacatgaggccacaggccaggaagccacacacatgagttctcacacatcgaagcaaatgctgagactataccggcctcccgcaagagaaggaatctgcagagaagtccacattcccgactggcttttttgtcttttaataaaaataaagagtcctcagaatagagcactcaatccgcacttaaaacacaaatatttccagtaggaagaaagaaatacattaagattgactctcaaaggtctggatgttggtgcgttgtttaggaaaggcggagcagtgatttttctctggcttggttctttgtggttcaagctctctcttgctgagacgtttctgcaaagctgtctagtttttctaaaacccacggtggcgtttcgagaaacgtcctcatttcgggagtatccagtcagaggctggtcaggccgccaggcctagcggatcatgcccaggcagggggttggacgtcaccgccacccggaggtcatccatccgcgtcagtgggtgcagaaaaagtggccctgtttaagtcaggaccccagaatgcccagaagttactgaatggtttgaagccaagcacagatgttatcatggaaaatgcagcgtttttatttctttttctaaatatgtaactcttcctccacttccccctctcctgcttgccttatttcaattgcaagcagaagagagtgagtgttctctgccggcaaactccgccagggtcccggcccgtagagagtcgtcaagggtctggaacccccgtgccaacacctgcccctgcttcgcagccccaagaggaaggccgcgtctttccccctcgctgtattgggaagctacgttccgggctggccaaatgggccccaattttccaaaacccaaatttgtaatacccttcaattttttaaaaaaaagaatttaaaaaagtctctgtgaatgcttcagaagttaccgtttacaccccagaagtacttgcagcacatccacaagtaaaaacacacaacgaatgccagagtttcgtgtgttttttaaccgacatctttgtggctgtgaacaaacttcataaataaaatagaatcaaatgcttctgacctagagagctgggtctgcaaactttttttttatcgtattccgcaacagttaaataaaaaattaaaaactcaacatgtctccttgtaaactacatcaattaacaaacacactatgtccattatcaaatataatagaaaaaatataggaaaatagaaaatagaaaaatataggaaaatagaaacttttaagccacggtgaaaatgtttctataaatgagtggttctaatgttttcgtgagcgcccattttggggagcaccgccagctgcccgttcaggagtgtgcagcaaactcagctgagagagaaaattggaacaaaagcaggtgctcgcgggtacctgggcctagcctcttagtgcggccagccaggccaatcacggcccccggctgaaccacgtggggccccgcggagcctatggtgcggcggccggcccgccggtccgcgctggctgtgggttccctctgagatcagtgcggagctgtcaaagcgagcaggggtggcgccgggagtgggaacgccacacagtgccaaatccccggctccagctcccgactcccggctcccggctcccggctcccggtgcccaatcccgggccgcagccatgaacggcgaggagcagtactacgcggccacgcagctttacaaggacccatgcgcgttccagcgaggcccggcgccggagttcagcgccagcccccctgc

SEQ ID NO: 11090 - DNA, 2300 bp, Homo sapien
taattgttttaacttcagccggacttctgcccgcgaagtgaaggaatattgttctgggggtcacgttggccagggcagaactctggcagctccagactctacgccctggatcccaaatgccctcagaggtgttgaggggagacacaggggccctagcccagctgcagaaccgacagccctacggaggaggtggtagtggtgcagaaacaagcctctcgtgtctccaagaggcaacaggacgccctggcccaggaggttggagacccacattcactgtttgccgctgcgctcagccaggtcccaatcttttcttttctgtggaaaatactgactgcacccaggctgtggacgctggcgcgggaagttccaccaaagttccggggagaggcttgtcttagagcaaaggcaggggacatttctcctgtgaatgttggctaagccttaaggaattgaaaggcgagtgtgtgtgtgttgggggcgggtttaatttcgcgatggaaccctactgggtttccccccaggtcgagaagaggcgccagaagctgaagcagaggctcaaaccctagtccagggagagttctactccctgggggcatccccgaatctacctggcatcccacgcctgggagagaagcgagacgggccttcaataaacattttgaaaggctctccaaagtttttacattaaaccgacatgtctctgggttcctgccttaggctgcgggcttcgtatagtccctgcgagagggcttcgtgaagtccctgcgagagactgctcagggagagacttcctggggtgcactattcccgggggacctgtgctcagcgcgacgcggcaggggtggaggttgaggatggtgggaaaaggtcaaggtcgccaagcctgggcccttccccaaggcgcagagtgatgcagtttaggtgccagctggacagcgctgctgaagcatttgggggtcaatgtttttcaaaacctctgttgtcattagcattcagattcgtactgccagtgagagcccttttgtcacttcgctcttcccaggggcaggtgggtttgcaatttttgaatttcggctccatcgaagtttcccctagaggaacgcggggatagcagccggccccgcagacggcttccaggggaagagaggggaggtcgtctccttccccgagagtcgagcatgcagcgggttagagggcgccagcaaaggcctggggccaactccagcccgagagtgtcgccctccttgggtccccgaaccctcgccaaggctgctgatttgccttctggttttactttctggcttcttgggtcagcctaagcccaagtcctccagagcagaggtatcaccccttgggttgggatagggaagttactccacctcacaaatcctctttcgggaccctgatgtcgcccatttcctgaggaaggcccagggtgggaaagcaggagctccgagggcctaggaggccagaagagaggtctggaggggaggcagccctggaagaaaactgggtgaggacgaggagccccccacctttgttcgagggactgtcctcccgcctcctaagaaccccgcatttccggagacttcaaggcctttggcccgggctgcgcgagctggataaatttgcagaggcgccgcggcagcttctggcgcccctgtcaactgggtttcgctggaggtggggacgattgcagcgcagttcagccctcgtcctgcctcaggaccttcgccttagcaagaaagtgaactaggaagaagagagtcccgtggaccccaggcaagctggggtccccctccctctcccgcacaaagcccctcctggctgcgcctggggtcagtgtcaggcagggctggccagaccccgcagatgggcgctgaggattttcggggtgggccgggggacgccggctcgagctgcttccccctactcccggctgccagttgaaaggaaaaggcaactatttgcggtgcaggtgtgaccagaagtggctgaggcacggcagcgatgacagtgagtagcggcgacgacacaggccgcgccggaacttgccgctcgcgcggggccgcaaaggacccgggggctaccccgtgcctccggctcccggctccgggaaagaccttctgttctctgccggcgcggagggccgcaggaaccaggcctctcgcctccccaccagctaggcagggagcgcccatctcctgaaaaattacttcctgggaagcggtgcggggagacagcttcaattgctttcggttggtgaaaaacgaattcgcttctcagattgctctcctagc

SEQ ID NO: 11091 - DNA, 2300 bp, Homo sapien
ccggcagcctgggccataaaaaagcaggaagcggccaccgcagggcggagggaatggctgtccctaataaagcgattgttccaaagaatgcccgcattccgaagacataggctggagcctcagcctcggcttccagagctcaggcctgggagcggggatggtatgggggatggaaaggggaattgtgtctccaggaagaggaggaagatgtttgctagatcaaaagttcgaagtgcccaccacttaacctcccacattcccaccccatcaggtctgcggacctcccctactgcccttctctcaatgattcggattttgtaacggggtttgcaatttgcttccggttgtatttctcaggaagtccgatgacactcggctgtccaggccaggcgctggaagtcccccaggaggaccagctcggtctcccacctcttgagtgcacagctccttggcccctgagtaccccaccacccccatttccagccttcttccttacaaacacgaagggtgggaggaaccagaaaacaggggatcccgcagccctaggctagttctgatcgctttcaggtgtctgcagaggcaagttgctggttgtcacctgtaaaatggggaggataaaaacacctcccagattttgttctagatcctagggggatgtgaggctcaagggagataaaggacactggagagcaccctagaaatgacaggatgaaggcgatggtgacaaatatccgagcgaaacgcttgacaatgagaacagacaagtgcaggtctccaggagtgccgcgagcgcccgcgggttctgagagcgctcaaagccgccgagtcaggctgcccagcccgccgggcctcgccgcagtgatcctcattcccgaatctggcagcgctgtcaaaggcttgtattaggaggtgaacggcggccgcaggcccactccacgcggttgctgaaaccgagctgggcgcgcgcgggggccgaatctcgccgcctccgcgctcctgtcggggcagctcccgatcccgggctgcgcggcttcggtccccaagacggccacttccagccctaggccccttggccgcagcgcttcccaaaccaagagagatcctttctcaactcagagcttttcattagcagtcgttaataatggccctgagttgccttatcatctcctggaaatgagaaataaatttcttcggagaacgtttccctttgtaaaggacagagagttttaaagatacaggtatgatgtaagacacataaatacctaggtaagcattagcagaaattctcttttccttatatttaagtataataaacatacaagtgtagctcaatgaattttcacaaactgacattctgtgtaaccagcagcctaagaaactgctttaccaacgatcccctagctcgcctccagttatgcacgccaataaccactagcctaacttctaccacatgcccattacttctgtagtttaaaacttctgattcttgaatgtaaacgtttaacaataaatcgcttgaatttaactcaaatttcaaatgtaagatgaagtcagagatgcagcctgaatctaggatcataatttgtcttgtgcggagggcgagtaatttccttgggcaagaaaataactggaggtgacagttgtttggggctgcagtcgtccgggccaggagcacagggcgggaaggaatggcccatctcttagggctctctgcttgtcacctaccaggttggtcagaaacgttctcatcaaagcaatggttctcttttcttttctctttgggacagaaggagtttcttgaccgccctcttccctgcaaatgcataaacaaccactgctcctgtctccaagctcagattcctaccaagatagccttttctcttcccctctcttttgtaagtctcttgatttcattctttgaacctgtgattggaggttaaagtgcaccaggttggaaggaggaagctcttaacaataaaggtttgaatatttagctgtgtcaggtcgctgccctctcacgagcctccctcccctttatcttttaaaatgcaaattatgtttcgaggggttgtgcgtagagtgcgcgctgcgcctcgacgtctccaaccattggtgtctgtgtcattactaatagagtcttgtaaacactcgttaatcacggaaggccgccggcctggggctccgcacgccagcctgtggcgggtcttccccgcctctgcagcctagtgggaaggaggtgggaggaaagaaggaagaaagggagggagggaggaggcaggccagagggagggaccgcctcg

SEQ ID NO: 11092 - DNA, 2300 bp, Homo sapien
atagaaggtagtgtgttaggtcttggccattggaagctcgcttttctccccataaccagcctgtttcattgctttatctcctcatgtttcacttatttcaggccatcttccttcacttctgtttctgacctaaggtagacacaacactctttaaaaaaatttttaaacccccagcagctacacaaaaacttaaaaaatttaaaattgaggtaaaatacacatacataaaatttaccatcttaactttttgtttttgtttttgtttttgagacagagtctcactctgtcacccaggctggagtgcagtggtgtgatctcagctcactgcagcctctgcctcccgggttccagtgattctcctgcctcaacctcccaggtagctgggattacaggcatgcgccactacgcctggctaattgttgcatttttgtagagatggggtttcaccatgttggctaggctggtctcgaactgctgacctcaggtgatctgcccacctcggcctcccaaagtgctaggattacaggcatgagccaccgcacccagccttagccatttttaagtgtacagtttagtagcgttaagtacattcacattgttgtgcaaccagtctccagaactctgctcatcttgcaaaactgaaactctgtatccattaaacactggctccccatttccccctgcccccagcccatggtaaccaccatttaactttctgtctttatgaatttgtaatgggatacagtattgtattttttgggactagcttatttcacttagcataatgtcaagattcatccatattttagctgtatcagaatttccctcctctttaaagctgaaaaatactcagtcgtatgtatatactgcatttttgtttatcattcatctgttgtggacatgggttacttctgccttttgactactgtgaataatgctgctttcaacacgggtgtacagacatctcttcaagaccctgctttcaattcttttggctacatggccagaaatggaattgttggaccgtattttttttaattttttgagaaacctctatagtgttttccatagtggctgcaccatggtagacacttctaaagtttctgccataccctaggggaaagaattattgtactgtagacaacatctaaggaaaagaactgtatggccaagagtaaacagtcaattttcatgctttattagaaaataattaaaataattaagagcgtggaattcctagaattgggagagacattatgaaccatttggtccatccctttcctttacgatgagtaaacagaggtttgtggaggtcaaacggctagttaagtaagggaagaaccagaactggcatccagagctttccaatcctcaacttattgcaaagaaaataataataattttcaactcgaaaaattatgcgatgaagaacaagaactattgagcggatgattcgcaacatcctctgggatgtattttctgtgtgttttgttttgaaggctgtttgttaacctccctaattgccttggttgacattgaaaccctgcctgtttttcttgatcccgccgctgactgggtcctgagcatcctaggagatggaggcagagacaaaggaaatcagtccacaattaagaatggaatggttcttaatggaatgctcgcctgtgcgctggcgggagttgccagcgtgccgagcggattcagcgcctttctcagggcctcaaagatcccagcgcactaggagggtggtttgtggctccctgcagtccccacgccccggatccaaacgacagagttcggggactcacaggggcagcaaggcggcagagccgcggagccagtgcaacttctccggcgggaccgcgcccaatcttccccgccgcagtcggggagccccgggggccgccgagcacaggctgcggaccgcggcgggcacgtgggctcggctgcagcgctgcgccaggcaccggctgctcggctctgcccaacctctccgctcccgcctcggtccctgcctctggggagagggttcctccccccttccactttgcaccagtccgagggaatttgcggtcggtgacgcgcatccttaagagagccacctgcagcgcgaggcgcgccgctccaggcggcatcgcagggctgggccggcgcggcctggggaccccgggctccggaggccatgccggcgttggcgcgcgacggcggccagctgccgctgctcggtaaggccccgctcgctcgctcgcagcccctcgcggtccctcagcccccaccccgcagtgtggacccgggcgcgc

SEQ ID NO: 11093 - DNA, 2300 bp, Homo sapien
gcacggtggctcacgcctgtaatcccaacactttgggaggccgaggcgggtggatcacgaggtcaggagattgagaccatcctggctaacaatggtgaaaccctgactctactaaatatacaaaaaattagccgggcgtagtggtgggcgcctgtattccaagctattcgggaggctgaggcaagagaatggtgtgaacccagggggcgaagcttgcagtgagccgagatcacgccactgcattccagcctgggtgacagagcgagactctgtctcaaaaaaaaaattatttagtctttattatcattttctataacagtttattatggaaaattttaaactttgataaaagtagagaggatagtgtcatccctgtcacccagcttcaacaatgattgatttttcccagtcttattttgtctgtcctccaattttagttctgttttgctgaaatattttaaacatatcctggacattagttaccatgactttgaattatttcatagtagtttttctatggatttacttaatcattcttctgtcgttagacacgttaacctacaaggaagaagctgaggcaaaattaatataaacagagtcagccaggcatagtggccctgtaatcccaacacttatagaggctgagatgagaggatcacttgagggcaggagttcgagaccagcctgaggatcataacaaaatcgtctctacaaaaacaaaagaagagagtttatttgggccagacttgagggttgcaacccaggagcatagattcaagttgccctcaatatatcctctgattagcagtagtggatttttaaaggtaaaatggggggacagggagtgaaagtgtgtcaggaattctcattggcttacagaaataacattgattcagctatacattgttaagctgtagggtgatggttacagtgtccaatgtggcattattaggttaatttatagctacttacggcaatagcaggcagtttcaagagatgagcacatagctcaaagtggggagtaggctgtgactgctgtctcattttaatacctctctgggcctgatattaaaagggtttgcattcttcggataataaatagttcttttttttcccatttcacattgtttcaaatttcttgttaaagatgaactttttatatgtaaatatttaggtgtttctgatgatactattcagccatatcctgaagttgtaatcaccaaaagatatgaaccattaaaataaactttttgtaattataaatgcagtacattttcgttatggatgttttgggaaataaattttaaaaactaagaagaaaataaaaattacctcagattgttttccaaagagacccaacatcccttctatccacatttttgtagtttgcttcttactggggttgaagggggtttctcaatgactgcctggagaagagcaagcctacttgcggcccatcttattgttaaactagcagattagaaaatagctgtatgctaagcacttactaggaagtagcatctaagacacagtgtcccgttgattgccctaatagttctacagtccttcagtatcatcctaccctaaactctaaagagaactatcagtattcctgaatgccatcctattgctacctctgcagatttttttccccctgaattttgagttagtgtgagtctgctggtttgtttcaaaagatgtgttttgagaaacagtcttgagaaaattgcttctgtttaccatccagtgattcacaggagaaattgttgtccttttactgagttgaagaaagaaaacttgatgaagaaactggaaatgcaagtggtagaaacttaatcatattgtgcctgggggctatttggtgactcagaaaataaattatttctgtgggaaataattagtcagcttgagcactgtttaacatatttctggagccaacccaattttatttgatcttacctgttatgaactggtaaataaaaataagtgtgacagatttgagactttacaacttatttaggaacacagaagtgaaatcaatgtttcatcctctgaaataattttaaatacttgaattttccttctctttcagttccaggaatggatggaggtgctttaactgatacaagtctcacagattcctattttagcaccagctttattggagtcaatggatttggaagccctgtagaaacaaaatatcccctgatgcaggtatccttagtataaattcatattgcactatgaagtttattctagggccagaggacatatagagtcttcatttattcctacatttg

SEQ ID NO: 11094 - DNA, 2300 bp, Homo sapien
aagaattgtagttctgttgtattacttaatgtcataatagtaaacaaatttactcatctttggttacttggccagtttattttggaaagtcttagagactagctttaggaaaatctgtctaaatgcatttcattttagacaagtagggagtttttatccattgataatagtctaatataatttttgctgtatggattaacctttaattaactgtacaatatagagttagattaaaaacagctctggaatagtttttaaaaaataaaataaaaggtttatataaatatagtaatttggcttcatattttttttaaggagtttgggtttttttaaagtttcttttatacacatttaagacataactcgagaattcctatcctattttaatctcaatgcagtagacattgtgttatagtaagtaggagtactagattgggaatttggagagttgagtttgagtcttggctttgctgttgactttgcatgtatgtcctgtggtgtttatagcctgatttacctcacctacctactttagttgctcagaaaaccagaaataattatgttgaggctcttcagaaagtacagagggctatccaaagaaaagaaaagtattacctcagttctctgcttatttttgttcacctacatgttttcagaaaacatgttggtatcttatgaattattagaaattgaaactcatatccctgttaatcataattttgtgactagggcatttttggtagcccttttcttatattgtgaggtggcatattatttcagtggtgaaggtttttaggcattcaccaaatagccagaaaacagttcctggataagcttatttttttcaggaagggtaactgttgctctaaatacccttttcagtctgctcagaactgatcacctccattaagcctttgattaacgctacctggttttaattaatttgcatttcatcagcatttatgcatgtagtttgtagtgtattagtttatatttgggtttttttaagttattttatgtcttttacatgtgacctggtctttttttctcagctagcttggaatctcctgaagggtaaagacaattgtcctttccctttcttcacaataaactcataatagagggcgctttgcacataatgtttcttactggttgtggttgttccactggaacatagtggttgttccactagaacataatggtatcaattggcctaattctaaatagtatgcatctgtagaaattttcagagtatgcctgtttagagttaatgacaaaaaggcatcaaaacaacagactgcttgatactaaaaatatggcacttaagctgctatgtatttcaacttttttttttttgctttttcaaacaattttgttaattatatttggctgaatgaaatctagtagctcttcattagataatttgaatttttaatactgtaatatatttggggaatgtgctatttgtattgttaatgattcttaataaaaaaggaattatgccttttataaaagaaaaacttttataaaaggcataattttataaagagccacaattctgttacttcccactcttccattaatttattaaatttttggtcactcttgctattaaatttcctgatgtaaaccttgatatggaggagactattcttgcagtaaatctgctaacatatttggaaataagtacatttgaaaaaagaaactttacatttgctttaatcagagctttttctacaacaaaacaagataaaattatttccttcatctttgcacttacgatcccaaagatgatgtttcttccaaatgaatgtttgcattttattttccagacttgttctctaaaaccaattattgctccattaagaaacatttttacatcttcttcaggaatgtcgttgtctgctgggtcttcccctcttcattcccccaagattactccacatacttctcctgctcccagaagaagaagtcacactccaaatccagcaagttacatggtgccttctagtgcctctacatctgttaataatcctgtttctcagactccgtcttctggtcaggtgatccaaaaggaaactgttggtgggacgacttacttctatacagacacaactccagcacctttgactggaatggtatgtctacattaaagaggaaattttagtactctcttgtaacaggaccttcttagttgtgaggcggtctaccccctcctgcagctttttattgtgatgcaaaaaagtatttcattttctaacttagatgagaagtctagtctcttcttctcaactcttcaa

SEQ ID NO: 11095 - DNA, 2300 bp, Homo sapien
agtccagttgaaagaatgaaagacaagaagctggaagctgatttagtaactttattgtagtttgcttggaaggtaaatgtattattgtatccttctgttcacttaaactgctgacctagagtaggtttgaataacactttgtttagtttggccacaaaatgcctgtgaaaggggaaattctttgggcagccagggcaatatcacttccttatctcccagtacccaaacacctttagtttctccttccttccttccagttgctttcaaaaagtggcgatgaactgcttgtatagttgccatttagtatccaagggggattgattcccggacgcccacagatagcaaaattcctgggtgctcaagtccctgatatagaatgacatagtatttgcatagatcttatacacatcctcctgtatactttaaattatctctagattacttataatacctaatgcagtataagtgctttgtgaatagttgttataatgtatttttaatttgtattacttctcatttgttgtattgtcatttttttcccctgaatatttcctacccatggttggtcgaatccttgaatacagaacccagggatacagaaggctgactatgtgacatttcttccaaagagctacttttatcttctcaatggagcttaaattttactgtatctgaagaaatgttttctttctcattagattttttttttttttgagacagagtcttcccctgtcccccaggctggagtgcagtggcacgatctcggctcactgcagcctccacttcccagtttcaagcgattctcctgcctcagtctcctgagtagctgggattataggtgcctgccaccaagcctggctaatttgtgttttttttgttgtttttttttttgagatggagtctcggctctgtcaccccagctggaatgcgttagttcaatcttggtgcactgcaacctccacctccgggttcaaatgattctcctgcctcaacctcccgagtaactgggagtacaggtgcatgccaccacacccggctaattttttgtatttttagtagagacaggtttcaccatgttagccaggataatttttgtatttttagtagagatggagttttaccatgttggccaggctggctcattagatttttaattgattactgaaatattatgtttatttttatttttttaattttttattttatttatttatttatttattgagacggggtttcattcttgttgcctaggctggagtacaatggcacaatctccactcaccacaacctctgcctccctggttcaagtgattctcctgcctcagcctcctgagtagctgggattacaggcttgcgccaccatgccccactaattttgtattttcagtagagaccaggtttctccattttggtcaggctggtctcgaactcccaacctcaggtgatctgcccacctcagcctcccagagtgctgggattacagttgtgagccactgcgcctggccgaaatattatttttaatatgaattctttcagaaagtattctctaacagctattctctgaggtttttacttcaatattatttaaagatttaaaatgtattaaaatttattgctatcatgtaaagattaaaattttatcaaaacaataataaagcttattgattatgaaaaattagtcaggctgggtgtggtggctcacacctgtaatcccagcactttgggaggccgaggcaggtggatcacctgaggtcaggagttcaagaccagcctggccaacatggtgaaaccctgtctctacaaaaatacaaaaattagctgggcatgatggtgggtacctgtaatcccagctacgtgaggctgaggcaggagaatcacttgaacccgggaggcagagcttgtagtgagccgagattgcgccactgaactccagcctgggcaacagagcaagactccatctgaaaaaaagaaagaaaaatgagtgattacatttacccccttcctacctttttaggtgtttccaaactatcatatttatcctccaactgcacctcacgttgcttatatgcaaccgaaagcaaacgcaccttccttcttcatggctgatgaactccgacaggtatgctttcagaattcatagtaggaatacttaatgtctcctgtgctttagtgaacaggggaaagaacagagctcttttcaaatcatattatttaatcaaatatgctctagtaaagcacatcgaatttagaagttttaattggtattttttttaaggaaacctgtcttttaaaaaaatttc

SEQ ID NO: 11096 - DNA, 2300 bp, Homo sapien
gccttagtttgcaaatacctaggatgcctcaaataatttcaggttataatctctaaattttcctttttaaaaaagtggggatagaggacaaaaataatcagccatatgttaataattattgaaactgggtgatgatacatggggattcattatattactattctattataaatgtttgaaattttctttattaaaaaaatgaataaacaaaaaagccatactttaataataaacacaaactaaagtttatggagtaattaaaccatgtatcgggccctttcaaactgcttgatgtgaattaatttttttaattctcccaataactctataaattagataccattattagtcccattttagagttacaaaactgagccacagagataaaataacttgccaaagtcacatagcctgtaataacattaaatatgattagcagggtacacatatgtccatacttacggatgaattgctaagatatagtttattcacatgggtatagctattcatttatccacaaaaatgatgactactatatgccaaatgcaggatactttgaatgaggtgaacaaaattcccatcttctggagcttacaccctaatgggaagaaagagtaaataaacataaaaaccagtgagatattttcaggtagtgataagacctatgaagaaaataagagaattacaagcagaagagtgaaggagtgagtaggaggctgctttcatgagaaagggcagagaatggctttacgtatagaataagcggcagtagatgattgagaatctttgtgttctaacaggtagcccttgaaatgtgtagtattttctgccactgttctaatgatagaagaaatttaactggttccttctgctgcgtgttactgcatttctcagaaatgaatatgtcatgataccttgtaaattaagttttagagcagaggacagcttcttaaaaaggctcattcagtttagcaaaattgaaaacccagttttagttctgaaaattaatctttgcaaaacaacaggaaaagctccccaccccacacctacccccttttagtcctctcaaaaaagtttctaaaaaccttttcttttttggccgggtgcagtggctcacacctgtaatcccagtgctttgggaggccaaggcaggtggatcacaaggtcaagagattgagaccatcctggccaacatggtgaaaccctgtctctattaaaaatagaaaaaaattatctgggcttggtggcgcacgcctgtagtcccagttattcacgaggctaaggcaggagaattgcttgaacccaggaggcagaggttgcagtgagccgagatcacgccactgcactccagcctggcaatagaacgagactctgtcaccaaaaaaaaaaattctttctattaatttatttttgttttttgtttgtttccttttttttgagatggagtttcactttgttgcccaggctggagtgcagtggtgccatctcagctcactgcagcctctgtctcctgggttcaagctattctcctgcctcagcctcctgagtagctgggactacaggtgcccgccaccatgcccagctaattttgtatttttagtagagacggggtttcaccgtgttggccaggctggtcttaaagtgatccacctgcctcggcctcccaaagtgctgggattacaagtgtgaaccactgcacctggcctgtaacaatcttttcatctagcactattgtaaagaagggtttgagaatggaaatgggtaagtgcagtcctacttcacttttctttctcatttccatagtagtgaaaatgtagagaagagacatgtttactgtttctccattggctgttacagttttccagaggaatgaaatgtaatatttaagaatgaacttgacttgcatgaattaaaatgttttcaaaattttgtgtgctaagatgacggcagccaaaacagctatgtttgggttatcttgttttttaaattgcatgttggacatccaagtaattcctcttttatcttgggtaggtatttgttgactgaccaaaacaggatgcgaagtgtaaatgacatcatgcccatgattggtgctcgattttatactcaattggatgctgctcaaatgagaaatgatgtcatagaggaagaccttgcaaaggtaaagagtgtaaattttttttttttttttttttttttgagacagagtcttgctttgtcacccaggctggagtgcagtggtgctatctcggcttactgtaacctctgcctcctgggttcaagcgagtctcctgcctcag

SEQ ID NO: 11097 - DNA, 2300 bp, Homo sapien
acaaaaaggctgttttctctcggatctccaaatttaaaagcacaaggaatgattgtaccacacaaagtaatgtaaaacattaaaggactcattaaaaagtaacagttgtctcatatcatcttgatttattgtcactgttgctaactttcaggctcggaggagatgctcctcccaaaatgagttcggagatgatagcagtaataatgagacccccgggccccagctctgggccccccattcaggccgagggggctgctccggggggccgacttggtgcacgtttggatttggaggatccctgcactgccttctctgtgtttgttgctcttgctgttttctcctgcctgataaacaacaacttgggatgatcctttccttccattttgatgccaacctctttttatttttaagtgttgaagctgcacaaactgaataatttaaacaaatgctggtttctgccaaagatggacacgaataagttaattttccagctcagaatgagtacagttgaatttgagactctgtcggacttctgcctggttttatttgggactatttcatctgctcttgatttgtaaatagcacctggatagcaagttataatgcttatttatttgaaaatgctttttttttttttacgttaagcacatttatcttgaactggagcttctaaaatgggccccaggggtgcaagatgttggtgtaattcagagatagtaaaggtttatcgcagtgtgaattataagagtccatccaaatcaacgtcccctccctcctctcatgcgatccaggtaattatgcagttagtgccacagtagactagcctagcaaagggtttgctccttgctgtctctgactgcaccacacagctattgatggcagctgaaagaaagtggatcatgccttaattttaaatattcctgtcctctggttattattttaaggaacttcatcatgttaaaatgacagcattcaaaggtgtaccacaatcaatttatcaaggaaataaaggctattgtaaccagagatttaatgcattcttctaaatgtaaatttaaaatttgccctttaaaaaagtccactttccccatatgcaaatgttaataggatttttatggggattaagaagcggcaaaactacagaagcagaattcaaagtaatttaaaaaatacacaccagttttaaatcaagagaagttgtaatctcttgttttaagcttgcgtttgagggaaaatgactttttcaccaatttaatatgcattgttctgttgtttttatttatgattgatcattatatgtgacttgcataaactatttaaaaaaaaaaactataatgaccaaaatagccatggctgagaaacacagtggctgggcagttcaataggaggtgacaatatgacaacttctcaagcttgggaactcaccagactgtttcctcctttaggtaacagattctgtcccacggctaaacttgtctttcacgtgggaattgcttttgtcaaacgtgaaagagtaaacaatagcatttccccagaatgccagttttatggagccccaaatgctctgaaaacaattagtaacctggaagttgtcagcccaaaggaaagaaaaatcaattgtatcttgaaattttacctatggctctttggcctggcttctttgttcattataagttagtgtgttccttcaggaaacaatgccttaataccatagaacatgggggccttaatagttgctaacattaaaaaagcaaacagaatgattgagggatccttatgaaaacaaaatggtgaattggacatgcagaacctaccatttccttcccctgtttgcaatttttgtggggaggggaggatgttagtatttacaaaagatgattttaagaacttccaagagatgagtttaagaattccatagagtattagttgttcactgtgtaattaatccttccggagagtctttttttttttttttaaagaaacttttgggtgggttttgttttttattagttaccctaggggtatgttaccctggggtatgaagggaggtgaagataacggaggggggagaaaaaaaaaaggagaaaaaaggagcctaaaatggggaataattgaaatggaacagggggtgtgaggctggttcctcagtccccattccaaacggaggatagaagctgtgtatttatgtgacctggcagatctctggggccataacactgaaaagtgaaagaacctggtgggcagctatctttggctactgataaccagcagaaatgtctgttaattctgattttctcaat

SEQ ID NO: 11098 - DNA, 2300 bp, Homo sapien
ttgagcaacatgttaatatcattgattagcatcttagattataaagattgtttcagctgtccatcaaatacctgttctggctttacagacacaatgtagattcattgctggcagcaggtttggaaagtgttgtctctttatgagttaaaaatatcaaaatggcatttgaaaaaatgtattagcaaattaaacctttgtacatggtactatggaccactttcccccagagtcaaatgtgtgtctctcctgagaagccctccttgggttttccctgccaataaatgtgcctttacttctctgagctgatggaggactaaacacccctccagcactggaatgccggtcctgcagccacttcaagtgtccaccttcttatcacagtccaagccctttagaaggcaaagatgatggctctccatcagtgttttcagccctaacccaatgcctggcccctgttgaatgctgcagaaggacaatgctgacagcttctccttgaaagagggtgtgggagtgacaagcagctctcaggtgagaccaacagacactgtggctccgcacgtatgtcccaggctgtgttctgggctgggggaccagcaaggagaaggatcagctgtccgcttccagctgttctgagggatgatgctgtgggttttagaggaggcaggggtgcgggaggcagagaaaggcgccaggaagagtggtgaggagaactggaaaaacagaaagcgctggtgaagccagcaggcaagcaatgactccggcagtcttccttgcctctgaagcagaagggatccagggacagttagtggctcaggtcctgcggctccaggtgcccagacgtgcatttcctgtgtggagtggccggggcctctccttggtgtgcagcccagaaatgtggcaactttgggttacccaaccttcctaggcggggaggtagtccagtccttcaggaagagtctctggctccgttcaagagccatcacagtcccttgtattacatccctctgacgggttccaataggactatttttcaaatctgcggtatttacagagacaagactgggctgctccgtgcagccaggacgacttcagcctttgaggtaatggagacataattgaggaacaacgtggaattagtgtcatagcaaatgatctagggcctcaagttaatttcagccggttgtggtcagagtcactcatcttgagtagcaagctgccaccagaaagatttctttttcgagcatttagggaataaagttcaagtgccctgcgcttccaagttgcaggagcagtttcacgcctcagctttttaaaggtatcataatgttattccttgttttgcttctaggaagcagaagactgaggaaatgacttgggcgggtgcatcaatgcggccgaaaaagacacggacacgctcccctgggacctgagctggttcgcagtcttcccaaaggtgccaagcaagcgtcagttcccctcaggcgctccaggttcagtgccttgtgccgagggtctccggtgccttcctagacttctcgggacagtctgaaggggtcaggagcggcgggacagcgcgggaagagcaggcaaggggagacagccggactgcgcctcagtcctccgtgccaagaacaccgtcgcggaggcgcggccagcttcccttggatcggactttccgcccctagggccaggcggcggagcttcagccttgtcccttccccagtttcgggcggcccccagagctgagtaagccgggtggagggagtctgcaaggatttcctgagcgcgatgggcaggaggaggggcaagggcaagagggcgcggagcaaagaccctgaacctgccggggccgcgctcccgggcccgcgtcgccagcacctccccacgcgcgctcggccccgggccacccgccctcgtcggcccccgcccctctccgtagccgcagggaagcgagcctgggaggaagaagagggtaggtggggaggcggatgaggggtgggggaccccttgacgtcaccagaaggaggtgccggggtaggaagtgggctggggaaaggttataaatcgcccccgccctcggctgctcttcatcgaggtccgcgggaggctcggagcgcgccaggcggacactcctctcggctcctccccggcagcggcggcggctcggagcgggctccggggctcgggtgcagcggccagcgggcgcctggcggcgaggattacccggggaagtggttgtctcctggctggagccgcgagacgggcgctcagggcgcggggccggcggcggcgaacgagag

SEQ ID NO: 11099 - DNA, 2300 bp, Homo sapien
agataacaacacgacttttcacagatctcttgcctttacatgttcctcttccgtgaatgctgttttctcctgctcccaacaactttctggtttagcccctttctctatcaagcatttatcacactgcattttattattttattattattatttgagatggagtcttgctgtgtcacctaggctggagtgcagtggcgtgatctctgctcactgcaacctctacctctcaggttcaagcgactctcgtgcctcagtctcctgaatagctgggactacaagcatgcaccatgatgtctggctaatttttttttttgtatctttagtagagatgggcttttgccatgttggccaggctggtgtcgaactactgacctcaagtgatctgcctgcttccagctcccaaagtgctaggattacaggtgtgagccactgcacccagcccatgctgcattttaaatatctgtttgcatgtctatttccccaggaaaatatataagcatctcaggtacagggaattgctcttttcttctttatagctccagaatctagtaccaagcaaatgttcaatacatattcattgaactgtgagcaatcagcaaatgttaaaatgatttttaagaaaagattcgcagttttacaatttctcaggtggaattgacggaaagaaaaaaagatgcaaacgaaacactccaactcaaatctcaggattaaacatggctattgtgaaggaccagaagacacctaaaggacagcatggcagaacacataacatctggaacttcaaagttgtatgaccatggcagtggatatacataacatatatggccttatcattttcctctctcaaatccttcgatggctttttaaagacaaagcctcatccttaatcttgcctacaaaggctgcataaaaaacctgtagctaggtcccatgatgcacgcctgtagttcccattactcagccggctgcagcaggagaatcgcttgagcccaggagttcaacgcagacctgggcaacatagctaaaccctatcattatttagaacaaacaaacaaaaacaacaacaaaaaccacttgcctccatctacttacaacctcatctcacagtactctccactttactttctgaactttagccagacttaggccttctttccagttccgtttttgcacaagcagatctgcacgtaatgttgttttaaatatcctactaccccaaactagttcgctcttatcttttagctgtcagtccaaagattccctaagatgtctccatcctgtggcagcagactataaggccgttttattacattatatttgaacaatacagaatagtgtaatgagcatggattctagactcataaatatgtccttaggcatatttatttaagcccttcatgtctcggtttcttcacctgtaaattgtacttgtaaggttattgaaaagattaaaagagataaaggatgtaagcacttagaactgtgttgataacgcaattcaaagggcccaacatatgtcggtcatgatcacatttacttaatttgtagtcactatcgtcccctctctcccctctagcctccggagtacccctgctcctctagcccagaggccacaccggcctggtccttttttgtattcctagcctcagcacagggttcggaacataccaggccttcaatattatgttttttaaaaatgacaaaagccttgtgtcccaattttgctttattagccgaacgatctcaagcaaatcactcaaaccacctacgcctcgtttacccttctgtgaaatgtaatagctacctcagagaggttttgtgttaaataaggcgatgtacctacaaaagcacactgcacatcttaaaatgccgtacaaaccgtagatgtttattaataaaccggagtccgtgtcttccctcccctcaggcacgtctcgtcccgacccctccctcctcccagcccacacccttactgcgcccttggccctgggtcccttgggattgcaagcgtgggagcctcggccccgcgcagctccctccggcgtcccgcgccctccttccttcctcgccaggacggacgcacttccggcggatgtgggggccagccctcggaaacggaagtgagcggcggggtcgactgacggtaacggggcagagaggctgttcgcagagctgcggaagatggtgagtgggtacccgggcggctggagttccacgcgggctcgggaccgtggctcggcagaaacaggcagtcgcctcccaacccgtccccggtggcggcggcggcggcagcgtggggc

SEQ ID NO: 11100 - DNA, 2300 bp, Homo sapien
ggaggatcacttgagaccaggagttcaaaagcagtgtgggcaacagagggaggctctatctctacgaaaaataaacataaaaataaaaaagtcatatcatactgttaaatatagtaatattttaaaatgtttacattttggcatttcttattttgaattacggtaactgtgaattgtgacttcattattctaggatacttactttgttcttaactgcaaactaaacaatcttttggatgatgtcaacatttctataactaaatgtattcgcatccttcattattatttaaattggccattttgtgaaaatattaggcactttaaataatcagaggagtggggaaatactgccgaagttttcagttggctctcattatttctattatcttaaataagaaaggtaagaaagtggaattctggtaattattttgcaatctctgcgctctgcaccactgtgaactcatagctgaagctgccttggactattttacctgggcatcacccatatactccttgttattataaattgggagacagtaaaacagacttgatttttgaggtctattgcattaaaaaaaaacagaatttagaagatgaactcagttgtacttatcctttaatcctgttttatctctggcaactattaaacaagtcgaactgctcagagaagttgggcaataagctaaagctacttcataatagtatggttccatcagaacagatggtgcagtgtctgacctatttcccatcaagaatagattaaaactcttacataatagaactagtactgtgcagtctgttttccatagcactattcctggctgcagaaagagatcagaaataaaagaaaataatgtagttagacaagtagaagaacatccttccaattaaactgacttaatgtattatcataaatcatggaggcagtaagtctgcatgctacttgatgactggtaaatgggatcctgaattaagctttgattcattcatttgacaaatatttattaaatgtctgccatgcacccggacagctgagccctagggatacagctgtgagcaaggcagatgtacaaggcagatcgacaaagctttcattttagtcaaaagaagacacataagtgagcacacgatattttgcagagatagacgtatgttttatgaatgtttgtcctatcattcaatgaataatttgaagcaatatatgagaatatgtacaataaaatgaaaaagtttaaatagataaaaatcaatacacagtctaaaagatgaagaccatggggaaaattagaatatacacataagccatatctaactttgaaagataaccctcaagcttggccatttccttcctatcagtccaagcaaacacaattatttacatgatttgtattgtcagtaagaaaaatgcattgcagtttttcatggaaaagtaaacttggcaaagtagggaacaagcatagtgacttgttgacaaaatctgcagaaagcagaagctacatatataggaactgagaccaagaaagccaggtcaatctgactgaaaatggtcatgaaattttatatctgatgatgagcaatttgacaaagaggaagaaaagcacatgaagatggccagcctgtcttttggaagtttaactcttcagttgacatggtcttggattccagacaaaactaaacataggtagaatactgtctgtttctctctgattgtgagcttgcactgaccatgcagacttcatgaacaatgctgagtggcctacccttgaccaactttggtgtatagcaagtgtgaccatagcagaatccccactcttcatcttgtaaggcaccttagggcagaggcagttgcaagcaataaggtggaaacatatgttttaaagaatcacttaacattaaactgtggcataaaccttcactagagcacaagatggttaatttgatgagtcaaacatgcagaatctagtagtgatgggattttttggtgactttgaagagggataaaattccagttgcagaatgtataagaatctcctctctttgtctgcagctgtcacttgccagactgaggaacagataagaaggttttctttacctttcaaaaggctcttgcaggaagcattgcttgttaggagccatcctgtgctttcaggtgtcacagattagcatggggttggagggtgggagacagcatcctgaagagcaggggtaggtgtggctttgcctggggctgtggcagagaggagagacatgcagttatcaaaagagtcagctgcactgtctttttagctttgccctgtgga

SEQ ID NO: 11101 - DNA, 2300 bp, Homo sapien
ggtccagccagcttggtggcttctgcaaccatacagggggcaagtgttggcccacctccagcctggcccagctgctgagagccccctactgcccacagcagtggtctcatgtcaaagatttttgccgaattttcaaattgactttttcatttattgtttcttaattggattaatattcaagagaacctactactctagatcccttcccttaaagttggtgctcttagacctctgggaaccagaaaccacccctaccctcacctgccacccacgctggagtggtggcctactctctgtttgctccttaggacaaaggaacatttttgtttcccaggaggcaccaccatcgccttcagtgattcattcaatgactaaaaacggtttacatctgttttttaaatcagcttagcatttcccagtatacaaatggcacacactttttatattgactttggaaaatacagagcaatggcaagcaaaaaatgttttaagatcatgcaaaatttcttccatcaagtaactagtgtaatgattgacacatcttccaatctgtgtgtgtatgtcatctgtcattgtcattttggtccttggaagttgagtttatcttactcctcaggtcatgacatactaccacctttatttactttttatttttatttatttgagatggagtctcactgtgtcacccaggctggagtgcaatggcacaatctcagctcattgcaacctctgcctcccaggttcaagcaattcttctgcctcagcctcccaagtagcggagactacaggcgtacgccaccacgcctggctaatttttgtatttttagtagagacagggttttgccatgttggccaggctggtctcaaactcctgacctcaagtgatccgcccaccttggccccccaaagtgctaggattacaggcgtgagccaccgtgcctggcctagtttttttaaatttatttttagagacagggtctcgctatgttgcccaggctggtctcaaattcctgggcacaagtgatgctcccacctcggcctcccacagtgctgggattataagcgtaagccaccacactcagccacggtatgctaccatctgtagacagtgtaagtctcctctttcaattttatcttattttaaattcttttatttagtaaataaaggaagatgtttctcactaatctatctgtgaagacataggtaaaaaaaaaaaataagggcaacagccaagctctccctaaataaaggttttttttttttttttttgtattttttggtagagacagagttttaccatgttggccaagctggtctcaaactcctgacctcaagtgatcctcctgcctcagcctcccaaaatatgaggattacaggcatgagccaccacgcccgaccaaaatctgaaactttttgatcaccacactttaccacaagtgtaaaattccacacacaagtactcaatggcaactgttttatgcacaaatttgtttaaaatattgtataaaattaccttcaggctgtatgtatgaggtatatatgaaacataaatgaattttgtgtttaaatgtgagtcccatccacaaggtatctcattatatacatgcaaatatcccaaagtctgaaaaaatccaaaatcggaaatacttctggtctcaagcatttcagataagggatactcagtctgcattgctttataaactggatgaaaatgtaagctctattagtcccgcccatccaccagagattccccacccataacctactggccacagggaaaaaagcatatgcaccatgatatttttatacacgttgtgttaactactgtaaacacattgtcttctttatatttctttgcaggaagttcagaaaaaagtgtcacgttttaatctgcagatggacataagtggattaattcctggtctagtgtctacattcatacttttgtctattagtgatcactacggacgaaaattccctatgattttgtcttccgttggtgctcttgcaaccagcgtttggctctgtttgctttgctattttgcctttccattccagcttttgattgcatctaccttcattggtgcattttgtggcaattataccacattttggggagcttgctttgcctatatagttgatcagtgtaaagaacacaaacaaaaaacaattcgaatagctatcattgactttctacttggacttgttactggactaacaggactgtcatctggctattttattagagagctaggttttgagtggtcgtttctaattattgctgtgtctcttgctgtta

SEQ ID NO: 11102 - DNA, 2300 bp, Homo sapien
tcccttgggcagtttttgacaaaagtctaccatttcaaaatgcaaagagatagtatccaggtttggaaatttttttttttttcctacaatgcctcaaaaacaaatcacacctgtaaactctaaactcttcttctgggggatattttgtgattgtaaaggagtggtgctgccttcccagtgaaagatgaaatgaattaaaaggaattgagtcacctcctgctggctctgtgagtctctgtgactgggagaagagcctgagaaggaggaaatggcaaaccgccccagaggcaaggttctagcacttcccgaggtgtcaggtggaaccttgctggggtgaggttaggcaatttggcacaatccctaatcttactcatttcctcattcccatgggaaacgttttcttgggagtgattatttctgagcagcctggaagacatcaaggttctggcgtagagtaaggtcataaaaaaaaagggccctgagtctcacccagcggtcttatctcccttcaagaatgtctcctaggtcattcccgggagtgagaagcttcgatcggctcacagtttctttttgtaagtgtttattcatgcattaaacaaatgtttatcacacattatcctgtggtgacaaggataagcaaaacggctctgaacccgagaagcccagagtctctctaggttgagaaaaacacacataaacagaatagagtttaacaaatcctcttagtttcaaagttggggtcctacagcagggatgctcttcagatttcggctctggagacgtttgttaatatacatacttgaatcccatcctggaacctctaacacagtgttttttaaccttgactggacatgggaatcacctgaagtgttttttattttattttgtttattatgtatttatgcatgtatggtactttttgagacagggtctcattctgctgcccacgctggagtggagtggcgtggtaatagctcgctgcaactttgaactcctaggctcaagggatcctctcacctcagcctcctgagtagctgggactacaggcacgtgccactacactcagctaatttttgattttttttttttttttttgtagagacagggtcttcctctgtttcccaggctggccttgaactcgtggcctcaagtgagcctcctgtctggtcctctcaaagtgttgggattacaggcgtgagccaccgtgcccggtcttattttatttttttaattgacagataatcattgtacatattcatggagtatacagtggtgttttgatacatacaatgtatagtgatcagatcaggctaattagcatatccatcaactcagacatctctcatttctttgtgttgggaacattcaataccctccttcttgctatttgaaactatataacatattactgttaactgtagtcaccctgtggtgctacagaacaccagaacttattcctcctgtctagctgtaattttgtatcctttaacaaatttcttcttacaggctcatcaatttctgtatttgattctgtgctttcttttggctgacctgtaggagcaggccccctggttgcagtgggagggaccagggaggagaggacaagaatgtctgggaaagtctgctgctcttgccctcttggactgagggaagacgggccttggtccagccagcttggtggcttctgcaaccatacagggggcaagtgttggcccacctccagcctggcccagctgctgagagccccctactgcccacagcagtggtctcatgtcaaagatttttgccgaattttcaaattgactttttcatttattgtttcttaattggattaatattcaagagaacctactactctagatcccttcccttaaagttggtgctcttagacctctgggaaccagaaaccacccctaccctcacctgccacccacgctggagtggtggcctactctctgtttgctccttaggacaaaggaacatttttgtttcccaggaggcaccaccatcgccttcagtgattcattcaatgactaaaaacggtttacatctgttttttaaatcagcttagcatttcccagtatacaaatggcacacactttttatattgactttggaaaatacagagcaatggcaagcaaaaaatgttttaagatcatgcaaaatttcttccatcaagtaactagtgtaatgattgacacatcttccaatctgtgtgtgtatgtcatctgtcattgtcattttggtccttggaagttgagtttatcttactcctcaggtcatgacatactaccaccttt

SEQ ID NO: 11103 - DNA, 2300 bp, Homo sapien
ttatctcaaattataactcagggcctaactatatgagatggctgaaaaaataccacattgtctgttttcactagatgatgccaaaatattttgctttacgtatattacagttctttttaaaacactggaagactcatgttaaactctaattgtgaaggcagaaactctgctaatttttcacattaaaattctctttgaaaaaatacaaaaaaaaaatgactgttgtcaccatagcgatcagcagcagaactcattaagaagacctggctttcttcttcgtgtggaagagtaggaatgcaaagcgtggaagtatattggacattaattatttttgccccataagaaaggacattttcagcagggcacggtggcgcatgcctgtaatcccagcactttgggaggctgaggtgggcaggtcccctgaggtcaggagttcaagatcatcctggtcaacatggtgaaaccctgtctctactaaaaatacaaaaattagccggccatggtggcgcacacttgtaaccccagctactcaggaggctgaggcaggatcattgcttgaatccgggaggcggaggttgcagtgagccaagatcctgcaactgcactccggcctgggtgacagagcgagactccacctcaaaaaaaaaaaaaaaaaaaaaggacatcttctaagtgccgtttagaataatatagtacttagtacaaagtactgcaacttaaaatattatgtcttccttgcaaactgtatcttactcatgtttgtttatcttctttccaatatccatgctccattgtttgaaactcataacaagtgcttcataaatgctgatttgaagaagctgggaagtaagattaagtggcaagtccaaggttaccagctactaagtatcagttaggactcaaacctaagacgtttaactctgcattcagtgacacaactgtcatttaaggagtgctgaggaagagaaagcagctctgacatccaggtgctggaactatcagctgggccttggtgttgctaagaacttttctggaccatggtgttctgtcgaatgaaaacaatttcacggaacaccaaagtcagacaagagcattctgtaaccatgatcaagacaaaaacaagaccacgtcataattttgtctgaacacggacaaaatttaggcactgtctaaaccacaaaaatgacaaatatgtgtgactgttgcttctttatcattcatggctttagcctctgtctagtcttgactcctaaataagacttattaagatacccaatcatagaattactgccatttcctgacagcaaccaatccagagtaaggccttgctttcttgaactcttcccaaaatcacataacgcaagcccatagtaaattctaacaccttcttactgagatgcccccacggttcctcatgcatgcatttctcctggcttcaagaagtagtagctcaattcttttactacaagttgttcctggtgggtgtgttggagagcactgacaactcctcctatgtccaggggctgtgttgtgtatacatgctgagtgtttaattagacaaccctgtaagacttatcatccccacgtggcagataaagacatggaggttcatgaaaatttaacgatttgcccaagtcccccctcccctccccaggaaaagccagcgaccacattccaaccctccgctaactctgcattgagcactctctttcctatgccctccacctgcgcccattcccctcttctgcgggccgaccgggatcctgctgggggctacagcccaaacatgttacttttccaactgttgttttatgtgtttctatgagaaaggatattcggattcagaaatgctttgcaactccagagctgttgagcctgcggcgcggcccaccactcaacagcggtgctgagtggctgctcggtcgcgcgggatccactccgggcctccgagggtgggtgcacgatccactagccactctccaggggagagtgacgtccgggtggaccaatcgccgctggggcaccgaccgctgggcccaatcgcaggagagccgggtagaacagtgacagcgccgcggcagccgaccccgcctcctcggcggacagcgatgctcagctggctgcggccgagtcatcgcctagcgctggcagggccgctgaccgaccgacggaggcgccgattggccgattgtccactgcgcagaaggagcagctgctccgcgccccgccgcgccgcgctgaggccgaggtccgcagggccgcggggaagccgagggctgccggagaaccctgcaggtgtc

SEQ ID NO: 11104 - DNA, 2300 bp, Homo sapien
tgtgaggaatgaggccaatgtggctgcagcctgcagagcagagggtgaggtggggttgaggccagaaaggtgttcagggcctgatcatgcaggcctcgaaggccagagtaaagcatttcccccaagtttttattttggaaaatttcaaacctatagaaaagttgcagatgtaatagaattattacctagattttcaaatggttgacttttgccagtttctctcttttactctttctccttctcatatgcacacacacatacatacacgtttttcttggtcgaatcatttgagaataagttagaaaaatcatgacatactacctctgaattctaaagcatgtatatttcaagaaccaaattaatctctggcataattatagcacgattacacacccaagaaaattaattataaaatacctgtaccttatatacagtccatatttaaatctctaattgtcctaataatatcctttgctaacatgttttgaaaatccaggctccgctgacattttttgggaccagttaggccagttattttgcaatacatacctcaatttaaatttgccagattattgtctcatggttaaattctggttgaacattaactactgcataggtgatgtgtggccctgagaactaactaatatcaggagtccgtaatgtcagtttcattactagtgatgttaaatttgatcacgtggttaatgtggtgtctaccagatctctccattgtaaagataaaattttcgttttgtaagaaatgaagtagcctgggggaagatactttaagcatctatgaatatcttgttccccaacaatcttttacccaatgtttgtacctttggcatcccttgtgtaagataattatgaatgtagcgattgcaaaatagtgatttttcaaattctataatttttttctacattcgttgatattcttctgtaaagaagagcccttacttctcctccatccttttaaatcagtatcagtatagacttgtggatgtttaaaatttagatttaagatctcacatgcatttataatccatttctaacattaaacattttgatgtttaatttttgtatttggccaggaggagccctgatcagaaaggttttttgagaaaactattgattgaatgaaataataatatagaaatgacaaataaatctgtgtttaccacttttttctcctgagaagttctatttgtcaatctaatgtgaatatatttttatttctctctaggtctcatggactgattggctctcattcagcaggaacctaacagataagtcttcctgctgtatatcaagacaatgcttggttttcaagctgttctgagaatgattaaagcagtgtcgcaaggtgacattgtcaggggagaacaagcagcttgagaatttcctcttaatctgattgcagcttgaaggcagcccatttccattaagtaggactgcatggcaagcagccccaccaaagggttgacaatgagcgtcccagtggctcctaagaaatcatgttacactcagttgcgggacaacagaaatgcagcaagaaataataatgaaagcatcttaagtctgggagatacgaatgccaatcaaatcatgttggaggtcagctcctctcatgacgagtccaagacatgtgacctgggagatgaaattggaaatacaaattcaagtgagccagaaaaccgtacccatttccataaggaatttcaccaacttcagggctttgggaaaggctctcaggctggctctgccagcctgaaagattttagactttcttcaaccattcagagggaactcaatgaagagcacacagtggagagaggcacagatagcctgcagaccacgcggagtattcagggaccaagtctgtcgagttggaggaatgtgatgagtgaggccagtctagacgttttggctaaaagggatgctgaaattccccggcatgttcccaaggataaactggcaaagacccttgacaatgaggaactgaggaggcattctttggaaagagcaagcagctctgtagctgcagtcgggagcctgactccgcagcatccacagcctctatccctcgactcccgggaagcacggggtcagatacctgggggtggggaggggccacagaagacattgccagaccacgctgtcccggcagctttccctgcaactgacagtacctcagagggaaagagtgtgcgtcatcctaaaccatctacctcagaaagcaagcagagcactccctcagagacccaaacagtgggggcacatgtactgcaggtgtgcagtga

SEQ ID NO: 11105 - DNA, 2300 bp, Homo sapien
gtccccagcccttggcagccaccattccactttctgtctctgtgaattcgaccactctaggtacttcatataagtggaatcgtacagtatttgtccttttgtgactggcttatttcacttaacatgatatcctcaagtttcattcatcctaagacgaatttagatgagtttggcttgttttgtagcacgtgtcagattagttaggcatgttttgtagcacctgtcagaatttccttcctttttaaggctgactaatgttccactgcatgcatacaccacattttgtttatccattcttctgttggtggatgttctggttgcttccacgttttggctattgtgaataatgctgctatgagcgtgggggtatactaagccaccactttttgcaacataaagtttttctcacagatttcaaaagccctaggaacagctttcagcccaggtttgagctcaaggtactgtgagcttctttccctctgaggtctgcccaagctcactgccaaggagcattagcccaagtgagcaggaaggagctctggacctcacaacatcacagagcccagatgggggtccctgccttttccctggcacactttgttttaaaacagtaaaaataaaacatgctcacgagagggtaaaaagtggacattcactccctcctgttttccattccttaagggtcggctgctattccatgaatgtgtgaatctttccaaagctttattccaaacatatgcaaatgtgtatgtttgctttgtttttttataaaactttgctttctcagtcaacaatgtatatcatctttccatataatagaaaggcattgaaaatctaaaatattccacatttttatgctgttaccaacgatgctgaattgaagatccttatgcatacaagcttgtgtatttatgtgaatattattatagcatagacgtgcaaatgttgggtcaaggtgtgcgtacattcaatattttgataggtacagccaagtcgccttcctgaaggattatgctaatttacctgttagctttaaagaaaggtttccgtttattctttcaagtttaaggcaaacattccagtctgttcctatgtgatcactaaatacttgcctttctctgagcctatactacttaattaaaatctgcttggaaaatctcagttaagttagtaaaatcatctagttctaacaactattgtctgtttacagccttaggcaatttagtgggcaaaactgtaattgtgtatttctaaacatgagaaatttcaagatttctcctctgaggggtatcagggcatataaaatcaatcatgtaaatatttgcttcttttactttcaggattacacaaatatatttttaaataccaagtcttttttgagaaaacaaaaacaaacatttgctccctgattctttccttttctgatttttaactgtgtgaaaaactagaaagatcaagtccttcaaggcttttatgccagtttgcctaggagagatacctgccccaagccccaattttaattactcaagccagttgaatggtgtgtgtatgtcagcctaggcaagcgacttcacagttatattttaaatatgaagatttcatcaaagaaggcaaaaaaaattgttcatggcatgcaaattagaaaatgagaaattggcggttcccattagcaacaaatattctgagaagagtttcatgggaggagaggccatatacatcacgtttataaatatttttacttcccagaaaaataggagctaggattgcagcagagccaagccctggcagccctttcgggcgtccccaggcagtgccctgaagcccaggctcgccttttgtgcttcctgcgtccgctccaggcgtgtctgcgcggtgcggaggcgcatccccgccaggggagggctgggagcggccgcgcacccagaggagagcaggctgtccttttagggagccggcattggtaaatgctctgtggttatgcgactattgatttgcctcaccctgaggactccagtggcaaagtgaccctccctcctgcctgtcccctcccttcctggctcccgcccgccctccctcccgcagcagcaagatctgatcgctgctgccctgctctcctcctcctctcattcctctgcctcctggattcctgaagtttaggagaaataaggtagccaagggaaccacatggaagttgtgacagctcccagcggcgcgcccctttcgtgtgtgccggtacctcggcttaggagttgcccgctgacaccttgaatgaaggaggtccccttgccagccagcctgcc

SEQ ID NO: 11106 - DNA, 2300 bp, Homo sapien
agggaaaagaagaggcagtatccattctgaagatgacataaaccattgctaactgtgtcttcatcatgtatttctttatttcaagctcatgacactgtctcacgcttaatacggtgtttaacacaatggtcctcaagttttcctgcgtattagaatcacctagggagttttaaagccttctgatgcctgggctgcaccccagagcaattaaattggaatatcagaggtaagagccacacatcagtatatttttaaaaacttccaggtggttccaatgtgtagccgagggtagagaccagtactctcagtgtgaaacacactaccaggaccgaggcaatccatttaactagtccccaggaaaataccatcccttgcctccagcttggtcacttactaatagttcccagaggtagtgggggtggtgcttgagggtgacaataacacagaccttggttatggcacactgggtcttgttcacagagaacattttaacaataataaaaactctgatgctaattctcaaattgtaaaagtttatcaatgtattgttaactgtcattgcttttaatacacactttttttttgaggcggagtttcgctcttgttgctggagtgcaatggcgcaatcttgactcactgcaacctctgcctcccagggttcaggcgattctcctgcctcaacctcccgtgtagccagcccaccgcgcctggctaatttttgtatttttggtagagacggggttttgccatgtttgccaggctggtcttgaactcctgacctcaggtgatccacctgcctcagcctcccaaagtgctgggattacgggtgtgagccacggctcccggcctttaatacacactttaacaaccagctgactgggagggaaaagtaaagcgagagaaagttgaaaaataaactgtacatattaatgtaaatgcatgtgaaagtgtaaaatgctgcctctttcacaaaggaaaatctcactggaacttagtaatgatgctgttatgacccacgtaaaacccaaagataattcaaagttacaaaaatgtagaaagaaagatctggagacttaacgcacacccacggtgaatgtggtctatgagtgtaagctctggataccccgatccaaccagatgctgcagtggcccggagaacatcataaatatgaagaaagtgtatccatgccggggcttccatttgtttttataaggcaataaacatcataaagcctagccgggtgtggtagtgggcacctgtaatcccagctactcgggctggaggctccagctggggctggagaatcgcttgaacccaggaggcagaagtttcagtgagctgagatcgcaccactgcactccagcctgggcaacaaagtgagactctgtctcaaaaaaaaaaaaaaaaaaaaagaggaaaaaaaaaagtgcacgatttccatgcctgctttagacagtggccctcaagtgtggctacacattagaatcccctaaggagtcttaagaaatcttgatgtttacactgcactatggaccaaggacatcagaatccctggggtgggactgaggctggcattggtcttttgttaccgctccccaggggacggggaattccagtattcatcaaggttgaggataactgcattggaggaaagaagcagctaactacctggatccttaattcctatctcttcttttcccaggagccaacaggaaaaaatgcaccaggagggaaagacaggaaaggagggacaagagaggaaggggggctccacacatctgcagcaggaaaggctcggattgcaccacccacccctgcctgctgcacacgaggctgggagctaccttggactttgtggtcgtggtcatcctgcaggattgtgatggcaactgtgtggttattttccatctctaggagagcagcatcatggctggcggtgagatcttccacctggaggagagtcgcagttactggttagacagagagctgcttggagaacagaagtggaattccgtgagtggaaaaggtccgtgacccaaaacatcaatgacaagtcacagccttgtgccgaagcaggagagctggactttggtggtgatgtggcagccctcggaatcacggggaggtcactgccacaacctggctctttgtaggggggtccaactccaggcaggggatcactgcctgaggtacctctttagagtcctgagtgtggctcctggaccatccccttcccactgcttgtccacgcgcttgcaccgctatgagcgatgacggcaaaggaaaagaaaagcgtcct

SEQ ID NO: 11107 - DNA, 2300 bp, Homo sapien
tgcagatgcacctggtagccttttcacagttcagctatggtttatgtgatgaatgaaacttttaggttggtgatagctccattgggagctgccaaggagaggggaggacctgggttgagagcccagttaggaggacgtccttggcaagagttgggtggcccctcacccccctctatcatgtgccctcatttttatggctaaatgttgggtggatagagacagattctcggtccaactattaggccaggatcctgggatcagaaggtttgaagactgattgcaacttggttcagattcttgggacagagaggattgagggctgccctggtaggagttaggaaaacccaaggcctgtgaaacccagctcagcataatgcttctgcagcttcgttgcgctgtggctggaggaatgaatcccattatgtggcatggcgtgccctaggttgatgttcagagacactgtggagtcagcttgttatagcctggtgggggccaggcaagcctctcccagtcacagtaaagctgctctgggcctaggcttggtgtctcggtgttctcacctgcctcagcacccactcccaaagcacatccctgcgcagcttccatcctgagaacctgtgctcatggagacgctcagcactggtctcccctcaagagcctcctcatttcttttcagggattcccacctgcaaggccattgattgcatttccaaggtgttcagcagctgatgcacataaaacccgggctgagccttagcagaagctctttagaatcagctaagactattggggaccccttattcctcccaaggggcccaatgctagaatattctctgaggtctcccactttcttaattgaccgagtggggttgcacaagtgaatccatacaaaaatggttaatatctttatactccctcttagaattgatcatatgcaaaataattcatacagaactctgtgtttcaaagctggtggaaaagatttgcactctgttcatttcgggtgggaagataaggcacctcattcagaatggatgctccactagcaggtagctcatgtcttggaaatcacgctgcaggctcggccctccaacaagccacatagaattatttaccctaaggtacttggagttttaaaataaattgatccaattaagtcacacaaatagaatttctcaaatccatctagcctgcagccacatttctctggctctctgtgccaaataggatcctggcattactgcttcctatttctctccttcccttttgctccctacagcagtaattttgtgggaagtggcctagtatctttagcatctgagggccgctgccacttctcagagcaagagagatcctctcagggtattcctctgggctgctcatggtggaggtcatgtcgccccgaaggagagaccatggaggatgttccccagaagcaacagcgggaggtggtgttcccggtctctcctcgtctatctacaatgcagcatttgactatatccttcccattttataccttgtgtcccgggcagctcactttggaggcttattgagaacttgagttggtgcacgtcattttgcttgaagcagatgtggcggtcacgcaatgcctttcttcccaggtaccagccagagcagcctaacctggtataccagatggccagtacttccgacgagttagatccagcagaccaaaatgaattggcaagcaccaatgattcccagctgggctttttaccagaggcagagatgttctctttgaaaaccatactctcacccaaaaacatggagccttccaaaatctctgggctaattgtgaacatttcaaccagcctcataggtaagagctagcccttccctggggccttgcttgttggcattgcatggtttctaggcagtggagctggagttgggggaaggtgccagagaagatgagcatctgtcttgctcctggactgggacatagttactctgtgttaactgtagttgtgccttcggaaatggagcctctctctccacaagtttaggggagaacagtggatgcctgtgggaaattgggaaatggttgagttgcagcttgctgtcttttccttcccccttagctgttctcatcatcaccttctgcattgtgaccgtgcttggaagggaggctctcaccaaaggggcgctgtgggcagtctttctgctcgcagggtctgccctcctctgtgccgtggtcacgggcgtcatctggaggcagcccgagagcaagaccaagctctcatttaaggtgagcagctcggcctagggaaggaaccctg

SEQ ID NO: 11108 - DNA, 2300 bp, Homo sapien
ttctgttttactgaattacgtggatcttccaaatgctggcacatttcatcatatatttttaaaatatcccatttgttaacatcacccccagtgtcatcagaaaattcaacttttagggagctgtccacatcttggtgacgaatacaagttttctgaaattcccatttttttcttgaaagttcaaattttatcactcgcagcaaatgttgtcagttgtttcccttctagattctgcccgccccccctttttttttccagagttaactttttaaactacgaatcccaatcatggccccttggcagccaccctgcagtggggcaccaggatgctgtgtccctggtgggctgtgagcctgactttatcaaccttcatggttctcggtgctctcatggtacatgatagagcatcaagaaatagcagtaactgacagttagggacatttggttgtggactgtgttttaaatactattgaattaatgttcagttccactggtgtgatcatggcattacagtttggtaacacaatgtaattcttttttttttttttttttttttttgagacggagtctcgctctgtcgcccaggctggagtgcagtggcgggatctcggctcactgcaagctcctcctcccgggttcacgccattctcctgcctcagcctcccaagtagctgggactacaggcgcccgccactacgcccggctaattttttgtatttttagtagagacggggtttcaccattttagccgggatggtctcgatctcctgacctcgtgatccgcccgcctcggcctcccaaagtgctgggattacaggcgtgagccaccgcgcccggcccacaatgtaattcttagcagttacttattgacatatgtagaggtcagttgtcatggtggctatagcttgcttatcacgatggtcatgaggaaagcatatatttgtctaaagagggataaagcaaatatggcaaaacattaaatattgggaagtgtagataaagagtaagtattcattcaacttctgtaggtttgacattttcaacatagaaagtgaaaaggaatgaaatatcagtgtgggatgaattatcaatgtatgaaagacgatgtaggtgggaatagaataagattccaattgtgggaaatctggtttgctgctgtctaagttataaaactgtagctgttgattagcatctttatgtgcattttttgtgtaatgataatcttgtctgggttcacattaggtgcaaatcatatttcagacagcttaattaaacctcttcagctcctgggtgagtgcaagaatctgtgcagagtgtaaatggtaagatttagaaaacaaaggactttatatgccatgcatctatgaggttcttcgtagcgtgtcctcaggctgcgttcataccaggtactcccagtcactggccagcacgattccattccaaggcaacaaggtcctgcatcccagatttaggataaccttctgcccatgctgagactcttggtgttacgggcacgtgtatgctttgtgctgccatggcagctgttaatagtacccatagaactccatcactaaattctcgattgtacgaattggagtccaagtgttttcagaagacaccagctaaggttttctgcccctgctggccttgctggtcaataccagtgtcaggagcggactcgttccccttcatggcgcctgaccggggcctcagagcttttgcatgcctacgactatgccctagatttgtggaaattgccggtgtgacgcttttctatcttcctctttgaaatatgagagtcagtttcagaggtaaagcggtggaatctctggtgcggagggcatctattctggctccccatcttctccctgaattcccccgatgatgccccatggtgggcccctttgccgtcaaccctgtcttcagttgctgttaaggtggcatgtgcttcccgctgcagggctgagctgaatccgttttcactgtaccagccacagacttagagattctgaggttgaaactgaacatatctgatggctcttccttgcctttcaggattctgaaaccttccttgtatccctcctgagacatctttgctgcaagatcgaggctgtcctctggtgagaaggtggtgaggcttcccgtcatattccaggtacagtctgcctgtcagcacgacagcagaatatatgttattctgttttgtactagaatatgttattcatttagactgctagttgtctgttgactttttaagttaactgtcaactaaaacccccagttgtcttcttttttagatt

SEQ ID NO: 11109 - DNA, 2300 bp, Homo sapien
ggcgggcggcgggcacgggggccagactgggaggcacacggagcccgccggcggcgaggagaccttcccttacatggcgcggtgcagagcaccccgccccgccacgaggtccggggatgtgtcatcagccgtgggtggggactctgcccggccgcccggagggtggtcccgcggcaggtggccggcccagggactctgctgccatccccgcccggtggccgccctgacctagggcgcctggctctccgcttgtccctagaacccgggacgcgccgcctgcacctctcgtctgggtccccaagattgctttgaggaagtctcccctaggtgggcttccttgtgacccagtgtggcctggaaaggccgggttcctcaagccctccacatggtttggaatgagaggaagttcttccgcctttagcaagacaccgtattctcagggtgttcctttctgcgtagtagaaaacttcccaggcatgggcaggtcagagtcattctaaaacctgcgcgtacacagagcggcagctgcactgtagtactacaacagcctgctggttcagctcctgaccctttccaggggatgggggaaccagacagcagttgtgtttgacttgtgtgactaggatagtcagacatgtgccttcaggaaaaaaataaataaataacctacatttcccaatactcacgtcatcaccgccatgccctcatgtgttgggttttagtccagacatagttaccagatggttgagatttcaatcccaggtgtatctccctaaagaatgtgccttttatcttacttacattcgactagtagaattgtgtatgtcggcctctggccgaatgccctaattgtatttaattcgaattataatttatctgggatttttcctaacatttcttgccctttatgtttggttcagataataggaaaccatgatacatttattcctctggtatttttagttgatctcagtggaaattaccatgatttttatatgaacacaccctcctgttattaaaacaaaaggtcttatttaagtcacacgaacagaatagaaacttaggggaaaggtcaacaatagattaaaatggttttaaaaataggtttagcatattacgatcatgtttaattattataaaggtaaaattcaaaggatgtcaaaggagttttgagtaaagaggaaagggcttagtaagtagatcagaaatgtactcccttgtctgggtctggatcctagagccacgtgctcctgtacatatgattacttgctttaggtgaaaaaaaaaaagaaaggcttgaaagacaagactgttgacttcagggagttacaattttctatttggtagaagaactcattctttgatggaattaaatacgtgttgattgattattctggtctgtagtttattttaaccaaagtccatacaaatagataattatgttggagggctcagaattatgtccaattaaattaatcctttctcattatcaaccatgtatttggagggattgctattaatcctagggacaaatttgaaatgtgaataagtgcatccttgttatggagaaaaatattgtttccctctaaccttggagatacttgagtctcggagttatctcttccagaggcatcttcagagatgcctatcactccacctgcctcttggtcctcactccaagcaagaccttccgataggatgtggtgtttttctgtatagttggcccctgcagacctggatagattttaaaggcagatccaataggattggccggtggattcatggaaggacgagaaaggtcaaatatgactccaagcacatcggagttgctgtattaatgagatgggaaggctgagcaaagaacgtgttggatggaagagggactttttgaaagtcacaactgacctttttagaactcttatccccagggtcagggctggaagatgtatcttcttggggcccctctcaggtgcctgcctgtgtgttgcagccacccgtccaggctgctggcctccttccccttcacctagctttactggctcctctcgccaaatctggggggtctcttcagcctctgtctccttgctgcccatggcctccctttgctcccctgccgccttctagtgggccgcctggtggtggacttgtcctgtgggatggagaccctccatacatggggttcaaaggtcctggggtattcctggatcttcaggacatctgcctaccctcaggtttcccaggcctcgggtggggaggcatcagatccctggccaacctgctatccaccccagggtttagac

SEQ ID NO: 11110 - DNA, 2300 bp, Homo sapien
gtggtgcgatcttggctcactgcaaccgccgcctcctgggttcaagtgattctcctgcctcagcctcccgagtagttgggactacaggcgtgcgctaccacgcccagatcatttttgtattttcagtagagacggggtttcaccatgttggccaggatggtgtcaatctgctgacctcatgatctgcctgccttgccctcccaaagtgctggattacaggcgtgagccaccgtgacaggccagatttgttgctttaaaacaaagcatatatggtggcttactatgatgtcaagcactgttcaaagcacattacaaagctgggcaggatggtgctcgcctatatttccagctactggggaagctaaagtgaggcgatcgcttgagcctaggagttcaaggctgcagtgagctatgatgttgccactgcactccaacttggtgacagagtgagacccactctctaaaacaaagacaaaaacacattttacaactgctaagccatctgcatgtgttcattaaaactttttctggggactttttctggctcatccctgtagtcccgatgctaggggaggttgaggcaaaatgatcgctagacagctggtatttgaggccagcctatgcaacatatcaaaaacccgtgtctatatgtagaaaaaatattaactaggcgtgatgacacaagcctgtagttccatctgcttgggaggctgaggcaggaggatggcttgagcctgggaatttgaagttccagtgagctatgattgtaccgctgcattccagcctgggtgacagagtgagacccctgtctctaaaaaacaaacaaatgacaacagcaacaacaacagaacactttttctgaagctagcaccatgcagttatgtactttataaattgctagtctaattccaagggaatagttcagcagctgatatttgagaaggacctgtagaaaggattcaaagaccacggacaccgtccactgtttttctgttttcctataagatagaagaaggatggcattattaatttatgccctgtttacctatcccaagtcccagatcactggatctttaaagattatgattctcgcttggcttttggtacaaaaggagacaaggagggagcttaaaaggtgagcacggtgtgattcaggactgaagcttctgccacttcctggggggtaactgcaaaagtgagccgttctgactagccgtttgtgcatttgccactgccaagggggcacaggtagattcaagctttggggctcttctgacaactggcaaggataaggtattagcaagggcaaaggaatagtaataaaataatccaataacaaagacatgaagatttataataatttttaggccggtgcagtgtttcaggactgtaatcctagggcgctttgggaggcccaggcgggaggatcgcttgaggccaggatttcgaggttaaggtgaactgcgctccagcctgggcaatagagtaacaccctgtctctaaaatgaaaagaaaacagtttaaaccttttaagtgcataccaaatcttttattttggagaaggaaaactggtctcgagttccgtgtgagctccctggggcccgccgggagggggttggcacggccggacctgcagcactagttctggccagggcgctgtgggatctgcaggggaccacaggatgctgtggcgcggtgcgctcagattggcggagaaacggccacacgcctacggagctactgagaaggcgagcggaggcgcagcccgcccgcccgccgcgggaaccccaggttggggcgctgggcgcgcgaagactcagccgccccgcccaccaagggcgcgtcggtccccggccgcagcctctgggctggcagccgccgccgcgccgcgctcccattggtgcccggcggtgacgcggccgagcgggccggggctgcctggtccgggggcgggcgtggggcgcggggcgcggagcgcgaggggcgggggccgggcgcactgctgatgaaacctggcgccggaacccgccagccctcggcgcccattcagtccgcgcaggcaggtgtgagcagcgggtcaactacctggcaggcgcgcacgcggccgcgggctcccgctaaccgcagcctccactcctctccccgcgcgccgcgcccccgccccgccccgccccgcccggtctcgccggccgagcgtccgttggtccttgagcgcgtccgacagtctgtctgttcgcgatcctgccggagccccgccgccgccggcttggtgagtgcccggccccgccaacgcagggggc

SEQ ID NO: 11111 - DNA, 2300 bp, Homo sapien
tttttaaattatatatatataattttttttttgagatggagtctcacttttcttgcccaggctggagtgcaatgatgtcatctcggctcactgtaacctctgcctcctgggctcaagcgattctcctgcctcggcctcctgagtagctgggattacaggtacatgccatcatgccctgctaatttttgtatttttagcagagataggtttcaccatgttggctaggctggtcttgaactccttacctcaagtgatttgcccaccttagcctcccaaagtgctgggattacaggcatgagccaccacacctggccaaatattttatatattatatatataatgtgtgtgtctgtgtataaaataagtgagctagacataataaacatcaatggaatactccacacaaccacaacagaatatatattttctcaagtggcagtagaacagtctcctggataaactatgtcaagccataaaacaagactcaataaatttaacataatttaattcaaacaatgctctctgactacagtggtgccaaactataagtcagtaacaaaaggaaatttgggaaatttacaaatatgtcaaaattaaacaacatactccaaaataaccaatgggttttagaataaatcacaataaaaattagaaaataccttaagataaatgaaaatgaaacacaacataccaaaatgtatgggatgcaacaaaagcagtgctcagagagaaatttatagctgtaaaaacctacattaaaaagtagatctcaaatcaatatcccaaccttctaccttaagaaactagaaaaagaagagaaagtgaaacccaaattaacaaaaccaaaagttagttctttgacaagatcaacaaaatttactaacttgtatctagaatgaggaagaagaaagaagattcaaattcctaaaatcagacatgaaagcggggtcattaccactaacaccacggaaataaaaaggataaaaagaggttactgtaagcaattgtgtgtcaacaaatttgatagcctactaatggacaaattcctagaaatgcactaccaaaactgactcaagaagaaatagagaatctgaatagacctataataagtaaagagattaaatcagtaaccaaaaacctccaaaaaagaaaagcccagaactgaagactctgtgagtaaattctacgaaacatttacagaaaaattaacatccatccttcatgacctcttccaaaatgtaagaggaggaaacacttcccaacttaattctatgaagccagcattaccttgatagcaaaccaggcaatgacatcacaggaaaataaacctatatccaatatattttattaatataaatgcaaaaatcctcaacaaaatagtaacaaactaaatctgcaagaaataaaaataattatacacactgaccaagtaggacttatttctaaagtgaaatacttgtgaaaattcataaagaacaaaaattatgtgatcatctcatagactaagaaaaagcatttgaaaaacttccaacagcctttcatcataaaacaaccaaccaggaatagaagggaacttcgtcctcaacctaataaaggagcaaaatctacagtcaacatcatacgtaatgtcgaaggactaaaagcctttcccctaagatcaggaataagacatagacgtctgctttcaccccttctattcaaaatggtattgtaggttctacccaaagtagtcaagaaaaagaaataaaagatatccagtggaaaaagacaaagtaatatctttatttgcagacgatatgatcttatacatagaaagtgctaagacacacacacacacacacacactattagaactaataaattagttcaaagatacaagatgttattacatgatttttcatggatagtgtatataaatgcaatgaaactagagataatctaatagacatatatatatctagatatattttatatatatattaaacattgtgtgccatgaaaatgaaacacagcataccaaaacttacggaatgcaacaaaagtggtggtcagaaagaaatttgtagctgtaaaaacctacattaaaaagtagttctcgagctccggtctacagctcccagcgtgagcgacgcagaagacggtgatttctgcatttccatctgaggtaccgggttcatctcactagggagtgccagacagtgggcgcaggccagtgtgtgtgcgcaccgtgcgcgagccgaagcagggcgaggcattgcctcacctgggaagcgcaaggggtcagggagttccctttccga

SEQ ID NO: 11112 - DNA, 2300 bp, Homo sapien
ggagaatttgatctatcttcctcagggtgatataggcccttaggagtgtttggaatttctccacccaggctactcaagaggcaggtactctaaatgtcctgtgggtttccaactgatgagaaacccaactggagagattgctgtggggaatcacgtaggcttctagacaatgagctccctgaggacagtgactggattctgcctcttttcaacagccctatagacaaggatgtaataacccccattgccaacccaagaccttggcatttctgccacatgatgctgctgttcgctacagtgactcatttttaaactcctagtgcctagcagagtgcctggcacatttgtttgctgaatgagagaatgagtagtgacatttcatatcaaatgatgcattattatttacaaagtgatttatttcccatgcatgaactcatcctcataactacccctactttaccccggaaggtaggcaagaccattttacagatgaggtcacacagctgtaggttggagaggtggctttcagactctaaattcattggcatttatatataggcatcatattgagactgccctttctaaagtactctgtcaaaggactaagagatatgaatagggattcagatgttgacctcagatttaggaacaaaatgcagaaatcacaaatgtccatctgaatggtgtctcaacaatggcattattttctcctatttgctaatcactgcaaggcatataggttttcaattacattatgagttacatagaatagaatttagggtccagatgggtaaactggtgaatccccatgaagtttgtagtagctatttcctgatacagatttgatataataacactgttgtatgtaatacagttttggtaatttcagttaagtagattgtagctttattgccctgggtcttcaaggaaacacatgttcaaatattctcactgcttaatgagatccttgttcctgttgaacttatgtgaccttattggaaatcaatgattgcttttgttcttcaaaatgtaatgttgaggagacctagatgaaatcactctacaaaatgcattgagattgcaggatgtggagaatgtgctgtaattaaaatgaatgattctgcttggaggtacagcatattttagctctgtgtgcatatcgtgcataagggaatttctctatgcagaattattttctcccaacaattctcatgatcacagcactcctggtagcaggtatcacttaactcctgggcagcagcttgtccaaagcaagggaaagggagctttcctttcctcgcaactgttgctatggggggcgtggcttcggagctgggtgaggaggcgttcggcggctccctcccccccccaccctcgtagactacacttcccgtgatgctcgagggaatggtctccgtggtgacgcacttggtgtccgcggagggaggacgaggacgggggcggcggctgctgcgagggggggcccgtgctctccccgtttcccttagtcgcactcaggcagccgccgccgccgccgctgccgccatgttggtttgagaggcgatgacaggaggcggccgcggcgtgtgggactgaaaagtgaaggaggaggaggagaaacaaagctctgagaggaaaccattcccgggctgaggagaaggaggacccggcctcttccggggaccagccgaagtcggcgtcgcccggagctcgcgaggccggggaggggaggggaagggaaggcggagaccggggaggcggcggcggggaaggcggaggcagaagaggagtggcgaggagccggagacgatgcgccccgaccccagctgctgtccggaggcgcccgcggcctgagcccagaggggctgtggagtgtcccggccggccccgagcacccccgcgctgtcggtcccccgctccggtctttcgctttggcttccaactagttaaatgcccttgagcgcgggtttccgcggcccggctcttcgcccccgcggcgcgagttgagccgtttccccgcgctgtccgcgcgggcgctccgacagcggctctgcagggtccgcggccagcgtccggccaccgctcggccgccactcaaggctcacgcgtcgatgtgtagctacatagttatctgtgtacatccacgctggggcatttttctcctgcttaatgaggacttgactcgggagcaagtgtgaatcattgccggggctgggaaaggaggaaggcgcatttaaccccctcccacccctctccatgtccgtgtgtcactcggctcggtccacctggcgcggccggtc

SEQ ID NO: 11113 - DNA, 2300 bp, Homo sapien
ctgtgtccaataatgttacctcatgccttaacaatgttagggatgagttataatgagttttattgagaataatgtctcagcccctcttagaagagtaattggaaacacagcgacttttgaaagacattgccttttgtaaaggtggcagtggtaacctgcagcaaacagcaactcttgcctttctacttacagtggcacttaggcccggcagtgccatggccaggcagtgccatggccagggaggtcattggataaaagttggagtcaagggtatggtggagggactaactctgtgagttagagctttcaaaatgtgctccaatattccttctgagctcattggtcaattgaagtattttcacctgcccttatttcctggggggctggtgtaggggtagggggactctgtggttgctaaacattgcaaatgagcaaccaagtaacaaaggccatggaaaatcacgtaactatggacttggaaatatctagacaaagtcctgaagcctaatcacagtgagatttgggcctctcttctcttctggcctttggtttttcggagaatttgatctatcttcctcagggtgatataggcccttaggagtgtttggaatttctccacccaggctactcaagaggcaggtactctaaatgtcctgtgggtttccaactgatgagaaacccaactggagagattgctgtggggaatcacgtaggcttctagacaatgagctccctgaggacagtgactggattctgcctcttttcaacagccctatagacaaggatgtaataacccccattgccaacccaagaccttggcatttctgccacatgatgctgctgttcgctacagtgactcatttttaaactcctagtgcctagcagagtgcctggcacatttgtttgctgaatgagagaatgagtagtgacatttcatatcaaatgatgcattattatttacaaagtgatttatttcccatgcatgaactcatcctcataactacccctactttaccccggaaggtaggcaagaccattttacagatgaggtcacacagctgtaggttggagaggtggctttcagactctaaattcattggcatttatatataggcatcatattgagactgccctttctaaagtactctgtcaaaggactaagagatatgaatagggattcagatgttgacctcagatttaggaacaaaatgcagaaatcacaaatgtccatctgaatggtgtctcaacaatggcattattttctcctatttgctaatcactgcaaggcatataggttttcaattacattatgagttacatagaatagaatttagggtccagatgggtaaactggtgaatccccatgaagtttgtagtagctatttcctgatacagatttgatataataacactgttgtatgtaatacagttttggtaatttcagttaagtagattgtagctttattgccctgggtcttcaaggaaacacatgttcaaatattctcactgcttaatgagatccttgttcctgttgaacttatgtgaccttattggaaatcaatgattgcttttgttcttcaaaatgtaatgttgaggagacctagatgaaatcactctacaaaatgcattgagattgcaggatgtggagaatgtgctgtaattaaaatgaatgattctgcttggaggtacagcatattttagctctgtgtgcatatcgtgcataagggaatttctctatgcagaattattttctcccaacaattctcatgatcacagcactcctggtagcaggtatcacttaactcctgggcagcagcttgtccaaagcaagggaaagggagctttcctttcctcgcaactgttgctatggggggcgtggcttcggagctgggtgaggaggcgttcggcggctccctcccccccccaccctcgtagactacacttcccgtgatgctcgagggaatggtctccgtggtgacgcacttggtgtccgcggagggaggacgaggacgggggcggcggctgctgcgagggggggcccgtgctctccccgtttcccttagtcgcactcaggcagccgccgccgccgccgctgccgccatgttggtttgagaggcgatgacaggaggcggccgcggcgtgtgggactgaaaagtgaaggaggaggaggagaaacaaagctctgagaggaaaccattcccgggctgaggagaaggaggacccggcctcttccggggaccagccgaagtcggcgtcgcccggagctcgcgaggccggggaggggaggggaagggaaggcg

SEQ ID NO: 11114 - DNA, 2300 bp, Homo sapien
agagatgaggtttcactgtgttggccagggctggtctcaaactcttgacctcaggtgatccatccgccttggcctcccaaagtgcagggattacaggtgtgagccactgcgcctggcctaaaatggccttttctaatcagctttttttatgaagaaaatttatttgcagggctcctttttgatagactaaactgaatacataaagaaatatagggataaaatccagtttccccagaaacttcatttcaacttctctgccatgcccccacatccatgcattttttggttctctcttctgctggtcctcatttggacaccatggttgtgtctataacacctgtgttattactacaggggatatagtaatgcttagcacttttcattgtgaactaattctcaacacaaatgtagttcacaggaaagtaggcaatgcttttatttctggaaagagaaaagtccataaagaacatagaagtattaggtgctagttccttccctgcattctcattcagcaacctactaatgattttaaagcacttgggggacatttggttaaaagaaaatgagtttcataagcaagtggtgtcactttatggagattatactaattgagatcatttatttctgaaagagtagcccaacttaatgggacttaaagcaccaaatatctataatctctctgactcccacagagaagaccaccctgtttggagcagcaatactgctccttaaagtaatataggttgagcatccctaatccaaaaatctgaaatccaaaattatccagaatctaaaacttttttggttgccaacatgccaccacaagtggaaaattccgcacctggccttaggtgacagatggcagctaaaacacagtcaaagctttgtttcaggcacaaactcatttaaaatattgtataaaattacctccaggccatgtgcataagatgtatatgaaacataaatgaatttcgtgtttgttcagacttgggtcccaccaccaagatacctcattatgtatatgcaaatattccaaaatccaatatatatatatatatatatatatatatatatatatatatatattccaaatctgataagagatgcacaccctgtagagcaaatccagatctgttctgagttggaagttcagaaactaattcagcaatgactacacttctggtgcttgcagtatcccataattagttggatgtcataataatccctattctcttttttacaatggcactcttacatcttacaaaatactttaaaggatttaatgttattttaagaatttttggataagttctttaagcccactgacaaaattgaaacaatcctgggggcttgtgaaatctgggttggagattgtagaactttgtttttagaagtatcatctttccctgaatctttcattacctacctgatttattcaactctaattttgcaataaaatggaattctttttctctcaaatttgtttccttaaatcagaatacccaatctaattcccatctgtagatctgcagcttgtggaatcatttcatgtcattctttttaaattggccaacagcatccatttaacaagctatttcccatagcaaagatatccttagttatgattttggatttaagctgcactaaaatataaggaaatattgaaacctttgaagaaagcactaactttacttccttcttccagatctagggatccctggttactcctgaattactcccatcatccaaagctgctctcttctgcttatatataatttgagggaagcacaattctaagaagttacgaaccacccctaagttatgacttttctaaacattccaagtattatgatgactttcagactggagatttgtgctatctgcccagtcaaagtcagccagccatggtgcattcagaacatgtgttgtcaacaaaaactggcatcatagaagtggctaaaggtgtacctcacaggcctggcatcaggttcatcagaggcactgcacgttgagaaacagtggggtaaagtgacatcaccaaggtgaacaggtgaaattcagctccaccttcaaaagttattcttagggaagaaaatcatctcttctctcttcctccttcggctcctgttggccggtgccttcctgaacctgaagaatatctttgctctttccaactcccacattcaaaacagagtcttacaactcagccacattttctgctgagccagccagtgggaacaaacaccaaggtctgtggcaaccaaaggtgtatgtgtgtgtgtgtgagtgtgtgtgtgaga

SEQ ID NO: 11115 - DNA, 2300 bp, Homo sapien
caaaggcatgctagtaattatcagtgataacagaatgaaaagaatacagttggttttgagcttctaacatatggtattgttggctctttctgagaagagagatcctgcttgtgcccaaggaatccctgaggatccctacgtaggacccactcatcccactgctttgtctctctactacagggcagtctgtgtccagccacttctgggaagtggagtatctgattggttaccctgtgtcataaaagagagggcatctgaactaatctctttatgcagagtttcacagcacttcctctgggtcacaccctcatagctccattcaggcaaggtatagatttgagtagaaatatctgtcctgagcatcgaggtaccgcggtgatgcaaatgtaagccccagcacagacagcatgtctgtgtttctagtgagctggcagatggcttttaaagtcaagttacaagtgtgtccaggcacagggacagctgtgtgagcaaaggaacacttttgtgccagggagggagagaggaccagctctagggggaactataggctctgcaggctcagaaagaggcaggtgtgatgaaaaccttccaggagcacctcatcactccgttcaggcctcctgactcattaggagattctggtgacaccccgcctccctggcttcaatctctctagctgtaagcctggggattggaagacttggcacagtctttcctccccaagggtgccgtgctgatgatgtttgcagagtgcatcacactcctctgataaaaggtgtctcctgagtacaaagtatcattgtcactatattccacaatgtggctaaatataggtgtgcaccaatctgctgaagagcagagtgtctcttcagcatttgcctgggaggagcaagtggcccagtggctgcataggatgcagcagaaaagagctggcatgcagcagcagtgtacctgagaccagggcatggggagagggaaaggccctgcatgcccccctggtgggcagccccagcccacttggtgacagtgaggcctgagtgcagcaaggctggagtcatgctgtgaaagcccacagtagcagagcccctgccaggaatatagcaaggagatcacagatcacagagtacattgcacctgccccatgcagtggcggagcaagacgctcaagggtctggagttaagagggaccatttgaggttaagagggaaggagtctcccttgttttggtttttgttttttgttttcccacacagtcccagagggtactgtggtgttctgacacactccctgtgtcagagctgttttttcattatgaccaagacagagcaggtgtgagagctgagcatcctccccttgctgtgctcctctggtctccaaggcaccctccccatgcgctgcttccttccacttaccgccctcgcacggcaccacatcctgagctctgcttgttccctcttcagactggcaggtggttatagaggtgtttggggtgtcagctctgaaatgctaaaaataaaaccaggctttctatcctgggatgtctcattagtttgcttacaaatgagtccccctgcagtttttcagcaattggctaacaagctctaatttgagcgtttgggctggaccttggctcagtgggagcagacgcggagcagacgccttctcggagctgcctgtttggggaagctggtcgtttccactctagctcagcctcccagaacagggaagctgcaggaaagttgacaaaagcacagcaaagcagggagagcctcctcggtagagagcaacgaccaggtgggtgtgggtgtggagagcagtggggcccacctgggcaggtgcggggggatgggaggaggggctgagagtgctctctaagttaaggtcacggtgtagaggagaggacttgaaaacttcctgcagcagcttcgtggcccggtgaaatgttctcagcagcaagcatgaagctctgatttgtaaaaaaatcaatacggcttgcatgccaactatgccttctccaatcctgcatttgtgatgtcagaggttgtcattctgggctatggagcaaacctttcagggttgacccagtccttctaggtcatgtggagtgggccagctttaatgaacctgtctaaaaggaaggaagagaaagagctcagctccttaggggaacaaggtggaccttggcagctgtctcactcctcaccagctcttcacctcagatcttgtcctgacttcctggtccactaacggcctcctggatagaagagtcaggtaatgatccctgcctttcaatactcatt

SEQ ID NO: 11116 - DNA, 2300 bp, Homo sapien
ctgtgggtggagagaggatggatgaagtcatgtgcatcaggcatgtgtttttgatgttttctggaatgtaggaaccaaagctgccccctccttccctcttcgtggctcctcccttcataatggaagctgccgaagtccagctgctgtttgcgcgtgtgcagacccaggatcctctgagacaaagcagcaaggttcagcgggaaccctgcaggtggcaagggagcaagggtctcatctgtcttagcagtagcttgagattggcccctgcaactccgtggcaggaatttagaagctgtgtgaggacaatggagagaagggactaggcccaaactcttcactcaacagggggcaggctgggaggttctggaccacatgctcagagtcagcagtcaggccagatggaacaagaggtcggcagctggactacatggccgtctcttgggctatttggccttcacttcgcctgggaggatgacggggcaggtccctggacagagcagcttctgggcttctggacaatctcaggctgctctgtggctgctggagatgaaagggtcttgccagtcatgttttgccttcctgccaaagtggagagttgtcctgtccatcctcaaggcccctgatgttggttggaatttaccgtatactcttgcagcttcctttattaccactcacttctgcgaggctggagtggacctcgtcttgtttgtcatatgagtgctcaggttttccatcatgctgcagtccagcgggtgccatgaatgtctgctgagtgttgctgtcacagagagaggggagttggttgtgactgcccagtcaccagtgtttttgtgggtttctggcagggctagtgggaccactctgcaaatgaaacttctgttaatattatctcagtgctttattaactaaattcctaagataaagtccagaaagacccatgttagacagaaatcagcaccatgttgcctagaattcccgagaacagcgagtgtgctctcaggaccgaaccacctcgcacatgcctttgtgtagcgtgaacacttttgaatgtgttgaatgcttttgaatgagttaccgtttcttcactcttggaactttccatctctttgccacttttgtttcctgttcacagaccctgtctaattctcccatgcctttccaaagtttggattgttagcactagaatgattatttcttggtaaattcttttattcttaatttcttaaattcttttaacataaatgcacataaattatgttagagtttatgctcttttgttttacaatagcgttttattacaaaggcacatttgagctgagatataatctgacctcctgggcttttgtgtgtttatcccattattcacattttttgtccttagctttttgtagattttcgagtgggccacctctctttgtccttattgcatgtcagcttgtttttgacaagtcatttttctgattttagaatgactctttgacatctcagccactgtgcaaagaaggcaatgtcccttctcccctcctccttatgttccctgcaaatttaatgagatggtcttcgatttccttacttcagctgcgggtggatgtatgaagtgccccatgtccaggcctgatccctttggggggaccctcatggagcacctccctggaataaactgtgactttgacctccccttctggcctcttgggccactaagctttcctctgggctcctttcccttgcaggctaaccccaggggcctgtgacatcagaactccatccccagtgctgtgccaaggtgagtctgcttctgctgggagttattacgagatgaaacctgagggaggaaggccaggtatttcctgaacgtcatggaacacgaggcccaggtgattcagcgaggtcagagtctgctgtggtggcggtggcggcagttggcagaggggagcctggagggaggtggggagttaacgactgcctgcctcctccctgaccccgcctgcctctcagctctaacatgcctgtgatttcatcatgcacacctttgtcaacaatccatttagcaaccaaattatacaccgggtaattatagcttccagcctcatgtcaggagtcccctgctcaacagcgtgctcctggtgatactgccacccgtaacgggtactggctttgctaacatcctgacgagacgtcggggagagacgggaagtggcaggtgggttgccctgacttatgttaattgtctatgtcaggcctgcgggtcttgttttgacagtcccaaaattatgtttggactgctgattagatcaatatgg

SEQ ID NO: 11117 - DNA, 2300 bp, Homo sapien
tgcccacattctgaacactcgatgcttttgaaatgtccttacttcatttactttttttttttgagacagagtctcgctctgtcatctagtctggagtgcaatggcgcgatcttggctcactgcaacctccgcctcctgggttcaagtgattctctgtgccttagcctcctgagtagctgggattacaggtacctgccaccacgcctggctaatttttgtatttttagtagagatggggttttgccatgttggccaggctggtctcgaactcccaacctcaggtgatccacccacctctgcctcccaaagtgctggggttacaggtgtgagccactgtgcccagcctcatggatgtcaatgaggaaggcattgctatccccattttacagataagaaagctggtcgggtgtggtggctcacacctgtaatcccagcactttgggaggctgaggcaggtggatcgcctgaggccaggagttcgagaccagcctgaccaatatagcgaaactctgtctctactaaaaatacaaaaattagccgggtgtggtggcatgcgcctgtagtctcagctactcgggaggctgagacaggagaatggcatgaacccgggagaactgcttgaatctgggaggcggaggttgcaggggagactccgtctcaaaaaaaaaaaaaaaaaacctgagggtcagagagcctgagttacatggttgttagtgaaagagccaggatttgaagtcaggcctggccccaaagctcatgctctttccacagcctttgaactcaggtgactgtgtggccttcagtgctgatgggcatggggttggggatgatggctggtggcctttattgcacggccattgcgcattaatcctagattgacatacaactccttgccaaatctgaggagtttatttgtagttctttcaacctatctctgtattgggagctatagttttgttctcttctcaattgatgttctcttctcatctagctcccagtcagtaaaccctgtcaggtgtgttttagggtctgacagacatgggcaacttcactttcctgtaccagatggtaattttgttcattttactccaacgagatgggaattagaggacataaaagaccagccaataggtttcatgttcctttttatttttccccactacaatgcaatgtcaagtactatccaggtcatacctgcatggcgggattcttcgatgagccaagcagtcctgggccccagagctggggctgatcctgtagagatgagggtggacacgtcagatttactcatgcatctcagcccagtctttgcaagaacagttccagcccgttctagcaaaagagagagagagtgtgtgtatgtgtgtgtgtgtgtgtgtgtgtgtgtgtgtgtgtgaccttttccccagggaagaattgtaggtccctagtaacatctcatcataactttattttatcttaatcagccacagggatgagtttctctccaattcactgatagagacattgtcaaaagagcaaatataaatgattccttttcttttgagacggagtctcgctctgttgcccagactggagtgcagtggcatgatcttggctcactgcaacctccacctcccaggttcaagcaattctcctgcctcagcctccaaagtagcggggattacaggtgcctgctaccacgcctggctaatttttgtattttcagtagagacggggtttcatcatgttggccaggctggtctcgaactcctgacctcaggtgatctgcccgcctcagcctcccaaagtgctgggattacaagcgtgagccactgtggccagcaatataaatgattcctaaagaggaatgggggaatcttcaagcacggatttgctggtatagtatttcttctcccttgatgcagagacatcactcctcccttgtgaagagcccatagtcttggcttgttgatctcattggcttcccaagagaaggatgaatcattatgcggtggtgtcagggtgactccagccacatggggggattcccctgactgaagtgcttcccacagaatgtgaagatcttaggctttctgcttttctcatgttacaaaggaagaaacagagaccctcgaggtggcaggatgagtcaacgtcacagggtgagcaggagagccaggacaggcccctggcagggcactgagctcctctggtgggcctttgacctcccagcaggaaaatatcaacagccctgtttgttccatgtcctctggggacgtttgtgagaaaagtccatgcagctctacacaaaagcacag

SEQ ID NO: 11118 - DNA, 2300 bp, Homo sapien
agagatgggaccagaaagatggtacaatagtgggaggttacaggttatgatgaaaaaatgggggtaggtggtaggtggataaaaatatcatgggaggaactgaaggacttttaagagcagggatttctaattttaggttttttgcatccttaatttaaaaccacttatctgctccaaaccttctaaagagttggctatagaaacaaccaaagaaaaggggctgatttcgaaattatgtgtcagcaggagtagagagaggagagttgtaagaggtgatatgtggagaggtctaagtgttcaggaaaagcaagaactgagagccagaagtgacggtgcaatccttgagaggacattggccgtggggaacaccacaaggtggataagggactcagtcaagttcaagaaaatctctgtggtaggatgactcagctggattacaggagccatttttgttattttcaaccataatttttcaggagatattcattactagaaaatgacaaggtcacgaattcactccccttcctctttttttctattaaatttctgggcctcagttttcccatctataaaatctagagattgggcctagaatatctctgtagtttccattagagtctatagctctaataataataacaacacatttttatgttctcttttgaggtaaatttacatgcagtgaaatgtacaaatcttaaatgtcccattccaagagttttgacaagtgcatatacttctgtaaccgaaactcttagctatagaattttttcatcactacaaaaaattctctcaaactcctccccgacagccaaccactattctgacttttatcactattgattaaataattaatatttaatagctattgttaaatgctaagctttgttttatagagcttcatcagtattaatgcgtgtatttcttacaagagttgcaagatggatatctccatttttgcagatcaaaacgttaagaggtgagaaaggcgcctctggtcatcagctaccaagcacaggggcaggacgtgaactaagaattcgttttagaagcccacgctcttaacctgtttatcctagagtccacaaacgattgccaagaaacagcataaatccaaattcagtcgaaagcaatgccatttgcaaattctaaaacctcctgaataatcctaaaggccatatgcattccatcttatcgaaggattcccttctatccccctccccagagaatggagaaagggggtgcgaaagacttcaattcggtttgactggagaaaaacacagaggtggcgtaggatccacacatcccttgggggcagacccagcggcggacgcctggacaggcggcgggaaaggcgctgcgacgccccgggtgccccctccttcgacgccactggcatcacctccgaaagcagcaggcacgaaggtgccctgccacgggggctggacgcagtggaggcaggctcatcaagcacgaccagagctcagtcggccacacgtcctcctcaatgtcactgtctccctgctctcccaccccgcgccgctgcacctccctccccccggcaacctgggcgggagtcccaagctccgccccagagcggactcacagcccccgcgctccctcccgcgctgcgcccaccgcgcggccgcggctgccatggcaacactacgccgccgccgccttttcacgcacgtcgcgagctaacggactcggcggcggcggcggcggcggcctgcgccccacccgcaccccatctggaccgcatcgctgaatgtgcccggacctgcgccttctgggtaatgaatccgagagaaaggggcgagggcgagacagcaggtggtggagggctctagccaacagcccctctcggcctcccactgccggagacgccagggcagtgggctgcggggttcctcgggcgctggctcccgtgcggggacggggaggggcgcgggagcgccaggctcgcggtgcatcatgggaattgtagttcagcgactcctcgggctcgcggtcttggtggggtagctcggactggcgaactacaaagcccggcggccccgaccgccgggaaagaccgataaactttgagcggaccgggacagaaaaaaaaatctctctttgtcttgagggggctgttgagtggtcgcggacctgggctctgtgcgttgggaaagggaagtggaggtgagcctcgggcttcccgccctgtagctgggcccgccccagttgcagcgctcagccccaccccggctgggccaccgccctgcacagtctcagggatgagcagccgcccaagc

SEQ ID NO: 11119 - DNA, 2300 bp, Homo sapien
taggggaactcccatttataaagccatcagatctcatgagacttattcactaccataagaacagtacgggtgaaaccgcgcccatgattcaattatccccacctggccctgcccttgacaggtgggaattattacaataaagtgagaggtgggtggggacacagccaaactatatcaacaggtcatgtacgtaagctgcttaatatttattgagcagctacactgtggactgaatcaaatagaatatgaggatacatatgtgaaaaaatattattttaatagctggctccagagttcctcttgggaagttactttgtgtaggaaaaaactttggtaaacagtttaggaatggcaggtagctatgaaggcacagattaggagatggaaataaaagtattgtataaagagaggagaggaggggagagatgggaccagaaagatggtacaatagtgggaggttacaggttatgatgaaaaaatgggggtaggtggtaggtggataaaaatatcatgggaggaactgaaggacttttaagagcagggatttctaattttaggttttttgcatccttaatttaaaaccacttatctgctccaaaccttctaaagagttggctatagaaacaaccaaagaaaaggggctgatttcgaaattatgtgtcagcaggagtagagagaggagagttgtaagaggtgatatgtggagaggtctaagtgttcaggaaaagcaagaactgagagccagaagtgacggtgcaatccttgagaggacattggccgtggggaacaccacaaggtggataagggactcagtcaagttcaagaaaatctctgtggtaggatgactcagctggattacaggagccatttttgttattttcaaccataatttttcaggagatattcattactagaaaatgacaaggtcacgaattcactccccttcctctttttttctattaaatttctgggcctcagttttcccatctataaaatctagagattgggcctagaatatctctgtagtttccattagagtctatagctctaataataataacaacacatttttatgttctcttttgaggtaaatttacatgcagtgaaatgtacaaatcttaaatgtcccattccaagagttttgacaagtgcatatacttctgtaaccgaaactcttagctatagaattttttcatcactacaaaaaattctctcaaactcctccccgacagccaaccactattctgacttttatcactattgattaaataattaatatttaatagctattgttaaatgctaagctttgttttatagagcttcatcagtattaatgcgtgtatttcttacaagagttgcaagatggatatctccatttttgcagatcaaaacgttaagaggtgagaaaggcgcctctggtcatcagctaccaagcacaggggcaggacgtgaactaagaattcgttttagaagcccacgctcttaacctgtttatcctagagtccacaaacgattgccaagaaacagcataaatccaaattcagtcgaaagcaatgccatttgcaaattctaaaacctcctgaataatcctaaaggccatatgcattccatcttatcgaaggattcccttctatccccctccccagagaatggagaaagggggtgcgaaagacttcaattcggtttgactggagaaaaacacagaggtggcgtaggatccacacatcccttgggggcagacccagcggcggacgcctggacaggcggcgggaaaggcgctgcgacgccccgggtgccccctccttcgacgccactggcatcacctccgaaagcagcaggcacgaaggtgccctgccacgggggctggacgcagtggaggcaggctcatcaagcacgaccagagctcagtcggccacacgtcctcctcaatgtcactgtctccctgctctcccaccccgcgccgctgcacctccctccccccggcaacctgggcgggagtcccaagctccgccccagagcggactcacagcccccgcgctccctcccgcgctgcgcccaccgcgcggccgcggctgccatggcaacactacgccgccgccgccttttcacgcacgtcgcgagctaacggactcggcggcggcggcggcggcggcctgcgccccacccgcaccccatctggaccgcatcgctgaatgtgcccggacctgcgccttctgggtaatgaatccgagagaaaggggcgagggcgagacagcaggtggtggagggctctagccaacagcccctctcggcctcccact

SEQ ID NO: 11120 - DNA, 2300 bp, Homo sapien
tactacaaatacaaaaattagccaggcatggtggcacacgcatgtagtcccagctactcaggaggctgaggcaggagaatcgcttgaacctgggaggtggaggttgcagtgagccaagatcatgccactgcactccagcctgggcaacagagtgagactccgtctcaaaaaaaaaaaacaaaaagtgcacttcggattctgaagactggcctttatcccacaggcaagggatatgctgtatgacactctcctgatgctgggcatggctgtgagccaaagcacccaggcagccctgccatcagaagggtaaaccacggacacctgatgccttcctgaaggaagagcactacgcctgccaaaccatcaagcgttgatgctccagcgccttctacccgtggttctccagcctcagcagaagagagagaaattgatgaccctgtcgttgtagcatccccatcacccagcaattaattttagttcaatgcttcaaacgctcttcaggcgcagtgtgcgttcagctgtgtcagctaatggtgagtacccggacaaccattctgtttcacattcagtacagtattcaataaatcacatgagatactcaacactgtattataacatagataggcctgtgttacattatgttgcccactgtaagctaatgtaagtgttctgagcacgtttaagggaggcgaggctgagctctgatattcgataggttaggtgtattcaaagcattttagactttcaatattttcaatttacaatggcttttatagggatgtcactccaccgtaggtcgaggagaatatgtagtcaagttgcctggtcatgagcacattttaggtcaaggtgtgttttacgcagcttctagggtttgctccttccttttgagtttgagcctgggggtgtgggttgaggataaagagtaggtgtgggccaggagtggtggctcacatctgtaatcccagcactttgggaggccgaggtgggaggatctcctgagcccaggggttcgagatcagtctggggaagggacgagaccttgtctctacaaaattaaaataaaaataaataaattagccaggcctggtggtgcatgcctgtagtcccagctactcaggagactgaagcaggaggatcacttgagcccaggactttgaggctgcagtgagctatgatcacgccactgcactccagcatgagcaatagagtgagaccctgtctgtattgagagagagagagagagagagagagagagagagagagagagagagagacacacacagagagacagacagagagagaacaaagagcaggtgtgatcggagctcaggaaatcctccctctggtaagtagtctcagccttctattgaggctgccaccacagtgccatccacagcttttgcagaccatgacatacgcaaactgttgtaaaattttggcagtgctcatagtctcagagccaagctttgaaacagagaggcagcaggagacagtgggaggagggtgggattagagacagaaggtctccgggtttgaatcttttctctctattggctggttgtgtgactcttgtctcagcttcttgggctgtacaaagagaaaactaacacctgccttagagacttgtgatgatttaatgtagagtgtgtgacatgttattggatattagcaattgctgatatttataatgaagagcactggaagctgtcacagttctcatagtttattttgcatttgctcctcagcatcctctgctcatctcagtgtctgtgtggtcttagtgggatgctgactatattaatacttgtaaactttactcattttccatctcaaatgggacaagggataaaaattattttttatattgtatatttatttagtaagtgagcactttccattttaggcactggagacacagaaatgaaagagacaacgtgccctcaaggatctcacagtgtgtggtgaggtggacacacacacacatatctaagcacatgacagtgagaggcacgtggtcacgaggttgtgacgtggagctgagagctcagaggaagggctttggatcaagtgtggtcagaccacactcggccatgaaagtctttgaaggtggggaaggggtgaagatggtgaggggattccacggctgggagaggtacactccctacacgttctaaccaactggccgtggggaggaagctggaggtcaggacacaggtagggcctgggtttttgcctcatgtgactgggtggatggtcacaattcggccatgctgtctttgaactcaacaccaccaaaa

SEQ ID NO: 11121 - DNA, 2300 bp, Homo sapien
gcgatataaaaaatcaaattaacacgatgtaggtgatttattccaaatttgatctgttacatttggaggaattggttgttggatttagaagtgtacaaaataccattagagagtgaaaaaaaagggaagtctgttataactgaataggggcgtggtctgctcaggctaaaaggaatagatagtagtttcataaaggactgatataactgtagagtcttcagaactggccactacagccagcacattttctctacagacgtaagtatgtctattaataccagccagcttggtgagttagagaaaccacagcctgtggatttgggcacatgcactctctgcctgcatctaatccttcgggtaaccatatacctacaactcctgtaatcctagagcagttacatggatgcactaagtggtgtgatgggagggaaagatagcatcacaaggattcgtttgattgtaacagtaatccacaccaagtcaaataaaatagccaaacagtttagaatgtggtctctaatgaatttgctaattctaccagggcctcacaaacatttcctgctagagtaccccatatcaaaccaagtggctgttctttaattacatggaataattatttgatttccaggaagttaagacagtgctttgtatttaaataaaaagttctagacatgctgtgaaactcgatcaaaccaagaaaaagggtgaaactgaatgcctgctcactgactcaagatttcagctgctcagcgagcctgacgtgacggcttatgagcccagaaaaggggtattttaaacccggctggctggatcatgtcactttcttatagaagccctgcctttccagagacctaaagtgtaacgcaatcagagacctttgaggggctcgaggctcggcggcttccgcccctcagcaccagcagagaccccagttttcaggggacatgatcccatagtgtcgccctcacttttgaagggccattaaaagcctggggcctcttatctcaacggctttgggcgtgaatgtggggcaagaagggggggggagacctgtgggtgtctcttttgcctgaggagttggagacacttgtggaaaagtcaggcccttttcgctccggcggccgctccggtgtggggctggcttgggttagacacatgcacacatacaccatagagctctgctttcccgtagcagctgctgcctctgcctctgcctctcccgcctcagcctctttgcccggcatacacacacattcagatttgcgcgctgtttcaatccttgatgacgtgtccccggagacagccaatagcaaacgggctctggtcaggacaatgggaggtatcgggccaatgagcgagccccgtgagttggcggtagccaataggagccgcgctggctggagagtaatgttacagagcggagagagtgaggaggctgcgtctggctcccgctctcacagccattgcagtacattgagctccatagagacagcaccggggcaagtgagagccggacgggcactgggcgactctgtgcctcgctgagggtgagtctggggcagcgccgcggcggggagagcgcctccggcagctccccagcccgcgcggcggccggatccccgcggccgggagccggcgggtcaggatccacacaaaggcaaatgaggggggaccgtggggggaactgcgcacggagcgagcctctgcccgggcgccgggaacgctgccccgcgccggtgccccggccctcaggcagcctgaggcgccgggagccccgcgccccgcgagtttccacccccggcggcgtccgcgctgactggcgcaaaaaaaaaaattttttttttaattaaaaaaattttgaacgtgttttgggccctcgggccgggcgttcgggcgggcggcgtgcgcggagcgcggccggggcggcggggccggcgcggctcggcggcggcggcgggagggcagcggcggcgcttccccgggctgcattggccgccgccgcagcgagccgggcgctggcggggagcgcggccagccgggcgggcggcggggcgggcggggcgccgcggcgggcgagggcggcgcgggggcctgggggcggcagtgcgggcccggccggcctcggcccggtcgcggcggcggcggcggccgggcggcggggggagcggcgccgctgcgctcgctggaacatggctgactcgggcccggcgctgctggctggagagaaaacaaggcgggcgggcgggggagctgggcgcagcagttccgaggcaactttttttttcctctctcttttcaca

SEQ ID NO: 11122 - DNA, 2300 bp, Homo sapien
cagctagtaagtagcagagctgggatttgcacccaagtctattcaattccagtgcctattactcaccatatcatcctgtcaaaatagaaaccttgtgtgggcccattgctctcaagatgtcctgtggccataaatgcaccctggcaggagcaagctggtatagacaaccagtaaagtgtatggccgtgccagtacaaagccaacactgctcctggaaaatattgatagtgccatattcaactaatcgtcaaattttaatatcatcgatgccactgaaagtatcttaatcattctcatgaatattttgtaatatgagacattgagaagataagacagtattgaaataaatatctagatttaaaaaatataaaatttgaatgattagtagagggaagcagaggatagtaaatatgtgtgaaaataataacataaaagttaactttagatatattatctttaaacactgcatgtgcagtataccaatttatatcctctttaatattatagtctttttcatgtgcatgtgtgatatattgtccattcaccaagactataatccctgagtccgatagtgtattttcttttaaaaagaaatcaacattaaaacaggaaagattatctaagcttactctcaagtagtttaatacatttgaggaaataaattaggttatggatgcttataagcgatataaaaaatcaaattaacacgatgtaggtgatttattccaaatttgatctgttacatttggaggaattggttgttggatttagaagtgtacaaaataccattagagagtgaaaaaaaagggaagtctgttataactgaataggggcgtggtctgctcaggctaaaaggaatagatagtagtttcataaaggactgatataactgtagagtcttcagaactggccactacagccagcacattttctctacagacgtaagtatgtctattaataccagccagcttggtgagttagagaaaccacagcctgtggatttgggcacatgcactctctgcctgcatctaatccttcgggtaaccatatacctacaactcctgtaatcctagagcagttacatggatgcactaagtggtgtgatgggagggaaagatagcatcacaaggattcgtttgattgtaacagtaatccacaccaagtcaaataaaatagccaaacagtttagaatgtggtctctaatgaatttgctaattctaccagggcctcacaaacatttcctgctagagtaccccatatcaaaccaagtggctgttctttaattacatggaataattatttgatttccaggaagttaagacagtgctttgtatttaaataaaaagttctagacatgctgtgaaactcgatcaaaccaagaaaaagggtgaaactgaatgcctgctcactgactcaagatttcagctgctcagcgagcctgacgtgacggcttatgagcccagaaaaggggtattttaaacccggctggctggatcatgtcactttcttatagaagccctgcctttccagagacctaaagtgtaacgcaatcagagacctttgaggggctcgaggctcggcggcttccgcccctcagcaccagcagagaccccagttttcaggggacatgatcccatagtgtcgccctcacttttgaagggccattaaaagcctggggcctcttatctcaacggctttgggcgtgaatgtggggcaagaagggggggggagacctgtgggtgtctcttttgcctgaggagttggagacacttgtggaaaagtcaggcccttttcgctccggcggccgctccggtgtggggctggcttgggttagacacatgcacacatacaccatagagctctgctttcccgtagcagctgctgcctctgcctctgcctctcccgcctcagcctctttgcccggcatacacacacattcagatttgcgcgctgtttcaatccttgatgacgtgtccccggagacagccaatagcaaacgggctctggtcaggacaatgggaggtatcgggccaatgagcgagccccgtgagttggcggtagccaataggagccgcgctggctggagagtaatgttacagagcggagagagtgaggaggctgcgtctggctcccgctctcacagccattgcagtacattgagctccatagagacagcaccggggcaagtgagagccggacgggcactgggcgactctgtgcctcgctgagggtgagtctggggcagcgccgcggcggggagagcgcctccggcagctccccagcccgcgcggcggccggat

SEQ ID NO: 11123 - DNA, 2300 bp, Homo sapien
agaaatcatagcaagtagcttttatatcccaggtttgggccaaagacttgtattgtggttaaggaatctaacttagtagaaggtgcacgagctgacatcgtgagtggctaaaatgagagaaaaaaagagaaaatcctaatcatacagaagcactgaactactgcagctgttcgttagttattaatttaataaaagcttcctccctttaaatcatgtgagtttataactggaaataggtcaataaaatttctgtcccacactgctgacaagcgatggacgcaattagctttaatcccactggaaggtactgcactctctctgggaccaggatatgtagaaaaaagcatttcaaatatataggaataaccagaaatgtatacagtattctcaacttgggaccgttactctataatataaacgaaaggggttttctagtcaatctctgctgatctcctgtaccaaagttcttccctttataagtcttgtactaccttttacaagaggaaaaagctctagagcgaaaacacagaacacactaaaatcccttcctttctctttacaactcaagccccgcctccattttgtttctgttactaatttttcttctgaaaaaataccaaatttacactgaaagactaaaattcaactttgcagacaacgttttaaaaaatacaattcagtttggtgatgttgttttgcagtcttacaattttagctacattttaactgaaccaattgttttgttcaatttatgagttaatactcagcaagtttgttttttacaaatagtgtattccattctaaaaatggaagtagcagtggtgaacaagaaaacaaccctctgagttttgtctatttcaggaggaagtactactttctccaattttaatcacaattcataaaaaagaaaaacctaactagctagatcttaaatatacaaatacattaacaatctagtaaagcaacagaaaaaggtaaacaaactaaccagcctatttttgtctggagaaaccccaacaaactgctggattccttggccatttgcattcagaagtaccaaaaactaaaatcctttttactaaataatttcttctacacgagacttgtttcctccacaccaccctatccaaattgtcagcattattccagaatataatcatttagtttgagaccactaaaaaaccccgcagtccaaaataccaattgtggtttttctgtaaagaaatggtcagaaactacaaattgttatcctaggacacagaaccaatcgaccaaaaggacttctggaatatgctgcccccaagatttagaatgcacaggcagaaatagcatacgcggtcacgatgtcccttaagccacatgaccttcctacgaaagcaaaggcttaaacttatcaaatgagaactccccctttctctgaagttaaaacaaggcagggcagctggaattagagcagcagggacagatcggctgttgactagtcagaacgggtcgtggaatgcaaagtccctgcgctttcgctgctccccttaccgtgagaagatctgggagggaggaaaggaggagaaacaccccagaatcctggtagaaaagcccctggcctcgaagatgggctctagggagacagggaggggcagctccgtgtgtgatgaccctttgtgaacatgcactctgtggcagcttcagctccaccgaggctttgggagagcggactacggatgcccggcgcggcccagctgtgaaggccgcgccggcggagagggtccatggcacccccgccggcttcggaagcccttccctctcccacctccgcgggtcaccccaggaaccagcggctcccgaccacgctcgcgcggaccacggaacagcgacgcgcaagcaggtctctttcgtcagcgtaatccctccgcagaaagccgcgcactagttttaatcacgccccaccccctggccgctggcgccacctccgccactcgggcgctttccagcagcttccagaaacgtcgcctccccaaacccagccactcacacatggcgggctcagcagccaccggccccgcccctcctcgtcgccgcagtcgcaactgcgtctgcggccacagggcggacagccacgcctctgcggagggcgaccggaagtgctcacgtcttcaccttccccgccacgccaccgtcctttcaggcccagcgtgcagcaggaaggaggactcttttgccgcggactcaagccggaagccgccttcctagtggagacgcgagtgggggaggagcagtccgaggggaacgtgggttgaacgttg

SEQ ID NO: 11124 - DNA, 2300 bp, Homo sapien
cttgtaaaattagtttcttctaagaattaaatgagataaagcatgtaaaaagtttagcacctgacaaattaaagttactatttggtgctaattttatacttcattctgcgtagagaagcagtacacgtcgtatcattctgcggtactctcaaatgggaaactagtaggctatgtaccttgaataaactgtttttgatgaaaatttccatctacctgagggaacctagaaaactttttcaaatcaaacggttttctctttgtctctctcaattataaaatataaagagtctccaaatctgctctcctgattccatcacccaacatttcagcgggaaaaaccagataggttggtggttgaaatcccgaatatatagaatcccccaaaagaaaattcatttaataccagaggtttatttgtccatatgagggacataaaaaaaataccagaggtgggctccccagttcttcttccaaatacaattcactttgacttacatacaaaatcccgggggggattttacaacttaatttgaccctaagtaactgctcttcctcccttcaaaaacaatctgctcctccttcccatatctcacttaaatgtgggcgtctccatccttccaaacacacagactagaaagtcttgagttgttccctattctttatttccctcttcgcacagtaagtcaccaaattctgtggacagttctttggaaaggtctcaaatctctacctctttcccttccatatcactgtcaaaatgatgcctctacaagtctgagcctgtcaatgcttagtttaaaattctctatttactctagcctgattacagcaaactccgtccaaacagcccaatataacctaaaggtagtattatgacctaaagctcattgtactgtgaaaccaacctagctttccagttctgtcttcctcaactctacttcacccccagcatctttcttctaacatccccttttcatacttctgtgaaccacttatactccagaagccttaatgtgaattattagcccagcatgaacccagttagatagcacaatgaacgtgtcaaggtggccctgggaatcgcaaaaagtattcaattaaacttaattcacactcctgtgtgcaaaatggagaaacccagggaaacagctgttcgaagagggggccttaaacccacccatttgagctcgccctccgagagcgagtaggctcggcacgtgaactgtcaaaagcgaggccacaaccgacctggaagccgaggaacagggtcagctttctgcacccagccctgtcaggtaccaaacccaactgtcttgaatcagagacgaacaggaccaaaggaggtgagtttcaacacccaaactaagaagccgaaggaggcgcagggtccgttaaccctgcccatctccacgctccttggaaaacgaaaacaaactctggtttctcttcagcgttcacctctctgcgcccaaacggatctgtaagtccaactctataccttaatcatcaacctttcccacttgaaccccgtcccagcccagcccatcctttcagcgcgccgactaccccataggtcatcccagctctgtctcttttcccaatttcgagagcggaaagaaacccctccctcttctcccttacctgccgcgggcactccccttcttggtaccgggtcgatcggaactcctgttccagcttgatctccaccctagttgcaacgttcaacccacgttcccctcggactgctcctcccccactcgcgtctccactaggaaggcggcttccggcttgagtccgcggcaaaagagtcctccttcctgctgcacgctgggcctgaaaggacggtggcgtggcggggaaggtgaagacgtgagcacttccggtcgccctccgcagaggcgtggctgtccgccctgtggccgcagacgcagttgcgactgcggcgacgaggaggggcggggccggtggctgctgagcccgccatgtgtgagtggctgggtttggggaggcgacgtttctggaagctgctggaaagcgcccgagtggcggaggtggcgccagcggccagggggtggggcgtgattaaaactagtgcgcggctttctgcggagggattacgctgacgaaagagacctgcttgcgcgtcgctgttccgtggtccgcgcgagcgtggtcgggagccgctggttcctggggtgacccgcggaggtgggagagggaagggcttccgaagccggcgggggtgccatggaccctctccgccggcgcggccttcacagctgggccgcgccgggcatccg

SEQ ID NO: 11125 - DNA, 2300 bp, Homo sapien
agaaggagtgttccagaagaagggcttgtcctcttgagccagtgcttatcaggcctctatgtatatcatgtgtgctaatgttccatcaaagctagtcacagggccaagccaactctgtacagtgtagggactggctgcaggagggcatgaattaccaggaggtgtagttctctagttcatagggagggccatcaagatagtagtctaccatacttgtgtaaaagaaggcattaattaactattattattattattattattattttagagacagggtcttgctctgttgcccaggctggagcagtagagtggggcaatcatagctcattgcagcctccaactcctgggcttaagcaatcctcccatctcagcctcccaagtagctgggaatacgggagtgtactgccatgcccacctgaaaaagaaggcatattttaaaagcagacctttagtgtagagggttcttgaatttgttatttaaaatattctggtagtttttaaacttaggaaagacccactgattcttttagtgatatgtttacattgttgttatttggcataaattgtgttaatgcacagtaagatttcatgaagtcattaaaattcagccacttggactctaaacccaataaagatgtaaaacagcagtgctatgagatgcatattcagtttcaaaatataggaaacacagaaattactctgtgcacttttaatttgaaaatacttttaaaatgtgtagtataatgtagtgtctgtcccaaaagagtaacattcattatagtgtttctttacgttgttgaaaattttaaattcacttaacattagatttttattaaagcaaaaatatgttttccttattagcttacccttttgtaactcagattaaacccttgattgttcaaattaacctgaaaaaaattattcttttggaggccaaacttttgattaagtagttgtttgtctctaattttttcaaatttatgtgtataaatataacctgtcatcaaatcaatgctaacattctatacatgtttttcatgatatgaaaactataaaacatgaagttatttgaatttgtgtagtttttatcattttatttttactttccagtgcatctatcctttgggctctaaatcacttaataacctaatttctcctgatttggaagaatgtcacactccacataagcctcagaaaaggaagagcttagaaagcagctataaggattcacttcttttagcaaattccaaaaagactagaaattatattgctattgacggtggaaaagttttgaacagcaaacataatggagaagtatatgacgaaacctcgtcaaacttacctgatagtagtggtcaacagaatccaattaggacagctgattccttggagcggaatgagattttggaagctgatactgttgacatggctactacaaaagatcctgctacagttgatgtctctggaactggcagaccttcccctcaaaatgaaggatgtacatctaaactggaaatgccactggagagcaaatgtacatcatttccccaggctttatgtgtccagtggaaaaatgcttatgctctctgttggttagactgtatcctgtcagctttggtgcactcggaagagttaaagaacaccgtgactggactgtgctcgaaggaggaatctatattctggcggttgcttacaaaatataatcaagcaaatacacttctatataccagtcaattgagtggtgttaaaggttggtactaatattttatttttatttacttatttattcatctggagtcagggtctcattctgtcacccaggctggagtgcagtggcatgatcatgtctccttgcagccttgacttccctggctcaggtgggcctcccacctcagtctcccaagtagctggaactacagtcgtgcaccaccatagccagctaagatagtgagatggtggccccactgtcttgcccaggctggactcgatttcctgggtgcaagcacccttcccgcctcagcctcccaaagtgctgggattacaggcatgagtcaccattccagcctacttgtctttaattcttaaaaatattaatgttgagttttgtctcccagcatgtgggaaagatgtcatccattgcttctgtttcctggaggcctgggagcaaggagcccaggaacagtatcacgaagcttgagataataccagttacattatcctgactgcccaaaaggcagtttttttgttttttttttttatactttaagttctggggtacatgtgcagaacgtgcagttttg

SEQ ID NO: 11126 - DNA, 2300 bp, Homo sapien
tatattaggtatttctcctaatgctgtccttccccaacccctccattccccatcaggccccagtgtgtgatgttcccctccctgtgtccatgtgttctcattgttcaactgtcacttatgagtgagaatatatggtgtttggttttttgttcttgtgttagtttgctgagaatgatggtttccagctttatccatgtccctgcaaaggacatgaactcatccttttttatggctgcatagtattctatggtgtatatgtgccacattttctttatccagtctatcattgatgggcatttgggttggttccaagtctttgctattgtgatttttttttttttttttttttttttaagacagagcctcactctgttgcccaggctggagtgcgatggcatgatctcagctcactgcaacctccgcctctcaggttcaagcaattcttctgcctcagcctcccaagtagctgggactacaggcgcccaccaccaggcccagctaatttttgtatttttagtagagacagggtttcaccatgttggtcaggctggtcttgaactccagacctcatgatctgcctgccttggcctcccaaagtgctgaaattacaggtgtgagccaccatacctggcctaggcagtctttttcaaaactctaagactgtgcttgtgtctcagggtgtcaggataatagtggttagttttaagtgtttaaactactgaaaagcagaatgaagaagtgagtaaaaatcacccataatcacacaacctcctaagatctcttggcacaataagggatatgtttttcattttattctctgtaaaataggatacttatgaacccacctcccaacacaggaagaattaaaacattcccaataacttacatttacctatgcgtttcctcccatcccattctctacctcccccccataagtaatcattatctgaaatgtgtttcatcattccatcttttcttagtttttcttacatgtgtttatctaaacagtatacagtagtctccccttattgtagttgtacttttcttggtttcatttaacccgaggtctgaaagtagatgagtatagtacagtaatatattttgagagagagggagaccacattcacataactttcattacagcatattgttataattgttgtattttattattagttttaatcttactatgcctaattataaaacttgatcataggtatgtagttataggaaaaagcataatatataaaatgtttagttactatccaaggttttaggcatccactggggtcttggaaggtatccctctcagataatgggggatggatggtactgaaccctgtatatacaatgtttttccctatacatacataattatgatcaagtttaattaagagtaaattaaatgtgggccaggtgcagtggctcacatctgtaatcccagcactttaggaagctgaagcgggcagatctcatgaggtcaagagttcgagaccagcctggccaacatggtgaaaccccatctctactaaaaaatacaaaaattggctggctatggtggcacacgcctgtagtcacagctactctgggaggttgaggcaggagaattgcttgaacccaggaggtggaagttgaacaatcacttgaacctgggatcacgccactgcactccaacctgcctgggtgatagaatgagactctgtctcaaaaaaaaaaaaaaaaaaaaaaaagtaaagtaaatgtggctcaacatgttgctgtcagttggaacatttgtttctgatcgtgtcttccacccacaaattgaatgctttttccatcttaacacttatcaggcactgtggccataacttgagcagttgagatgcaacagcaaaattagcacaaatttctttttctttcttcgcagtttcatggataagagatttgttcttagatctcagcaacctcagcatatgatttttttctttaagttgagaactttgacctttttacttagagaagcattttacagcttctctttggcatatctgaattgccagcattactatgctcgtgctttggggccattattaagtcaaataagggttgcttgaacacaagcactgcaataccatggcaatagatcgcatcaccaagatggctgctaagtgaaccacaggcaggagtgtagacagcatggacacattagacgaagggaagattcacgttgccagtggaacacagcaggacagcaagagagttcatgatgctactcagaatggcatgaaatttaaagcttataaattgtttctggaatt

SEQ ID NO: 11127 - DNA, 2300 bp, Homo sapien
actccttggctaccaaaacctaaacatcccctgaaacttaccaaactgcaggtatgaattggatctcactaaggtgaatatacaaatcttgcaagtgctgagccctaaccaatcttgtaataactctgtggtagttaattttatgtcaaattgattgagctaaaaaatgcccaggtagctggtaaaatgtttttttctgggtgtgttagggagggtgtttctgaaagagatcagcactggaatcagcggactaagtaaagaattcccaccctcaccaatatggtgggtgtcatcaatccactgagggcctgaatagaacaaaaagcgggcagaagggcaaattccctcttcttcttgagctgggccatccatcttctcctgcccttggacactggagccccttgttctccagcttttggattcagactgggtcttgcaccattgccctccatcttctcctgcccttggacactggagccccttgttctccagcttttggattcagactgggtcttgcaccattgccctccttgatgctcaggcctttgaatgcagactggtctccaccagcagcttttctgagtctccagcttgcagatggcaaaccatgaaacttcatggtgtccatgagcatgtgaaccaatttctattataaatctgcaatatatatatatgaggagacttatttatatattggttcagtttctctggagagccttggctaatataaagtctatactctacaaagtgccctaggtactcagggagtacccaagtgtgtcatgaccagcccgacagccctggctgctggcttccccgcacacaactctgcacgctgccttcatcagcctttctctctcagctgaaccgagggcattgaagcgggcctctggcactgtacctatgagggagcaatatcttcccctacactgacctcttccgtgccgagatgcagccctccctgctgccactagttacagtggtccatgttccctttcaaagtgaagttttgataaaagcacctcttaaccaatgccaaatagctaagtctgggacaaagattgcaggtattttgcattttccatgtaacctcagagggattgccattcacactgatctgagctgcagaataccaggcagccacctcacccacccagcaggtccactcttatactttctcagaaagcacagccactctactcttattcagttgaaaagaatttccaggaaggtgtttctgcgattgcctcagaaaagtcagttccctttgggaatttcccttagggatcatctgtaactccatttctgccttttacctgaattctttggtttggtttgaattctttggtttaatttatgaattccctttattacttttctctgaagaaatggagatatcagctgtccctccccactgccatttattccttccttcattcaaaccttatgtggctgctacttaccgtgtgttaagtgttcactttttttcttggaattcaaaaaaagaaggacagtatttggggcacagatcttttggtgttctatacatttttttaaagtttcattttacatttgtgtgtgcgtgtgtgtgtgtgtgtgagacagtcttgctctgttgcccaggctggagtgcagtggcataatcattggctcactgtagcctcaaagtcctgggcccaagcaatcttcccacctcagccacccaaaatgctggggttacaggtttatgccactctgtctgacctgaaagttttgggtttactttcccttctttctctttgctgaagtcagagatgatggcagcttccagattctctggtgcctgtgctgggctcgtgctggtcatggtcttgggtccaggattcattctggagactctcagggaagtttcccatgacaaggaaatgtaggagagtgtgctggctttgcgtgctcctctgccaagccctgcttctcctggtgggacacactgaaccacagccagggcattttggtggttagttaaaaaaaaaaaaaaaaaaaaaaaaaggaagaagaaggcactgtgtaattgtgccggggatcttcagaaattgtaatgatgaaagagtgcaagctctcacttccccttcctgtacagggcaggttgtgcagctggaggcagagcagtcctctctggggagcctgaagcaaacatggatcaagaaactgtaggcaatgttgtcctgttggccatcgtcaccctcatcagcgtggtccagaatggtaaggaaagcccttcactcagggaagaacagaaggggagattttctttgatggtt

SEQ ID NO: 11128 - DNA, 2300 bp, Homo sapien
gtgtcaccatctctctgggtacccaagcaagagactaagtgggtctctctgctctttttcatttatttactcataagatccttcctgctgactctgactcaaaaatgttgaaacctcatctccattcccacagctgcttctgttcagacccccatcatatgttatctggattattacatcaatctcctaactggtttctctgcctctgatcttcctgtttcaaaacatcttctttggtcataaccaaaggtgtctatctgaactgaggcataattatatcacttcctttctttaaaacatcccaaggctcctcattgtcttaagaatccaaattcctgacaactcagagggtctgtcacaatctggctccaacagccctttctggtctcatctcatataaaactgacccctcttatcccaaataggatggtctgccctagctgtttaaaaatttcccccctcccccagatggaaccatagcatctctctttgcatagaatggtacagaatcttctctcccatctccttattgctgctgctccttcccctgggagcctcccctgtgtattggaagtctagccatgtgtcacctcctttgagcacccttcttggggcagaaccacttatttctcatagtgcttagtccatacatctatggtagcacttattggatccttgtgtgtgtgtgtgtgtgacctcagagcttaagatggtccctggtgcatagtgatgactctgtcaatgtttgggacaagagtgaagttctaaatagggcacaatggatttaactgctggcaccaaatccctcccctgtgaaaacagccccagcctctgagtcctgtctacagtctcagcccaccccagacccattctctttgcagggatcctcaaacctccctttgcaagaagatcttctggatgcttttttcacaggtagagcatccttcctgcgccacaaaaggttgagtgggtagtgatcaattcatgctcagtgaattagatttgttcagagaggcccagagatggggtaatgatcccatgggtaaaagatccatgtctggagaaaggataggtgtgcacctagaagaagagaagagagtggggctcatttatattctgagatttaaatgagatgtggcgggaggactcttcatcccatctgattaaacctacacaagagttcatgtgggggcacacaaagactaactaaggatattctctacgttctactcaacttttgggatgtagcttagaatcctaaaacacagtactacagaaagcctcgaaactaggctagattctcctcccatcccatccaggcttctccgcagcagaaataggtgtttaattaaatggaataatatagttctcctttcatacctcaggagatcaatgagcccatagctagcactcacatatttatagactgaagaaatgaacatattctggggctcaaggagatcaccacctactggggaggcaggggagaagggaggatgctaggaccctgctatccccactacacggcacattgcagtctagggttcaccgtgcagtagaaaggagaagcaaagcgatgaaaccctcgtgggattcgtgaaggctttatggaaaagcgatgtgatgatcagtgggatttctagggggaagggatccagggccagcaaccagctgaaggaaaggctgaaaggagggaaatgcagggtacgatctggatggagttaaaatggcagaaaactgaggctgagtgagaggtctggtactgaggtggggatcggagttccagcactggcctttgacagcctctgggtcccaggtggaatgggtagggccagagcccttgccttcttctccaatcaacaccaggggtgtggtgtcttaggcaaggatgggtgctgtgcgccctgccgcccaccataggcagggcctgggaacccggggaggactctccccacctccagcctccggcagtgtccgccaggcagggcgggggccagcgctggtgttgagtagtggaccccagggggatgactaagccttgcctgcgagcagactcgagcatgccaagttatgagacgatgataactctgccccgagcctctggggtcgtggccgtgggccggcaggggcgaggcgggcgtccagagggcggataaaaggggccgcgctgcgccggggccgctttctccgcgcggtgcctgcagggctcccagcgagtggcagcttgggaggggccgcccgggcggtcagactggcacctgagcggccaccgcgtcccggccaggcgggcagaccgaccc

SEQ ID NO: 11129 - DNA, 2300 bp, Homo sapien
ggcaagagggacgggcgagcacaggggcgccctgcactgcctccgtccactgtcccctttctagactctgagcccctccagcacaagaaggcaatgagacacatgtaaatgctcacctggtgcccggctcatcagcaggactcaatgaagttactcagtgaatgaatgaatgagcccagcaaatggtggttttctttttcctgccttctcctttgctttctttctctagtaacttttggcagttggtcaactgggataaaaaaaagggcaggaaaattctctcccagctgatgtgcaacaccagcaccactcccctcagtctcctgaggttcccccatctcaccccctttctcctgttctgcccaggtgaggatgagggcaggggaggggtgaaggaagacccataccaaagccatgtgtgggtctgcattctcttacctggccatccattcccttgtaacaccccagcgccccaccccagcgcccctcctccattcccatcgtcctctcctctactcctgccatcctcacccactccgtgagcatcaacatccacacccacctttttcttctctggaacactgcagccccatgttcccctccctaccccaggaacagctcccaagcagccaccactacagatgtggtgggaggtggagactgctttaaaagcttggtgaaatagaagacaggaagcattttagaggctccatcaggggtcaggttttaaatgctctcaaaatcaggtctgacaatcccagcagaaagataatgacatagatttctaagaaaccaagctgggagacagccgagcggaagccgtgttttcctgcctcagggtagatattctctcgcatgctcttgacacatgccccggtcactgtcttgtgtgctggcccctccgagggatggtgggaagtggacgcaggtgagggatgcctagagtactgtgggcaccactccctgcagcggctgttttctcgccaaggctgtgattttcatgtcaggcactggaaggacaatcagccagaaagaattgcttggagctgtctctgctgatgactagatataagaaacaaacatgctgtggtgtagcaaaaggcagcccgcgcgctcagctcagccagccattcgctccgtgcagatgctcgcagctgtgtcaatggggaaccagctctgtgtttcagagagactgcggcagacgcatccttcagcctgctgggggccattcagcctacctacatccacatggcatctgagcttgggtttagttagaaaattaactaacttcttgaaggaagctaatctgcacttggacctttttatgaacaatgctgacagggatgtagctaggctgcttggaagatgtgaagggcagggaagaaagctaacatgctggatgacagagtcaggattcagaaagatcttcctaaatgagaataatgaaaaccaaaaaggctaaatttaacaaggatgtagtgaaaagtccaacatcagttgttttcgttttttaattacacaagttcagcgtaggagagatgtgaactagtaatagttcatatgaatattggttgattctgtaatctatggagggggctggtttatcttgggattagtggggaagtggggagaaggaaaggaaaattcaagacccacaagttaaacaggatgactccactggagaaaattcagctaattctactattatgtcgaattcattatcaattcagagggacttagagctcttatagcttcaaatgaacgcttttagcccaaacgacagatgatactggtgatcatctggtaaagtctgagagccaagtgttgatgccaggacacccctagggccatggctgcctgtgggctgcacgctgatccttgagccaatcagccatgaccagaaagattcgtttatatggtgacctctgtaaggatgcatttcaaggaacttccctccaaggtctgtggctgtggcagatacctgtccagtacatccccttcctaatttagatgaaagggtacgttacatttgcaatgatctctgcttcttcataggtatgtggaactgaccaactactgtgattataaagactacagggaaactatattgagcaaaccaatgttgttctttattaatgtacagaccaaaaaagacacctcaaaaggtaagtatctatattagtccattttcacactgctataaagaaatacctaaaactgggtaatttataaagaaaagaggtttaattggctcacggttctgcaggctatacaggcttctgcttctggggaggcctcag

SEQ ID NO: 11130 - DNA, 2300 bp, Homo sapien
cccacgcaaaaatacactttgaagtagaaagactataaaaggaatgaagatcagaatagcaacaagagcaatatcttagatttgtgtgattttacaatttataaattattgttagaactcatcatgtttacagcacagtgaggtgggtgctggtattctcatttacagataaggagaccagggatcagggaaggatttgcttacccctaagggcctgcagtgacagaaagatcctttggctctctatttggttcctaccgcaccatttcacagcttgcctaaaatgagacaaattgtaagatattaataagaattcactttcaaaattctatatacttgctgctctattttaaacatatatttctcttaaattatgctatgctaattagctctaccatttccagacagtaatctgttattgggtgctactttttaaatttagatgccactactaaatcctaatttagactcattccttttaataacatctatgccttctaatgtgttccaccctccattgcttcaaaacatgagagtttataatgtgttatattcattccattatatggatagaactctaccttcaggaaattctagtttagctcttcattttaaagacattccttgcacatatatttgggatccttaccttgatgctttttctgtctcctttgataaattcctcctttgtcacactgcactgtttctctgaggtcttgtattagaatagccccttaagaataaggaactgttgtaaattgctttgtaaacaggttgccagccaactccaaaatgtatttcctgtcttctcttttcacccaagtgggtaataactgtgttgtaacctggagacagtcagtagttactaaccacctagtatgtcaaattaccaggtaaggttatccagcaaaaggggctcactgcactagaagccaacactatgacaccaagtttttgagaaaaggaaagcttcacattgcaagttaacttctgaggaaacaaaagtccagttcaaatctgtcttgtactggctttagggcagtaattttattacaaaaggtttagggttggatcctggggttagcaggtgattggtggaagcaaagggaacatctgggaagtcttcaggcatgcatggctctctcttcatgcttcctggtgggtcccatgtgcaaatttggagggagttggtatgaaacatgcagtagaaattcaggctgtgacatcagcaagcttgctgtgcgcaaactgcatttggccatattgattccggctgatttcagtcagttttgttataagcagagggagtttcagcaaattgtttcttttcttatctgcccctgaaaacaagaatttctgttagttattggtgtctttgactctttgaaacagtttcagtagttcccaagatatgaagataaaagacccccttcatcagtgaaaactcttacaaggggatgaaagacacagcttcctctatgagagcacaagaacaattaaattgaccctcacaaacactatggttggtgccaggaacgtggcctggtgaggaggacagtgtcacatcctccctgcccactcctgtttccacgcgtgcatttcctcttctgcccctctcctaagccaggatgacccttctgaccgcgtggaactatcacagaaactgcttccatttataccagatgacttgggattcagtcttcttgcttggtttttattgactgcaaaaatccatgacaactttgcgcacatttgcttaagctgaaagcaaatggatgaaagtttgtagttgaaaatctactttctcttcaatctcttccctttttgcttttcttaggaaacatacaagacagtggtccggaaagctcactgcaagaactgtacaaataatgtaaaagtaaggcatccataagatcaaagccacatttctttgctctctgcaccccattcccgcgccggccaggttaagcctcctgcgtggccagcaccccttggcaggggcagaactccctggaacccgatccttgtctccatggcgacgcgtcacaaagcagcccgcggctcccgcaagcgctgagatagctggagccagggccccgcggccgcctcctggggcagaatggaacagcctgggcccagggctccggatccctctctctgccaccacaacctccagccaagtaagacagcagactctgccggtctgcggggcggggctggggtctttcccggggaaagggtcctgttgagaaaaaggggccttagtatttaagggtgtggcatcgctcttaggagtatgc

SEQ ID NO: 11131 - DNA, 2300 bp, Homo sapien
agctcccacgggctccatggagtgttgcagccccagctgtgcttccctgctgcagccagcatgatggcagcagccactgccatcactagcagtgccgatggctacctgaagctggaagacgtaaggaccacttctcccctagggcctgtagagggagtgcagacttgtccagaccttgatttcaggctctcgaccttcagagctgtgagcaaatacatttttgttgtttgaatccaccagtctgtgggaacacatagcagccacaggaaactaatacaacacctgagagccccatctgtagtaattattcaataacagttagtcatcagtcaccatcaacctcatcctatttcggaccaaacctgggcagtggggacacatcaagcctaccatttggagggtgactctcccagcagtggggaatgaagtggcacagagtagccattagaggcccaagcctggaggtaaaggggcgaattcacctgggggaaaaagagctttggaggcagaatcaaagagacctggtgatcaaactgcagtctcaaggaagctgccttcccttctaaattgagcagctaggaccctcttaactgaactctcaaagtctggaaggtttgaggaggacaaggagtgtgattttgcacatgtcaagttggaggccctgctgtgacacccacatggaactgtctggtagacagttagatattctggtctgaaaaagtaggaagaaagtccaagtcagagataaaggttagagagttgttggcacctttatgcagcacttgaagccctgtgcaggatatggtcacaaagagaaggtaagcctagaaggatcaatcctgggggactccaacagttcccagacaagaaggggatgaaatggggagacagtgggaaaacagggtggttagaaagggaagagaagcatccaaaggggtgctgtcgggatgctaggaggggatcctccctcctctgtctctcctgtttgccttcccatcatatagaaactgagtgtattagatattttctgcactaattaagtattttcattttccattcttaatttacaacggaatgaattggaatgaaaatatgcatttcattcactcttttgggagcacaattctagggaatttgtacttgaacaatccttcactgctccatagccactgtggaatcacagttacccaactatacagcagcaatggccaattattgccacaagagactatgatggagctgactacacggtaatcatgccactagcgtcacagctagagtggttctccctccacagacccaaaaggctgaactggtgaacctgctgcatctgtgggcagaattaggatgaaaagcactacctctgtgaaatacaaaatctctgtggaagaaaaatcaattcaggttagaggcggcagctgaaggccatggctcccagcctggtgcgacagcccagggagggcgtctgcctctgcagacacagctgggactccattcagcagccaacccttcccccactttccttgctgtttccaagatcctatatggggatcgggactcaggcaggacctgttctcttcagagcttccaggacttctctttcttctttgcctttggccctgttttccttggaaaatcaccagttcttccttttttcctgtcccctcttagccaggcacttcctcgagtgtttaaaaaccctgcgcgttttagggagcggggatttggcaaaggttatgcgaaggactgaaaaggggcagcgtcatgaaggccctgtcattctccctgactccccgtcttttcctcagttgagcatactcctaagagcgatgccacacccttaaatactaaggcccctttttctcaacaggaccctttccccgggaaagaccccagccccgccccgcagaccggcagagtctgctgtcttacttggctggaggttgtggtggcagagagagggatccggagccctgggcccaggctgttccattctgccccaggaggcggccgcggggccctggctccagctatctcagcgcttgcgggagccgcgggctgctttgtgacgcgtcgccatggagacaaggatcgggttccagggagttctgcccctgccaaggggtgctggccacgcaggaggcttaacctggccggcgcgggaatggggtgcagagagcaaagaaatgtggctttgatcttatggatgccttacttttacattatttgtacagttcttgcagtgagctttccggaccactgtcttgtatgtttcctaagaaaagcaaaaagggaagaga

SEQ ID NO: 11132 - DNA, 2300 bp, Homo sapien
taaggcaaatcgattaaataaaagggggctacaccatgactacacaacacatccacagcagtacaagattaaagtttgtactgactttcactgaatgatattacttctattactacaatttatcaaataccaccataccatgttttatttatatctaatccttccaaaatcctagcaaaaataggtattacttccattttacagtcgaggaaacagagggcaaagaggaatttgacaaagatgacagactttatatgtttatgtttatatatgtttagtgctttacatatagtttccatcattacataaacaccatgagatggaatacagaaaggcttagtaattatcgcaacatcacacagctcacaaataagaatagctaggattcaagcccatgatgtctgactccaggaggcctggtgcccttacaagctgtactttatataaaacatcttagtagagtgccaaggatttgaacctgacccaaatctgtctggctccaaagactgagaactgttcatgtctcctcttcgtacggcagttaaaatgtgggaagcagaccaaataatctcaaaggttctttctgttcaaaattgctatgtctccatggattttattataaggttttgatatgtaagaaaaagttggtgggcggggggtggggacagaaaccaagtttttgggatgcataacaaaaataacttatagttacagctaactatatgtccaaatgtaagaacacaacaaccccgtgataactattattgctcccattttaaaggtgagttaactgaagcatgttaagtaagccacctaagtggcaggaaaactagcaaaagcacatacaatttacatgtaatgtaaacctgggcctttcgtcttgcctctgacttaaccaacttgttttgatagacaaggaggaattcccatactctttatgagttagatttttctaactttaggttacaactccttattcaattacacgcttatccaataacatatttgaactgtgcttatacttccacatgcctgacataaggtaaactcagggatcagaagcaaacttaaaaagacacaaaagggtataaaagacctgataagttatcagcaacacagttccaccttttcttacactgtctctttactgaacaaaagttaacggggacatcgcttctgagggaaagaaacaaaagctgcttcagatcaaacaaaaagcaaaacttacacacagtaccaatttatggctaggagtggcagggtagaacagcgtcggcttaaatcagaccttttaaaaataagcagaaagtgataccgtggacagcctgccaaatgacgtcacaactaaaaatcgatttcttaaaaaaaaaaacacctgacattttactccacaagagatcatcctgctgcctgatgaatacaagaacacttaacacaacccctttgcttttattataagcggtttgaactggtgttccttctcctaagtcgtaacgcaccagttgtcggggtaatccagacaataatagaagtgaatacaaaacaaacgaacaaaatgacgcttattgccagggaacccgcgcaaaagcgccagacaaaaccctacccagcctctctcgcgagtcccagaagacaaagccgggtcccagcaagcactgcggccaggactacacatcccagcatgcaaggcgcacacttctcccagcgggactacgattcccaacatgctctccggacagctggccggcctccccaccatcccggtgtctggggtctctgcaaaaatggggtctgtctccgcccgcccagcctccctttagcgttaaggatcggacaccacctcccggtagtaaattgtgactattccgagttttggagtcattcttcgttgcctgttttattagggcagcaaaacgcctgtggctagggcgggagtgggcggaggcaggtttgagccaatggcacgggagcggccctgtcgctgccatggcaacggcggccgttctccggggaccggctgcccattgggtagaatctttccagaaggctcgagaagaaggaagcggaagtggcacgtggaggggccggtggaggcgccggtgagtaaatgccgcagattctggaaagttctgatcagtgcgatacataaggctgaggaagtgggacctccccttttgggtcggtagttcagcgccggcgccggtgtgcgagccgcggcagagtgaggcaggcaacccgaggtgcggagcgacctgcggaggctgagccccgctttctcccagggtttcttatcagccagc

SEQ ID NO: 11133 - DNA, 2300 bp, Homo sapien
aataaagtgttaaaagtgaatttttttaatagtcttgctatattgcctgggcaggacttcaactcctgggctgaagcaacccacatgcctcagcctcccatgtagctggtactagaggcatgagccactgcacctagctaggaattatttttttatttttagagacagactcttgttctgttgcccaggctgcagtgcagtggagtgatcatagttcactgcagcctcaaactcctgggctcaggtgatcctcctgccttggcctcccaaagtgctgggattacagatgtgagccgccatgcctggcccagctaagaatttcaattagataataaatatggtagattttacaacctcttatcacttacctgttgtgctgaataattaaggcaaatcgattaaataaaagggggctacaccatgactacacaacacatccacagcagtacaagattaaagtttgtactgactttcactgaatgatattacttctattactacaatttatcaaataccaccataccatgttttatttatatctaatccttccaaaatcctagcaaaaataggtattacttccattttacagtcgaggaaacagagggcaaagaggaatttgacaaagatgacagactttatatgtttatgtttatatatgtttagtgctttacatatagtttccatcattacataaacaccatgagatggaatacagaaaggcttagtaattatcgcaacatcacacagctcacaaataagaatagctaggattcaagcccatgatgtctgactccaggaggcctggtgcccttacaagctgtactttatataaaacatcttagtagagtgccaaggatttgaacctgacccaaatctgtctggctccaaagactgagaactgttcatgtctcctcttcgtacggcagttaaaatgtgggaagcagaccaaataatctcaaaggttctttctgttcaaaattgctatgtctccatggattttattataaggttttgatatgtaagaaaaagttggtgggcggggggtggggacagaaaccaagtttttgggatgcataacaaaaataacttatagttacagctaactatatgtccaaatgtaagaacacaacaaccccgtgataactattattgctcccattttaaaggtgagttaactgaagcatgttaagtaagccacctaagtggcaggaaaactagcaaaagcacatacaatttacatgtaatgtaaacctgggcctttcgtcttgcctctgacttaaccaacttgttttgatagacaaggaggaattcccatactctttatgagttagatttttctaactttaggttacaactccttattcaattacacgcttatccaataacatatttgaactgtgcttatacttccacatgcctgacataaggtaaactcagggatcagaagcaaacttaaaaagacacaaaagggtataaaagacctgataagttatcagcaacacagttccaccttttcttacactgtctctttactgaacaaaagttaacggggacatcgcttctgagggaaagaaacaaaagctgcttcagatcaaacaaaaagcaaaacttacacacagtaccaatttatggctaggagtggcagggtagaacagcgtcggcttaaatcagaccttttaaaaataagcagaaagtgataccgtggacagcctgccaaatgacgtcacaactaaaaatcgatttcttaaaaaaaaaaacacctgacattttactccacaagagatcatcctgctgcctgatgaatacaagaacacttaacacaacccctttgcttttattataagcggtttgaactggtgttccttctcctaagtcgtaacgcaccagttgtcggggtaatccagacaataatagaagtgaatacaaaacaaacgaacaaaatgacgcttattgccagggaacccgcgcaaaagcgccagacaaaaccctacccagcctctctcgcgagtcccagaagacaaagccgggtcccagcaagcactgcggccaggactacacatcccagcatgcaaggcgcacacttctcccagcgggactacgattcccaacatgctctccggacagctggccggcctccccaccatcccggtgtctggggtctctgcaaaaatggggtctgtctccgcccgcccagcctccctttagcgttaaggatcggacaccacctcccggtagtaaattgtgactattccgagttttggagtcattcttcgttgcctgttttattagggcagcaaaac

SEQ ID NO: 11134 - DNA, 2300 bp, Homo sapien
ttagagttgttcctttacagtcaatgttataggcaagcagtgcctatcatgtatctgttagtatcctcatcagtacgttgctctaggaaactctcctgacatgtgattgggagagagaactcccagcaagtccatttatcatatgactagagtaagtgaaaggcaattctttttaaaatgtgagttatggagctttgtaatgtgccatttatctatgtctactgtggaaaggaaggacaccagggcaagtttattacttaaacggtgtgttctctgttgtccttagggcttaattttccacaccttgttctggaacatagtaatactctaacatgatgaatttccatgaaaacattgattaagcaccaggagttgcttacccacgtggagtaggcatttgaccctgcttattagtcttctgtgtctaattaaacagtttggttaaatgtttactaccccacatatgcaaggaatattttcttggaaaaaagcgaaaacagctttggaaattggaaacaatctagaactactaggcaggtaagcttgagaatttcccaaggataaaagcaatgaattcagtcaaccatagatttgaaatgcttcactaagaaatgaaatggaaggatccctacatttctttttcctcccatcaaaatggtattgacaagagaccataaaccttgggcgaatggaacaaaagggaactatttgcactcacactaaatggatcacacgtgaaatatttagttcccagttttaagaagtcaatataaaccacacagagagaaaattctttgtctccaggcctccttttcaaaacaatcccagcaggtattgcacaattgcagacaatactgtcctaatgcattagagcctaagtcccctaaacgcattcaagttaagagggctcaagcctacaaatgtttattcagcacctgcttctctgtctccaggacatcctacttgtattcccagggccatcctacttgtactcccagggcctcctcctccttaaatgtttagcaagtaggtgaatgttgtatgtccatgtgaaagatactggcattcctagggtgcttagcagagttgcagtcacatagtaggtatccaacaaatgagtaaatatgaaggaaaacatagaaactgccttcaagaggtcatgggctaaactagggctgggaaaagcacttggtcctgtgcacttccttggaaacagaagtgagccaaggcttgagggaggcacgaaggagttcagaaccactgaagggagcctctagttcttacttgtaatgctttccccttcagtgcaccacacaacacaacaggaccagtcccctatcagggccaccactctaccgggctggggaggaaagcccttcgcagtcctgcgggaacaggaggcactcccacattgctccacttctctgtattccagtttaattaatttttatattttgaataaaattacacccactctcttccattatggtgaacacttaaaattacatttatagaaaattacatttacacaaacttgtttaaaagccaaatcccagacctaggctattggccaaattccatttaaaggggatattaagtaaattagttgagctgattaaaaacaccttcatcaaagtagagcattggtgccaacaatattaagagttgaactattgattacatttttttttccacagcagataatacattagcagggaggaaaagtgattactgctcgcttccacttcacaggtagaactactgatgggggtgacgcggtaaggtgggagggcatgaaggcaggggacgcggcctaggtcaggagggacgcagaggagaaaggaagaggaggggtggaggctggtggctggagggggcagaggtcagacgcctcgaaggagggcgccgtgagggcagagccgcggccacctctaccgcagcagcccgtcgggccggacaccagccgcagccgccagcccggcagacgctggaagcgcgcacaggggtgctcccgctcccggccgccagagggcgcggccggcgatggcgcggcggagacggagggaggaggggagccggcagagaagggtcagccgcggcggcagggcggcggcggcagcggcgcagctccgctccccgcgcgtctcccttccccgcgcccaggtagggcgctcagcctccgccgccaggatgcggccgcccgcctgctggtggctgctcgcgccgccggcgctgctcgcgctcctcacctgctccctgggtaagtagcgggcggccaggcgcgcaagggcgaggcgtgg

SEQ ID NO: 11135 - DNA, 2300 bp, Homo sapien
taactgtctatctggttgctcatattaaaaacctaagacttgagattggttcatctttttttcttcaacttcatgttggcatgaccagctggttctacttccaaaatatatctcctgtccatcttctctccatatttaatactactacgctgtttcaggctatcatcatctcctgccttgaccattattagatcctcctgtttcagtggtttcccattccacctaagatatttttgctgggtatagcattctgagttgggagcaattttcttccattactgtacaaatgctccaccattgtctttcccctctcatcatttctgttgaaaactcaactgtatatcttgtttctgtttatttgaaaaaaacatgtatactgtctccctctatgacttcccctgctgccagctgcttttaggatattctctatctttaattttcaacagtgttaccattatgtgcctatgtgtgattttctttgtatttgttctcaccggagtttatagagcttcctgagtctacaacttgatgacttttgttagttttggaaaattctaagcctgtattcttcaagtattccttcagtttcattctgtctctccttagtttctaatgtcatgcattttagcccttttccttttgtctcatattgccatagctcttttcttcccttttttttcttatatcagtctggatattttttaccggacttgctttccagactgttagtcttctctgctattgtgtttaatatttttttgaattactaacttcagttctttcattaagttttagatttttcatttggctcttgtttataaattgtagttctttggtgcaatttaaaaaatctttttatccttaaagaacacattaaccatagctgtttaaaagtcttatttgataactgcaaaatctgttttatctgtgcatctccttctatttttcacttttcttgtttctggtttggtcttgtttcttgctctgctgggtgagtttggctaaatctcagatgttttatgtgaaaaattaagaaggctatggatgataggacttcctatagaaggatttaatcttctgggttgtagatgttgtttgggtacgtctattcatagactgcccttactccagagccattttgtcctggcagtctgaactccaaccttgatctcccggcactacagtactgctaaaggctttgctcagctttttagcctctccactgctgctttctgcttggttctttttttccccccttggtttttgtgcagcttaggtcattgagggaaacttgcatgcggcatcttgggacccccttacatctcttctctttcaaggtctccagctccagactccgcctttcagtccagcaaggctgcaagagcccccagctgctgcttttggctgtgtgctatctgcagctccaggaatcagcaaactccttgaggaaaggaggggctcccatggatgggctttctaattctgagatcttagtcctttatgtcctttctgcctttgttgttttctgttttttttttaattttattattactatactttaagttttagggtacatgtgtacaacgtgcaggtttgttttctgatggcttcaatcatttgctttgtgtaatttctccagcttttaaacttgttctcaacaggagagtagatgcaatccagattgttctattgtggtcagaagtggaagtctttcgttacacttagaataaagtctgtgctcctttcccctggcacataaaactcaccctggtcagccttttgcctgtctcttttgtaccttattcccacacccagtagctccagccactggatttcttttttcattgactgtatcaaactttttcccacctcagggactttgcattaagtcctttgacggctcttcctcagatttttgcatagagctggctctttgatattatttcatctcagtttgctactgaggatgaacaaaatgctagtcttcattagatgactaacagatttttgcataggtccagctccttgatattatttcatctcagtttgttacatcataatagatttccctctcttttcagggcagctcctagtcaccctgatttattttcatcctagcacatttcagtcactacctgaagttatttgatttactttcttaatttccatttctccactctagggtaagctatgttcctgcctggtgtgtggtagattctcaataaaaatcatttgaatgaatgagtaaataaataaataatcactgattctgaaaggaatttttcaaattattctttgaa

SEQ ID NO: 11136 - DNA, 2300 bp, Homo sapien
ctccttgcattccccaggtagcacgatcatgtataaattctgtttgataatggaatgggcattgcctcccttactaaagtgttcctctgacatcacccaaaacagcatgggcatttcagatataaatgtaattgcccgatgtgttcttcctgcctgctgcacagataaaaccagttcattaagactgtaatattgcagtaaagagtttaattaatgcaagactggccaagtggaaggactggagttattacttaaagtagtctcactgagaactcagagactagggttttttggataattgggtgggcagggggctagggaatggttactgctgatgggttgggaatgaagtcctagggatgtggaaaccggtccttgtacaatgaatctggctttggttggggaccacaggactggttgagtcatgagtcatgggtctgagtgggttcagttggttaccagaaggcaaaaatctgaaaaacatctcaaaagaccaatcttaggttctacaatagtaacgttatctataggagcaattggggaagtgtcaaatcttgtgacctctgtccacatgattcttgagcagtaagggatgataaaaaatacactttagcaaagttcaggcccctcccctgatcctaatcttgtggtctttcattagtttttggtccctgagcaaggaggagattagttttagggagagactgttagcatccttccttccaagttaaactataaactaaattcctgccatgattagcttgacctacgcccaggaatgagtgaagacagccagcctgtgagactagaagcaagatggagtcagccaagctaaatttctctcactgtcataatctttgcaaagggggtttcatcaagatcactttatgtcctttagtcataggagtagcctcagttaatgtcctgtagcaaggaagtaaatgcccttcaagtggaaattctctagttcaaagtcctagtagtcattgctgggaggcactcacaaacctttgccataagccccaggaggtactctgcagagggggctatcaaatggggaagttgtccccaccagctcttcagtttctgttctgcactatgtgggcctgggcagtcttaactggttccaattttagcaagttccattaatactgctcaaaggatttacatatcttctgttttacagtactggatagggggaacatttcccagtcagataaaatgtctcttcccataatgcagtcaggtaaaagagataaaaccatttcacatgaagtatgttcaaatatggcagctttcataatcctaacaaccgttacacttttatgttctagtcccaggaatttccccttttcatccccagatcattttaccctttcttctgcaaaaggctttgggtccccagcctggagtcccaccaggagaccctggcctctctcttaattgttaccttgattaaccagtctaacaggtaattatagatggggtttctcattttaatctttatcttcttgtctttaaaagttctccaaactgggggaaatgcagcaaactggtttgggcccttaaatgttgagagatcagccaggggtccctttcctccactcagtctttaataatgttgtattaagacttttgttttaaccccatcaatttctactttattcattccattttttaataaccacctaaatatgtccaccctcctggggtgagtcccatggctctcccctttctttttcctcttactttcattcctatgaatgttttctgtattcatcttatttcttacaaaccatttaaaaatttccacctcccaggatgagtcctttgactctcccctctccccttcatcattttcttgttaattaacctaatgtctttattagcatctgtaagacctcaaggtaaagcttagaccacaaatttgataaggcttctggaactgtcttggttttgcagcagtaagtttatatgaggtgcctatgcaaaatgggcccctttaacaacaacatgtaccatggcctggataacggtcatattcagtgggtgaatatcccagttatcataaagctagtcccggggaggagccaagatggccgaataggaacagctccggtctacagctcccagcgtgagcgacgcagaagacgggtgatttctgcatttccatctgaggtaccgggttcatctcactagggagtgccagacagtgggcgcaggccagtgtgtgtgcgcaccgtgcgcgagccgaagcagggcgaggcattgcctcacctgggaagcgcaaggggtcaggg

SEQ ID NO: 11137 - DNA, 2300 bp, Homo sapien
ctgtgtaggtattttgcgttgtttggagcatgagacctttgtactatttgaatccaagtgtctgtttttcactttgttgcttactccatgaaagttttggtacttggagaaaataaattgaatgaccattttttttttattatttcaacaggcttttgaggggcaggaggtgtttggttatatgaatgagttctttagtggtgatttctgatattttggtgcacctgtcacccaagtagtgtacgctgtgtccagtgtgtagtcttttatccctcatccccacccctcttccgagttcccaaagttcattgtatcattcttatgcctttgcatcctcataacttagctcctacttataggtgagaacatgtgatgttttgaccatttctttttgaaaatacttatttacatatgtgcatttaggtaggaagctgtgcttaggctatctatcatcagcctttttggcagccttgggagcaaatgactacaccagaataagatgttgggcaatgtcctcggaagaggccgcaggcagtgttacccagagagactgccatgacctatttattggctgaaggccaggaagggcaggcatgtttctcatgcatgttcccttcctacatcgtcttgatctgcactgtgttcttgggcaagtcccagactcccatttcagtttttcttattttaaacatttgtatattgtatattgaaggaaataaaataatcctgtagcctttcaacatctttttaatgtttaatagttggtggccagagcagacaagtgttctttcccacgatgatatgactggtagttttccattttggggagcaaccttatttggaaagaactcatcagcatgctaataaacaagtgttattaacggctcatattcacttagtttatgcaaataattaatgtaagactgtgtgagtaggcaaaagtataaaataattacatattaaaatttcatgctcacgtttcatcttcctataaagttagtttttcagagagcggatcaaaaaaatgaaagtctttctcattttttctcattttactagatgctgacaaaagaaaaaaagcatttttactatttactgtcaacacatcttctcatgtgtgctcttttcccggagtcagtagcttgagcccaacgtggccgattgggtgtaggagttccactcagccacaaaaaatgtggccagggaggtttcactgtggacagcaggctttctaagagaaaggcaatttatggtgggttttcagacttgcagttttcctttctctgtagttgacaggaactttctttttataccttcctattttgttacaacatcttaagtaaagaaattctcttgtctagtcaagggcagggagggagttctgcactgttgcaggggacggaggagggggttggccactagcattaggtaaaactgctgaattgagcccagcatgtggaatcagtatttttgattcagggattcaagctctttgtccttttttccttcctcctagactgattcatagaatgtttcctcccccaggaagaaggtctttgtaaaggcgactttgttctcacttgtttgatgcatcaaacttccattgagtgctgtgggcaaggccctatatgtggcagtgggactatatggatgaattttaaatagttttgccttaaagaaagtctttgatgattgagactgaacttatgaaccatattgtttccttcggccctttcagttattgagctttttatggtatgaaaagattcatttctaccttaggatcagaatgaaaacaagaaaccaatctgtattttaaaacgaagagaaattattttgggaacttggtacaaaagtgttggaaagggccagaagactaaaagagaacaggtagggttttacctagagctcagtaactagagaaagctactattgcctctcagtctgcaggagtaaagtcctgtttcccggggcccatttgtgcagcagcggtgtctgtggagcttctctaacccctttctctgctctggctcccactagaatggtcttcagcagagaagccgtcaggagacttctcgccagtaaatgtcgatgctacagcaatgatgctcccgatgatatggtcctgggaatgtgctttagtggcttgggaatccctgtgacacacagccctctcttccatcaggtgaggaaatggtttttattcttccctcatggcaggtgagggacagattcttctcacttaaggatttgacttctttctcttcacatattcgggaaacagactaagaactgtgttg

SEQ ID NO: 11138 - DNA, 2300 bp, Homo sapien
tcacatagaactaggtaattagtactttcagtaaataaattcccttcaattagccagaattatattgaattgtgctatatagtaaataatatattcacatgaggttttatagtattactgctaaaagtatgggtcctaccaacaggtgactggaatgaagggatgagctgattcaggcaaggatcaataaaaaacacttgcgcagattcgaagttactatcgagtgagaatcagtttgcacaagtctttcatctcagctctgcatgaagcactccttggaacctccttaccaactgtggctttaagaatagactacattcattcactcttatttaaacacatacattatatccctgtgtacatgtcaatcatttcagtttcggtgcaaaaggctggatattcacaccagataagtcaaagttaaaacatattaaatgaaatggtatttcaaagcttgcatgctctacctttaaaaaccagtgagccaaagatgttcctattatttataattattgatttctgaaagtttgtgttaatacatttcaaagattaacattgaaaagcctaacagaaaggaataacgattcaactttttggcaatgtaaatctattgctagggctcgatatcatgaataaatcttaactaatttctttgacatcttgacatttcttatttctccaaaaattacattttcatagaaaatatatttatacttcaaatagacttatgatggtatttaattgcacttaaaaactcatgctcaaaatttcagtaccagaaactagcatccatcatctcgacagcaaaacacaaaacgtaagaaaaactaatcattcctttaagtgaaataaggcaatttttacctaaaaagaccttgaggttagtgagggaaaaaaagatgcttgaaatgtaagaaaagatcctgaagtatttcttttcatctttattctctctgttgctttttcttttgatttgaaagatcagatgagaccacatataaatatgtctgggaggtgtcttagagaacttaactcacttcttaaaaagagaaaagaactaaatacattatgtgataaataaagtattttttattgtacattctgtttgaatccttgttctctcaaaggctagaatgaaagaaagaacaaggaaaaccccgtgttttatgatttgtgacgataatagtcaccacaaggtagtttttttcagtgttgttaggacacagttaacgacaacatataagagaatctgcatcgttcagtcacaaaatcttctcttcaaatcagaactacaaactgtattctagatagatatttccctgttagtaaaatataaactcagacatggaaattctacatctttttggagaagtcttaatgattacactaggatcaacagaatcctacaaccaaaagtcaatttttatacttttaacttgtactaactatgctgttgagaaagctgctttcaggatgtaagaactaaattataattagtgttttctaataggtgtgcaatacagagctggaagcaagaataaaattattcacttcaagaaaaaggaatatgattatgcgggaagtatgtgaagtgaaaatattgtatgaatgttttacagtaattatttaacacaatgccatatatttaaattatcttttcatatgtcatttgaaaacatttaggtacatttgaatagaagtgggtgttctttgtgtatctgtcaataagtagttttttacatttgtttattgcatgaaaatataattgtaaagggtttcatagcctattcagtgtaagcctatatccttcatatttgagaacttcgatgtttggatttaaacagagcaaattgtacatgctttggaggaaaaaaatttttaagtgattaaaaaatatttcttatcagataataccaaagtcctattataccttcttttacacaccataatgaattagtgatcaagaacacaactgtagatttaaactaaaagaaacaaaaaagaaagaacaaaaaagacaggctgcatagtgacaagaatccatctcccttcatgccagtgaggttctagctgtgagcatgctcagaacatgggaggcactgaacttactacatcagaactcctgctgaggtataagaggatacgtctaataactcaattgctgtaaacctatgattgtttttctggtttttaaacatctcttcagcctcagattgattacaatgttctttctacttcatttcatcgttctgatcaatgtcaaaggtaaggttgctactttctcgttttaaatgagtgca

SEQ ID NO: 11139 - DNA, 2300 bp, Homo sapien
tttttttttttatctctcctcccctgtgctattaactgtagaaaggaggggctacttagtaattctacacctgttaaagtccacgcctatcaacttgttaagcttcccaaacaagtgcagggtaaagcatgagaacatcagagtctggggcggcggcggtggctgcaacggtggctgtgacggtggctgccgctgggtttggctttctggatttttgttcagagtcgctaatgtatcccccacaatggcagttgatgacagcaatttatattccagaacgaagaacaaactaaattcatctcaaaatgattataaatcatcaagaaggagtagcctgccacctgaactactcataggaaatgacattagaggaagacttcaaagaaacattaagaacttggatcccattcacctgaggcacccgaagaagagaccatccatatttccaggtaggaattgtttacatttataccatccaattgaaacaaaaccaaacacacacacacacacacagattatatttcccttgttacaatcagatgttcatttaaaattaacttgggttacattcgaagactttaagtaaataaacatgtctgaatataaaagaataattgtttgatctgaaagcacactatcttcttcgttttattttctttattgattgtaacatctttaaggacctgtaaataggcagctattttattatttgttggcatcagcaggaatgtggaactactttgcttgcaatcctgaagaattccattgatgtatttcattctctggcattttttttttttgcaatattattggattgttgagtgaagttgatgtttgtgtgcaccaaaaattaacaccattaaacactccaatgcatgcttcaaattcctgtcttgcatcagagcctaaaaccatttgtagtaaaaagctcaactgaacagtgtggatggtgaaatatattagagcacaggagacatggatttcagtcttgataaagggactctgatgtctgccccagatgtttatgtgtgcatattatagatacgtagattgtcagagatacctgtgactgcgaaccttaattgagctaagtgatcactggagagtataaattatatgaattatatagccaatttggtttcaatactatttgctttgggatttccaggaaaaactgaaagtggcctttttgttatggctgatcgatttattggagccttctttatgggggacagatgagactaaattattttttggttttctgtattcatagagttaacccaacacttagggctaactctatgaatgtaggaagccaaaaaataatttagtcgagttttacttcataaaaattatatggactacccaaaacagctgactctttatactgcttttggaaagcgagaagataaagatgatttagagatgtgggactcaaaattacatttcttaaggaagctattttaataaatttcttcagttcagtgatattgccctagtgtcacactcttctgcagaaaagaagcaaaactcagcctggagtgggccagaaggtgtcagtgtgtgagtgtgttagggggaaggagagggggatggtatgaaaagtgctggaaagaggagcatttgggtgcctgaagtatttcacagagcacagtcactttctgcctgttcgcttggatctcctaagggtaccaaggagctcaggcctgctgtgtttcctaaaactacatggtatgatgtactttctgatgaattggttcactagcccttcttccagaaccttcttgcagagcagttcttcaccttttgctttttcttctcttaacattattctttggttaattatgtctggattcaggtaccttataattcatcctgcacttctctgccaccaccgacatagccccacccccatacttcatggccttcttctttccaaacaactggatccaggggaatgcctcactcctgcagccagcattcctgctttgccctctcgttctataaggtcatctggccctggctggtagctacagccacaaacttatgagaaggcctcttggcttgaatcttacataagttgtcctttctaagatcttgagttgacataattaatttgacaaggtggagttgtgaaaagagcactcaacttcagggaggtgagttccagtctagactatgtccttaactacctgtgtatgttctccaagctacctcactgacccctgtgacccctcaactataccacctgtttctgctctttctgtgcccagtactctccttaggggcagcagcagaag

SEQ ID NO: 11140 - DNA, 2300 bp, Homo sapien
aaaataaagtcaacagagagaatctctatatatttgagtaacaatatacaatagcatgtttgcttattgcaactgattttaaatgtctccaacttgctctccccaaatagttaccactggtgttcaaaagtaatatatcttttaaaccacataaagagtaaagaaaaaaaagtatttagctttttaaaaaaaagttctattctagagtcactaaggattcataataagaatgaatgggccaggcgcagtggctcatgtctgtactttgggagaccaaggcaggtggatcacctgaggtcaggagttcaagatcaccccagccaacactgtgaaaccctatttctactaaaaatacaaaaattagccgggcatggtggcgcatgcctgtcaccccagctactcagaaggctgaggcaggagaatcgcttgaacccgggaggcagaggttgcagtgagccaagattgcaccactgcattccagcccaggcgacagagtgagattgtctcaaaaaaaaaaaaaaaaaaaaaatcaatgtagctaaaatttaatgaagtgttaactatgggcaagatactatgctgagcccctttcatacatagtgttatttattgtttccaacaactataggaagaaggtacaaccccattttacagatgaggaaacgaaggcttagcaaagttaatagcttactttggggctcaaagctagtaagggctggtgccaggagcgaacatggggccctgccttgagagcccatgccatcgttaatcgcagggcactgtgcagcctacctgttcattcactgccatctgagtcttggcaagcatcagatgggcgtaggtatgaaatttattttcagatataataattgtttcaaggtaaaacctttgggtcttattttacctagaatccatacattcaaagtacaagtgataaaatcagttcagcaactctagtatgcacatgaattaaaaagaagtcaatctggtgagagatttcatcagaataaagtgtataagtggagttggaaatctgagtgattgagtgcttgccatttgggtaagtgtaatgagtttgaaaaactaattgtattgatgaagtatcttagggcctttcagaacatagttctagaagttttatttagtgttgaattttaaaaattctttgtcctaacaataaaagtacattgtagtctttcccttccatttttaaaatgaactgttaatctaggaagtcctgtttgtgtgttgatttggggagttagcccaacatttgctatgttaaatacttattaacatggtttattacttttttctgttttttagacaacattaatcatgaatgtactgggacttgggaaggatcctgtggtttatgagatagttggccaaatcccacctcttccaacataacctgtcattattaaaatataatactcttatttaatcccctggtcaagctaaatgataatgtgaaacaaagctaaccaaaatcaggacacctgatatcaagaattcatgaaatcaagagccattgtagagcaaggaatctaatgcttttgcttcttatccttttcatacaaataaaataagcttcactgggcttagtgagtcttagaaatgagaggtttgagaataagatccattgtggagtgtgtgacattacaaaaacaagccaactaagcagtgtgtactgtccccttagagtgcacacgttcgggctccgatgccccttgaaaagactgcatttctgggagggaaaagtaaaaatgcagataccaccatgcgtgtggaaggcagggaagaaaaagcccagacaagcgtcctcttgttgagtctctttactgcaacgaggctgacggatggggtttttcaaaacgtcgctgcaaccagatgcaaggctgcagctttgcttaccgcagcgtgctgcagttgtgtttatttcagggacagacacaaggggaagcagcagccagagcacacccgggccgctcacgggaagccttgctgaagagagaggatccgcagaagctgggaaattcctcccgcagcctaggcggagactgagccgcggctcaggttgagacagtgggcaggggcagggggcggcgctcccggcccatcccttagccccgcggcggccgtgtgggccggaggctgcctgcaccgcgtcagggaggccggcctagaaaccctccctcccagaagaaagccgatcccagttcaggtggggtcttcctcggttgcgtacctggctggagccgagctggtgggcggccggcagccggcgtttctggtga

SEQ ID NO: 11141 - DNA, 2300 bp, Homo sapien
aaaattaatatagtgggcagggactgtgtcttattcaccttgtgtagccccacagcctggcacatagtaggtattcaataaatatttgctgaatgaattggaagaattcaaaattgtatcacagatattctcaaagtagaaatgaacagtcattttgaatcatttcctgaagtatgtatgtggggagaggagtttaggaagggtggagagaatatatactttatctagagtgatttgaaaatagacaaggggagagaaatttttaaaagaaatcccattggcctcagtattgtcacaacataattttctatttaatgatgcaatgacaaaaattgatggaagaaaacagtctggtcttggaataatcaaatatgtttaaaaaccacgtactgatgtcaactcaaaagtgagttttttcagttattggaaaactgctccataaagaacactgtatgtcaaattcttttcattaatcaaagagcagatagacaaaggaagattcatccttgagtgtaaagtattataaaaataatgagtccaagttaaatgatttatagctatgacaagtaaagaatgctgtttgggcaacagtattactcccaaatggcttcccacttgtagaaaaacagcttcagacaagccccatagtgtatacagtggtgcaaaatgacctggaaaaaatggtttctatggatatcatttagagatgcacatccctgaataccttaaggctgaaggtactttagctcttttcctcaaagcaattgcagcacaggttctcctgcccaggttttgtttatataagaacaatcttggccacaggtcatttgtgtaggagacaattaatcactagctctttgagcacaggtaggttaatcagtatgcacataatacaatattaaaattttcacggggaaaaaatttttttatttaaaacaataaagcatcagtaatacctgctgatcttttatccaaagcaagtacaaaggctgttagtgaaatagagaagactttctttttaaacagttcggaaaatacaaggcatcattgatcacctgaaggcctcattttaatttgattccagatccacggcagcttagaggttgtctttttgaaatagcgtattgctaaaatccttatgtaggtcagaaatggaacttcaggagccatcatattctgctatcctaataaataattagggtcagaacctcacttgtttatgtttcaaaaaagcacaatatttggactatagcaaacatcaggatttttaaaaattcaaatattaaatggcattcagaacatcatccacatggaagagggagagatgaaataaatctgcagatgcctctatatacaaaaaggatgtcctaggttttggactattaaatacttttctttcttcagacaataccctaaaaaaacaattacaaagtactctgaaaccctgccacacccctttgattaaatcacacttcacaaaatatttagagaaagcctgaacaaatcaaataaacatcaaggcaggaaatgcagccaggaatgcctgatcctgagctcccccagagtctgaagggctgcctcacttgaaaatttaatcaaacacaatctactgtaattccattgcagcctttgcacttaaggaaagctagttcagtctctgacattttgattttcacagcagatgggagcaaaaaaagaaagaaagaaagaaagaaaaagaaagaaagaaagaaagaaagagaaaagaaaagaaaagaaaaaaagaaaaacttccgcggctcacaaacatatgtgtccagttgagattttctgtctccagccttatgcaacatccagcaaacaaacaaacaaaaaggttattttctattactcactattactccaggatttcagtaaatatttgatactgatctcaaagaagcccgaatcctgctggctggccatgtctgcggcatacaaagaggctgggaggacgggcagcggccgggagcaggtaccgggcgtgatgcgcctgtcacaggttgtgatgtcagcgcggggtcaggcgcccagaggcagctctgcggatccacctccggctccggccgggagtgctcatctaaaggacacggcggagcagagagagatgctcggccgctcctcctcctccgggtccaggacttgcttcttatttgctggacgctgatctccctgcagccctcggaggcggcggccgcgctgctttcatttcggggctgtcatcaccagaaacgccggctgccggccgcccaccagctcggctccagccaggtacgcaaccg

SEQ ID NO: 11142 - DNA, 2300 bp, Homo sapien
caaaattaatttcagttttaacctctgtatagacttggttgaaagaagtggaaaactaagaaggttaactgagttgcctaaatccagcaaaggggtacagatcaagtgcaagcatatttaattgggttctttaaatagaggaagtacccagcactgctccaggcaattagaaggagacttactccagtgtcccatccacaccctctctaaggccacggggtcacttctgctaacgtagtttacagctctaaggaaaaataaaaccccaaatcaacatccatgttctcaaaatagaaaggatctatccctgggcttatgattaagacaaatcagagggttttttttttcccattcaaatgcatgaacagttcttgaataacaataactgccactctgtataaaatactatgctccatgatttatatagagggcaaccacaaaattgtttttcccaactgtgacactttggagagtgaaagttaataattatgctgagacactgggtgcaaaccgggactgccctcagcaaaggacgccatatgaccactctgtttattatcttcactctttccaataaccctgtgagtttaagtgtcatgcacattttcgatgaaaaaaaaaaaaaatcaggacttgagatagagatttgctcaaagccaggatggtagtaagctccataaacccctcccccagtccaggtgataattgcattgtttgttttaatcactcaaaggaccaaaggataaagaacactgtgaggaacttagtgctttataggtactttcatttttagttttgttggctgatgtccctgccagttcttagccttcttcaccctctctccttccctccctgctctttgtctctctgtttctctctctctctgttttacacacacacacacacacacacacacacacaaacacacacacacgtgctggagagcaccatcccctcagcataggcctatttgaaagaccttaagtgttcacaagtcttttccgtctattgcaaacaatacatagacagttctgtgccctatgatcatttgattaaatgtatatagacattcacaaaataggattatagtaataaggcacatttcttctgttaggagtattttatgtgtattttccctagtttcaaaagtaaataaaaaagcatgaatgatgtttactttagaatggtagtttgcttgccttgctgagcgttctctgatatattgtttttctgtttaggaaacagtagcaaattcactaattgtctttagcagtgagatcagggagaatatttccagggataatggaaatctatctataattcaggtatctcatttacttgatagctctggcctgctccatcataaaatcatgtacaggactggcagcaccaagataaattttgacttacttgcctgctcttgaatgctgcttgatgaagtcccaacaagaattgaaagagaaaagcaaacagcagtaggcaagaagagatgacccggataattttacaatctgagaacagctgagacatttgagaaagttgccaatatttagaggtttcaactgatataacatgcaaagattctcctatcctaccctaaacagacagctgtttcaaaacattttaatacccatgactcagtagtttacttttgggtacagtttaaggagtcaaataggttacatatatcctaatcgtcttattagtaacttccatatttctgagtcttatgtgatattaacactgaactggtgtcagatgtgagtttgggctaatgagaaatgacattttactatgttaggggctgttctgtagactaatagacaaagatataagctttttatgcaggttctgttactggtactaaaccttacatttatttagtgctttgtagtttgctcagcaccttcaaacacattacctcatttgacgagtgagatgcactgagtattaattagctagtttcttcttaaatgctcctggtttagaataagacttaattcttcctaagttcagtttgtgtggcatgagatacccacatggcatcatgtaggtatattttgagaagtttcagatcagatttaaatgaacaaataataatcttcgtccatggtatttaccttcatgtagaacttttaaaaaatgcaatatagcttggtatttatcacttaagaaatacagaggtaagtctgtccaaaaacatatgtattacgattttccgaatttatttgtaccctagaatttctcttagtcctcttttttaaacatttaaacatttataatttttcttagtgcggtgc

SEQ ID NO: 11143 - DNA, 2300 bp, Homo sapien
aggctgttgagcagactactggcacatatgccactcgataaggctgagaaccgagaaaagcttgagaaactccaggcacagctgaagtgggccgacttctccgggctgcagcagctgctgctgaaaggattcacatccctcaccaccacagacctgaccctgcagctcttcagtctgctgacaccagtgtccaaaatatccatggtggatgcatcccacgctattggtaaagccagcctcgttcaccctgtctcaattctgatggtgactgtgttcatcatttggtacaataagataatatgaacttactgcttttaacaattctgcttaaaaatggttccttgggagtagtttattttttctcataaaattctatataatgtaaatctcaatgatctgtattatagaaaatatttttaaggcagtagcataaaaggggccaaaattatttttaagatattagcgatttctttttagctttccagatcaaactgcaggtgctgttagtttattccattgctctcgtacagaaaaaaaaaatttttttttcttaactcctaaatcttttatttttttctttgcttttctgctttttgttcttcttggaaattctgttggtttcctcttgttttgaattaacccaaatcaacaaaccagatttttcatttatgtctttttgttttgttttgttttgttttgtttttgttttttgagacagagtcttgctctgtcgccaggctggagttcagtggcgtgatctcggctcactgcaacctctcctcccaggttcaagcaattctcctgcctcagcctccggagtagctgggattacaggtgtacgccaccacgcccagctaagttttgtatttttagtagagacggggtttcaccatgtcggccaggatggtctcgatatcttgaccttgtgatccacccgcctcagactctcaaagtccttggattacaggtgtgagccaccatgcccagccaacaaaccagatttttaatgccatggcatgtgacccagaattcatttcatgaagctatcgcttaacagagagggactaagccattccttattttaaagagtcttttcaattacatgactaagacttaaattggttggcctatgtcctctcacaccagtttttcttaaaatatgtttttttgataaaaatttcaaactagtactcagtttggctcagttcaatctgcgccaaaaacatctgggccagccatccttattcacaatagtccagtgcaagataatcactgcatcttaaaatcgcagatctactttactgtcttctttgtaactggtgcaattgtggttgtgcatttttcatagattttgtgttagatcatgtttaagctgattcaaaaaactgcttttgcatcacctcagtataaaaatctgtaacatgccttcccactgttaacagctaaaatataccatattcagctatctccattgtatcttctctaatccagggtttccactgaatgtcttgtgtctcctgcctcagctgattcagcattttgaaaatcccaatcagttctgtaaggatatagccgaaaggattgctcaggtatgagttacagttccacactcaggcagatccatagaggccttcaggacgccctagtgtcaggcaaattacaaggcccagagatggcagtgattttctcaaaaactggaaataataactaatatcacagtaatggaaatataggggtggctgatgcaaattgtcttgcttgctttcattcttgagaatgcaggtgggaagaatttgtgaaaattatattagccaagctaagtatttcctgtaattaccaaaaagtgtatcaatctactttccagatggccagagcttatagtaaaattgctaacatttcttcctattcattgggctattttattcctaattgatttttttattttaaaaggtttgtttagaagagaagaaccccaaactttcaaatcttgcacatgtcatgactctttataaaacgcacagctacacgagggactgtgccacgtgggtcaatgtggtctgtcgataccttcatgaagcatatgctgacattaccttgaatatggttacctacctggcagaggtaagctttttttttttgttttttgagacagggtctcattatgttgcccaggctgatctcaactcttgggctcaagcagtcctcctgccttcgcctcccagagtgctaggattacaggcgtgggccaccattccctgccagaggtaagctttgaaatgaaggataaaatctattatagc

SEQ ID NO: 11144 - DNA, 2300 bp, Homo sapien
ttgaaatggagtttccttgctctgtctcccaggcaggagtgcagtggcatgatttcggctcactgcaacttccgcctctggggttcaagtgattctcccacctcagcctcccaagtagctgggattacaggcacatgccaccacacccagttaatttttgtatttttagtagagacagggttttgccatgttggccaggctggtctcgaactcctgacctcaggtgatctgcccaccttggcctcccaaagtgctgtgattacaggcgtgagccaccatgcccagctggaaataatgtttttaagaaaaattaaagcatattgtaaattgaatacaaatagtaaattgagcagctgcactagaagagaataggtgagaaagtctattatggtggagctaataagttgcaagtccctggtacaaagagaacaagaaacataaaggtatggggggctgtataaaatgacagaaaatgttatttctgagacttgtgtgacatgccacgggttctcattagtccactcctagtgagacacccctcccccacaaaaaggggacaaagcatattgttctgatttatagggtaaataaatcacaggttagttaagtgtatgaagtcaaatggactagaattcaaacctgggccttactaccaggcacattacttaactacttgattcagtatcctcatctgacaatactgaccaatttacaggattactgtaagattaaacatggtattgcttgaaaacccaaagcagaatgcctaactcataaaatgtttggtaagtggcagctgttattagtaaggatcacagacgtatttctttgcgaattagacttagagcaaaagctttagaatctatctgcattagtaaggcctccttctacaactaaggattactgattatcaaactaaaatggtccctaaggaaccaagcggagcccacccttttcctaatccaaggttgcttctgtttactgctcaagcaccttctggaagcagcaaggcccccatgggagcaactctcactgaatccatttgaaggttttgtaggtcttacaacaaaccctattcagccttgtattaggcatgttacagaaccaacgaattcggagatgaagtcaggtcttccagttcagcctgcgaggaagacaggtgatccgaatcctaagaatgcaaaagatgggccgggtgtggtggctcatgcctgtaatcccagcgctttgggaggccgaggcaggcagatcacctgaggtcgggaggttgagaccagactgaccaacaacggagaaaccccgtctctacttaaaaatgcaaagttagccgtgcgtggtggcccatgcctgtattcccagctactcgggaggctgaggcaggagaaccacttgatccctggaggcggaagttgcggtgagcggagattgcgccattgcacaccagcccgggccacaagagcgaaactccgtctcaaaaaaaaaagcaaaagatactaccaagccctgcggagcaaggtacctcacacttcatgagcgagttaagatgggtttcacaatttttcaagcaaggaaacgggctcggaggtcttgaacacctgctacccaatagcagaacagctactggaactaaaatcctctgatttcaaataacagccccgcccactaccactaagtgaagtcatccacaaccacacaccgaccactctaagcttttgtaagatcggctcgctttggggaacaggtcttgagagaacatcccttttaaggtcagaacaaaggtatttcataggtcccaggtcgtgtcccgagggcgcccacccaaacatgagctggagcaaaaagaaagggatgggggacttggagtaggcataggggcggcccctccaagcagggtggcctgggactcttaagggtcagcgagaagagaacacacactccagctcccgctttattcggtcagatactgacggttgggatgcctgacaaggaatttcctttcgccacactgagaaatacccgcagcggcccacccaggcctgacttccgggtggtgcgtgtgctgcgtgtcgcgtcacggcgtcacgtggccagcgcgggcttgtggcgcgagcttctgaaactaggcggcagaggcggagccgctgtggcactgctgcgcctctgctgcgcctcgggtgtcttttgcggcggtgggtcgccgccgggagaagcgtgaggggacagatttgtgaccggcgcggtttttgtcagcttactccggccaaaaaagaactgcacctctggagcgggttagtggtggt

SEQ ID NO: 11145 - DNA, 2300 bp, Homo sapien
taagaagtaaattcttacctcactggctattttaagtcaatgacattatcaaataatacagacagagaatatctgaacccatgcattcaatcaacaagttagtattatttgaacatttattgctttataaattagaagcagcatctagatcataaatgaatcgcagactgctcaacctctaaagatctttagcctaaatgcaaaaacaccattgacatgtgcagtcccatgcagataaagtgcttttaaatgttccttgatgaagaagcattttagcagaatgttaaatgcatccttttaaaggaccaagtccaagccaagatttagcatttagcattatattagaaaactgacccaaaactaaagtcttcacattaataattccaaagttatcaatttccaagaattaccatttctggcctgaaaactaccatgtccatttccagcctgaaaagattcttttgttcggtctgaaatacctgaaaatagcaggatacataatgaggaactagaaaaacaaagaagtaccttgctaactcttgaacgttgaatttccagcgagtgtcaggttctcggaatataacttcatagttattttcaagtgcctgatttttcaaaagtacataaaacattgaagacatagtatgtatgtttgggaatgtttatgctgccatttaacatttactacaaatcttttcagaattccttttgttttaccagtaatccaatgccttaatttatcacaataaatgcagttgtttcattcccatacttagccactctcataattctccatgataaattttgctcaattttatctagtatgtaggaaatttgtaaaggttctttgttttggacatctttaaaaatagatgactgagctagtttaaaacgtcctgaacaccggtatgaatgaactcagtgacgtctcaaagtcacttatgggatttttgtagatttacttgtcagatgccttgtcctattcctcatgccttcctttagaaagtgggagtaccataggaacataactggtgaaataaaagtgatagtcacatacttcacatcatcttccttccaaaagtagctctccccattatgcaatacaatttgggtcaatgctctgggccccatttccttgagtttagaaaactattataatttccttataaacatccaaatattctttgcattcataaattgactactactttatctcaaactgaattttctattatcactataatttattgtgtttataaaacatagagtggaaagagctaagcaaaaaggtttccttttcattcttgagatgggcgcttctcaactgggaaggatttaaataacacaaccggaaacctctcatttctaagtcgaattaatagctgaggatggctgaaaaagattatacatatccagaagataaaaagtaaaatgaggccgggcgcggtggctcacacctgtaatcccagcactttgggaggccgaggcgggtgaatcacttcagctcaggagtttgagaccaggctggccaccacggcaaatccccgtctctactaaaaatacaaatactagccaggcgtggtggtacacgcctgtaatcccagctgctggggtggctgacacacgagaattgcttgaatctaggaagcagaggctgcagtgagctgagatcgtgccactgcactccagcctgggagacagagcgagactctctctctaaacaaaacaaaaagtaaaatgacttcccttaggctgcttgtcagttagtccttaagtcttggttttaagtgatggccttcattcaattgactcttcacgtgcctgttcatttctcgcccaagtagactagacatgaactgaagtaaccacaagtttggggctcattcttccttacattcaccaaagccccacaatctgggcataagtggaactgatgaagatcattagagaaaagcacacctgtaagtatgccagttagccccagatgtaaaaagaagcctaaaatcgtgagcccagtctggacctattcacttcacaattaaccaggtagggattctgcatgatgcgaggaggatactccactatctgcttcctgcccccttttttttttttttttttttttttttttgagacagagtctcgctctttcacccaggctggagtgcagtggcacgatctcagctcactgcaagctccacctcccgggttcacgccattctcctgcctcagactccccagtagctgggactacaggcgcctgccaccacgcccggctaatttttgtatttttttttttttag

SEQ ID NO: 11146 - DNA, 2300 bp, Homo sapien
ggtagccaaatcttaaagctccaaaatgatctcctttgactccatgtctcatatccaggtcatgctgatgcaagaggtgggctcccatggccttgggcagctccacccctgtggctttgcaaggtacagctccactcctggctgctttcacaagctggcattgagtgtctgcggcttttccaggcacaagctgcaagctgtcagtggatctaccattctggggtctggtgggcagtggccctcttcttacagctccactaggcagtgccccagtggagcctctgtgtgggggctttgaccccacatttcccatctgcactgcactagcagagattctccatgagggcaccacccctgcagcacacctctgcctggaaatccaggcatttccatacatcttctgaaatctaagtggaggttcccaaacctcagttattgacttctgtgcacccacaggcccaacaccatgtggcagctgccaaggcttggggcttgtaccccctgaagcaatggtctgagctgtacattgaccccttttagccatggccagccagagctgctgggaagcagggcacaaagtttcaaggctgcacacagcaggggggcccaggacccatctcatgaaaccatttttccctcctaggtctccaggcctgtgatgggagaggctgccatgaagtcctctgccatgccctggagacattttccccattgtcttggtgattaacatttggctcctcgttacttaggcaaatttctgcagctggcttgaatttctcacctgaaaatggggctttcttttctatcacatcatcaggctgcaaattttccaaacttttgtgctctgcttcctcttgaatgctttgctgcttagaaatttcttcaaccagataccctaaattgtttctttcaagttcaaagttccacatgtggatctctagggcggggcaaaatgccaccagtctctttgcatagcaagagtgacctttactccagttcccagtaagttcctcatctctgagaccacctcagcctggacttcatcgtccatagcagcattttggtcaaagccattcaacaaatctctaggaagttccaaacttacccacatattcctgtcttctgagcccttccattagttccagtctctgcctgttacccagttccaaagttgctttcacatctttgggtatctttacagcagtgccccattctctgtggtaccaatttgccgttctcacactgctaataaagacatacccgaaactgggtaatttataaaggaaagaggtttaattgactcacagttcagcatggctggggaggcctcaggaaacttataatcatggtggaaggggaagcaaacacatcctcacatggtgacagcaaggagaagtgctgagcaaaaggggaaaaagccccttataaaaccatcagatcttgtgagaacccactatcatgagaacagcatgagggtaaccattgccatgattcaattacctcccactaggtccctcccatgacacatggggattatgggaactacaattaaagatgagatttgagtggggacacagccaaaccatattgaggacgaactgaatctaaggtttgggtaaaattctcattgtacaaaaatgagtaaatagaaattctcacacagcttgggactctataaaaaagtttgccagctgggcctggtggctcaagcctgtaatcccagtactttgggaggccaaggcgggtggatcatgaggtcaggagttcgagaccagcctggccgagatggggaaacctcgtctctactaaaaatacaaaaattagccaggggtggtggcacgcgcctgtaatcccagctactcgggaggctgaggcaggagaattgcttgaacccaggagacagagattgcagtgagccgagatcatgccattgcacttcagcctgggcgacagagcaagactccgtctggaggggggtggggcggggaacaaaaaaaaaagagttcgcataattaggctaaaagagcgtcgtattcaggagccattaatacattcacagatatttactgagcatctcccatgtgcctggcattcttctagatgctcagaatggagcagtggacaaaggagacaaaaatccctgccttcatggaacatgtattctatcagagaaaaaaaattctcaaggaaaaaaggcaattttagcatctgctctgctctgttctctcaaaaaataagcaaaggatttcacaggtatgccaccggaggtatatatccccaggaaatgtccacatacacac

SEQ ID NO: 11147 - DNA, 2300 bp, Homo sapien
cctaaggaacacactcacgtttcctggcatctgttagatagctctacttgccacaagccctgtgctgaaacccctacccacaaagctgcgttgtcttcctgcagctgctgcctgggacctcttaacagagggaaatggaagtggacggatgcttatgcagccctgtccagtaggaatataatgccagctacgtatgtaacttaaactctctaggagccacaatggaagataaaaataaatgaaattaattctaataatatattaacccaatatacccagcacaccatttcaacatataaccaatataaaaaaatttttaatatcttttttcatactgaatcttcaaaattcactgtgtatttttaaaattttactttatgttttttaggagacagggtcttgctctgttgtccaggctcgagtacagtggtaccatcatagctcactgcagtcttgaacttgctggctcaagtgatcctcccacttcagccccccaaggagctaggactacaggcacacaccaccacaacctggctaatttttgaatttttggtagatacagggtctcactatgttgcccaggctggtctcaaactcctagcctcaagtgatcctcctgccttggcctcccaaagtgctgggactacaggcgtgagccactgcaccgggcccgggcacagcgtgtttgcagtagccacattccaagtgctcactagccacatgtgaccagtggcccccatattagccagtgcaggttaaaatgaaaaaggtagcatgtgaagctgggcaaattatgataggatacagagattgtgtcactatttttacgatttatgtatattttctgttccttatgggttccctcctaatatttagaggtctttgaaattccattgtttcttagcagtgctgagaagaatgaggaaagtattcttcctccacgctgggaatggattttcaagggagagcagctcatctcccactccgccctatcccatccctagagggaaatcccaaggggaaggggaagttctcagcacagagcccctccccacttggatagtcccttcctaaaagctaactgtgaaatctctggattttgttttagaaggaaatcacttttttcatagttgcttttcacaattttagtaccttagctgccagaaatagaatttattactttacaataattattatagccaaagccaccatatattctgcatttcccaggatggtgtcagttttgaatgttgtttctttcaggcaggcatggtgaattttggttcagaaaacaggatcactctgtcacgctcttgagggtgaactgttggagagtcactgtggtgatcaaccaatgggtactccctagttcctggaactgagaacttcagtctggatacttctctataaatggtttcggtagactctgccactttccccggggatctgaaagagttctccaagaagcccccacttctcaggcggcaacagggcaggtacctgggcggtagcccttatgctactgttcataaatcaatctgagttttatgggtgctttttctgaggaaggagagatttaaagttatgtagcggcaacaaagctttctaataatatttttggcaggctgctaaagaaagatgaaataagaaaagatacaagccctgggagagtggtggtagcccttgggacgccagccagatgttggtgctcacaaatcgggggagacaatggcctttactgttgccatttacaatgccgggcagctcattaatcatcagctaaaatgatttcactttcagggtctaggcaggtcggggctggggttggggagggctgtggcaggaggcctggcttccaggccggggaagtgtcccagagacctactagacggggcccctcccctccactgctcagggcaaagggcaccaggaggcggagcgggggtcgaggtgggagtgggtgcgtcacccttgttttccgggctgtgagtctcccagcgtccccagctttccaggtagggacgccccctcccacgcagcacggttccggcgggtggaaaggaggggctgggctcccagcgcccgcccctctatccatcacatggccggagagtcacaaaaacaacagctttggccaagaccgtgacttcagtaaagggaacccggggctctcgcagccagccctcctgcccatggaggacagtttccttcaatcttttgggaggctgagcctccagccccagcagcagcagcagcggcagcggccgccccggccgcccccgcgggggacacctcctcgc

SEQ ID NO: 11148 - DNA, 2300 bp, Homo sapien
cttttaaaagtgctaaatcctaagttcataagagtgatgcacatatgaaattatgcacagatgtcatctatctcatttcaggcttaggacaagaagcaaaattaaacaagttacgtaatataacatttttcttttctgatagttttcagaaagtcatttgttgcttttcaagttgtcagagttaggcctttgtggggaatatatgaaaagacttttcttacaaaggaaatcttttttctatgtatgcaaattccataataactcaccagttcaattaggaagagcttctggtgaataaatatacttttttcggccgggtgcggtggctcatgcctgtaatcccagcactttgggacgccgaagcgggcagatcaggaagtcaggagatcgagaccatcctggccaacttggtgaaatcccgtctgtactaacatacaaaaaattacctgggcgtggtggcacgtgcctatagtcccagctacttgggaggctgaggcaggggaatcgcttgaacccgggaggtggaggttgcagtgagccgagattgcgccactgcactccagcctgggcgacatagttagactccgtctcaaaaaaaaaaaaaatatatatatatatataatatacatatatagtttatacatatagtatatataatttatatatagtttatatatagtatagtttatatatagtatatatatagtttatatagttttttcagtttttattattataaaaactgttgattattgacataactactttgtagcctagagttcttttggtgtgaccagcccatcaaaaggcattatttataatttcaaattactagaatttttctacatccacataaattattttccctttttgtatttcatctacttagtataacaggagcaggataagtcaaagtaataatggtaatgctgagatctgtgaacctttgtaattcatcatgagcatgtaatagttttataatatatgtaaaatatgcatggtaagcatgatgaaaaacattgcaataaccatgcaggaagagtcatttgagacctcctccaaatagcaaaaaattaccaccctgccccttttcccttcagaatctcagaactatggattttctctgggttctatttcggttttttcttttcaggttgagagccactgtataagtctgtcttaaaccttggaggcattagtaggtctcaaggctcctgaaaaaagtattttttttttttttgctttaatctgggtgaaaaatgaggatttactctaattacaaaactaaacattgtatttccacccatttgtgtaagtcagggatccctaacccctggaacttggacctgacctgttgggaactgggctgcacagcaggaggtgagcggtgggcaagtgagcattactacctgagctctgcctcctgtcagatcagcggtggcattagattctcataggagcacaaactctattgtgaactgtgcatgtgagagatctaggttgctgcactccttatgggaatctaactaatgcctgatcatctgaggtggaacagtttcatctccgaaaccacccccaaaaaggttggggactgcttgtgtaagtcaccaaatactcagataaaaacaatagcttcggccaggcgcagtggctcacgcctgtaatgccagcactttgggaggctggggcgggtggatcacctaaggtcaggagttgaagacaagcctggtcaacatagtgagacctagtctctactaaaaatacaaaaattagccgggcatggtgacaggtgcctgtaatcccagctactggggaggctgaggcaggagaattgcttgaacctgggagacggaggttgcagtgagccgagatcgcgccactgcactccagcctgggtgacgagagcgaaactccatctccaaaacaaacaaacaaacaaaaaaacaaaacagtagcttccactgcccacctagtgggtaaaattattcattcaacggcacctactatgtcacaggcactgtcctatgtaatagtaggcagacaaaacttcacaagccgaagatgacgagtaaattatatggatgttagaaggtgataagtattaaggagaaaaagtaggaggaggaggagaaagagtgctttgcccagggtaagattatgtgtgtaggggagggggatggaggggaactggttgcagtgttaaacaaggtaggggtcaatatgggctttacctgagaaggtgacatttgagcaccttagttgtcctaattttggcttaaacaattattaagagaattatt

SEQ ID NO: 11149 - DNA, 2300 bp, Homo sapien
gcatgtgccaccatgcctggctatttttttttttttttttttttttgtagagacaggatctctacaggctagtcttgaactcctggcttcaagtgatcctccctaagtgctgggattatgggcaagagccactgcacctggtgacatattctgaatttttagttatgttgttcttcctggcttactttttattttctacttttaaactgaagtagaagttatttagaaacaatttacttatagagaaataattttatttgtagacaggataggtagcattcagtagagaaaggaaatgaaaagcagctcatcaatagttaaataattgttcaagcaagatgtggataagttgctatgttatgacactgatgtggaacttccaagaaatgtgtttggtcatatgaattcttttgggagcaaggtagaccgctaaggcaccgagcctatggtagatctccagggctgaagctcaggtgggcatcatacccaaggcagcaagcagtgaaaagagccacagtagaacccaactaaaagtctcagaaaacaccaaaggttatgcttgggaaaaaagttcagtcagcaaatattagacaagggcatggtaaactggtagagtcagtagccaagaactaaaatggaactgagtaaggttaggtgtgtagaagaatgattctagagcattgccatgaatggtgttgggatatgtgaggcttgttttagtggctgttagctgtatggtttcttggtgagagatggactgatttaaaggtacagaattggactataagcttcctgcctgccttcccagccctgaacaaaggctttatctggattgtccttggtcagatagagggtgggacaggaagaagtaagcttgggtaaatttccatagtttactctgactctttatgcccaggttgtgtgtgcttagccaaggtatagagcagagattggagtccatgcaagaacagtgtgaagaatatgatagatgtaaattggaaatgagagttcatgagattgactttgaataggcccagaagaagacttctagcttttggcgatcatgagaacattgtatagaaaacaaatgaggcttccttgctgcattgactttaccaatgtatataggaatgctttttttttcccttaagtttttaagatgtatcttgacccttgggacaacctatgcagttaatgtaaagaagtgcttagtgtagtaaggaagtaacagatggaagccatagttactagggatgaaatgatattttctggttgcagaaatatgaaccagtagtgagaagaagtagtaaaattctgttgtctgcatgaatgcgtagctgtgggttacttttcaccgttcagttaattgagtggtagtcagtgagtgaaaagtagagggccaggttcaaggaaggcttcctataggagttggtgcctaagcctagtttaagtcagacttagcaagaaggaaggaatatgggagaaggcctgtaggcagtggcagctgaataatcaaaggcttagaggcaagaaacggtaatgtatttattcatgcaacaatatttcttttttaaattttaattttttttttttttttttttttttagacagagtcttgctctgtcacccagtctggagtgcaatggcacaatctctgctcagtgcaacctccatctcccaggttcaaacgattctcagcctcctgagtagctgggactgcaggtgtgtgccaccctgcccagccaatttttttgtagagttggggtttcaccatgttgcccaggctgatcttgaactcctgagctcaagtgatccacctgccttagcctcccaaagtgctgagattataggggtgagccaccatgcccagccaaaagataaatttttaaaaaaattccagtccatcatagtctgatactttagtaatgtataataaagaagtgattactaggtccgggtgtggtggcccacacctgtaatcccagcactttgggaggccaaggcaggtggatcacttgaggtcaggagttcgagaccagcctggccaacatggcaaaaccccatctctactaaaaatacagaaattagctgggcatgtgatgcacacctgtaatcccagctattcggctgaggcacgagaatcatttgaacccaggacacggagattgcagtgagccaagatcacaccactgcactccagcctgggcaacagaacgagattctgtcttaaatgaatgagtgaatgaatgaagtgaattacaaaaaattttaaaatacaaaccaaatgttttgttaaattc

SEQ ID NO: 11150 - DNA, 2300 bp, Homo sapien
taatcagttagagatcattcgtcattaccaattaattttttacattataatgttagccaactactgttgcatcacagagtccaaataaataaataaatcttactgaggctggaaagctaacattcttactcagaattaaacaaacaaggtcttgtcctgctacgtgggctggatggagtgtggtggcgtgatcatagcttgctgaaaccttgaactcctaggctcaagaggtcctcctttctcagcatcccaagtagctgggacttcaagcatgcactgccacacctggcttattttgcattaaaaaaatttttttgtagagatggggtcttgccttgtttcccaaactggtcttgtactcctggcctcaagtgatcctcccaaagtgctgagattacaggcatgagccactgcaccagctttagtgatttttttttttttttttgagacagagtctttctctggatcacccaagctggagtacagtggcatgatgtcagctcactgcaacctccacctcccaggttcaagcgattctcctgcctcagcctcccgagtagctgggattagaggcactcgccaccatacctggataatttttgtatttttagtagagacagtgtttcaccatgttggccaggcaggtctcgaactcctgaccccaggtgatccgcctgccttggcctcccaaagtgctgggtgggattacaggcatgagccaccacaccaggcctagttggtttttttaaagtggaaaaacagttgttttcctaaacattgtggctaattttaattaaaaacagaatggaggaatgaatatgcagtggaaatactaaaatcactgtttaaagtcattgcttggtgtttaaaaatctataaaaatgtgaaatttacaatttttcatcaaaattctattcagacagtcttttttgggggttggggttaagagatgaggtctctttctgttgtatagactggacttgaactggtctcaagtgatcctcctgcctcagcctacctggtagctgggattacaggcacccagccaggtataatgttagtggaatagacccctgctgctatgccctattctaaccatctccatcacaaataattaaagtggatattaatcatatttacctaagatggagtacatcttagttaagtagaatacaacttctagtttggttcagtaagattaaattgtatttatttttttgtttgttccataggtttagtgcagaagttacttttttgtggtaaatgaatttatgattttttatgtttcataattttagtgaaaattcttgtgtggtaattaatttgaacttttgatactgctttttaaccaggtaatctttattttcagtatttatctttgtaaaagataatgttagcttttttatatttttgtctgttttaaaagtaagattatttacaaaagactgaatttttttaattgttggagtgggtgatttaagtatttgaactttgcttatctcttgtctaattaatacagattctggaattttccagttttacgtatagataagttttgaaagtatgatttaagaggatatgaaatgtttgtattggctatacttgaatttttttattgcaaaaatgtctgattttctgagactggttttctaactatttataaagaaaattggttgtggtctctttggaaaatgtagaagaaatgtagttgtgtgttctagtgccttggccagataggcttgctagtctttattgaagtttaatgtattctgacatgaatacaataactaataagggctaaagttgtattgttgttgctttttttttcttaacatttgcaatccacattgaacagtgttttataacaaaatcttagcttatgattcagaataaataattcagaacattcagaataaataatttggtggcagcagcaggagttaagttagtgattttttagagttaagttttaggagctacaatttataaattaaaaattttcctattaaagttaccagctgtgtcttcgtgaattttctgaggagagattgtattaagggattaatgaatgtttggtgataagactggcatacaaatctttatttttaaaaggtatcattaaaacagttggcttccctgtatgtatactgtatttccttcttacacagtccttaggctggtaagaagtagtagtaaatttcttgaaatagaccctaaaaatatagggattagtgattgtcttatgtgtcattttgattccttttttactttgcaaagcagtatttagattgattcaattt

SEQ ID NO: 11151 - DNA, 2300 bp, Homo sapien
ttcgtaaaatcagaaatttatttgatcaataaaacttcttttctggaacacaactccttggatgtgtgagcctatcagacattaggagaataattttaataagcttttgaatggaagatttgatcactatgattagagacggagcagtgggagatgatagtgtcttggtgctagcaccaagctagcactaatagatgatggcacctatttatgacccaaattctaaatttcttttggtatttagagacatctcccaaatatgtatttccccatagtgattattctaactgacctttagcattctgtctgtcctagacatctgtataaatgttttcattctgttgaacttagtggtttgaattctaactcctgagaaaatttccacatctttgcattttgcttcaggcttcttttccccatagtgtaatggggaacaagaggtgtttggttacatgagtaggttctttagtggttatttgtaagattttggtgcacccatcacccaagcagtatacactgcatcctatttgtagtcttttatccctcactcccttcccaccctttccccctgagtctccagagttgagtcattcttatgcctttggatcctcatagcttagctcccacttatgagtgagaacatatgatgtttggttttgcgtcagccttttaatttttttttttttttttttgagacggagtcttgctctgtcacccaggctggagtgcagtggtgcgatcttggctcactgcaacctccgcctcccaggtttaagcagttctcttgctcagcctcccaagtagctgggattacaggcgcctgccaccatgcctagctaatttttgtattttgagtagagatggcttttcaccatcttggccatggtggtcttgaactgctgaccttgtgatccacctgccttggcctccctaaggactaggattacaggtgtgaaccaccatgcctggccttttttttttttttgagacagagtctcactctttgctcaggctgtagtgctgcggcgtcatcttggctcacagcaacctccacttcataaggttcaagtgattctcgtgcctcagcctcccaagtagctgggactacaggcgcataccaccacacctggctaatttttttatttttaatagagatgaggttttgccattttggccagggtggtcttgaattcctgacctctggtgatccacctgctttggcctcccaaagtgctgggattataggtgtgagctaccacacccagccttgtgacagtgattcttatctcatagtgcaaaagatggcatttggatgggagataatagttcagaaaagttccattctacagcaactcacaatttgaggaccatagttctaagaaatatccacaaagtcagttgaactatgatttttagctacttggcatataaagttttgctggtaagtaatgacttaaatccataacttttcaaaaacataagccttacttcaaaagcattatttgtacattgtagaaaattagaaaatacagataatcatctgcggtaactttcccaaaaaagagaaaatacagataaaatattaaatgaaaatattcttaccacctacaggcgaccaattttaatatctccataagtcttccccagctctatcttttgacttaaataggatcatatttaactattgtcttgtaacttgccattttcatttaataacctccatccttccgtgtcaaaataatttttcacctcttctcttacttagtctatattcagatgtaaattgttcatctcttatatttcccataagtgaaagttagtcctagacttgaagcctttattagctgtaagttcagcaaaatgcctttcagagccagtttgtcaaagccagcatccagtctggagaatgcacctggcatatggttgtgtcctttaattccctttcaatctagtggagttctttttttcatgatactgactgaagagattgcacagttttggttttaagtacagagacgtagtacatttcttaataataaatgtttaacttttgtgtgttttaacctaatttgtttttttatttttaaatttatattttatttcagcaaaacaagctatcgatcagggaagatctccagttataatagataacactaatatacaagcttgggaaatgaagccatatgtggaagtggtaaatatgaaacatgagaaagtttttattttttattcttgtcaattttttcacattctaaaattttggctggttggatcttgattattaaaacatttgtcctttg

SEQ ID NO: 11152 - DNA, 2300 bp, Homo sapien
gtgcagtggctcatgcctataatcccagcactttgggaggccgaggcgggcagatcacttgagcccaggagttagagaccagcctgggcaacatgatgaaaccccatctctacaaaaagtagaaaaattagccaggtgtggtggtgcacacctgtagtctaagctacttgggaggctgagataggaggattgcttgaggcagggaggtcaaggctgcagtgagctgagatcatgctactgcactccagtctgggtgacagggcaagattctgtctcaacaaacaaacaaacaaacaaactagtacagaatatttcattaaaatgtttatgtcatttgaattatgttaattatacttcctaaatggaataatggtatcttattattaaaccagaataataaatatgaacttgaatatatttaaatgctaggcaccattctatgaaaatctgtctgcttcatgtttattattgaaataatctaaattaattttagaacacttaaaatcgaaaacatctccaaagtgtagttcttctctttctaacagtatgatagttcatttgtttaagaaaactattcccattatttgggtattcaaacatgtttttacttaggagctctttttgcatggaatgtactagactatggtattggatgataatggaaagaagataatctccccattcgtaaaatcagaaatttatttgatcaataaaacttcttttctggaacacaactccttggatgtgtgagcctatcagacattaggagaataattttaataagcttttgaatggaagatttgatcactatgattagagacggagcagtgggagatgatagtgtcttggtgctagcaccaagctagcactaatagatgatggcacctatttatgacccaaattctaaatttcttttggtatttagagacatctcccaaatatgtatttccccatagtgattattctaactgacctttagcattctgtctgtcctagacatctgtataaatgttttcattctgttgaacttagtggtttgaattctaactcctgagaaaatttccacatctttgcattttgcttcaggcttcttttccccatagtgtaatggggaacaagaggtgtttggttacatgagtaggttctttagtggttatttgtaagattttggtgcacccatcacccaagcagtatacactgcatcctatttgtagtcttttatccctcactcccttcccaccctttccccctgagtctccagagttgagtcattcttatgcctttggatcctcatagcttagctcccacttatgagtgagaacatatgatgtttggttttgcgtcagccttttaatttttttttttttttttttgagacggagtcttgctctgtcacccaggctggagtgcagtggtgcgatcttggctcactgcaacctccgcctcccaggtttaagcagttctcttgctcagcctcccaagtagctgggattacaggcgcctgccaccatgcctagctaatttttgtattttgagtagagatggcttttcaccatcttggccatggtggtcttgaactgctgaccttgtgatccacctgccttggcctccctaaggactaggattacaggtgtgaaccaccatgcctggccttttttttttttttgagacagagtctcactctttgctcaggctgtagtgctgcggcgtcatcttggctcacagcaacctccacttcataaggttcaagtgattctcgtgcctcagcctcccaagtagctgggactacaggcgcataccaccacacctggctaatttttttatttttaatagagatgaggttttgccattttggccagggtggtcttgaattcctgacctctggtgatccacctgctttggcctcccaaagtgctgggattataggtgtgagctaccacacccagccttgtgacagtgattcttatctcatagtgcaaaagatggcatttggatgggagataatagttcagaaaagttccattctacagcaactcacaatttgaggaccatagttctaagaaatatccacaaagtcagttgaactatgatttttagctacttggcatataaagttttgctggtaagtaatgacttaaatccataacttttcaaaaacataagccttacttcaaaagcattatttgtacattgtagaaaattagaaaatacagataatcatctgcggtaactttcccaaaaaagagaaaatacagataaaatattaaatgaaaatattcttaccacctacaggcgaccaa

SEQ ID NO: 11153 - DNA, 2300 bp, Homo sapien
ctaaatgtaaggtggtatcctggatagaacccttgaacagagagggcatttaggtaaaaatgaaggaaagttgaataatgaataagttatataactaatatataactgatatgtaacttaatgttacatattatatgttataataagttataacaaattaatgttaaagtatcaatgttaggtcattagttgtaacaatgtaagaggttagtaataagggaaactgtgtgtgtgggggggtgggtacatgggaactctaccatttgctcgatttttatgtgcatttaaaaccatcctaaaaatagtctattaatagtaaataagtaaggagagcaatggagtataaccccctgaagaaaaggaatccataaattcatactgatagtgaataaataaataagtagggttctgctctatagcagcatctggattgacaaatgtggaaggcttgaaggaggtggggaaaaaaaatcccgacatttatggaatctgaaccataaggtaaagtttgattaggtgcaggatatttgcttcgtctcaaagtttaacctcacagattgcttattagttttttgttgttgttgttttttggtttttggttttttttgagatggagtctggctcttgtcacccaggctggagtgcaatggcctgatctcgactcactgcaacctccgcctcccgagttcaagcgattctcgtgcctcagcctcccaagtagctgggattacaggtgcccgccaccatgctcggctaatttttgtatttttagtagagatggggtttcatcatgtttgccaggctagtctcaaactcctgccctcaggtgatccgcccacctcagcctcccaaagtgctgagattacaggtgtgagccatcgcgcccggctgcttattagttttaagggggaaaatatgccatggagaaacaggacaataccttgatggggtgacaaagattaatattatcttataattagtatagtgtgcctgcggatgtaacacactgagaacgccacaacctcacgtaaatgtggttgtttcaaagtaggatgcatgagtttaattatgaggagacaaaggtcgtagtagaaatctgtatttgagatagatttctttctgagaagatgggttgctttggtgaacactcttgatcacaaggctgttagttaaataatcaaatgtatatattccagactgtaactttaacaacaaatgaaattgttatcacgttggggatggaaaagggtacatatccatagaaagaattatttaaatatgaagagatggtaagttttccttgcaaggacctgaaattatgggggatggggaaccaatggagggaggaggggttggagaggtggtgggaagagaaaaggagccctcagttgaggactgccagttgtttggtttgtatttatttttaatgcaacaaacacttacatagcgcttattcttaccaggagctcgctgttctacttgctttgcacgtattgactcttttaatgggaaagctcagtgattggtctgtatttccaaaaacaaaacaaaacagcgacctgacactaaacgattttgttcataagtatttttatctgttattggggacctgcgccccagtaattctgtccttccacagaaaagcatgagcctaaaattacgtcaggtggtctttcgtagaaacgaccggaatgcaaatttgtggtaccaactgtggagttccgttggaaaagtcagctggttgtcttctagaaagctctaagaagcatgcactgagagccgattatacatctattggggggcgccagtttctcaaattcctttttccttcgggggtgaacgccagaggaggtcgctgctttcttttaacgaaagttggtgtttttagataacttccctgctccagatctaggaactaattccggtctacttttgttgccaaattactgcgtttgtcacgccatggattctgggagacctagtctccgtgccgtgaggtttacggagccggtgtgaacgtcggacttcaattcccacaatgcctggcgcaaacgcctagttttggcctgggtaaccgagaggtgaccgccatcttgcgtacggaggtgaggtttgttaccgcgattctgagaggtgggcttttagtccctccagacctcggctttagtgctgtctccgcttttctttcaccttcacagaggttcgtgtcttcctaaaagaaggttttattgggaggtaaaggtcaatgcgtaggggtagagtaaggtgagtagacaccccgttttaggtgagggtggggc

SEQ ID NO: 11154 - DNA, 2300 bp, Homo sapien
gcccactcttttcttgggcttaatcctgtggtgttagcagcctaacgtgggcaatatgtattccgggcctcattgaaattcaaggcatcattttataagagagagggttaatggtgaaactggcaaaactgctcacaaagttgacgtgacaccttcagccctttcaggactcactgccatatacaagatgtagagtgacattcttaaacaattcatacatccaacaaaatatttactgaggcttccaggtgtcaaataatggggataagagcactgaataatttatacaaaaactcttagccgggcatggtggctcacgcctgtaatcctagcactttgggaggctgaggcaggcagatcacgaggtcaggagatcgagaccatcctggccaacatggtgaaactctgtctctactaagaattacaaaaaattagctgagagtggtggtgtgtgcctgtagtcccagctgcttgggaggctgaggcaggggaattgcgtgaactcaagagggaggttgcagcgagccaagatcgcgccactgcactccagcttggcgacagatcaagactccatctcaaaaaaaaaaaaaaaaaaaagaaagaaaaaagaaaaaaaaattcttgctttcatcctggctttcttctgaaactttctggcttcctggctttggaggtttgggaattgaagaaaataaagtaaaaaacataataaaaacaaccaaagaggaaaggtttttctagatctagacatcctactctcccatacaagatttatgttgatggaacaacgatgtaaaataagaaaattcctgagataattttaaaaagagggcagaaaaaactcatagtagacttcatcgaggaatgtataaaatgggtagaacctggagtattcagtggcaaaatcttggacacaggaatacagtaacacaacatattggtctagcaagcactggaggagactgaggcggaattgtccagcgaatcccacaaaaatggaaatgaagaggtctcagtatctctaggtgcccgggtccgatggaataccgatgtacataccttttctaacacagtagcattagtttatatatcagcattacctctcttttgtttcagttgataagtatcctactgtaatccattcattcacactttgcttgttcattgttgaaacaaattctccctggaacaaaattctagtaaccaaatacatcatatcaggggaaacttccttacagcagggatggtattaaagtaaaaagaggaggaagtcccttcttcagctctggcagggacccggctggggaggaaaccttcccgcaaggtaggtgatctgctgtggtgaccaggctaaacccactctacagctgcaggagggactggcatcccttagaggtgaagaggggaggagacccacctcctggaatgtgtccctgtggtctccagatgatttcttcctctaataaggacaattctgccaaaggaatggaatgcttcgtcacaggctcaattactctgtctccgccagcctaccacctataaacaattcctcaaattaggaaagcggggagatttaataaagacataacacgtaaagtgtaggaaaactatttgtatggcattccgagacgactaggtcagagttaacaagtaaggagcaaagtagttaataataccaattctgtttacccatcacaacacctgtgctgaatgtcagggtttaaaaaaatctcccaacctttatctaaaaagatagggctacgtaacaatcggtgtggtttttgtcggtagaggtctaggaagccgcaagagtagtggacgccttgacagctgcccttctcgcgggccccgcggcggcgtgcccgtgtggttgcgtgcgcgcggacggggcggggctgaggagggacgtgcgcgcgcgcggacggggcggggtggagctcggagggcggacgcgctcggggccgtctggtcggcagggggcgctgcgcacccatgccgcgctctgcctgcccccgggtgctgtccgcggcggttcgattggagcagccgccgaagagcgcttggcgccattttgaagcggagaggaggaggaacggcagggctggctgcggaaggggagggggggggagaaggcgattggatgcggcggcggcggcggatcccggagagccccggagtgagcggagtagcgagtcggcaacccggaggtaggaaacaattcagttaacggaaagaaaatgtctctcttctctggctgcggcgctccatttttcagcggccgccactgccgctgtgtgcgt

SEQ ID NO: 11155 - DNA, 2300 bp, Homo sapien
ggtttgatatatttgtagaaccacaagaacagggtcaaaaggtggacattttaaaatgtacatggagcattttaaaatgtattgctttaatatggaactgaagtatttaaaatatttgatttatatactgaatatatttcagatacttctcatgaggagaattaactcagctgatactgaattcctgcagtgtgcacacactgttgttgatgaaataactcataataatttcttccaggagataaactatgtatgtagatttaattttttaaattattaaattgggtgagttgattttgaggaaaaataatatagttaagagaatgttgattaaactgtcttcccttgaattcatcaaaataattaaaaagaacctaaagaaaaatgtatttaagtaaagctaccaccaactggacagaattggcaccagatgtgcccttaagactctattgaaagtgagagcactgacaagggatatgtattggcagtgtactgtaagtgtcctattatttgctaatttagagggaggatattgctatatggacacactttaagagaaagaaagaaaacctgattttagctgtactaggactaaaggagaggctttgtggtcatagtatttttctttaggtcaacctgtttaccaggaagagcaaagtttagtgatgaggtaagactaaggaaaatcatgaaggaaatatctttttaccaactttacgggaacagaagaaaattatacgcttaacccattaaacaaaaaatgaagatgagttatggggttccataacgatgagttatatgagttccattgtgtctcagcttgtctctcaggagtctgactcccctaaaagtagttagatgtgccaaaactgaggatcctgtcataacatgtgatgtacccatagctcaagtgactggttcttatccttgtaagagttttaacaaatttggagataaattacacagagaaaaaggacttactacctttagtcctaactctcattcctatgctacttagccaggtgatgaagcaactgtagcctgagttgggagctttgatgttaattttttaaagaagtgttcagtcatccgggagatgctaactatacttttgtttaaatagcaaagccagagagaatttttcttattcaaagatgaattaacagaatacagataagcaagttaacaaacacaaaacctatgtaaatatcttagcattccaaagtaactgataagcaatacttaaataactgtcttagttatttaagctgccaaggaaggtaaacagcaaatgacatgagagaaaaaagataacaaaaatgaagtaatacatgaaaaagagctaaggatattgactatagaatataatttaatataagtagcaaggagcagaataaacaatgtggaagatggaatcagtaagctagagatttggcttgaggaaatctgcatagaatatagagaaattggagagaaaaaatggagttaaagggaatgaattgcagatagtgaaaaaccataattgacatctttggagaagacagtagaataatgggaaatggaaaatattcaagaaaataataataaatttgttctgaatgatttaaaatatgaatctggaggtgaagactcatttttggaaaatatactggtgcagtttgctaaattttcagggattgcaaaagtgatttcacaaatatcaagaaaaactagttatatcggggaacctgccccgataatcatgtaggttcttttctatttttcctaagcggcggccggcttgagaaataaagggacagagtacaaaagagagaaattttaaagctgggcatccaggggagacatcacaaattggtaggatccgtgatgccccacaagccacaaaaaccagcaagtttttattagagattttcaaaaggggagggagtgtgtgaataggtgtgggtgacagacatcaagtacttaacagggtaatagaatatcacaaggcaagtggaggcaggatgagatcacaggaccacaggacagaggcaaaattaaaattgctaatgaagtttcgggcaccattgtcactgataacatctaatcaggagacagcgttttgagatcaaccggtctgaccaaaatttattaggcgggaatttcctcttcctaataagcctcacaggaccacaggactgaggcgaaattaaaattgctaatgaagttttgggcaccattgtcattgataacatcttatcaggagacagggttttgagatcaaccggtctgaccaaaatttattaggcaggaatttcctc

SEQ ID NO: 11156 - DNA, 2300 bp, Homo sapien
agtgtccccaggaagaacctggacacttcccacatggcacactaggctgacttcccacatgtgggaacttagggccacggccaaggtaagaagccagtgctgctaccagccgccagccacagctcctgagccctcggccatgggacatctgacctgccctgtggcagacgactccaggtacagggtcccaggtatttggaataagcttatatttttatggctggtcacttctggggggttttgtgaagttggttgattcttctttatttactaggacaacagagcctgctccacacactggaaccagaggtggatgaggactgaaggaggaagaggagaaggcagagggcctggcccagcctcttcactccgccgacccttgcaggtgtcagttcaaagtcctgagtggagctcccggatgactgcacaaccaggggccaagcagattagccgactccagtggagcaggctagagacctataactgggagtgggggaatcccttgaattataaaatcaaaaaatataaaattccaggccaggcatggtgcctcatgcctgtaatcccaacactttaggaggccaaagtaggagaactgcttgagctcaggaatttgagaccagcctgggcaaccccatctctaccaaatagataatatatgtaatatatgtataacttatacatataaatattatatatatgttataactgtactcctaggagttatatatattacatatagttttatatatatatatttctatatatagagctacatatatattttatgtataatagtttatatattatatataactcctaggaatatagttataacatatgtacagttgttataacatatatacaggaatacagctataacatatataaatatataacatatattactatatatgttatctatctgtaaatattatctatatattactatatatgttatctatctgtaaatattatctatatagagctatatgtgtgtaactgtattttatatatatgcataactcctaggaatacatttataacacatatgtataaatataatatatagttttatatatatataactgctaggaatacagtttaataagtcatgtgcatgacatgtgaagaaaataagaaaattctattgagaaacataagatgtttgactgcagggaaaactacatcctcttttttaacatgtactatatattgtaaaaataacaattctttgaaataaaactaaatttaatgcaaatccaaatcaaaaatcatttgggacttttttctttgttatggaaaaaaatttatttcaaatttcttctgaatgaataagcatgcataaatagccaggcaaattaatgagagagcatttgtcctattggatattataagcatacaagtataaacattaaaccattatataataacagaaagcccaatagcacagaatccataattcagaaacagactcatgtgtgtgtgagaacttgatatatgatcaaggtggactatcaacaaaatgggttggataaactgactaatcatttggaaaaaatagaaataacaaatctctatgcccaaattaagcttcagaaggagcaaatacctagacataaaaatatacatttttattaaagtactgaaataaaacttaggtaattgatttataatcttagcacacaactttttagatggtcacttgaccctatgtattagtattttaaagtttgaatcaacaattccattcgtgggattttttttcccccgaagccataatgggtcaaggtgacagagaaagatatacaagtctggtcattaagcatttttgtaatggtgaaaaattggaaacaacttaaatgttgattaaataaattatagcatacccatacaatgaaacccaaacagccaattagaataatgatatatcaccacactgatactccattgcctgagcactgttggtaggaaagcctgctcctgttacagccctgacagcagtttatgtctatgcctgctgatccatcctcaccaacaccagggggtgttgttcacatgcttgttatctagagctgtcctttctgcccatcaacagacagttctgcccatgggcacaggcaattggtctcaactgcgcatggtttgccctgtaatgccctccaaatgaccagctgaaaagattgatagtctagagcagaggacctgcggcacctgatccacagaccagacagttaggaggcttctttgtcctcccagaagtgcaggcaaagttttggtgttcatcaaatgagtgatca

SEQ ID NO: 11157 - DNA, 2300 bp, Homo sapien
taatcccagcattttaggagaccgaggtgggtggatcacaggagatcaggagtttgagaccagcctggtcagcatggtgaaaccctgtctctactaaaaatacaaaaattagccaggtgtggtggtgtgcccttataatcccagctactggggggctgagacaggagaattgcttgaacctgggaggcagaggttgcagtgagcagagaccatgccactgcactccagcctgggcgacagagtgagactccgtctcacacttgtggaacccagaacttagtaaccatgaacagaaccttaataaacagaaagttctggaaataaagtttaatcatcatgcaatctttatcactgggttaaatgaacaatcatctgggaacatgtcttggaatgcttaaagctttgagatgcatgtgcctatgtggcagacaaatttcaaatgtgaaacgtttagttaacttggtcttgctttttaatcactgctttaaaatttaaaaaatgctgctggtcaagtaaaaatagcaatagataaaatctgccctgagcaaacagaccatacatcaataaatgaatacttagcttaagcgattttccatgagacccatgaagcatttctaattgaaacttaacaagctacaacccaacagacactccaatcttcacttctagaagggaaatgtgatactccatgtagacgtagctttttaaatttagctggaagacagcgtgacagtgaagttgtgtgctgtaattttttaaaattgctgaagtgtcatggtttgctatttcgtatttattgaaaaaatgtaaatgctatatttaacagaatggcagtaactctgtttcaatctgaagacttaatcttactaatcatggtaatatatgctggctggagttgggaatatttcataaaatactggaataaatttgtgcttatatttcaggggaattaataaaagcaccttcatctgcaacatttaaaatgttattgcctttaaatttgtattaaataatgcagggaagatagatcactgggggagaatggatgcacctctgtgaggatcttggtcattcaacacacgtgtacgggtgaggaaactaaggcacgacttactgggtagggaggtagggatattagcaagatccttcacttgtctgggctttctgtctttgagtcacctttgcgcagtttttcactggacttcacaagcctctgaggcggcagggcagacaggacatccttattttatagaggaggaaacttaggcttacagaggtttcctgccccaaatcacaaaggtggagcctagaccttctcagtctccaccaactgtatttcggttagccacaatcctatctacccacatccaaatggacactgtggctctgcaacttctgtcaaaagggctctttggcaacaggaaaaacgtcatggctccattgtattgtagaggatgggaatgggtgttccggctaaattctccctcccctttccctccacagctcagatggcaaatgtgcgacccagggacctcccgctccagcagacctgtgcgcacaactttgcacagattacctgctaagtcagagccgaaaggtaacacagatgccaaaggataataaaggtgaatgagatttactcaaaattggaaacttggtgtttggtttttcaggagaacaatcaacgactgtgatttgaagttcaccagggtattctgagagatctaatcaaagatagagtgctggtttgaaattattaaaaggtaacagtaaaagggagagcaaaaccccagtcccaacgcaacccataaatctactttgtcttcctcgaaagaggggcgcgggtgggcgcgtctccccgcgagcatctcacctaagggggaatccctttcagcgcacggcgaagttccccctcggctgtcccacctggcagtccctctaggatttcggccagtccctaattggctccagcaatgtccagccggagcttctttgggcctccgagtgggagaaaagtgagagcaggtgcttccccagcggcgcgctccgctagggcccggcaggatcccgcccccaagtcggggaaagttggtcggcgccttttctccccgacgaagccgctccagggctgctctcagaggacgcgcggcaggcaaagagaatgaacctgagcgtccacgaaacgtcctgcacggctcccgggagctgggagaaacaggtgcctttctccgacgtccgcgggcgacgcctgccgcaccttgcccgctgccgcgcccctcccgggcacccctcgccctcgg

SEQ ID NO: 11158 - DNA, 2300 bp, Homo sapien
atctgggaacatgtcttggaatgcttaaagctttgagatgcatgtgcctatgtggcagacaaatttcaaatgtgaaacgtttagttaacttggtcttgctttttaatcactgctttaaaatttaaaaaatgctgctggtcaagtaaaaatagcaatagataaaatctgccctgagcaaacagaccatacatcaataaatgaatacttagcttaagcgattttccatgagacccatgaagcatttctaattgaaacttaacaagctacaacccaacagacactccaatcttcacttctagaagggaaatgtgatactccatgtagacgtagctttttaaatttagctggaagacagcgtgacagtgaagttgtgtgctgtaattttttaaaattgctgaagtgtcatggtttgctatttcgtatttattgaaaaaatgtaaatgctatatttaacagaatggcagtaactctgtttcaatctgaagacttaatcttactaatcatggtaatatatgctggctggagttgggaatatttcataaaatactggaataaatttgtgcttatatttcaggggaattaataaaagcaccttcatctgcaacatttaaaatgttattgcctttaaatttgtattaaataatgcagggaagatagatcactgggggagaatggatgcacctctgtgaggatcttggtcattcaacacacgtgtacgggtgaggaaactaaggcacgacttactgggtagggaggtagggatattagcaagatccttcacttgtctgggctttctgtctttgagtcacctttgcgcagtttttcactggacttcacaagcctctgaggcggcagggcagacaggacatccttattttatagaggaggaaacttaggcttacagaggtttcctgccccaaatcacaaaggtggagcctagaccttctcagtctccaccaactgtatttcggttagccacaatcctatctacccacatccaaatggacactgtggctctgcaacttctgtcaaaagggctctttggcaacaggaaaaacgtcatggctccattgtattgtagaggatgggaatgggtgttccggctaaattctccctcccctttccctccacagctcagatggcaaatgtgcgacccagggacctcccgctccagcagacctgtgcgcacaactttgcacagattacctgctaagtcagagccgaaaggtaacacagatgccaaaggataataaaggtgaatgagatttactcaaaattggaaacttggtgtttggtttttcaggagaacaatcaacgactgtgatttgaagttcaccagggtattctgagagatctaatcaaagatagagtgctggtttgaaattattaaaaggtaacagtaaaagggagagcaaaaccccagtcccaacgcaacccataaatctactttgtcttcctcgaaagaggggcgcgggtgggcgcgtctccccgcgagcatctcacctaagggggaatccctttcagcgcacggcgaagttccccctcggctgtcccacctggcagtccctctaggatttcggccagtccctaattggctccagcaatgtccagccggagcttctttgggcctccgagtgggagaaaagtgagagcaggtgcttccccagcggcgcgctccgctagggcccggcaggatcccgcccccaagtcggggaaagttggtcggcgccttttctccccgacgaagccgctccagggctgctctcagaggacgcgcggcaggcaaagagaatgaacctgagcgtccacgaaacgtcctgcacggctcccgggagctgggagaaacaggtgcctttctccgacgtccgcgggcgacgcctgccgcaccttgcccgctgccgcgcccctcccgggcacccctcgccctcggcgcccctgcccccgcccccagtgccagggcggaggcagtcccggctcgcaggtaattattgccagcggagcccgccggggagcgggggtgggcgcgccggcggtgggcgggcgggcgcggcggggcgcgggcataaaggggcgcggcgcggggccccggagcctggctcccgcgcagcatgcccgccagcgccccgccgcgccgcccgcggccgccgccgccgtcgctgtcgctgctgctggtgctgctgggcctgggcggccgccgcctgcgtgcggagccgggcgacggcgcgcagacctgggcccgtttctcgcggcctcctgcccccgaggccgcgggcctcttccagggcaccttccccgacggc

SEQ ID NO: 11159 - DNA, 2300 bp, Homo sapien
acacaggggctccctttggctgtgaagaagtaaaggctatgatattcatcttgacttggggtctgtagtgatgggcatgggagcgagaggtatcgcttctgtttcagtcactctcgctgactccggtggtccatatctcactgaaattccatcttactgggcccagtggcaactcctcatctagctttaaatttggtaatgacttctcacccccccatttgctttaaggaggagtaattattatttccttgctttatcccagatctccactctcagtttttgaatagcagaaacaaagcgttaacacataagtctcctttaatgttattttcctttggttaactcatctttggttaggcatcagggcatgttcacaccttggtgttagcagcaggttctgcacagcttacaggacagtggagagatggggcccagagccacttggaaagaactgtgtgaggaagggactcactgagtcagacaccgtcattttcaaaacacacaattctatataaaattggtattttacatatatacagtaaagatggagatatacacacatatgtacatatgctatacatacatttatttacagttaggtatacgcttcttagaagcctttaaatagcaaattaggcaatgcacaaggaatagtccatttaattttaagtaatatatataaagttctcattttaaaattatattagtagggatgtagccatctccaggaaggctaagaaagttcttggaaattcttgcatctccaacattccaacttcttaacgtttccatttttaggcattaaccgcgtccttcagttcctctttctctcgctttctcacatgcacactctctgccacactcgtcactttagcttcctcttccctgagtttgatgtcacactgggcaaaactcagattttagtttctgggccctcagcaatgaggggctggaaagagtttctaatcctggcaacttctgctgcacacagatgtccaaagcctttgctgtaccattctggggagtgacctctgtggggaaagaaatcagaaaggaagtgggaaagtttgtttccaaatcacagcaattagttttggtggacagggctgcccttgggccccgatgaccagtgaacctgcagacagctcgggctgctgccttgaggggctcaggacgtcattctgccatcaggggccttgaaaacgtcctggctgctaagtattcatgttgtcatttgagtactcatcaggtgctttaaaatgataccaacatcttggggtaaaatgaaaagattcagatgaaatccagaatttactgtgaaaactccgttttgtctacccagaccaagaactgggtttagcatcatgaatgccttgaaggggttggatgtaagttacttacttctcaaagaactaccagagggagcagcaaaaggggacaggcataaaagaaatacatggtcgagcacggtggctcatgtctgtagtcccagcactttgggaggctgaggtgggcggatcacctgaggttgggagattgagaccagcctggccaacatggcgaggccctgtctctacaaaaacatacaaaaattagctgagtgtggtggtgggcagctgtagtcccagctactggggaggctgaggagggaggatcacctgagcccaggaggtggaggttgcagtgagccctgatggtgccactgcactccagcctgggtgacagagtgagaccttgtctcaaaaagaaacacaagagagggaaactctgatttactgagtacctactatgtgtcaggctctgtttctggtgtgtgtttcatgggagaaagacagaaatataagtaggcataaaacagaaaataaagaaagacaaacagttgcaggagaaatgtcagaatttcaggaaagggggaaagacagaggggaggcatacatatccacctatgaaagcacactaatggcaatgaggaaacaaatacagtgaaataagaaatcagggtgacatccctgctggatgtgctgtacaagctgagactcccaagatctgagcctgccattaagggagtcagcacttacttcaggtctatcctgcagatgtgagtcagtcttgacttgccagagccacacggttctatcaagtactgcgagtccatcaccactgctcgcacaccacccaggagctgggcttcctcatgctccacggagagggacaccagggtacacattcctttgggcaaatcagttttccaggtcctgtagcaaaacaatccgcacatcagagtcatgactgagggagga

SEQ ID NO: 11160 - DNA, 2300 bp, Homo sapien
tagcaggcccggctcttgatgacttcacctgtaacaactgagagtggaggctttcaagcagaaggcttctaagctgaaaaaaaaaaatcatatgattcgatttggactacactgtggaaagctatttagatggggaagatgctggagacagggtttctcccacatttttactgtaacagatccagagagaggtggcaaggcctacactaagagaatgagagtgaaattacgaatgagggaacagatttgaaaatcagttcagaattaggtcttggtgatgtgcttggtgaggatgaagcaggatccgatgattcagtttatttcagaaggaaatgatatgctctaggtcaaggtctgcgctgggcccaaggctatgcaaagctaaaccaggccatctctggcctcagggaatgcagatgctcccctctcaggggctgcaaattcaggcagaaaccagacacctagagtcaatgtgtgaggcccaaagtgtaagacagtgccaagccgcggggacccactgcagccacacagaggtgtgcgtcctgccaacggcattctgactcggagttgattccacagaaaaagacgctcatgcagagtagccggattggatcacaaatagcgatctccagaatggctccctcatctctacttaaagaaattcagtggttcattttgctgttaccttatccagggaatacacgataagaatcaagtgcaggggactaaaataaggagtgttagctttgagatatactgaagctgagattcagatggggcaagctggaaatatggtccccggggctcagtgaagaggtttctggaaagaagtaagtgccttttatggcagagttgagttcctttgtgaaaaagaagactgcaggtgctttatatttagaccgtctagtctgatgtaattataccctctttataatcagtcagggaaaacttcttagagaggaaggaaggaggcattcaaaacctctttgaaaatgggaaggaagaaagtttggcaagttgagaagggtcctctggccactgggaggaagggtatgtacaagacagtgcaagtggtagaaggacagcttagaggtgcccaagaagctcacacctgtgcatgggaggacagaggggagggaggtggaggaccacacagggctgccctcagagcacccagagttcctgcttcagccacgctgtctgctaatgagcattttccttggtgctctgcagggtgacgactccgatgaggaagatctttgtatcagcaacaaatggactttccaaagaaccagtcgcaggtggtctcgtgtggacgacctctacacgctgctccctcgaggagacagaaatgggtcaccgggaggcacggggatgaggaacacgaccagcagtgagagcgtcctcacagacctgagcgagcctgaggtctgctccattcacagcgaaagcagtggaggcagcgacagtcgcagccagccgggccagtgctgtacagacaacccggtcatgctggatgccccactcgtcagcagcagcctcccacagccccccagagatgtcctcaaccaccccttccaccccaagaatgagaagcccacgagggctagggccaaatcatttttgaaacgcatggaaacactccgagggaagggagcccacgggaggcataaggggtctgggcggacaggtggcctggtgatcagtgggcccatgttgcagcaggagccagagtcctttaaggctatgcagtgcatccaaataccaaatggagatctccagaattcgccgccacctgcctgcagaaaagggctcccatgctctggcaagtcgagtggcgagagcagcccgtcggagcacagcagcagcggggtgagcacgccctgcctgaaggaacgcaagtgccacgaggccaacaagcgcgggggcatgtacttggaggacctagatgtgctggcggggacagcactgccggatgcaggggaccaaagccgtatgcatgaatttcactcccaagagaatttggtggtgcatattcccaaggatcacaaaccaggaacattccccaaggcactttctattgaaagcctctctcccacagatagtagcaatggggttaattggaggaccggtagcatctccctgggcagagagcaggtccctggtgccagggagccccggctcatggcgtcctgccacagagccagccgagtcagtatctatgacaatgtccctggctcccatctgtatgccagcacaggagatcttttggacttggagaaagatgaccttttccctca

SEQ ID NO: 11161 - DNA, 2300 bp, Homo sapien
gggcactggaacatctgctgtggctaaagaaggagagccggtggcaggtcacatggcagattcacccacctgcctttggccagtgctctttcccatggcccagcaaccaggaaggctagaatcagagtccactcaaaggtctatcccatagtcagccgggttttgccacaacattatttaaagatgcttcgtttaggttgggcgcagtggctcatgtctataatcccagcactttgggagggccgaggtgggcagatcacttgaggtcaggagtttgagaccaggctagccaacatagcaaaaccctgtctctactaaaaaatacaaaaattagctgggtgtggtggcacaggtctgtaatcccagctacttgagaggctgaggcacgagaatcatttgaacctgggaggcggaggttacagtgagctgagatcatgccactgcagtccagcctgggtgacagatcaagaccatctcacaaacaaaataaataaataaatttttttcttttaaaaaaaagatgcttcatttaattttttttttaccatagtaaaaatatccttttattaaaaactgatctggaaagctaagactcatgcactacatttaatgaatgaatggttagtgacaaataaagatagaagtctcagtaaaatgcatgcccttccaagccctttcttctgaacaggtctcaggtttgcccaatcagacttttcataaatgtaagactgatgaatttgctttttatttctttcactctccaccctttctgaagttgcagataagcagtagaaagtccatgagcagattctggaggtaaatcaagtattaactaatgcacaattcagatcatgactgtgacagcaatgattatctcaaaaaaatcaaaagtgggcagttctcagcaactccttgtctgaccccgatagagcgggacccttccccctctttccctgccttcccggcaaccctctccctctgtcattctcttcacatcccccaggtcaatgctcttaaacagaaacggaagttaagccacaaggttagaggacaggaagtgactcaatgattccttgggggtcaggtgtctgggtagtgagagaaagaagggagagaaaattccagattagaaaagtagcccagatgggagagtgatcagggcaggaatttcagaaacgacaatgacatcagcattagtggtactcctccactctcctacacaagcacttaagagcgttgctgtgaactacttcccacccattttctttgcaagcctaggaacgcggggctttctggcagatttaacaggtagtttggtggtgtctggattgtgctaatagaagccattataccaaagataatttttaaaacctagaatttagtaaacaagggttttttttgtttcattttgttttgctattttgagattgttaatctcaaatactctcaatttgctgatttcattattgtgttaggacataagtgagataatgaagtggataattaatgacatactctttaggatgtaaataaaagccacactccacagaaaaaagaagtaccataaagcttaaaagagatcacgaaccttagtacctgcattatacaatgaggatagttttcgtaccgaggaaaaggaaggaagtctcttagaatcatcatctttgctgcttttagtcaactgtggaatgttttaaaactgtatttatggtcttaaagggcatgtaagaaaatatttggaaatttcaagcaaaagattaaccactggaattatgatagaaatcgcactgtttctttacgagaggagagttctgttcgctactaaaagactctgttgagaatgtgaatgagtggaacataccccaccttacattttagtcctctttaggggtttgattcattagaaagtgtgtggttctttctattccaaacagaatccttttctctgggactttattttaaggctgtgatgcaaatctttggtgttcctttttaatgggaatgaaaacaatgaggaaaggaagtgtggaggcttggaatctcagctgaggcttcgcaggtcactggggagcagtgaggttcctctccactgttagcaaccggaaacatgagagaggactatcatctgctccttgctctgaatttctttgaacctccatgctggaaccctcctcagttctccatgcaaacgttaaccaggcccctttgtggtgcttggtgctgcgctggtgcagagaatgcaaagacactgtctgtggtgggaaacagaaaagcagagtgaaccacacattccagcgccg

SEQ ID NO: 11162 - DNA, 2300 bp, Homo sapien
cacggaatgtcttgcacattttaggaggttttttaaaaggatttattagataagatcttcgcagttgacaaattctcttacccaaaattggcataatcctttagcttggggagaagagatcacacacatgaaactattatggaagtagggaatttcccaatatatttagtcaagagcacagaagctcattggcagtgaggtgccaggcagggtaggagcaggagcagcccctataatctgccttttgtgggcggggcagggtcacagatgcctgtcacacagcctgcatcgagcagggcctgctggattaaaaagctgacttctggccagctacagcaagcaaagacttgcaacaccatatgggaagaattgacccaacaatccatgtgctttcattaaagggatgtttacagacatcctggttcttgactcaagttcattgtcacagaatgacgttctcatggaggaagtgggaaaggggtggagttgaggggtgagtgtagaaagctggacgaaatcaggggaccctgaacaaaatctctcgtgttacttttcagttactcagaaagcctctctctctacaaatccctacaaggttgagacacacaggcactctcaaccttgaagtatctgattttacaacttcaaactcaggcttctcacaatactctatactccctctcttagagtgagtacctcttatctagttcaaagtctcattcattctcttatttgacagactccagttgtgtttttcttgcctttaaggagctcactgactaatggcagatgccagttctagggttctattgagtgagagtggaaggagaactaaggtatcaaacttttgctattcagccccactctgccctatgcttacttcgtattctccctcactgtggagttcaaacatttaaaatctgagtggctgttatcctcagcatgcactgtatactctgcaccttactcccggaatcctttcatctttagctctccttatcacaggcagtggtagtttggtatcatcctctgccagattaaacatgtatatttatttaatattctctctgttgttgaaaataacaatacgaatgttgcataataacaacaaagttctttatcatcttcatttgatctgctgtcatctgtgaggtctccagagcatactctgtgcctttcatgttcgaggacactgccgagaaataaaactgagactcgaatccagatcctgtgactgtgaatcctagtacagtattccaacatatagccttagtttaggaacactcactttttctattcatggtaaacgtgtggcctccactcactgataaggtgagattaccatcgagcatgcagtatacgaaagtctacaatgcattgtttgtcatgctcacttacagagcagactgattgttccacagtcacctgttcaaccccacttggtagtggttaacccagagaagcaactgcctctcatctggaacctgaaatgcatcccatgcattctcctgattcaccaagttcattggcagtgtaaatacaagcaaatcctgttgccaactgagggtgtaatgtcatcagaatgtgaaggatgacctgagttttttaaggatacacaattaaatgtgcactgattttgttatatcctattttggcattttctccttttctgttttctccttggaattggtttgcacagtattaacagattaaaaattatttatgggtgtgtgtgtgtgtgtgtgtgtgtgtgtgtttcagtcatgggcatcttctttcgagtcttattaggcatggaaaaacctaagcttggtttaaaacacttcttcccttcctgtgaagttttaggctaacttaaaatgggatgtgttatataaggaaggcacctgacactagcggtgggggtgcctaggagaaggagcaccccccttggtttgtgatagactggcagcgtttcctctggtatgtgccagagcggcagagccagttttaaaaagaggatttataggaaatccagctgtgagttttcgtttttttctcttagagctggaggcggggccaaaaccaacctcaaaccaggcacaccattgatcaggctagaatgatgtggaccagtctcacagacaacagccaagcacagaggaaatattagctggcagagataacgaagagaaaacactcggtgacagatgcaccatctgtcagtttctgaggagcagttttcaagaaagctgaaaatgaattgaagaagagaggggttttgtttgaaaggtacagcacagcctaaggacaattttaaa

SEQ ID NO: 11163 - DNA, 2300 bp, Homo sapien
tctctctccaccctccttccattctcttccagtaaaaaagtgataaccaccaagtgtctgccttgaacaaaaagttatgacacagatgctcccagtgttggaccatcaagccgaaagcacgtgcacaaagcagctgatgcaagcaccttaattggacggccaccggtgcggactgagctgggctcatgaaccttccaggcagccaactttgcaatatggtgctcgacctttctccattcgagcttctgccgagcagttccttaggtctcagatccctttcaccttccacagacgatgctatggaacagaaaaactgctgctcaaatcctaaataagaatggaaagtgcacagtatggccccatagatctttctttcccttcctgccatgaagccaacctgaaaacaaagacatgatgactcttgtgtaaccacccgaagaggctgacaattaccaactacgtgaggtagtaggcaattgtcacatgctgggctgcagagatcgtgcttaacttgtttattctcatagcgggacagttatacaagacgagctgcttctcagaatcaggctagcaacaattccctcagggaaagttgttaaggcttatgggcctcggagagccagagtaagaagaatcaaagtcctaatttaaatcctgttaaacttttaatttggaaataatgtagaaataatttctcattattagactataaattcccagccaggctatgtttccgtcagccaaatgtagaagcaacttggtcatatactttttgtatcaaagaactttattctttcagccccaggctcagaatttgataacatgttttctgtggactttttctcttcacatcaaacaatgttaaagaagaaaaacagggaaaattataatgacatatacatatatgtcactcagtgtgtgtatgtatatatatacacacatatatacacatatatatacacacatatatatatacacgtatatatatacacacacactcagatatggccaaactgaattactagcagtttgcttaaaccatatactctggttctggatctgcacacatgggtacctacagtctcttgcaaagccctccccagcctctgcctatcagaattccccccattttaaaaagcctatccaaatgtctctttctctatctggcttgcaatcatcaccccagtcaaaaataatattgctcacctagcattgtgtttgcgtcctttttgagacatatatatggcctcatgttagaagcttttgtataacttctcaatgggtccttagcaggttgatgacagtatctttgaagtacctttgcaacttctgcagtgattcttgtcttaaatgattcagtgtcttaaatgtgataggcaccttctaagtattttacctctaggtgattaaaaattggggaagtagagaaatcaaagaggaaaggatgcttaatacgtaacgcgtgtgtactttgcctctctgagtcttatctgtaagagccctccaattcccatcacgtgagggtcaggatctgtggtgtattcactcctggtgttaaagcccttgaagtttatttttcactggaaaagtttttatttgagttgtttcttgataatgaaggtggtggcttacgctcagctgttgatgcttgtttgaagtagtttttttttgttgtgttgtgttttttaaatttaagagatttatcaggtccatcttttacctggctgctgctgccctgtagaaagcgaaggagctttctctaactttgacaggctgaaaagtttcctgagccctggacttgtttgtcttctacttgttttgcccttccctctctctttttctttcgactcctttagtgagggctgcttttgggtgcttcgtcagctctgaggcacgtcaaatacgtgtattttgctttcagcgttgtgtgagggaccctggcggctggaactgcctctggtcggggcttagggctgactgcaaacgttcccattttcctctcttcctctcattggttcccgaggtcacgtgagggccccgggggttggaattctgagttgtggctttggcactcctctttctttttaaaaatcgctgggtctgttgagctgtcctgggctgggtgccttgctctttgactgagactggagacagacggcaacagccacaggcagactgaggtggcaataggaaatctgccgagatgttcagtcaggtgcccaggaccccagcctcaggctgctactacctaaattccatgacacctgagggccaggagatgtacttgcgatttgatcaga

SEQ ID NO: 11164 - DNA, 2300 bp, Homo sapien
ggggctggcagagagctgggccatgctgggtggcacacactgctcagccggcacctgttccaggcagatcatttccgtctttcatctggcttctcttggacagtcctcaattcatgggccatccaacagccagaactaaacaaatgtgcaattccagaatttagtcttcaaattagtcatttaaggaaaactcctaatcaatggcatctgaatataaaatatgtgctagaatagaaagtagtaggggcccacgctcttgagagctaaatgatcactgaaatagcttgaatggttatgttctgttcccgtgtatataatgttaaaactattgcgtctgtttgattcaacaagaggtcccttctaaaagtcaagtatacagctttcctgggaatgtaattgataaacattttgttgttacactgtatagcagccactttaagacaacaggagtcttgttctttgcagagcattttgttacctctgcatgcatacaaagcagaggatggaatcaaaagggtatttggcttgtgtccagaaagcaatctggattagtctatataaccggctgtcacagtttcaagtccgtttctgatccgtgacttattgcttcataactgactatttcaaagatttaccaggattctacaaaaaaagtatctcattactttctagctcattctgaggtatgtttcactagttaacatttttaaatatttaaagtaacaaaataagacaataaagactatttcttaccatcatccctgtcattcccattttctaccaacaagataaactgatggagggaatatttactagaagtgtagcagaagtgtagagggaatactttaggtagaggttagtttgcattccctaagtcagtagcaatttatataatagaggaaggactgaatacttttaattttcaaacttcctgtggagcacctggaattaaaatgaatatctgattaaattttggttcttatgtggcagcttggtacaaagacatttaaaaagaaatgagattcaagcaattttgcagattcaataattcagaaattccttttgaaaaatttgttcccctccccaaacctgaggtgtaaggcattaatcacatctctgaattagttaaatgttgtcacagttactttcttggaagacctcaaagcacttcagaaacaaaactttgtgaactgcaggacaccccgaggcctgagacagtattgtcttctccttatgaatgagttgaagtccaggaagtgggcttggacttcagtgatgatgtatttcttaaagagccaatacatttccttctttccttcaggaatcagagttaatttctaactacaagcctactttacgtttttggctaaaataccttaaaattcttctattttcatatttcacttcttcataatacgtacttctttcactgcatacagattgtaatgctttctcaaagtatgtaaatctattttaggtaggttccttatggtttgacctgaatattttaaagttatttttctcctcataatggctatgcaatggaaataatattttgacacttcaaaccgtattaatttaattgtagtttgcagccagataattatttcattgaagaaatcaggaaggattaacataatgttcagatcaccaatattgaacatcaaaagaatgtcaacctaaccgagtagctgacttcaagtaacttgaatttagggaaactgggatgagttatgctctcactgtggcatatataaatttttgttgttgttgttgtagttgtgaaggtggtagtttctgaaactgaaaaataaaggaaagtatcaagaaataggaggagtatggtccagcccctgatttctgggtaaaactggaaaagaagctggaagctccttgagtggggggccgtggggaccaggctgtcaggttgggcgagggagggaaggggaagcgcgctcctggaaggagtggggcgcgaggcagccagggggagggcaggggagggaggggagtggaggagcgcccaacggaggggaggaggggaggagaaggaaagtgggaaaggagtagaggagttggcgagcgcagaggttaataacctagcgcggcgtttctggtggccaggcatcccggtcctcgcgcgtggcgcagcctcccagcgccggaccgacccatgtcgcgcccgcattgggtcccgggaccccggcgggagtgccgcgtccgtcctttccagtcgccgggagtctgagtcgcgggccacgcgggagtggcggtggagagcccgccggtcgttatgagga

SEQ ID NO: 11165 - DNA, 2300 bp, Homo sapien
gacagtttctttttttgagagtcttgctctgccacccaggctggagtgcagtggcacagtctcagctcactgcaacctctgcctctccggctcaagcgattctcatgcctcagtctcctgagtagctgggattacaggcgtacaccaccatacccacctaatttttttttatttttagtagagatggggtttcaccatgttggccaggctgctctcaaactcctggcctcaagtgatctgcctacctcaacctcccaaagtgctgggactacaagcttgagacagtttcttttagagactaatctcctaggattattttccaccaggatgaaactcaaaataatgtagtccaaaagtcaaaaaatgatgggcagcaggacaaatttgacaggcagatagatttcatttggcattcacaatgttttcaaatattttgagtaagttacccacgtatgaaatctaggagatttcacataaaaatctgaaagtctagcttcttctaaaacagcagacaatgggacataatgcagcccccattccaactgcgaatcagctatcaccgagtgacagccatgcttggatacatgagcacacggtctccatctccccttagcgcccacccagggaagtgcactctgcactccgagcccttgcaggtaatcaattttccatccctaaactagttcaattccctcactcgacagaaaaagcaactgagacccagggctgggagcagtggctcacgcctataatcctagcactttgggaggtcacggagggctgattgcctgagctcaggagttcaagaccagcctgggcaacacggtgaaaccccgtctctactaaaacacaaaaaaattagccgggcatggcggcctgcgcctgtaatcccagctactcgggaggccgaggcaggagaattccttgaacccaggtggcagaggttgcagtgagtctcgattgcgccactgcactccagcctgggcgacagactcggtctcaaaaaaaaaaaaaaaaaaaaaaagaaaagaaaaggaaagaaactgactgagacccagaaataccctaagagttccctgggctgagagtttattatttgtacaaccaaaaccagatctcgaacaaacacgggtctctgcagcactttctacttccaggtgctatctttctctcttcttcacatctatgaccaactgctcaccatggtgaactgcttcaggctcctgtcccagcaaggaggatagaatgaacagcatcaagctctatgcaaacagtaatcaggacttaagtcttaacattttgattttaagaagtttaattattttgacttggctatatattttttctacccaatatcccttttctgtgtcacattgtaatcggtagataaatacacaggtgagaaagcaacaggcagatgttttcctggtcattgtatgtctgtgtcctgtaagaaggtgtggacttcctcctcacaatgacttctagttaccttgatggggagagtccacttgaaatattatgtcaatatcacagattgattttataacccagatgcagtagattttcattttacccttggtcctggtggaacatggttagcaaacattattttacattgtacactgataatcatgaacttcattccaataaaacttcctgtcagctcttacagaataggcacttttctaggtggtgagatgaagctttataaattactccctctcactagcctgaaacagtagtagaattccaaaagatagccttctctcttatcttaacatgttggtgccgtcttacttgtacctcaggaagctaattaacaggaaaaaaaaattgtctcttttatttttaatgaataagaggcacatctcagcaaaagtgtgaaaactttcaattggctcgaacattttataacctttttcttcccctaagaggtgcccaggacctcacaatgaggtgcattgtgagcctcatgccaaggttaatttggcacctctgtcacaaagagcatgtgcagactctgacaggctttcagggaagccacgtcccccatgtgctcttctggtttcctcattggtgttcaggaagaggaggctgggctcttctcggggagtggagtgctatgacagatgagactttcatgcaagaaaataaatcctgcacatttgatgtactgctttaaacttaaagacctctttggacccgaaattgtaaggtaaggagtgctcagccacaattcttgaactttgaaactgtgagtgtaatttgaggacgctccttaaaactctttgttgttt

SEQ ID NO: 11166 - DNA, 2300 bp, Homo sapien
actgtaatcccagcactttgggaggccgaggcagctggcttgcctgagctcaggagttcgagaccagcctggtcaacatggtaaaaccctgtctctactaaaaatacaaaaaattagctgggcgtggtggtgcacaactgtaaccctagctacatgggaggctgaggtgggaggatcgcttgaacccaggaggtggaggttgcagtgagccgagatcgcatcactgcactccagcctgggagacagactgggactccatctcaagaaaaaaaaaaagagctaagatacctgagggccagagtcattaaacattaaagtgattgcagctgtagtttaccaaccccgaggactttacttcctctgtagcaatttctcatatcctatatattcaagagtctggagtaaaattgctagataaatacagggccctggttacatttgaatttcagataaaggctgattttttttctcatataagtatgtccctggcaatatttattacaatttcaaatattgccagggacatacttatatgagaaaaaaaatcatttgtaataaattttgccatagacatatgaaaaagcttctgaaattcaaatttaactggacttcctgggtcaccacactatttctccttcctcagaacccccaacaatattgaagcacatgtcttcatgtgcttcaatggtagagacatgtcttcacggtagagaccatcaaccactgctccttattgaagttgtctgtcatgcctgtggtcactcttgccaaattattgatcattctagcacttggttcttctctttattcctctcagtacttatttccattatcattcattatgattatgatatacacatagaccacaattcagtatccctgcttctgatttcctttaccttctcatttcaaacacttcctccatttcaattccaaaggagagaagcataaagaagatgaagcttttttgcaatattaaatagggtggtcagggaagcctcagtgaggagataatacttgagccaacatcctgaaggaaatgagggacccaactctgctgactggagaaacatagtccaggaagaggaaacagtaattgcaaaggccctgaggcagaagccttccaggcttattatagaaagtttctcgagaacagggattaaatcttatacttggtggtgtggataataccttacctgcaggagtaattcatgtaatatgacgattcatagaagaacatgataaattattgattaataaatgagtaagaggcaccttggtgaaaggttattaagtatatttggaaatcatttcctgcctgtaagaccttgcaatcaaatggcaggacttagggttcttaataatacataaaataaaagcataaattaaataaggaattaatattatgtacaatgagtaaagtgcattttgagaggcactatttgaagagaacttcaaaagttgcatatcaacttcatatgcagaatatttttctgaggggttcagatgcttctacacattttaattggagggctttcaaatattctagacttagaatgcatattaacctcgtgtcttctcccctacagaccacatttgggtagtttttccatgctcttgattcttttgtttctaatccaataagaatattgaggaatagaggtaacaaaggatagtgaagatcagacattttcaagcgattcatccaatgaagctttactgggtacctgccaagtgagtgaaaccctgagatgtatatattctagtgccgaggacagagttccacacctagcagatatttagtaaatttttgttgaatgaattaagtgaatgaaagaatgaataaatgaaaggaacggtcttctctgaggtatctggatgtgacgccaaaagggtcagaaccacattttcaattccgcttgataatttctagaatataatagacggtgcgaacaaagagaaaataaataaagcagtgaacttcagaactagagggcatcgacgcggcagctgattttgtctgcacacggcccccgtagcctttccgtccaaaatcatttacgcggccgcgaccggtagtgacgtcacgagatttggagctcgcgggaaaacttgtctctgcgttgtggggaggacgcgcgctcgcgcgggattttcaagcgtaggcccccgggaactcgagctgccatgagcctctgggtggacaagtatcggccctgctccttgggacggctggactatcacaaggagcaggcggcccagctgcggaacctggtgagtctgcgggggccgggagcgtg

SEQ ID NO: 11167 - DNA, 2300 bp, Homo sapien
cctcaggtgttccacccgcctcggcctcccaaagtgctgggattacaggtgtgagccactgtgcccggccagatgttattcacttttattattaaatgacccatgaaccttttaaaataaagtttttatatgtccttcataataaggattgaataaggggaagatgggggagaaaatgggaaggaaatggcaaagacagacatcaatccttctggattcccgggatgccctgcagtctgtcctccaagttggtgacagacatgcctccttgatgtaaatagatgggtggtggaatgggaaggcgggtttatattctaaaccagcttatcacgatgagactgttgatcaaaccaccccccagcacatcagccttgatgactcccaacctcccccagagatggctcctcccttgggtaggggggaccttccttaggaggttgatcttggaggcaaatcgccctcctcgtctgcttgcaacagtgccaaggagccgaagccccctgcccaactccactcccatggcctgaccacgtcagaaactgtgagtgtctcctttacccccttgaggtagtttcttgggtccgattatgaacaaagaacacgcttaggattgtgccttctctcaggacattcctgaatttgccaaggtgatttttctcttttctccacaatatgcagctatctaagatacatctcaaaggaatatataccaaagaatatttttttaaattacactgttatttaatctggtggccctttctccttgccaagttagagcaaggaaagtataagacatccaaaagtttgtttcctgcatgggtgttattttgcctaaaaaaaataacggaagctcttagaagaaaatcttggaagcagggatacctttagataaaagaaggatacattggaaagagataactatttagatggaattgacctggccttccaggtcttgccatgaaacagaggtaggatcgacagcctggggactgagaagataaacattttgtatgagtctgtggcattattgatttctcaatgatcgtttttccaaagtgatcagagtaaaagtttgaaaacagaaagggttcctgtgctcatctttgacactgcaaagagagaggaagctgtagactttagcccttcacataacttctctggggtgtgtatgtgtgtgcgtgtgtgtgtgtgtgtgtgtttagcggtgcccagtgtcagttaaaaagtgaaaagaaagcagactgagttttgcagtcatgaggaggggaaaaaaagtgaatctaagtagcctcagggcttaactccagaaagacatgaggggttccaggctgggcactaatagacagctggctcaaatgcagaccacagtcccagaaggcaagaatatgtctgtgtgcctttagaaaacctgtggccctaaccatttttcatagtttgccttataagctgtgactagtaggaaatgtaatcaccttttccctataattttccatgcatgctttttatgagagcaaaagccatggttcactctgcctttcccctattaggacacccttgggtggtgtgaggttctgatgtcccttgagcaggcaatcaaaaattgttgggagcagcagggggcaactctctctctgtgtgtgtgcaggatatgtggaagatggagttgaaaagaaaatgaaacagaaagaaggaacaacagtctagaaatttaaacttggatgtgtgcaaaagccatttaagaggaggatattcggcccagagcagggaccacagggctggcacatgtcctgcccactcacctatttcattctgacagctgtcatctgtattcagcctgacacgatcgagggcattacatgctttattttattaaccaggccattgttcccttctcttcctaaggacattgaccatagttacatctggtgctctatctattctgatttagactctgccttcatgaatagaagaattgggtcctgttgaaattgtataagtcctacaaccaaaattgtagtacaatcgtatgtatgtgtatgtgtataaaaggtaaaaatgtaggtcattgaaaattaaaacaggaggaggagccaagatggccgaataggaacagctccggtctacagctcccagcgtgagcgacgcagaagacgggtgattactgcatttccatctgaggtaccgggttcatctcactagggagtgccagacagtgggcgcaggccagtgtgtgtgcgcaccgtgcgcgagccaaagcagggcgaggcattgcctcacctgggaagcgcaaggggtcaggg

SEQ ID NO: 11168 - DNA, 2300 bp, Homo sapien
acagtatcatagcgcctgcgaggagctgattgtctactggagaaagatttttaattggtaagctcttttaaatatctctgaaattgaattaagtaggcaaaagaagtggagttttcctacttagaaatggtgatattatctttacccactcactatcttcactaagaaaaatgagcagaaaaatacaaccaactgcatatacatactacttaagaaaaaatacaagaaaaatcaaaatggaaatgttaaaaatgatgttaagctattcattcagaaaggaaatagaaagttcaggttgtcactgtctctcaaagtactcatgcaagaagtctaaaaatagcaaaaggtagaacctgctgccatatagatatatgcacagtgggtaaaaaaacttagtgtgacaacctttcagtctagatttatgtattttacaaagatatcattttaaatttgcaaatgaaacagtactcttaaaagcagatgatactcacttgggacagacaaaaatgtagtagaaggatataaacgttacaggatttttcaattatatagtatatctcaagtcatactattatgacttgtatgttttgtaaatttcccgtacagtttcaagcattctagcattttataattcaattgccatttaatttaaatggacatgctagttaccactgctttcagaagtgtttgcttaactactttaacaattcaatcactttggtgcaagtttaaacaaacagacatgcaaccaagaattcatcctaagtactggttttgaggaacttttttataacctgtggtacttagaattttaccgtgttcccatatcctgggagttaacttgactggcaggtccaattaaatatgaataataacaaaactgattatggtggatttgtatattgacctttttcatttgagaggacaattaaaacgatctgaatatacctcaagatacctaatatttctggtgacttgcaataatctttattgaaaagggaagacctcatgaaatattaaagaaaattatatcattcctttcaaggaacagtcatgcctatttagttttaattcaatactaacagcaagattactgtgtacattttaatttttaaaaattaaaggtttattttttgtctcgtatctgtgcagacatagatatgtacttttctcacagacaaggctggcagtgagaatcacccatgtttttagataatttcgaaagtcctctgaattgtacgtgcctgtgaaaaaaggaaacattaataattggcatcatacctgaggattgtcaggattttgaaagtgtgggatttgtcgttcccaccaaactaccccacagtgtcacacactgcagtctttttaggctgggaggcgagttcaagagctgtttgttgttccgagcttgatccagagaggatcactgtttgacaagttctattttaagtcgtgcctgagtgtgcaggtgtcagcctctttcatggctgtagaaaaagcaccattacactccgtctgtattcttcccccgacaatgcaggatcgcccccccgcccccccgcgcgtttgtttctgctttgccagccactttttctttgggaaattctagggagggcaggcggacaggactgcgaggaagggcgaggaggggcagaaagaggtcgtctgccactcccctaccttacaaggcacgtggcactggcagtagcagcagctggatgcaacaactgagatgaggaacctcctcccagcaagaggatattgagagaaggaggaggtggcagcgaaggcaagacatgcacactgtgtccttccccaaagggagaatccgccctcaagggaaaaaccacaaggaagccactacccgccccgcctctgccagcttgccccagtgtctggcagcagtccccatgcacctgctcacctgtctatccgttcggggtggttgggggagggacgaggggtgtcggggtgggtgggtgggaagagaaggagggcagggcaaaagagggggtgcaccgagggctccgcccccccggaggctgtgcgcaggcgcagtggctgctaccgcaggcagggggcggcaacatggcggagtgagcggcggcgtcggggcttcacaacaacagtggtggccgtagcagcggcggcagcagcgtcaatagcatcggccacagcctgagcttcagcaccggccagcgtcgtggccagctgctcgcgtcctcgggcttctcggagcggctgcagcatctccgcggggggcgggccgggccggacagaccgggagagggagagagcagagg

SEQ ID NO: 11169 - DNA, 2300 bp, Homo sapien
cttctgtaaaattttcattgaaaattatgtactaaggtttggtttgaattttgtaggctattgcttatgtagtaagcaccattggtaattttgtcagacacataattctattatattaatactaaatcatttttaaccttataataatttgaaccaattaagtggcccccttcttagtaaaacctgttaaccatccttctgcaaatgttttatctgccccatagtttcttccatgaacttagtaacctctaacattttacatattttacctttttattttattaactatgtgttcctgccttatcatctcttagaatatgttctgtgaggaagagtttttttcttcaattttgctagctgcttttttgacagtgccagggagcatatttgactaatagtgagtaatcaacatgtatattttctaaatgactaaaagtcttgagttctacctttaaggtaaaggaaatgtatgcaagggtgttacaaactgggggagcaacatggtaaagcagggaagcaaacgtgtcctgtgggtgaaattggcccacagtaatattctgtaggactcagcaaagaggttagttttggtcctcaccaatctttattgtctcctactctagtttacacattgttgttagttatttgcaatcattttagttcgtgaccgtttatgtagaagtgtgaaaattcatgaagtgcttaagtcaaatatattgagttatccttattatgagcatgaaaaatgtagctaaatcatatgggaggtaaaattggtaagacaatttcatcccttttaaacttagattgttttaaactgatattcagacttcagttagtgaagaatagcgaggaaagatgtgttgtgtgatgtgtgcttcaggattgagtgataggtgattctttaccctatgactgaaaggatagtgatactacaaaatagtatcactagatgaggaagaaaagatttatgtaggaagataaattttttgatatttgagtttgaattatcagcttttatgaagagcatttttttaatattatagcatttttatctgaaattgtattctagtatagcattgtccaattaaattacaattcaagcctcaggtgcaatttaatattttctagtaaaaaaatacaggtggtattaattttaataacgtatttagcctagtattttattttgataatatgcaatatattatttcaacatctattcaataagaaaatatgatttttaaaaatattctgagctggaaaaacccagttttttcatacttatgacacatctcactttcaattgcaatattccagcagctcaatggccacatagggcttctggctactgtatgagatggtgcagctttaaggtttggtttcaattttggagagtctgttgtttaaataccattggtaataggtacatggtgatagtagttgaaaattcttgaagcgagtgttcagcatagacatagtgttatatgaagctgtgaaagcatactatatcatccaaggatagagtatttatggagaagagaaggccaaggaaataatattttaagcagtattttacatatttttaagcagtatttttacatattttaaacactatcactttttatttctatgtctaagatctcttcttgtatgtcaatttctacaaaaaatgaaatgaagccattatttataacatttcatttctttagctaatagtagaattatttaacttgaattatttatctgtaattgtcttagatcaggcttcaaataacaagctatcactcaaagaaatagctgaaattttagatctcttaaagttatattttaatagcaaagaaaacaaatgtttatttcatatttattagggatagcatatgaaaaattcatgtgtccttatgctaaatcagaaattatacaatttgatattctggatgtttcaagctagaatttctgttttctttcttagtcatcaagagttcatataactagagctgtcctggagcaatttttatcttttgcaaaataccttgatggtttatctcatggagcacctttgctgaagcagctttgtgatcacattttatttaacccagccatctggatacatacacctgcaaaggtatgaattttatacttattcagtttgatttagtgtaatgttatacattatagttgctggatctatagtattcagtggaaaacatttgaacattttagcttattttatagttaatctgtggcaattgtgttaggcagtatcaggagatcaaaatatttataagcagtaaaataaatgaaac

SEQ ID NO: 11170 - DNA, 2300 bp, Homo sapien
ttaatagtaaatgtgaaacaaattaattaagagagcacatcatttacataggcatgaatacaattaggaagtcgatggatataagtagcaagggcaacttaaatgatctagcacaacattcttagaaatgttggcttccatgcttctcctcattttccttttaggattcaaggtggctgcttcagctcccaacctcaattcataagaaacctgcccaaattaaaaggcagagatgactcttcttccttcctcttcttcctgtttttcctctgcctcctcttcttctctctcctctttcactttctctttttcttctcctcttttcttcttttttttaaaggaagcccgtcaagaaatttcccccttatatctcgtgagccagcaggatcacatcctctttcaaaatcaatcatcagaaaaagaaaatgggattataatgactggcttttagagactaatactggttaattaactagtaactagggttaggctagtctttcctatacccagtcaagctcaataataaaacaaaatataaaatgtgtgttagcagggaaaaagttatgactgttgtggaagaagtcaataaagtctgccatagaaagattttacttttgattttatttgatcaatttgttcttagactactcatatactttcattgctaattgttatatgataaattacctagagatggtaactgaggaaacctaaataccatgaaatacattgctattaacatgaagaccaatgtatggagataaattatgtaatttgataattataatatcagtagcctccaagtgagtgatactcagctttttttccaaccacctactctgtgtttttgttttctttaatgggctctcatgaaattacccaggtagaatttaatgtaatttaaattttttaaaggtaacactttatttttaggacagagagaaacatcttgaaatttaagatacacagtgatagataataattcacaactctaaaagggtgagaattattgactcaattttgaccatgaagtaatttcttttttttaatcttatttttttcccattaaaaaacagttcaggctaggtgtggtggctcacacctataatcccagcactttgggaggccaaggcgggaggatagctggagctcaggagttcgagaccagggcaagaccctgtttttacaaacattaactaggcgtggtggtgtccacctgtagtcccagctactcgggaatctcctgggcccagggaggttgaggatgcactaagccatgatcccaccactacactctagcctgggtgacagcagagatcctttctcaaaaaaaaaaaaaaaattatattcttgactgacaccaaacgaaagcagggtatttttttgacatctacattgtatgttttgtatgagaacactgtactaccaacttactttgagattttttccttttcttattaaataagttcttgaatttgtactgatttatttatactcccctatcatgtcacttctttagcagtatacatttcaatgtgactagtcaaaggtggggctgaagtcattggggatgtgacaaattgaaactgcctacaaaatagaactttcagttaaatttttaggttttcggtttcaaattttatttatggttatgaaaattttgaattggttatattttgagtttccatattatttttaacattagacatactttttatatttaaaaggttttgcctttcaacaaaaaacaatcagatttggcaaaataaatatttttagccaaatttgttgagtcagtcatatgtcttagaatctagtactgtatttttcaagcaaagtaataatataatgagttaatatacttggatacaacaaaatcctgtggagatgaatgcttagtttttggtaatatgatatctcaattataaattgctttattttataatttaattttaaatatagctagctcctacagttctataatttttcacttgttattctaattgtctaagcttttcatttaagtaagccaaaacatactcatttctgttttctgtattttagccattctacaaagtctgtaatggattttgtcaatagcaatgaaaatattatttttgtacataacacaattcacctcatttcccaaatggtagacaacatcatcattgcttgtggaggaattttacctttgctctctgctgctacatcaccaactgtaagtactttgcctccatctagtggttatattttataaatacatgactttagcatttcagtggtggtctaggctataaaca

SEQ ID NO: 11171 - DNA, 2300 bp, Homo sapien
gtgccaccacgcccagctaatttttctatttttagtggagacggggtttcaccacattggccaggatggtctagatctcttgacctcatgatcactcaccttggcctcccaaagtgctgggattacaggcatgagccaccacgcccggccacttcagagtatttatagcactatgagtactttgtaaaaagaggacaactctagaatcagacagttctgagtttgtgttctggctttaccacttaactggttttgcgacctgagagaaatctcttaaatttctgtgcctccgttttctaatctttaaaatggatacaaatcttaatttacagagtgtttgtattaattagacaaaaagtgataatagactgacatgctttgatttctggcatgcagtgaacattcagttattactgatttgttcccctgtctagcagtttgacacttaatatattgtcgtgaaacgaataaatagtattttgaaggtgacacctttgagatgtaagcacttcaaaatagtaatgtatttagtaatttgtagatatactaaataaagtagataatagaaagtccttaaagatttttataactagtatttcactgattgtagaatatggacagaaaagcccagtgggaaggaaattggtagtaacttacttgagctaatcagtatttatctggcaagaactttggcagtgaaaaatgggtaagtagcgatgaatgtaaaaatactaggggaagatttgacatttcacaacaatgaatggatctgagtggtgtttctttttttttccttcctgtgttatgtgtttcttatgtgacattttaggaagtaaatcgagtaatttttgaatgcagtgggaaagtttcttgcaagtttcttgcatgaatcccataccttcatgtgacctcatttttatactgtgtgaaaaggaacaattacacaagcttctcctatcatgttgtctttataaggatcaaattagattaggggtagagaaatatagaaaagaaaatatttctaatcttaaaatctatgttataaattcatttatgctgtaaattatgtattattttctttaaccatcctgtagtaaatattattagtctgttattcagatgatgtagctgaagttcagagaggttaacttctcaccgatggtcatatagccagaagttttggaattgtaatggaaaccaaatactatcaacctttaaatactatgctctttttactatggcgtgctgccaaggaatcaaacattttaattttgggctagaatatcatgattgacattcattgagaaatagaaggtaccctgtttatttttcattgttagagtaacaacaagtgcatacctattatgggctggaattgtattttgcattatacatattatctaatttaatccatacaatttttaacacactgtataagtgagaaagtacttgattgagtttcagggaccctagttcacttagtagtctactatgtgactacattacctgaaatatgtagatgtttttcctccaactataaaatgttttgttggtaacaatctttaatgtctttcagctttaatgggctgtgactgattctttttaatcttaccgtttctaaccttggatagaccatgaaatggttacacatacaaaatctcatatactagtgtagtataataatctcatatattataaaagcatgatggataaatgaacccagaggctcaaagagatttgttaactagaggtagagaaatgaggctcaggaaatcttctgaagtccaagacgaatctttattctgctataactttacctgcctttatgagtctatagtggtagctgtgccaataaagaacaagaatgctagtatggaaaccatgacatgagtagagagcagaaaatatgcattgtaatagaggattatgatcaataaatgttaactcagagaggtggagatacatgatgtgaccagtttagcctgaattaagaagtgatacttctatatattatctgtaatatattatctattcacaattctttttattttcaaagactccattggaaaatgttccaggtaacctttctcctattaaggatccggatagacttcttcaggatgttgatatcaatcgccttcgtgctgttgtctttcgggatgtggtaagttatacctgattggtttccctgaaataaaccttctactgtcattcgtatgaaatacgttttataagaaagctgcttatgaaaacgacattccctagtatctgggattgttggtttattgcatacttctcat

SEQ ID NO: 11172 - DNA, 2300 bp, Homo sapien
ctattctttcagtctatcatctttgaccaaactaacaaataaacaaacaaaatttaaatctattcaacaaatatgaggaaaactatgatataacattgcattgtgataaatgcatattttaagtcagtttaaattagtatttgatattaggaatattgaataatatgaggatgttatttattcctaatttaatgtatagatttgatataatttgactcaaaagaaaagggggagaaaaaaatgggagattttatttcaaaacctggcaacatttttctgatgcttatcctagaaaaagtattataaattcacaccctcaggaaatctgaatggtatgccattagtttaaattcaagcaattaaaaaaactgtctaatagacaacacccaagaattgagtctgttactgacaaaatcccttcatattgtttttaattttttagtatgtgtgtacaaaactttcagaagctgtgatcacacccaacaattctatcatcagaacaacacttctactagagatttcacaaaagattttgtgagatgtcttgctgacatcaaggtagcctattttcctgttgggcagtttcctggtttcttgtcctaacaacctttgaattcaaagaaacaagcaaataataacaaaatctaagagaagttatatagaatttactgattttcaatttttaggagatctttgaaataatttagtctgtgcttctcattttcaaagattatgaaactttcaaacttaaatgcaagtttaagcaatacaaatagctaacatttactgagcttctactttaaagtgagaactgcagtgaatttacatatagtagcttaatggtatcttactttattcaaaacgattaagttaaggactgttatctccattatacttagatgagatacacttttcaaggttatcgtttagaatttggtaacattttattatatggagaactttattacattaacctttgtatgatgaaatttgatagaaatttaacattttaaagatttttttatttcattacttttagttgttaatattatatgtgtatttcattatctgtgtagttatatgcacatatatgtttctgatttaattttcacaaattgaaatttatatttatttacaaagaatgagcatgagtattccaaaatataggccttgtccttgaggaacattattatattattaatgtatttattcttttgaactaatcatttgacttgctttgcattttgcaagtgtgtcagaattttacgtattgtaattttaaaatgatcttcgattatcttgaatatttcagatattattagttattgaagtaccaaagaaagtataaaaatgactttatatttttaaggaaactaatagagaaatataagaatttctcttctatgattggcagctaacaatcaaaggataagaggggaacatcatataattattatttataagctgctttaggaaattgttataggaactatttcctgatgcttttgaaggcatcagttttgaaatgccagatgatttaagaagcaagaggattattttgatgctccctgaacaaaatagtaggtgtattggatgatatctttttgtttttttttttgtttttttgagatggagttttgctcttgttgcccaggcaggagtgcagtggcatgatttcagttcactgcaacatccaccttccaggttcaagcaattctcctgcctcagcctcccgagtagctgggattagacgtatcccaccgtgcctagcttatttttgtgtttttagtagagacggggtttcgccatgttggccaggctggtctcgaactcctgacctcaggtgatccatctgcctcagcctcccaaagtgctggggttacaggcatgagccatcatgtctggctggatgatatctttcaactgagttgtgttactactatgcacatccgtttagcaattttttgtttctacaggttttgttttctttatttgaatatatgaaaacatttgattaataatacaagatttttactttcaaagcttttttctaacctagtttctttcattacagaaacacctgctgcatttccagacaccataaaagaaaaagaaacaccaactcctggtgaagatattcaggtagaaagttcaattccccatacagattcaggaattggagaggagcaagtggctagcatcctgaatggggcagaattagaaacaagtacaggccctgatgccatgagtgaactcttatccactttgtcatccgaagtgaagaaatcacaagagagctt

SEQ ID NO: 11173 - DNA, 2300 bp, Homo sapien
ggcctgaacccaagggagagagcgcagggcgcaggggcccgcggctggggcttggctgcgaccacacctgggccggacgtgggcggtgcaggctgaggggtgcgtgggcagaccgtggtctggagcagacgtggagagtaagccgggacaccaagtaaggttttcaaataagctcacgcagaaataaagcgtagcgatcttgagcccagagaggaaagtaagagggcacgggaatgcggagcagcgagagagaggcggcgagcggacggcacagggccacacgcgccgggtgagggcagaaggcggcgtttccccagagaccactgcacatcctcgccgtcgtggctgcaggttctccggctctgatgggtctcccctccaactgccaaaaggtagtggtgcattcacccgcgatgacggcaaagtggggaggggttttttgggtgttcccagaccctgctcttaaggggatggaaggttcttgggaaatagagtagctgggtgccacgcaccccaatgtatactattttcagctaaattggaatctatcactgttggataaggagaaattaaataataggtggttttgtgatgctgtgcctgtgcaaaacaaaacacacaaacaaaaatcaaaagcttaagtagcaagtgggagccctgaagaatatcttgttaaaagtgactctgaaagtgtctacaaacatgttaccgggagttataggatttgacgggaaatattcttaattggaaagacgtggcatctaaattaaaggtagacaattaaaaaaatccacctagttttaaaaaccacaacgtaaccactaagtagtatttctttagtttcctgtactttgaggacacaactggaccaccaactagaaaaaaaaattcctcctcctgtttccaggttccaaaattcagaaatgaaatgatttatttcatttttgttttcaaaatgatgtttaaatccaaaaaaccccccagataactgcaagttaattttctttgcaaatgttaaccattttcccttaattaaatcacacgaaatagtataaaattagaagtctactgccaggtcaccacttaaggacacttaagacaggagatatatccttaattatacatctgtaaacaagccagataccccaaaccttcaatttttcgggatagttatctgtgaggaagcttgatctctatgatctcacctgaattttatgtactaaaatacaggtcactatgaaataacgctaaagtactctgtccatcccacagacaatttatttttcaaatgtttctataagtgcatatatagcgttgtgtcctgcttgtaatgctgggcaagtccaccaaagtgcaaagactgcatctgctggggcagagggatgtacgaaatattttttaaatatcctaacttaaacaggggtagaacatctcacacactcagcaataattttcagattcaacaaatggagaaaagaaaaaaacataagtaaaaaaagagcatactacctccataacgtttcaaaaaatcattttaacatataggaacatccagaatgagaaaattacacaggtactcctccatctaaagccaacttccatatgccagtagtctgcatgaaagaacaaactttcaacctgcatttaagaagaccccaaggattaacagacgttaattatcttactctaaatgcaagttagtgattttgttttagaaaaccccgtcaagatcactaattgatggatgcccattaatacacctgtatttgcatttcagcggtaaaagacaagcaggttttcggcacagaagagagccgctttgccaagtcttttcaaaacgtcaatatgcttcaagtaataccaaagctgagagattcctcttgatttccaaactgtctaggtggcctgagtggttttccgccggcagcagcctcctacctttagtttgtgtgcctatatccatgagtggggattaattagccgggttggagctgaaggaggctgtcgtgacgagcccagtggcgattggccgcccgcctgcctggccctgcctttataatttccacacgagtgcatctgggctcttagacaaaccaacagcagcttcttctgacatatacacacgcacactcaccccggacacacactcagcacacttttcctccatttgattaacagtgctgcacacacaatgattacgggaaagcgcaaataaatacggaaaggggtgcttattttgactactggaagagctttgctgggtctcagcgcaacttttgttttttattcctgagaaggtg

SEQ ID NO: 11174 - DNA, 2300 bp, Homo sapien
ccaaatctatctccctagtgcagtgtctccaggcctgagtttcttctggaacagattccattttagaatggggattcacaggttctgtgcatcaccacagtgctcagagaggattctcctggggtgtcttagaggcaggtgcccaactcaaatgtattcccaaggtttgctgggctctgggatccacgagacaaccagagagggatatctcatgaaatttgcatctggtggctgaacagtacctatgttctctgttttgaatatactttaatacctgagagtcttaaaatttgtgaacaacgtttctatagtcctttattttcaaatgcacattgatcttcacttgctgcatttttactcttcaaccctgaaactatggtctacattaatatggatttttaaatcacatgtcattacttttgcaacaccatcaccaaaattttttgctcttttacatttaggttcatctctgtggtctgtgttgtcctgacatgtaaaaagcatatcgtttattgaggtttttttcccccccttttagagcatccggaagtgataacacgcaaaatcacaaagtagcataaatcagtaaattagttgagttgtttttgggggggaggtgggggtagggggcacagaacaccagaaagagtgttggtgtgtaggtagattccatattaatgaggaacactgaactagttggaaattactgctttctctagaaatataaagcaaagcactattccaaggctatggagtagctctacagcctggcctcaactctaaaagtgtgaagaatgcaatgggcagagacctacctgcagtggactgtcattttcctttctttctctgaattactgctttttctgtgggcattaactatattgctacagcatctagtgtactgagcctgcggtgcatggctcaggccttttcccatcgacgtctagggggactctggaccgtgtgaagctagggggtgtttctcagcacactgcagaagggcagctcagaagaatgcagggcccattcagcatggggatcccagcacatcactgtagaatttgagtgatctatgctgaataaacagtggaatgtgaccagtcaagtagaaatcttgagtaatcagatggaatgcaatctttctaacattaagctaccaagatcctgaatgtcagagatgtactcagagggttaacagacaagcacaaggcatgctgactacattggtgtatccagattgctttgcttttagccagtgctttctaatttttttctcgacattcttgggatagttcaagtttgaaataattaagtggtggtgttctttaaggaatttctataaccaaattgatcttatttttgatttcacttatcatagaacaaatatgtatcattatggcagtgtatctatgtaattatcaatttaatcatcaccaccggtgtttccatattttttcccaagtatttaatatagctctcttatggtggtggcctggtgatggggaccgtctttcttttactgacacatgaccaatcatatggtattttcaagggaattttaagattcatcttttcagtttgatagtagactagttaaggaagaactctttcattacttgcatcgtgtaaatcatctctgtagacatgtgttcatattaatgaacacattttttctcaacattgtagcagaaatcattttattcgtcatgatcaatgaatatgtgatttgctccagatcgttagaaggaaaagtaagatttcagtcatcaaaaatgtttttaccgtagccctcatctaacttacacgtggtgcatattaaaataagcagagaaaaaaaaatgtgaataaactactgaaaacacttggtgttttgtgttcaatgagaccttcctgcaacctgctccccatgggtggcagttaacaggcccatcagatattgttgaaagaaagcaatatatccatgaatgaaggctaaaattgcaatcctttaccctttgaggcatatttcagttgaaaacaaaaagaaaagaaaatttggcttagagggtcacagagctcccatatgaccaagtctcaagcacattaaatcatggttgtttactggccaagggcgtccactagacaactctatcccttgcgctgaagctcaatcgtgctgagggagagctttcttaatattactgtgttgctcttagcccttctctgggttaggatctgtcagcatttctatgataaactcctattctcaaaggtttttaatttgaccataaaaatgtgccccaggctgaagtttgctatac

SEQ ID NO: 11175 - DNA, 2300 bp, Homo sapien
ccccttgcttcaccaggctaacttctgtatccactgccctctgtgaagggcgtaggccaactctcactgttggttattaggattccaattgcaacacccaatacttctgttaatggctgttgtgatacctcggttcttgtcttcttagtttaaaagaatttaaacaaaagacacacagcaaaggagatgcggcagagagtcattcactgcaaaaggaaaagagtattttgaaagttagatgcagaatagacagtataccctgagagagagagttcagggtgggctgcttgcaagggtgaggcagtgttgattattgctagagaaaccccctttgtgggagtcttacatgataattcataaggagttgggaagaggtgttgctagtaagcatgttctgggtggtcctctgggtgcacatgcactgtagctgtatgtttgtgttcatatatcacatgtctcattagcatcttaaatctccacccaggggtgtgttttttactataaatgagcaaagggtcagtttgatgacaattaaaatcaaaatgcacatgccctagagaagggacagtccctcctgaagatagctttgcttaaatgagctcatttatgatgtgaatgccaaggcttattgtgttggctgtgaggtcaccaccaatgctgcatcccgagaacatggtcacttccttgactaactatcctgcctcacttcccctctcaaaatactttattgtaattctagcttagttctctggtttacctgtaggttaaagggctggcacagtaaggcaaggtagtagtaagactgcaggttttgaactgcctaggttagattttaggctctgctccatatttgcttgtgaaatgactcatcatctgtaagcctcaatttcctcacctgtaaaatgggtggaaatgatgctgccaatcttatagagttattctgtgagttaaatgatgtaatatatatacatactgatgcacacagatgcatatatgttcatatataaaaggtctaagtgcattgactggtgcataaaaatgccttcaataaaaataaatgtctttcaaaaaatgccttaaaaatacacatacaatggatacttactaaatacttacaggcttttattgttttgttttgctttttaaagcaaggtattcctgagactgttttcttgtgagccctttgtctctttttcttcattttccattagctggataagatcagagtctcaaagtgaaaagtgttaacactgtgtttgcttccctatttgctcattttttccctccaatctatgtagcctttacgtatgacataaagatgtgcagtagaatgcgggtgggtaaagaaaatattatattcacaaaatgtgttctccagccaaccagtaaggcatccctttcttactagttataggctctgcttctgcccttgtctttaatccttttctatttctgagccccttccttagaggctactggctgaggaagtctaatgtgatgaggtccgagcgtgaagttcactcagcaaagacaggatggtggcatgcaagcaaattaaagcattctcagctttccagttcactctctctgcaaacaaacaaacaaaaattcatagctttttaggtttctatttttaggagttgccaaatacatttcaaaagcaaaactacaaattaatgcagcatggggtatgtgacattttttaaggtctttggaggagatgacaaaacaaggagcttcccactttccagggttgtaagtttttgggaaaacatcaagtgcgaaaaatcaataaacatcctaccttgccactgaattgtgtgagggtttcctgattacctggtagtcaccaggctttagaagagttattgtcatttcgattttcagatgagtcactggatctcttgcccccagggccacttcattatgattcagtgcaaagtactgacagcactggggcttccggaagggagtggtgtcgggatgggggttgctgttggcaagaggcttaattgacacctttgatgtagcctaagacagaacctgcacctcccactgctgcttgggagacgtcagctttacgcagaaaaggcatctgctgatgaatcctgcatctcattcagcctgctctgggagcagccttagccatccttaaactcatccaaccgattcccatttccgcgggtgcttggcttagtgctgagacgggattccgccgttggtattcaggtccaacactaagactgtgtccatgttagaactcatagaaggtaagtgaaatgcattgctgctctcccttg

SEQ ID NO: 11176 - DNA, 2300 bp, Homo sapien
atgtttattgatttttcgcacttgatgttttcccaaaaacttacaaccctggaaagtgggaagctccttgttttgtcatctcctccaaagaccttaaaaaatgtcacataccccatgctgcattaatttgtagttttgcttttgaaatgtatttggcaactcctaaaaatagaaacctaaaaagctatgaatttttgtttgtttgtttgcagagagagtgaactggaaagctgagaatgctttaatttgcttgcatgccaccatcctgtctttgctgagtgaacttcacgctcggacctcatcacattagacttcctcagccagtagcctctaaggaaggggctcagaaatagaaaaggattaaagacaagggcagaagcagagcctataactagtaagaaagggatgccttactggttggctggagaacacattttgtgaatataatattttctttacccacccgcattctactgcacatctttatgtcatacgtaaaggctacatagattggagggaaaaaatgagcaaatagggaagcaaacacagtgttaacacttttcactttgagactctgatcttatccagctaatggaaaatgaagaaaaagagacaaagggctcacaagaaaacagtctcaggaataccttgctttaaaaagcaaaacaaaacaataaaagcctgtaagtatttagtaagtatccattgtatgtgtatttttaaggcattttttgaaagacatttatttttattgaaggcatttttatgcaccagtcaatgcacttagaccttttatatatgaacatatatgcatctgtgtgcatcagtatgtatatatattacatcatttaactcacagaataactctataagattggcagcatcatttccacccattttacaggtgaggaaattgaggcttacagatgatgagtcatttcacaagcaaatatggagcagagcctaaaatctaacctaggcagttcaaaacctgcagtcttactactaccttgccttactgtgccagccctttaacctacaggtaaaccagagaactaagctagaattacaataaagtattttgagaggggaagtgaggcaggatagttagtcaaggaagtgaccatgttctcgggatgcagcattggtggtgacctcacagccaacacaataagccttggcattcacatcataaatgagctcatttaagcaaagctatcttcaggagggactgtcccttctctagggcatgtgcattttgattttaattgtcatcaaactgaccctttgctcatttatagtaaaaaacacacccctgggtggagatttaagatgctaatgagacatgtgatatatgaacacaaacatacagctacagtgcatgtgcacccagaggaccacccagaacatgcttactagcaacacctcttcccaactccttatgaattatcatgtaagactcccacaaagggggtttctctagcaataatcaacactgcctcacccttgcaagcagcccaccctgaactctctctctcagggtatactgtctattctgcatctaactttcaaaatactcttttccttttgcagtgaatgactctctgccgcatctcctttgctgtgtgtcttttgtttaaattcttttaaactaagaagacaagaaccgaggtatcacaacagccattaacagaagtattgggtgttgcaattggaatcctaataaccaacagtgagagttggcctacgcccttcacagagggcagtggatacagaagttagcctggtgaagcaaggggggcacaatgaaggaaaagtgtcctcagcccagggatctcctgtttcagggctggatacgagaaaggaggccagtgtggtacactgaagagacttaaataactaagtaaagcaagtatgtggggttggaggcggaggaatgtcaggaatgagatggaggcaggggccgcatagtgagtagtgctttaaaattcatgttagggagtttggtttttatccaaagggcaatgagaagaaaaacaaaaacaaaaacaaagattttaagcaggcgccacaggatcaggcttgcatttgaaaatgctctccagctcttgccctgtcaagaatggattagagggaaacaatactgggtgcaaggagaatgtcaaggtaggagagagtggggcacatttaagggtcctatggtagagatgctgacgtggctgatctagggtagtgtcatggggtggaggtaaacggaaacgttccagagaaatgtaagaggtaaaaactatagaacctgg

SEQ ID NO: 11177 - DNA, 2300 bp, Homo sapien
taggatatagagctgtgtctgcttggggcggtagttggggtacagcttaaatagcatttgcttttgggagctagaatgagatctccaatactttcagatgatcctgggggaaaggatgtattagttccattcacttctttgatcaatatcttagtaatataaaggaagtagcattcgtttttgaaaattacttgaattaggagttttctagttagatttcatttcaataaggaattattgttgaatataaattagatttgccaaatgcttaagctgccctggaatgaactttagtaccagcctgctgtcctggactaaatgatatgaccatactgtagggccaatgtatactatttaatgtcttcatctacttaattatcagttgccccctggtttccttaaagagctaatgatgcccaactatttctagtgagagcactttgctactgagagagtcaaacaccaaggtgattctctgaacacattatctgtgtgtgctaggtacaacagctaggaagaggtaagatgatggtgagttacttaaagctcttaagaaatgaccctagtagaatatccataggggttaagagatgaaatttatttcttggcttagcattttggaagaaatcacttggcatttgtcattggcaagataaaaagaagctctgatttctgttctccagaagatgtacttggcttcttcctttctcttaatttacccctatggctctcattttgcctcagaatgtgaaagaataggcttactactttgcatttagttaatttggtgagttcactgtactctcatctctgggctattaaatagttcaaaaataaatatcgcatcacttgtggaatatgtagcatggatctcatttgagctgtgttttaaaacaaatggtaattatttaacatttacatcatacttggaaagtatttcagaatagaactttttaataataagtagtcaaacacataactgggatcaatgggcaagagaaaaataaaattttaatgttccattgaaaggtgtaggctcaggaagagagaaaaatacttatgtgtattttgtatactcatgtgtatttgggacaaacacaggttgtggacgacaggattgaaagtcagattaactggatcaaaattcaggctgcgtactgagccagtctaagatttcaccgaaatctgggagctgctcccactccctggacttttgtgcaaagactggaggaagctgtgaacagcctgggctaggagaacattccccctctgggaggagaggctcgcatgagctcatggggctttccaccgcagacccagccttggcagccacaaagtgtccagcagtgaaacctggcccttcagttctcaagggccctttggaacatatttgactctaagcagaggtcactattccaagagtgactcatgtcttggggttaagtggagatgatgggtgggatccatgaacagatccagctcttcccaatgtggggggcaccagagtgcatagcttgggagggttggtcatccgaagaggcactgcgtgggtgcatcccgggcaaaaaggatgagaaggtgatccactggcttccataccctgggaaaggtgtcagaccgtgaggtcacatcaaaaggtatgagtgtgggtacctccttccctcccccgacggtgggggcctcatctctcggccatatcacctctgtgccttgcacacttcctggctcagactcagccctgtccacgttctcttccaccatctgatctgcccccatctcccaaagactacttgtggggactagggaggtttaggggtgtagtcaagccagatgcaccgaggttgctgcggtgggaagagggcgctgggagggaggaggacctggggcgcagccgtggtgggtgcgccctgccaagaagggcgggggcgacggggcgcgcacgcggaggaggaggaggaggagggagacgggagggcgtgtgagcgagtgagacaagaaaagggagcgcgcccgccgccgccgccgccgccgccctcctctggagagagaggctggagtgaggctgtgcgaagcgccgcatttcaatgaggacgggccgaggcacatccctgcactagtggccgcaaccgaggcgccgcgctccagcagctgctgccgcccagcccggccccgccgccgccccccagccctgcagccccgcagccccggccgcgcccagcccggcgaggacagcaccaggaggcggcccccagcgcggccacaaagacccccggcggcgtctctccgcggaccggtgcgtg

SEQ ID NO: 11178 - DNA, 2300 bp, Homo sapien
gagatgttgttttagagtagatgtctgttcatttacaaagaaagttttttgtttgtttgtttgtttgtttttgcgagacagggtctccctctgttccccagcctggagagcagtggtgtaatcacagatcattgcagcctcaaactcccaagctcaggcaatcctcgcaccacagcctctggagtagctgggaccacaagtgtgtgccaccacgccaggctaattttttttagtttttgtagagacaggggtgtcctggctctcaggaactagtgacctcaagtgatctcacctcggcctcccaaagtgctggaattatggacacgagccaccactacacctgaccttttttttttttttttttttttttttaaaggagattggaaacaaaaatatctaagttagttcttaggaagcttggactcatattctagatacaggagaagtttattatcttttttttcttccttcaacacagtagtgatgacttcctctcacataatcttaggggcttttttttttacttaaaagcaaatgagtccgtttctctttcaacattgtctttgtctattagagttagacttgctagtctagacctctggagcaatggaaatctggtgcttgcgcattcaggacgaaatgctcaaagctgcctcaattcacaccctacaccaatgcctgggaaggacttcacctctgtcttacattggtgagcaaaccacttcccgcacagatattgatgtggatactgtcagttcctgattaattggaaaagcaatagaagtgaaatttattacactctattaagacgtgtacacttccaaaagtaatgcagaatgatcccatcagaagttcatctgctccttttcttcccatcagaactgtagagtatcacagctgtatttttgcatgcccccgggatctaaatcggacccccaggacacagcaccagctgctcaggaaccaggagacttgcccagggaccgcctgcagagatggttccccggagagctcctctgtgttatatgctctagtgagatccagagtctgcagtcatccacaataaccaccacacttacagcagtgaaaaatcatggcacagtagtcaagacacatccgaggaaggatcctccgcgggtctgacgcccaataggtctcagtaaaatgttcagtgaaggttgagtagaggagtttacatagcagcagtcacgagaaaattttatcgcctcattgtttccgttgagaaaatagggacagtatttgttaaatcacggcacaaaaatgaagtgtttctaatatttttaatttttttttttgagacgaaatcacgccccgtcgcccaggctggagtgcagtgggcgatcttggctcactgcaacctccgccttccgggttcaagcgattcttgtgcctcagcctcccagatagctgggattacaggctcccatcaccatgcctggctaatttttgtatttttagtagagacgggttttcaccatgttggcttggctggtctcgaactcctgagctcaagtgatccacccgccttggcctcccaaagtgctaggattaacaggcgtgagccaccgcgcccggcctaacattttaaatttcttagtggtttggaaagaaatcaccatagaagtactcgcctttcctatcctctgtttatgtttgtttagaaaagagcaaaacaaacccaagtgtttgctaattcctaacatttaaactggaaagactgcccgtaagaaaagacttcttaaaatttttagaccatcttgagatgacgccttgcctcccgcctccccaggcggcgcagtgggagtgagtacgcggggcttagtgtcgtgagagctgccctgggaaggggacttggagtgcgcagtcagctagtgacgcggtctcctaagggcccccaggacagcttgagtagcccccgcgggcaggcccccgacccgggttccgcgttgacccctcagagcggcctgctgctcccccacgcgccagaactggcgacagggccactttaagggcgcctggggcgtgctcgccctcagctgcggccaggagccattagtgcagggggcgggcccgggacgcagcggctgtggagctcctcctgctgggaggctgccccaggacccagcacgtgcgcagcggccatggcttcctcaattatctgccaggagcactgccagatctcgggccaggtaagaggctgtggaaggggaggcagctgcgtttataacctcgcgggcgggccctaggtcggtggtcccctcggccctcaaagcccggcc

SEQ ID NO: 11179 - DNA, 2300 bp, Homo sapien
tcctcaacttagggcaaccaccagcctctgcctgttttctccctttctgctttgtaccctggcaggcccaggccaatttgggagcttgcctcatttgtgtctcatctcttggtgatcgttttcccttattgcctgatgttcaatgttctttttttgttcctcttagttttttagttgtttcaggcaggagggtaaattcaggtcctttatctctgccagaaacacaaatctgtggtttctgtagttgttgacaaacctgttttctgcttgcctttgctcctaatttcccacagtgagatcctgctaacagatctttttaagaaatcctctgggtcgggtgcagtggctcatgcctataatcccagcactttgggaggcagaggtgggtggatcacgaggtcaggagttcaagaccagcctgagcaatatggtgaaaccccatctctactaaaaatacacaaaaaaattaagccaggcatggtggtgcgtgcctgtagtcccagctactttgggaggctgaggcaggagaattgctttaacacaggagtggagtttgcagtaaactgagattgtgccactgcactccagcctgggagacagatgagactccgtctcaaaaaagaaatcctctgtatatttggatttgtcaacagataatctagtccttttcacttcattctattctgtttacttggttgtgagttgccctttcagacttaacagctagacaaaattttgataagcatacctcctatattagggtaattcacagaaacagaaccaatagggagtgtgtgtataaaagatttattataaggaatttgcccgtacaattatgaaggctgagaagtctcaggatctgcagttgacaagctggagatgcaagcaaactgatgtgcagtcccagtctgagcccaaggctggaaaagtgttccagctcaagctgtttggctgtaggagctccctcttactcctgggaggtcagcctttttgttctattctgtcttcggtcgattggctgaggcccacccacattggggaagacaatgtactatactcagtctaccaattgaaatgttaatctcatccagaaactcaattggaaaactatgtattcacaacacttctgacaccaaattgtgttttccacaccaattatcccattctcactaaaaccttggtctccacaacccctttattctctaaagacattcctaagtctttagtcagtaacttttcaaccaattgccaatcagaaaatctttgaatctagctgtgacctggaagccaccccgtcccccaccccttccaattgccctgcctttcccgatggaaccagtgtatatcttaacatgcatttgattgatgtcccatgtctccctaaaatgtatagaactaagctgtaccctgaccaccttgggcacgtgttctcagaatctcctgagggctgtcacccgccattggtcactcatttggctcagaataaatctcttcaaatattttacagagtttgtctctttttgtcaaggaaacacagatgtatcaagggtaggatgcaaactttgtgattaaaaatataatgaaatttcaagttgcagtgagcagctctgaggtatgttcatgaacagcacacagatgcaaaacaataatctggagggttagcagtcttcccgagttcaggaggtacctttttaagaccagttcctcccgctccgacactgccaaatcagcgactctggtgcttgttcaactgaagcaaagaagggcgcagctaatcttggatccagcgtttccctaacaagggctaagagtgaagccgactttgccgtccggggcaatgtttaggaaagcaaccaaagccagcaggagggaagaaaaaggagagggatattcttggccccctgacactccgctgtgtagccggagcacgtctaaccccagcgtcttgagcaaggagtgtccctggagctgttatccagggtcgctccaccgcacagagtaggcttctccagtctccccggctgccctcgccccaccccctgccgcctgcgggcatcgctttatgacgtcaccacgtgcctctgcgggcaggcgcgggaggtgcgaccggggggcggttggggttcaccgcctcgtgccgtactggcttctgggtggcccttaatgtcttgtgctctaaggtgctgaggggaaagacgcgggaggtctctggcctgacactatgaaggaagagagaaactacaacttcgacggtgtgagcaccaaccgcctgaaacagcagttgctggaagaagtccgca

SEQ ID NO: 11180 - DNA, 2300 bp, Homo sapien
aatattaatattttcagatcatagttgactgcaggtaactgaaaccacagaaaatgaaactatacataagtggggaccactgtacacccttgtagtcatcactcagatcaacaagagaacatttccaaaggccatgagattccctcctgtacctgtgaagtctgtagcctctacctataagcactattttgatttatgtcatatcatagaccagtttttcccatttaattcattcatgtagaatcatagtatgtggtctcaatatgaagtcttttgtatttggcttttcctcaaagaattggtgagattcattgatgttgcaggcaatcaggtttaaaattttttttctgtgtattattgcattgtatgaatgagtgagcatttgggttgttttaaggatttgctttttgtgaatatagttgctgtgaatattgccatacatgtttttggcatgcacatgcatccatttctcttggttatatacctgcaagtggaattgttgggtcattgagtgggtgtttagctttagtagaaactgccggttttccaaaatgttgtatcatttttcagctttcaccagcaaggtagaagagttccacttgtcttcacttagcactaatcagtcttttaaattttagccatctgttaagtgcctagttggtatcactcgattttagtttcacttttctgagggaatagtatgttgaacaccttttcagatgctttttaaagattttcttctgtgaagtgcctattcatgtatttttctcactaagaaaaatggttgttcctttttcataatctttccagagtcatcttagtgggatttggggaagcaacagggctgtgtggggtaacctgccacctttaagtggaaatcaggtaacaaagtttcattcactttttttttctcatttctgttttccccagtctatgattcaattcattttttattggctggatataatctggatttatattataatgaattttagaatgagactcttgtttcaaccataaggatgtatgataggaaactattataagaaaccagaacaagaaaattatttaatagatgtattctgatttattctcttatgtttttaaattaagatattttggaccaagagttttcatttatttatccattcatcaaatacatgttaagtgctttctttatgacagacctaatagtaggcttaaaggatagtataatagtgaacaaaacagagataagcgaggcacttgtcctcttaaaatatattcaggtaggagatacgaatcataagtaaacaatagctaagcaagataattaaatatgtctccaattttgcagaaatggagcaagagccacaaaatggagaacctgctgaaattaagatcatcagagaagcatataagaaggcctttttatttgttaacaaaggtctgaatacagatgaattaggtcagaaggaagaagcaaagaactactataagcaaggaataggacacctgctcagagggatcagcatttcatcaaaagagtctgaacacacaggtcctgggtgggaatctgctagacagatgcaacagaaaatgaaagaaactctacagaatgtacgcaccaggctggaaattctagagaagggtcttgccacttctctgcagaatgatcttcaggaggtgcccaagttatatccagaatttccacctaaagacatgtgtgaaaaattaccagagcctcagtcttttagttcagctcctcagcatgctgaagtaaatggaaacacctcaactccaagtgcaggggcagttgctgcacctgcttctctgtctttaccatcacaaagttgtccagcagaagctcctcctgcttatactcctcaagctgctgaaggtcactacactgtatcctatggaacagattctggggagttttcatcagttggagaggagttttataggaatcattctcagccaccgcctcttgagaccttagggctggatgcagatgaattgattttgataccaaatggagtacagattttttttgtaaatcctgcaggggaggttagtgcaccttcgtatcctgggtaccttcgaattgtgaggtttttggataattctctcgatacggttctaaaccgtcctcccgggtttcttcaggtaagcgaaagaaaaatgaaagcataatttgaaatacgtgtagactacatcatttttatttgttaatgtttatgtgtccagtataagtgcaaaaagataacgacaaattctactttgtttttaaatatattccatgaaattatgagccttga

SEQ ID NO: 11181 - DNA, 2300 bp, Homo sapien
aattaatttcatttttgaaatgttcattgctagtgtatagaaatactattgatttctgtatgttgacctgttgtcctgaatccttgatgtactcatttattagttctaacagtgttgtagtaaattctttagggttttctatatataacaattttgtgtatagaaattctacatgttttaaacacattcatctttatggctgttggaaatttaaaaaattctatttaaatgtatgtactttttaaatgtaaagaagtagagtagatgaccaataaaagatttcctttctttttttggtgggggccagggggtacagggtctggctctattgcccaggctggggtgcagtggcacaatctcagtcactgctgcctctgcctccccagctcaggtgatcttcctgcctcagcctctggagtaactgggactacagatgtgtaccaccatgcccagctaatttttgtgtttttttgtagggacgggtttcgtcatgttgcccaggctggtctcgaactcctgggctcaagcgattctcttgcctcggcctctggagtagctgggactacaggcataagccaccaagcctggccaatatttgcaagactaaagaaatattgacatacaatttcacaatatggaacggaaatatgagttcaagaagaaaagaaatgatgtaaaatttccttctgttaaaagcttgttcatgtagttttaaaaattgatgattttagatattaaattggtatttagattccactggctacatttaaaagttatataacttttattttaaaatgttaatttataataaaacagaagttgcttcttttgtaactatttaagtcagatgagaaattgtgatggtcaatccaaaaacgtggaagtgagaaaacagtcatagtctttggggactcctttgggggtataagagcaaaatcattttgaaaccactgtattaatatattcctaataggttttgctttttgggatgactgactgctacctttctgagatttgagggagtcacttaactggtcctaaggccaggcgcggtgactcacgcctgtaatcccagcactttgggaaactgaggcaggtggatcgcttgaggtcaggaattcgagaccagcctggctaacttgaggtcaagctttcaagaccagcttggccaatatggtgaaaccccgtctctactaaaaatacaaaaattagacgggagtggtggtgcacagctgtaattccagcttctctggaggctgaggcatgagagtcgcttgaacctgggaagcagaggttgcagtgagccgagatcatgccactgcactccagcctgggcaacatagtaagactctgtctcaaaacaaaacaaaaacacaacaacaacaaaactggttctaaatgctccgggcaagtacatactgctttttcttttttctgtttttttttccctaaggcagccctattgaagagtctgtcatctacaatattttactaatttaaaaacacttgtcaagaagggtaaagtatgttcatcttgattttactctttgtatcccggaatcaggaactaacagttttatgatagtgatatagactttacacacacaccaagacttaaaacacgtggtgcaggcgggcttttggaaattaactgtgctctggatacagaagtcacaaagctcaggctgcagagacattgaggggataatcagcctttattgtctctcgtgcactgtgcccagcgctccctctagcggctacaagcgctcactgcccacactctctactaggctctccggaggcctcggtttcgctggagagaaagagattgcgcaggcgccgagcagccgacgtggccgcaggggaccgtgcctgggggggtctgcgcggggccgctgactcgcgaggttctctgtcgcctgccgccctcgctccttttctccccttctagagtgttacggtgactcttgggtccgaaggggacggacgtcctcccacgtaccatttagaaggtcagagtgggcagaacctagtctgagcaggccggtgatgaatccgctggcaagacgcgcgcgtgggtactcacgtgacctaggctgcggcggcggcgtgctgcgggctctgtggcgggagcgaggccgacgggcggggccgcgcggccgcgtgacgcgaagcgttcgagagcgcgcgtcgtggaacgtcttggttgccacggcaagcgcgcgcgcgaggccttgggaacctcgggaccggcccccggcgagcgcagcggcgcccagtgtaagggagtgggagctggt

SEQ ID NO: 11182 - DNA, 2300 bp, Homo sapien
ttgtatgaattttaggatcagcttgcaaaattctgcaaaaaagtcatttgggatcttgacacggattgtgttgcgtctggaggtccatttgagaagtactgccatcttcccaatatgaagtctttcaaccctttaacatgggatgtctttccatttatttaggtctttaagttctttcagcaatgttgtatggtcttcagcatacaagtcttgcacttattacatttatttctaagtattttattcttcttgataatattatgaatggaattaatttcatttttgaaatgttcattgctagtgtatagaaatactattgatttctgtatgttgacctgttgtcctgaatccttgatgtactcatttattagttctaacagtgttgtagtaaattctttagggttttctatatataacaattttgtgtatagaaattctacatgttttaaacacattcatctttatggctgttggaaatttaaaaaattctatttaaatgtatgtactttttaaatgtaaagaagtagagtagatgaccaataaaagatttcctttctttttttggtgggggccagggggtacagggtctggctctattgcccaggctggggtgcagtggcacaatctcagtcactgctgcctctgcctccccagctcaggtgatcttcctgcctcagcctctggagtaactgggactacagatgtgtaccaccatgcccagctaatttttgtgtttttttgtagggacgggtttcgtcatgttgcccaggctggtctcgaactcctgggctcaagcgattctcttgcctcggcctctggagtagctgggactacaggcataagccaccaagcctggccaatatttgcaagactaaagaaatattgacatacaatttcacaatatggaacggaaatatgagttcaagaagaaaagaaatgatgtaaaatttccttctgttaaaagcttgttcatgtagttttaaaaattgatgattttagatattaaattggtatttagattccactggctacatttaaaagttatataacttttattttaaaatgttaatttataataaaacagaagttgcttcttttgtaactatttaagtcagatgagaaattgtgatggtcaatccaaaaacgtggaagtgagaaaacagtcatagtctttggggactcctttgggggtataagagcaaaatcattttgaaaccactgtattaatatattcctaataggttttgctttttgggatgactgactgctacctttctgagatttgagggagtcacttaactggtcctaaggccaggcgcggtgactcacgcctgtaatcccagcactttgggaaactgaggcaggtggatcgcttgaggtcaggaattcgagaccagcctggctaacttgaggtcaagctttcaagaccagcttggccaatatggtgaaaccccgtctctactaaaaatacaaaaattagacgggagtggtggtgcacagctgtaattccagcttctctggaggctgaggcatgagagtcgcttgaacctgggaagcagaggttgcagtgagccgagatcatgccactgcactccagcctgggcaacatagtaagactctgtctcaaaacaaaacaaaaacacaacaacaacaaaactggttctaaatgctccgggcaagtacatactgctttttcttttttctgtttttttttccctaaggcagccctattgaagagtctgtcatctacaatattttactaatttaaaaacacttgtcaagaagggtaaagtatgttcatcttgattttactctttgtatcccggaatcaggaactaacagttttatgatagtgatatagactttacacacacaccaagacttaaaacacgtggtgcaggcgggcttttggaaattaactgtgctctggatacagaagtcacaaagctcaggctgcagagacattgaggggataatcagcctttattgtctctcgtgcactgtgcccagcgctccctctagcggctacaagcgctcactgcccacactctctactaggctctccggaggcctcggtttcgctggagagaaagagattgcgcaggcgccgagcagccgacgtggccgcaggggaccgtgcctgggggggtctgcgcggggccgctgactcgcgaggttctctgtcgcctgccgccctcgctccttttctccccttctagagtgttacggtgactcttgggtccgaaggggacggacgtcctcccacgtaccatttagaaggtcagagtgggcagaaccta

SEQ ID NO: 11183 - DNA, 2300 bp, Homo sapien
gccctctgcttcagggctcctgattcgtttttcttcctgccaaatgacaagaccctctgtgtgggcagaaagggaggtaggaaggagcaggcaggtagcagaaggcagtgttgaagtacagatcttgtttcctcaccttggagaagactgctaataagccctcataattgttagttagttttaatgttggtactctaacagagattaagtcatgtaagtatcttttaaaaatcagttaccatttttatttcatacaaataaccactccttcctctttatgtgccataccatacacttcccagaataatttattctgtagatctctcccagaagacaagaacctgagaatacactgattgtcaaggaggatttattgaaaagcattttctatagttagtataaagttgttctatgttaacaagaactgtctacccaaatatcacgaaataaatctgtttacagaatcctttcttctacaatctcatgcttacatcctgcttaagggaaagatggaaacttggtacaactatttatactgcatctctattggcattagctaaatgcactgcaaaggctccaccttgttaccctgacttgagtggcctttcattgtgtgtgtgtgtgtgtgtgtgtttgtgtgtgtgtgtgtgtgtgtgtgtgtgtgtgtatgtgtgtgtgttctgggcatgcaggatttctggcaaagagttttgaactacaatggctggaggattaaatgggaaagtgtgctggtgggagatcttaatctgccacaaaaatgacactaaacagagggagaatgtcacgctagatgttaaaatgcaagttttacagcggcttgagatcctttcaacgaaatagtcaaggaaaccaagaaatcagtaggcaatcaattaggaatagatggaaagtgctttgacataaagaaaaccaccactgccacctcaacttggtgacagctgacaaacagtaaagggaagaaatgatggcctgaggcacatcatgactttaagggattagacgagaacatacattggagatatgtgtactgtacatatatatatacagaacatacatacatagagaaggtacacacagaacacacactggagtctccttggaagctgtgctataaagcagtggttttcaaagtgtggtcccagaccaacaacatccgtattacttggaacctgtaagaaatgttaattttgggactccaccttacctagcaaattaaaaattctgggttgatgtccagcaacatgcattttaacaaatctttcaggtgattctaatgcctgctaaagtttgagaaccactggaattatgtttcagttaggctttcatttctagctgctttatctacatgcagggtgtgtgtgtatgtgtgtgtgtgtgtgtgtgtgttatatgtctgaaatttttaaaaaggatattaatctttaaatttttgcttgctttaatccagtggtgttaatagaagaaataagaaacacaaaaatggggtcaaaaagaagaaataagtaagctaaaatgataggaaaaggccaacagaaaaataaacaaataattttttattttctctttcatatagtcaagtgtgagccccttgaatttctactgatgtaaaaatcgtatttgttttcatctggaaggagccttcggaacctctgctgccaccttctcatcttacagatgaagacctgatggggtaaggttttactgacctgccaggttagacggcaagttcgtgaccctgggtctgaggaagagagatcgcaggtaaaagtttaaattgagtagatattcttggtttgtgagaaaaataaagtgcttatccacattttttgaagttatgtgaatcatttaaattgtcttccccatctcctggctcctgccagagactggtgctaagacacgcgtggttggaggaacacacgctctctcgggaggtgacggcccagcagatggatcagcaccacagaccctggccccagctgcaaggctgcctttgccaggagaatgaaagagtcttttcactcttgtttcctctctccccatgccaggctcagcaccagtaccagcccccaccttccgtctgtgcatgttttcttcagtcctggaaggaaatcataagtgatttgccccaaaaggattgctgttgagtgagtaaagagataaactttattatcattattaatcactactgttttatttatgctctataataaccctccttctttcagaaggtattgggcggggccggaggagctttatttttaagggctggttatctgtcc

SEQ ID NO: 11184 - DNA, 2300 bp, Homo sapien
aaggcttttttaaggctaaagacggctgaaagtcactggacacctttgtagccttgtcatctggtcctggccagatctgagttgagaaaaaccagcctcagatccgcctctgcaggagttgggcgctccccactccctgcacgccccgactccaacactggcttcagcttcaatcccagaaaagtggatcaaaacgacaggttccacgaacaaacactgcgccggcgcctctactttggagaaaaggaaaagggcgtgaggtttcggtcatttttgtcaaaggaaatcagatgaaaaggggtgtacaaaggaccaggtctcgtgagcgcagccaatcttgtccgctcccaagcgactcaggctcttggcaggacttgctgtagagtcccagacggagttagccactgagtccttcagcgacccaggaaataacaacactgttggcaggtgggggagggcgcccgggaagatatccaatagtggcgtcaggcaagaggacagaaatgctcctttcattcacctttcgaagcagagcatttggtccccgttggcctctgactctctgttgcggcaatctagatgttaccagaattcccgtgtttccttcatattcaaaggcacaggaaatctggggtgcaagcggactgctgtctctcaaggaatagaagtctgtgacaaacgtatagaaatgagtttcatgttgaacaagatccgtttctgcgttcctccctcatccagccttgattctccagatgcttaccaacttcttaatatttacctcaactgcaaggctttcaaccggcgcttttgttagaatactactatcttcccattaaagcaatgtccacactcagtttgcttggtgaaaatgttaataacgcacacttagaaaaacggtgataaccgttgcttgcataaagtggccatttgaatagactttggatctgatttagagatttagggatggatgttttaaaaaaagcaaaagtagtaacagactatagcattggtaatgtgtgtgtgcatatatacatattatttttaaaaaaataaagttcgattatttcacctggcttgtcagtcacctatgcaggcgtctgagcccccgggtttccaggagccccccgtataaggaccccagggactcctctccccacgcggccgggccgcccgcccggcccccagcccggagagctgccaccgaccccctcaacgtcccaagccccagctctgtcgcccgcgttccttcctcttcctgggccacaatcttggctttcccgggccggcttcacgcagttgcgcaggagcccgcgggggaagacctctcgtggggacctcgagcacgacgtgcgaccctaaatccccacatctcctctgccgcctcgcaggccacatgcaccgggagccgggcggggcaggcgcggcccgcaaggacccccgcgatggagacgcaacactgccgcgactgcacttggggcagccccgccgcgtcccagccgcctcccggcaggaagcgtaggtgtgtgagccgacccggagcgagccgcgccctcgggccagcgtgggcagggcgccgcagcctgcgcagccccgaggaccccgcgtcgctctcccgagccagggttctcaggagcgggccgcgcaggagacgttagagggggttgttagcggctgttgggagaacgggtcacggaaacagtcccttccaaagccggggccatcgtggggtgggcgagtccgccctcccaggccgggggcgcggaccagaggggacgtgtgcagacggccgcggtcagccccacctcgcccgggcggagacgcacagctggagctggagggccgtcgcccgttgggccctcaggggcctgaacgcccaggggtcgcggcgagtccacccggagcgagtcaggtgagcaggtcgccatggcgatgcggccccggagagcgcacgcctgccgcggtcggcatggaaacgctcccgctaggtccgggggcgccgctgattggccgattcaacagacgcgggtgggcagctcagccgcatcgctaagcccggccgcctcccaggctggaatccctcgacacttggtccttcccgccccgcccttccgtgccctgcccttccctgcccttccccgccctgccccgcccggcccggcccggccctgcccaaccctgccccgccctgccccgcccagccggccacctcttaaccgcgatcctccagtgcacttgccagttgttccggacacatagaaagataacgacgggaagagcggggcccgctttggggtccaggc

SEQ ID NO: 11185 - DNA, 2300 bp, Homo sapien
caaaggtaagacaaggaaaagaaaactgctataccagtctaaataaaaagactgcccagcaatcaacagttcttttcccctctctgacaactgcaggatgttggcagggtttctcaatagacaaactgtattagaatcatgtagagtatgagccgggcacggtggctcatgcctataatcccagcattttgggaggccaaggcatgccaatcaccttaggtcaggagttcaagaccagcctggccaatattgagaaaccccgtttctactaaaaatacaaaaattagctgggcgtgatggtgggcacctgtaatcccaactacttgggaggctgaagcaggataattgcttgaaccagggaggtggagattacagtgagccgagatcataccactgcactccagcctgggcgacagagcaagactcctcacagaaggatcacatcaggcacagaaggatccacatagaaaagattcacacccacccacaattgccctggagaaggaaggggagagacaaaacaaacaaacaaacatgtagagtatgaatgaaccagacaatagggttggggcctaggaatcttatgcacaaagaaattttgaggaccactgttttgaaggtcaacagttctaactgcccccccatacaccttagtgtttcaaaaagtgagttgtgagaacaaccagtgatattcagaatgattttagcatggaagacttatgccttcatttcattgtgcattaaaatattaaatacaactggtatctcacaaaccaataatttcatagatattattgcttacgatgaagccaagtaaaaatctaaggtaaaatttactaagtgcataatggagcagactgtagatggatgtaaggtaactcatgagaatggcacatgaacaggtgaaattcaggaagccaatccaagtgtgcccggagggaagtggttctctgaatctgccctcttgacaacacagctcattccatcctcctgcattttacatcaggcacagaaggatccacataagagagattcacacccacccacaattgccctagagaaggaaggggagagacagagagcctttacttatgtaccacggagcttcagagttaagccaggtgcccctgcctatctctacgtggagaacaattgaacatgggtggaagtagcaggctcctaggagccgggccctggtgggtggcagtatacgtgcatgtgttggtggtcactgagacttgggtggcctgattctgtattgtgcatgatttgcttttctggccactaataggtctcacggtgaagacagcagaaccagatggagtaggggctcaaggaacaggtagccacaccaacacttcccaggagttcagccctttacaggccacagagcaacaatattgttgaatgtcagagtgaaacagaccgcagccaccaagtgatcgaagtctctcattttccagctgaaaaacaggaatacagagagagagtcttctggtcaaggtagcagcactgactggtaactgaagttggtcggatcagttaaagcctccttttccggagttctgttacgatatatgactctctacgccagttccctagtagggactcatgactgactgtctccctggcaatgacagaaactccaatcctattcgactcatttaatgatttggtataggattcagaggcgcacgcggcgaaggctgagcaagggctgtctgtggttaagctcatcacaggatgaggccatgccccacgcaactcagtcagagctgggcttgcgatgatgcacccagagtagttgttttgggtgggggctgcgaggaactcataaaagatgtaagaggaggagaaagttggcaagaagtggatgctttcatctgcagagaaaggcccctgagccctaaaaaaactgccctcctccccactcccccctcctccccccgacacacaaaaaagttcacccactacacctgccttccccagatgggctccctgcgcaacgcctcctcgtcctccgagattttccaatggtggcgcaagctcctccctcgcccgagctgggcgccgtcctagagccaagcgcccgctagagccgagactagggggcggtgaggagtgggacccgctcgcggccattggttgtgcggccaggaggggcggagggacgacgcgcgggctgtgcggggccggcagcccggatccactcccgctgcgcctgctgtccgccgtgcgcccagactgcgcgccgcgccgctgcgcccaacattcccgaggacggcttcgcgggcgcgtat

SEQ ID NO: 11186 - DNA, 2300 bp, Homo sapien
tatgaataaagttatattttttcatttaaaaaaaggaataaatgcttggtttctgtccaattcagtaaagaagtaaagtgtactttttgttctttttcttttttttgatgatggcaaggacataaagttttgacatgaatgttgatagacatttttgtttatattgagaaaaaacaaaagtgaaacaatgaagatgtatataaggtcttcacttgttcaatgatgtgatgtaagcagtttctttgctgaattgcatgatagttttcaaatactgaaagaatattttctcagttgggggggttggatattcacaatgtgagagctgcagatagaatacattttcagtttaatctttttctttttctttttttcttttttgatggagtctcactctgttgcccaggctggagtgcagtggcacagtcttggcttactgcaatctcttcctcctgggttcgagcgattctcatgcctcagcctcctgagtagctgggattataggtgtggaccaccacacctggctgatttttgtatttttagtagagacggggtttcatcatgttggtcaggctggtctcgaactcgtgacctcgtgatccacctgcctgagcctcccaaagcgctgggattacaggtgggagccactgagcctggccttaaatttaatcttcattaacattttcactgtcactttcttaagtgcagagacaatcagcaataagtgtaaacctgcttcgtagcatttgatcatttccctggtgtaaatactccaaaagtggctgatttcaagcaatcaacatgacatactgaaggcagagttgggaaaatgtgcagtaacacaccactaaataatatttccgcatacagatacaatagacataaataaccttaaaagcacagataatgataaaacataataaaataattagaaaatgaagagttttgagatttgtaccctttgtttttaatataatcttattgtaagtttatgtagtaagacttttaataatagcagtgtttaatttttctgctaattatattcctgaaattttagcaaccagttaccatcagttggcgctagcacaccaccgactgcaggctttactgatgaggaaactgaggctcggagaggctgtcacgaacttgctgtagtcacacaggaagtactacctaggttgctctaattccaaaccttctcccttccatatgcctctctttaaaacataactgatctacctatatgtcagcacccaaacatcttagtgtgaatggatttatagtttgttgaataaagtcattgctttccggtaggtgggatgggaaatctgactaggcgaaagaataggatgaagggaaaaagaacatctacttaacagttcaggatacggcaggatattttctctcctgggatttgggcaagccaagatttaacaaccagcaattgcccagcaactgatagaactggtagaacattcattgtttttttaaacgtttgccattcagtattccttttcacacattttcactgtgttaaacgaaaacgttaagacttatctcagcagccacagcaaagagcaagtactaacaatcaagtgagtttccaggagaaaaaaaacaaagttatccctcaatgcaaatacaactcggccaaaggtgtggcccatccctctccgctccactattttcaaataagccacctctgccttcatggactgcgagctagtgactctaggctgtgacaccactgcatcccagcttcaaatctccccttgcaggcagtttgtgggggaaataataaaattagcatcctaacactacaagtcgtgagaccgctcaggaacaatcctaatttgcatactggaactcctgtagaagatactttgaaccgctttagatacaataggatcaggtaaaacggcgctgccttgccagccactgcaggttttcacctgacacagcccccagaccctgtctacgaatcccccagctggccgaaggggccgcggccgcacatgcgcagtcagtcccgttggttgtgcgctcagccccgcccccagaggcgccgcgctccctgacagcccgcgggcgtacacacgctgacgcgcaggctgcggtcgcgcaggcgcagtcggggcgccttcccggtataggcgccttttaccccagcgtgtcctgagtctttggttcgcgaagtgccgttaggccaagcaggtgctaaaagcccggggtcgtggaccccggccaggtcttagcagcatggaggcgcagggtgtagcggagggcgcggggccgggcgccgc

SEQ ID NO: 11187 - DNA, 2300 bp, Homo sapien
tacaccctgcctcttggggtagttaggtgaacgcttttggccagggaaatgcttgtccaagaaaaaacaagcattgctctcttatctgggtgcccttctctgggtaacatgcccaaatgatacattactgtgtctcctctatttcttcttcacctctttaatgccaacaacaaagaatcacttgccttttgcaattagtctcagacatttgctacctttaatgagttataaagtccaccccgtatctcactttcctcaatatgtcctgctttgttagcaattgaaagtcactctagcccctgcccaggccagggactgcccattctgaagggcaagaacaacttagaactgagacattcagagcaaatctcaggtgcccagtttggagaggaaggctgagtgctgaatgctttctgagcagcagatcaccagtccctgagtgtctctctggctatgtgctgaaggtcagatgctgggaccactgtggtgactatgccaagtgcagcagtggcaggatcggcagtgtcctcagaggccagtgctgcctgactgcctacactgtgcccttgctgggaaatgtaatagctcatccctagtgttaataatagtgctgcaggattttttgctccttagttcagctaaatctgggttcttgtctcacagccaggaaaagttaggcacaagggcacattgaaaggtgaagagggcagaatttattaagtgaaaagaaaaccctcaccaaaaaaggggggggggggccaccagtaggctcccacctcacaaattgaataccaggtcaccacaaacaagctgaagagaccaggctcctcccctgcataaggcatgaattcctggtggctccaccccattccctcagtgtgcatatgagcccttagtctgagccattccatattgatttatttccgatattgtgcacctgttaagggacagaatttttcaccgtgggcgtgtttaggcaagccccctgtgcacaatgacctggatgggtcagaggttctctggggacccttccctgtctgcctaggcatttggctctctcatgcctctatcaataggaggcaggaattgatgggtttatttctagcaaccaaaatggcaagccttctcacatgatcttggaaaaggaagtaagaattttgaacagaaatctcttaaatagctgacatacaggcatagcaagttgaacaagatattgatcagaaccagagtagcaaccatataataaactgcaggtactgcctgtattttgtgataagctgcttacctgagacctcttgatgaacagcaggcaaagtttatcaacattccaaacacctgaatgataggcacaactacaggtttggctactgtttccatgtgttagataaccaaaaagccccaaagcacagtggctcaaataacaacctttttttttttctttttcctcacaatgttgtgggtcggctgaacttagctgagagtttcttctggtagtcttgcttggggtatctcatgaggccgcattcagatgggagtgtggctgtgactggacagtcaagatgacctcccatcctccagagctggaggcttcaaaccaaaggcccctgtgcaaatccaacccatgctcagtttttgtactgccatgagcagtaatttttacatttgcagtaattaaaccgcttttacattttttaatagttgaaaaagaattcaaaacaaaaatattttgtgatatgtgaaaattatatgaaattcaaatttcattgtccacaaagttttattggaacataatcatgaccaagcttattcacttatgtattatttacagctgcttttgcactacagtggtagcactgagtggttgtgacaatcacagaaaccacatggcccacaaagccaaaaatatttactatctgggcctttagagattctgctggccccttctccagagcctctgtccatagtcatctcttttttttttttttttttttttgagacagagttttgctcttgtcgcccaggctggagtacaatggtgcgatcttggctcactgcaaactctgcctcttggattcaagaaattctcctacctcagcctcctgagtagctaggattagaggcatgtgccaccacacctggctaattttttttttttttttttttttttgtatttttaagagactgggtttcaccatgttggccagactggtctcaaactcctgacctcaggtgatccacctgccttggcctcccaaagtgctaggattacaggcatgagccactgcacctgacccacagac

SEQ ID NO: 11188 - DNA, 2300 bp, Homo sapien
aagatctataccacaacttactaataatgagttccatgtaaaactaagcagaattcacaactcttttggggttcaggttattctatcatgagacttctccttaaagcttctaaccctcttcagccattgctttaaggcagcctgactagattaagtaaacagaacttgaacacaatgacttaactatactttataaattcatgattgttaagccacaaaatcaacctttccaaataaaactgagtgtaagtcaaactgccaagcgaaaagagcagctatggagctctcaactctcccttttgtcatagtttatctctgtacaatgccagataaagcccagatgaggaataaagtgatgtgactattgctttatacttattaaatctcatccgttattgtgggaccatgctgccatcctcctcacctgaggtgcccgataatgatcaccctagcggggggttataaggcacctttgttcgaaagaagtttatagaattggactcagaaaggtacagcttgccctccagggaagcaaaggagaaaattatatttaatgcatattaaacaaacaattgttggagattataagctacatcgattccaagatcccaaaatacttgagtcagcttactccaaaatgttaccagccagccactttaaacattaatgaggtagctggtttctaaaatctggaaggaggaggaggttttgtttaagccaactatttcacagaagaggaaatacagttcgacctcaggaaatttaaatgagactgctgaataactgggaaagaacatctcctgtggatgacagggcaaagaagaattaagctgattttaggccaaataacaaatgtgacagctgtgcttttttgtgtatgtattggtgtgtgatagtgtataatttctagaaaagcagttctcatgcatttgggtcttgaaaatttccacttttaaaaattattgagaactccaaagaactcttgcttctgtaggctgtatctatcaatttttaccattttaaaaattgaaactaagaaattaaaaaaatattgattgaatcattaaaaaaactgtattaacataaaatatttttatttaaaacattgttttcaaaaaagttattgagaagagtattattgttttatattactgcaaatctatttaatacttggcttaataaatggcacctagattgtcatcttttctccatatactctattgtgttatgttgttttggttgaagtatgtgaagcgaagttagttcacacaaataagtaattggaaaagagagaacctcatagtccccttaaaaggatctcaggggactcccagggatccttggggcacactttgagagccactgtcctgaaaagtagtttggaagactatgttaagaatggctgtccaggagtggtgagattattcacgattctttttttcttttcttttcattagtatttattttctacaagaagatggattgcttgtgcaaactaaaaatgagaaagaaagaacatactcatgttgagggcagattatggaggccctggaaaaacccaggcagaggagtttacacttgggagaccaaggagccactgtcatttcttaaatgggaaaatgataagagctgtgtttgggagtaagtgaattcgaattgaaagagagaaagagagatgctacttcagagaagtggtgtggtgagtcagacctcaggtgttggcagaaatggagagaaaggacaaactccaaagactttgagggcagaatgacctgagacctggatataggaaatacaggagagggcagagtcaaagacaacagttttaaaattaaaacatttgaagaatgttttttcccttctatccaactttggggcctggttctgttgctcaggctggagtgcagtggcgcagccttgacctcctgggctcgagccattcacccacttgagtagctgggactgtaggtgtagattgcctctttctatccaacttcaactttttctgaatgttactccgattaagctaattgaagtcttgtcgtgttttccagagttggccaccctgttcaagggcttaggagaaagtcaacacacttcgcaacttgaattggtcccagctgctcccagaagaacgggcgggttggtccctatgccacccctggagagctactcgccgcccactttgccgtgaagggctgtgcggttcccgtgcgcgccggagcctgctgtggcctcttatgcactccaccacccccatcagctccctcttctccttcaccagccccgcagtgaagaga

SEQ ID NO: 11189 - DNA, 2300 bp, Homo sapien
tcgtgttaggccaagaccttatcatctttcagaaaacagatttcagttttgccgtggttttgaggtcctgaaccaaaatttcactggcggttctaccaaatcacaacctctgagtctctcctttcatatgattcccataacagaatgttttggtggaagttctattaagcagtaaaaccacagccaatcaagaaatcactgggaaagataaagcgaagtctagctttccattaaccaggacagtcagcttctgtaaaatggagtgtcaacactgcgccttctgtcttaggccaagcattttctccttcttggaactcaccagatcttattgttcttgagcgtaatggattaactttctatactagccttgaggaatacatgataggaattatatcagtgacagactaatgtttaggcaggaaaaagtcatcatcgtgcagaaatatcctggtatgtaaatgagaacgtacagaaaagagcagactagacatactctaaatcaaaggcctgccaagagtcaagagaattctgcgaactgagaaagactccatgccagaagcatgagccagcgctgcagaggttataatttctttctctgcatcttgtcctctgcattatgctcatatacgagaaggaaactgagatagtgattgggccatttcttttcttaatttaatttttaaaaacttgagccacaaggtatcaattctgaggacctaattagtttactggcaataaagtccacatccagcctaatccttaatatataatctgtagcccttaccggtcccgctgtttcctggtgtttctcacccaggacaatctcaaacccaacacatagccgggtgcagaggtatctgggccagtgtagaaagaagactttgaggttaaggcatggtatttaaggttctgctgcaaatgttgttttaaacaaatcaccgttcaactacaacggtataataatgcaaaaatagcatctgccatgaagaaagtgcagtgctttgagaactagaaaaagcagttaaatttaaggccttgctttacatttcggagccgccatcggggccaactggaggtatgactttcctgcacacaggagcaagctgaaaactgccctgtggctttattccacgttcacccctgcagcaaatgccttttctgtgaggaactacgggctgatggggaatcagaggtggttcttcctaagtggcgtttctgagtgggttccaggagtccacagtgactttaagaggcaggctacctgggggacagccaggccgtgagacgagaaagttgtacagtaacattgctgtgtgcccataagtttgtatcttttattagattagataatatatctcacatgctgggttgttaagcaaataaatatgtgtaaggaaattacaatccacataattacatgagtcgttttaaccaccactcacccccagagtgattagattttcttctgcctatgccattgcggcccagttgctctgtcactgtccatggggacaggatccccttactccgaaaagcaaatcaggaacaaacagggcaagtgagagtcactatcagggcccagaaacatgtgaggaacagcagctcagaagggtctccagactgatgggccggtgatcctatattcttgttgggctgacaactcttctggtttcgggctccaggtgctggcaagaaatctcagaggtggggtgggagagagagacgcgaggcgacccacgcagacaaagggctcccaccccacccccgggccaccccggcaggccgggcaggggccgagcctggggtcgcgcagggggaccgagagggcagcgcggggctgggggtggggaagaggcgggaaccgagccgcaggccgctgcgaggagtactaccccgccacccccgcgccgcgagtttccgcgcacgtggccgtggggccggtctcgctcccgccccccgccgggcccgcgcagccccctcctctgcggctcccggagcggccagagcgcgcggcggcgggcgggggcgggccgcaagcagggctccctggccgctttccaggtcggcgcactaatacgggcgatgaggcttcgcggctccagtctgactgacgccggctggggccgccgccgccgccgccgccgccgccgctgctgcagccgctgtctcggtccccgccgccgccgccgggccctgcaggcgctgggcgcgcgcagccaggcagtgagtgcgcggcgctcggagcgggcggccgggggaccacggcgggggcggggttgggggcgccggacctgggtggg

SEQ ID NO: 11190 - DNA, 2300 bp, Homo sapien
gaaatctctactagttagggcaagagaggactcctctctcacccagatactatcaacaaagaagtaaggatgcattacattttatctaaactgtaaatttatacaacctctggaaagatggcagagtggccttcctggcagtgctgtctaggtggctaatctgaatgtcaaggaagctgaaatcctctccacttactaactagagggcaggctcattccaaggtgtgcgggagagagttcgccaattttctaccacttaacaatcagcaagtgtttacaatgtttttgtgtttcgagagcaagggcaaagacaatcgagtttgcattctatcgtcctgccttgtttaggggcagtatatttagggtgcttaattctgggacacaatgcgaccccggacaaggcgcctgaggcctgtctctctcgctcaccctgcgtccctagtgggtctcatcgatccacgcatttattcccatttgtaacagatggctgccgtcaaggctccgtcacccctatttgcttaaccacatcagccaagggagcaggctagggagcacaccccttctgggggctcgagacctccctgggtggagcagaactgcagcggctgcaggtcccggagagtctgggagaggtcgaggttgacagaggaggtgggtagggggcgcgggcgccaggggcgatggaagcggcgatgatgccaggccgggtgggtgcgctccagtgtgaaaaaacttacaagtctctgagcacacaaagagataagattccaagggaaaattaaagaaccgaagaaaaggagagtgaaactccaggaaactccgaggtcaggaatttgggggaatctaggggaaaagggacttctccgagaactggtagcgcggaggaggggacgcctgaggagccgcagtctccaggagagcggtaagccccggcctgcgcgggttcccatccctgttctcaccagtacgagggctgcggccgccagcgccgcgccgagcaccgccagctgcaacagaagcggagccattctccatgccgtggcagcccgcccaatcccgcacctccacacaggcggaagcgcgcccgcgcgacccggccccgccgccagagaggtcgcgcccgctggccgcagcgcccccgcgtggcgaggcggagaaaacgccgctctcgtgccctcggcgcccagtcggtggagaggagcgctaggttccacagcggggcgccaggtttatcaagtatgcaagacgtctacttaatttgaatttcagattaaaaaactaatcatgtttttaacagccttattaagatagccacataccatacgactcatccagttacaggtttctggtttattacattagtttttataaactgtggtaaaataaaaagttgccattttaatcattttaagtttacaatagtgagtggcattaattacatacatactgtgcaaccatcaccactatctatctgtaaagccttcccagctccctccaggttctggcaacaactaattgcatgctctatttggggcatactcatgctttaaaaaaaaaaaaacccacaaaaaaacaaaaacaaaaaacaaaaaaaccacgctgtgtttatcagacattcaaatttaacgtggtatcctgtattttatctggtaaccccacctaggagggagatggcagccttgagcacgacacagtctacaacacaaggtgatgcttaggagccctcagctccgggacctgcagagcagaacgtggtgcggacaatgagcgcacagaaagttcaggtttctcggccgagcgccgtggctcacgcctgtaatcccagcactttgggaggacgaggcgggcggatcacaaggtcaggagatcgagaccatcctggctaacacggtgaaaccccgtctgtactaaaaatacaaaaaattagcggggcgcggtggcgggcgtctgtagttccagctactcgggaggctgaggcaggagaatggcgtgaacccgggaggcggagcttgcagtgagccgagatcgcgccactgcactccagcctggacgacagagcgagactctgtctcaaaaaaaaaaaaaaaaaaagttcaggtttctcatgtgttggagcacggagcccttgaccagtgaagaggcaaggccagggctgagcctaagtcacaggcagaaaaaagacgcagaaacattggaataacgctccacacgcactgcttgattctgcgctagaaaccctgttatctccgaactgttggtgttattctgagtcacagcaccagctcttttataaagaggga

SEQ ID NO: 11191 - DNA, 2300 bp, Homo sapien
ggttctgatgcaacaatcttgattgattgattctgacagagtctcactctgtcgcccaggctggagtgcagtggcgcgatctcggctcactacaacctctgcctcccgggttcaagcgattctcctgcctcagcctcctgagtagctgggactacaggcgcccgccaccacgcccggctaatttttatatttttattagagacagtgtttcaccatgtacaccaggctggtctcgaactcctgacgtcaggtgatccgcccgcctcgtcctccaaagtgctgggattacaggcgtgaaccgccgcgcccggccacaatctttaaaagattacaactatgtctcctgggactgcacgttcactacacaccacgctcacgagcgctcgcagcgggtatggaactctacagagtcctttcatctcccgtctcactgaggaagaagccctttcttttcactgtgacaacctccaggtcctcccgcccatcgtctgcctcgacgaggaaggaaatggcaccccaacggggtcggcctccaggtgagagaatcccagctaagagttaaaggaagctgccgtccgccagggtacagaactctacccgccacccgccaacactcacttgaacccagccgccatcttcccgcccgcgcgtctgcgcctgcgccgctcctctcctgcgcgcctgttccgccgccgcactttcgacacggatgccggggccgctcacgccacgggaaatgccaaggtggggacgcgacgaaaggtccctggcccgccctcgcatcgactttcccctgcccagacgcctttctaggtttccttgccttggacgtattttgacgaatctgctgttaaagaaggagcgggtctccctctttataaaagagctggtgctgtgactcagaataacaccaacagttcggagataacagggtttctagcgcagaatcaagcagtgcgtgtggagcgttattccaatgtttctgcgtcttttttctgcctgtgacttaggctcagccctggccttgcctcttcactggtcaagggctccgtgctccaacacatgagaaacctgaactttttttttttttttttttgagacagagtctcgctctgtcgtccaggctggagtgcagtggcgcgatctcggctcactgcaagctccgcctcccgggttcacgccattctcctgcctcagcctcccgagtagctggaactacagacgcccgccaccgcgccccgctaattttttgtatttttagtacagacggggtttcaccgtgttagccaggatggtctcgatctcctgaccttgtgatccgcccgcctcgtcctcccaaagtgctgggattacaggcgtgagccacggcgctcggccgagaaacctgaactttctgtgcgctcattgtccgcaccacgttctgctctgcaggtcccggagctgagggctcctaagcatcaccttgtgttgtagactgtgtcgtgctcaaggctgccatctccctcctaggtggggttaccagataaaatacaggataccacgttaaatttgaatgtctgataaacacagcgtggtttttttgttttttgtttttgtttttttgtgggtttttttttttttaaagcatgagtatgccccaaatagagcatgcaattagttgttgccagaacctggagggagctgggaaggctttacagatagatagtggtgatggttgcacagtatgtatgtaattaatgccactcactattgtaaacttaaaatgattaaaatggcaactttttattttaccacagtttataaaaactaatgtaataaaccagaaacctgtaactggatgagtcgtatggtatgtggctatcttaataaggctgttaaaaacatgattagttttttaatctgaaattcaaattaagtagacgtcttgcatacttgataaacctggcgccccgctgtggaacctagcgctcctctccaccgactgggcgccgagggcacgagagcggcgttttctccgcctcgccacgcgggggcgctgcggccagcgggcgcgacctctctggcggcggggccgggtcgcgcgggcgcgcttccgcctgtgtggaggtgcgggattgggcgggctgccacggcatggagaatggctccgcttctgttgcagctggcggtgctcggcgcggcgctggcggccgcagccctcgtactggtgagaacagggatgggaacccgcgcaggccggggcttaccgctctcctggagactgcggctcctcaggcgtcccctcctccgcgctaccagtt

SEQ ID NO: 11192 - DNA, 2300 bp, Homo sapien
acttttaaaatctgagtcaccattttaaaaaaattgttatatcatttgagacattaacagatttttggtgacatccttttagccagtgatgacatgtaatctgtgtaaatgtgtagaaaattgaaattgttgaaaagaaaaatttgagggaatactggctaccatttactgagtacttgctatgttccagacacctttttaggtgctttacagaattatccactttaatgcctataacaatcatttgttacttgtcttcacctcctgttttacagatgactttcagtaacctgtccaggtacataagactcataagtaaaacttagacataaatctgactccaaagcctgtgcttctttgactacagtataccctgtgttatttaacctcagttgagattcttctttcgtaaacctggagtgatgtataacagtaagatttgagaacttgctccttgtcaggttttatgcctgggatttaacaggtctatctcatttggcccttattaacagtccctaggagtagacactattttcttcccatttgacaagatgaggagtttaaggtaagaggttaaataacttgcctgaagtctctcagccagtaagtatggctctgacatttgaactggcttagtaattgcagagcatttgcttttttttttttttttgagacggagtcttgctctgtcgcccaggctggagtgcagtggcacgatgtcagctcactgcaagttccgtctcctgggttgaagtgattctcctgcctcagcctcccaagtagctgggattacaggcgcccgccaccatgcctggctaatttttgtatttttagtagagacggggttttgccatcttggccaggctggtctcaaactcctgacctcaggtgatccgcccgcctctgtgtcccaaagtgctgggattaccggtgtgagccaccgcgcccagctgagcttttgctctttaccactaaagcagcagttcctaaatcttgctctatcatctggagaacaaattaagattcttggctagtagttgggggcacaaacccagttactattttttaaaagatctccaggtaatcttgccgagcagcactgtagtgtagtccactgtactgtagtgccttcttatcttgtagagctattgtgaggatcagcaccaatgtccgtagaggccctgacacaattccctaagctgatatttgatagagccttccataactgattgctaaattgtcttcataatttttcagtagcttctttcaataggaaacatttctttgctactataggaatttgcagcaccatcaacagatgcccctgataaaggatacgttggtaagttaaatggttttgtaattttaatacaaatacttttaacacatttaataatttttagttaagtcctagttaagttgatgtaaagaaaattattcctaatattcggaaatatttatgaataaaacaaattcctcaaaagttttccgtgtgttagtaaaagatagcataatagcaggatatagaatttcataaatttaacctttatcaaacttgtttgctcaatttttgtttatacattcataagttactaaccaagaaaatagaattttggctgggtgtggtgactcacacctataataccaggattttgggaggccaagacagcaggatcgcttcagcccagcagttcaagaccagcctgggaaacaaaggagaccccgtatctacaaaaaaaatcaagttagctgggtgtgccagtgcacacctgtgtcccagctacttgggaggctgaagcaggaggattgcttgagcctgggaggttgaggctacaatgaactataattgtgtcactgcattcaagcctgagtgacagagtgaaaccctgtttcaaaagaaaaaaaaaatagaatggaatttttttaagtcaaagaactgtcattgcacaccttttgtttccataaagattctttgctttatacaactgctatttttttcttgccttggaaccatctgttctttatggtaggaaccaacattttttttaaatgagaaaaacagttggatgttagcagaggggctatatatacttcagttacagattgaggtattttgaaagataccaggaaaactcgtaaaggatttagaattgaggtctaaaatagattttttaaaaaggcatatgggggaaaaatgtcagaaaaatagaaatttcatggctgggagtcttagagagaccaaacagaatataactataatgttacaatgtattctactcagaagagcctgtccatggcca

SEQ ID NO: 11193 - DNA, 2300 bp, Homo sapien
ggccactattctactttatgttagtatgagtttgactattcaagatacctcatataagtgcagttatatagttatttgtccttttgtgtttgacttatgtcacttggcataaagtcttcaagggtcattcattttatagcatgtgtcagaatcaccttcctttttcatggtgaataatacttgtatataccatattttgtttatccattcatccactgatggatacttgggtatcttccacctttcggctattgtaaataatgctagtgtgagtgtgagtgtacaattatctctttgagaccctgtcttcaactcttctggatatatacccagaagttggattgctggttcatgtggtaatttttaattttttaagaagcatcatactgttttccatagtggctgtaccattttacctaattcccatcaacaacatacagagatctcgatttgtccaaatcctcgccaactcttgttattttctggtggtggttgggtctttagggaattttttttttttttttttaagcagccttcctaatgggtgtgaggtgataatcccattgtggttttgattggcatttccttaatgactagtggtgtggagcatcttttcatatgcatgttggccatttgtgtaccatctttggagaaaagtctgtttgggtcccttgcccattttttttttttcagattaatttttgttgttgaattgtaggagttcttcattcttcatatacacatatatcagatgtttgatttccagatattttctcccatttgttgtcttttcactcttgattgcatccattgcacagaagttttttttttttttattttaatgtagttcattttctctttttacttttcttgcctgtgcttttggtatcatattgaagatcattgccaaatccaatgtcctgaagcattttcacttgttttcttataaatgttctctagttttaggtctcctttaaatttattaagaactcttcctactgttgacttgctttatatgtttttgagaaatctgatgccagtctaattatcttgctcttgtaagtttatttaagcagtttgcctagaggccctgaatgcttgtctaatattttcactggtgtgtgtgtcagaattgatttttccatgtttttcctgtggatccttttaatgtgtagagtcacttctttatttctggaatgttttcttggatgatagtttgtagtttcgtaagtggaagcttagattattgtgttgaggtcattcttttctaaaataaacaattaatgttacacatttccttctcagtactgcttaagccactttccacaaattttgatatgctgtgccttcattttgttccacagaattttcttatggattcctcttaaatcagttatttagatatgtttgatttccaaatacttgggaattttccaaatatctttctgcagttgatttctagtttaaatccactgtgatctgaaaacatatttttggttcttttaagtttgttgaggtttgtttaatgcttgagaacgtgatctgtcttgatgaatactccatatatggctgaaaaaatgtatattctgctgttaggagtgttccatattagatcaaggtatttgatggcatcattcaggtcttctatatccttttctttctgtatgttttatcagttactgagagaagtgttgaagtcttcaaccaaaactgaaaatttctatttttccttttgctaaaggttgttttttgagcccatattgttaggtgcatatacatttaggattgttatttccttgattaatttaccccttatcattaataaatgaccttctttatctctggtaatatttcttgtttctttcttttgattaacgttagcttagtacgtcttttttcatccttttagttttagcctgagtccttttatttcttagtatttgttttcttcttcaagatgtttgtttaatcattattcctccttgtttgaatattccatttgtggtggtggcttatagtctacattaggtttgtggagtgctttggggggaaattgatatcacctgtagtttttttgcattttgagtttttttgtttgttttatcatagctccgttatggtggtgatgtggtctgccttattctgttgttcatttcatgaactgggttccaaattcaataatgtgtcctcctttcagctctgtgctcttttgtccaatcttttatatccagggagatcccctcaagataaatgtaacttttgaaatgtttggcttgcaattatatactgaaatgttactt

SEQ ID NO: 11194 - DNA, 2300 bp, Homo sapien
ctcgggaggctgagacaggagaatctcttgaaccccggaggtggaggtttcagtgagccgagatagcgccactgcactccagcctgggcaacagagcaagactccatctcaaaaaaaaaaaagaatcattttttgaggagcgggggtacagtttagttttgtttctacttttacctttttttaaaattatttaactctttataacatgatttttaaatgtacacaaagataaaaggaaaattacagtgaacacctgtgttctagtcatttggcttcaacagctgttattttcctttaatagataagtatggaagagtggaagcttgctttcatcttactcctctgcctttctccctaaaactctctcttcccaccctattactcagaaatcttttcctcattctttatgtgtactgtaatatatttcatgaatctcatgtgaaattttctctgtaatacatatagtattcaatctgtaaccactaagagcactttgcagagttaaaaatctgggatttatagcagtattaattttatttaataaactatgaagttaaatataaatatcatctggggtttatagcagtattaattttaacaagtaagcttaatgtcattgtcttttagcaaactgaaaccgtgtcagttcagtcttcggtattggggaagggtgtaaaacatcgacccccaccaatcaaacttccctcaagctcaggaaatagttcctcaggtattacatttcttagttttttgcagtctagaataacaaatattatataatcataatctctttttaaaactttgccccattttgatttctacagttcacagaagtttgaattataaatttaggaaataacttttatgttcttctaggtaactattttacaccacaacagacaagcagctttctcaaatctccaactcctcctccttcttctaagccatcaagtattcctcggaaatcatctgtggatctcaatcaagttagcatgctttctccagctgccctatcacctgccagctcatcacaaagtgagtcataacttaaattcttcattaaatcttcataagcttttgcattagtgtttcttaagacagcttttttcaacctgtgaagtagtgatatctgaatgtactgtgtacccaaaatgtataagttgctagaagcttcaggcagagctcttgttgattgtatgtattatgtctctattgtaattgtacttgtttttctgtatctgtgtatacattctgcgtgtacctttcttataggcttacaacctacacatctccttaaaaaaataacctggtagttacatgtggcaataagatttcaaaatattttttattccagtgtaccctaggatcattttgcatatttatgtaaattgtgtggctgatatgaaaaaaatgtcataagagttgttgctgcaggtcctatctttgtgtatatgtaagaagtcaactagttccaaggtggtgatacaataaactgaaaaacaatatttcaaaaacactcctacactcttttataaattgttgtcagttactaaaatgtgatgataatcataaagcattattctgaagatactgaaatgtaatttttactactgaatacttttttttaacatcaagaagagttatacaagaatgctagcattagtttgggagaatttcttcaaattagtaaatatctgaaagtaccaatttggggaaaaaagtcattccagttttttagattttttatagatagctaatatatgctgaaagttttagtacactgcacagtgatagggtggtcttcgcattagatataaacatcttcatctcgatagctcaaaaggtgtaatttttctgccttcttgttttgcacaaagaaaaatatataaattttctgaaagtcttattcacacttcttatgttgtgggtatggattatggtaatctactgcacacagttgttactttaagtaagggttgagtgacagcttctggacattcacatttctttcctttctttctgcaggacatgaaagctaaaaaagaaaacacctcaagagcttttggttttacttttttggtttttgttttttgtttttgttttttaaaaaattgataaactgtgcatacttcattcacaacagattttctatacattctacatttaaacagaagtacacagttactgttaaagatgcagtattatctctcagatatttgctttattactgttttttgtaaatttgtttgtcaggataaacttgatgtgttaggaattaaacatgtatatttaggtgccaa

SEQ ID NO: 11195 - DNA, 2300 bp, Homo sapien
gtagaaaggtggattttaaagagcaaccccaccaatatttaggtaaaagtcaatgaaaggaaataacagggaatcctcagcttgttttttcacatgaccagtttttattattgtaaaaggatcagatattttgataacatacattttcttcttttttttttaagttatagacatcacaacagtttatttctgaatcctcagcatgcatttctaaggaagccattttttttctttatttttattttagatataggggtatgtgtgcaggtttgttacaggggtatatttatgatgctaaggtgtgggtgtctgctgatcccatcacccaggtagtgaatatagtacccaatattgattacttatatttaaaaaaatcttttcacttaaagacaacatacattggccatttttaatttattaacttatttttgtagaacacaagggtgatacatgttcttttgtgaaaaaattggtctatagagccaaatgactaatttgtttgacaggaagagaattgaattttttacctttgcatcagagtagctgcatgatttattatcttccagtcattcttccatattcataaaatactttatttaataaactatgaagttaaagtttgagctgcattaactaagcttttttttacattttatatttcagctcgtccacagatgatcattcaaattggtaattaaaaaataaactattttaatctgttaagaaattacataaatatcaaactctttaaaaagacttgctaaatatactttatttgaatcagtgataaatatgtatactttgtttgaaatatattctaaggatctgttatgtagacattaatagtaacttctaaaattgcaggttaaagtgagaggaaggccaaagacctttgcacatgttagttcagtgattttgctttaggatcaatagttgtaagggtatatagcacttggtaactttcagcccagattatgttttaataaataaattttgtgccaaaagaaatatcacttaattaaatcaaccaaattattcacattgtttcataatgcatgcaaaacttagtcattgtttcatatgtttaaatgcattaaaaaaatttttttcatatcttggtagatttaataccagtttatattactgtgactaaaacatggaagattcaaaagtaatcccaagccttcttaagacaactcttacctaatacttttctctccttttttttccttaaacattttaggttcattattggatcaaagaccgatgctgagaggtaaaaatatttgcatctcttattttggtcaggatggatatgaaaaatttttcacccttataggatagagaatactaggagttaaaaactttgattttggttatgctgttaaccatatttacactgtttaatatttatgggtctctgttgtaaaattagggcattggacaataaaacctctaaggtcctttccaactttaaaatcttactgattctagaaaaatatctgtaagcttgtgatacaccaaactactaagaatggttcttttcatgggatgagatttttgggggacttaaatgcatttttccaaagtttataatacctaggttttttttcatagaattaagaaaacaaaagaaatgtttaaaatatagttttgttttaaataagaaaacttagacatatctactgtagctaaggaagatgatttctagatagtactttaatcagaatctaagaaaggaattgagtattttctttggctgcttattacttaagtaatccctgtaatttctgtattagaaataagatattgaaagtatatctttagattgttatttagcacaatgttttggacaatttgtcattgaacagtttaaaaatatgtacttttaatacaaagataaattgcctaatttttaatatttatgttaattttgatagaactttctttttgccattaatagtcattattctttcctataaaataaatttgtgtttaaaacaggttttctaatctttacctgttttctcctgatattttagggtagtcaatcagtaccaagaattagtccagaatgaagccaaatgtccggtcaagatgtcacacagctccagtggctcagccagtctgagtcaggtttctccagggaaagaaacagatgtgtgtttcattaatgttacttctttgtgcccagttgtttcacaagtaatctgagaaatgttaagaatcatttttggaggctaggcacagtggctcatgcctgtaatcccaacactttgggaggccaaggtgggtggatc

SEQ ID NO: 11196 - DNA, 2300 bp, Homo sapien
gtatttatttgaggtgctatgcatttttcaggatgtaaaagatgattatgtatttgaatgtgaagctggtactcagtatcagaaaacaaagctgaccatcttgcagtcgcttggagatccactttactatggtaaaatacagccatgtaaagcagatgaagaaagtgacagccagatgtctccatcacagtgagttctgttaaatacaagtaactggaaaaaaaaaaataaggcaccaagaatttatctagtaactactgatgaaccattaatgaataaaaatttctctttgggaactcacttattagttaaatataacaattagatttggcggtagacctaagtaaacttaagtcgtagttaccatgttgctcaagagttattaaaaataaaaaaacctatggtataattatttttatgcttgttttgaaggctattcctgtgatatccttctttatatgtttatggcacttaggactttaacctttgaacatgaagtgtttgggcaatagtgtgtttaaataggaagcaagtttactataaatgtgaaaagatgcttggtattttggcactgcatgtaaggacacagactcaatgcttattgtagttattggccctacatattaatacataaaaatatagatgatcttccaaaatgtatgaactacatatatttggtactgtcagtatttagttttattttgttttactatttatttggtttttttaatcaaattgatttgaaaaataagttttctgttttgaaaacaaaaaagaagctcagcagaaaaggatgggggcgaggtctatgttaattgtaaagcctttacttacacaaaatactaattgaaactacagtagaaaggtggattttaaagagcaaccccaccaatatttaggtaaaagtcaatgaaaggaaataacagggaatcctcagcttgttttttcacatgaccagtttttattattgtaaaaggatcagatattttgataacatacattttcttcttttttttttaagttatagacatcacaacagtttatttctgaatcctcagcatgcatttctaaggaagccattttttttctttatttttattttagatataggggtatgtgtgcaggtttgttacaggggtatatttatgatgctaaggtgtgggtgtctgctgatcccatcacccaggtagtgaatatagtacccaatattgattacttatatttaaaaaaatcttttcacttaaagacaacatacattggccatttttaatttattaacttatttttgtagaacacaagggtgatacatgttcttttgtgaaaaaattggtctatagagccaaatgactaatttgtttgacaggaagagaattgaattttttacctttgcatcagagtagctgcatgatttattatcttccagtcattcttccatattcataaaatactttatttaataaactatgaagttaaagtttgagctgcattaactaagcttttttttacattttatatttcagctcgtccacagatgatcattcaaattggtaattaaaaaataaactattttaatctgttaagaaattacataaatatcaaactctttaaaaagacttgctaaatatactttatttgaatcagtgataaatatgtatactttgtttgaaatatattctaaggatctgttatgtagacattaatagtaacttctaaaattgcaggttaaagtgagaggaaggccaaagacctttgcacatgttagttcagtgattttgctttaggatcaatagttgtaagggtatatagcacttggtaactttcagcccagattatgttttaataaataaattttgtgccaaaagaaatatcacttaattaaatcaaccaaattattcacattgtttcataatgcatgcaaaacttagtcattgtttcatatgtttaaatgcattaaaaaaatttttttcatatcttggtagatttaataccagtttatattactgtgactaaaacatggaagattcaaaagtaatcccaagccttcttaagacaactcttacctaatacttttctctccttttttttccttaaacattttaggttcattattggatcaaagaccgatgctgagaggtaaaaatatttgcatctcttattttggtcaggatggatatgaaaaatttttcacccttataggatagagaatactaggagttaaaaactttgattttggttatgctgttaaccatatttacactgtttaatatttatgggtctctgttgtaaaattagggcattgg

SEQ ID NO: 11197 - DNA, 2300 bp, Homo sapien
gaatgtacaggtttgttacataggtatacatgtgccatggtggtttgctgtacctatcaacccgtcatctaggttttaagccccgcatgtgttaggtatttgtcctaatgctctccatcccctttcccccaaccccccaacaggccccagcgtgtgatgttcccctccctgtgtccatgtggtctcactgttcagctcccacttatgagtgaaagcatgtgatgtgtggttttctgttcctgtgttagtttgctgaggatgatggtttccagaatcattaatgtcactgcaaaggacatgaattcattcttttttatggctgcatagtattccatggtgtatatgtgccaccctttctttatccagtctatcattggtgggcatttgggttggttccaagtcttcattattgtaaatagtgctccagtaaacatacgttacgtgtgtatgtgtctttatagtagaatgatttataatcctttggtatatacccagtaatgggattgctgggtcaaacagtatttctggttctagatccttgaggaattgccacaccgtcttccacaatggttgaactaatttacactaccaccaacagtgtaaaagtgttcctgtttctctgcagcctcaccaacatctgtttccagactttttaatgactgccattctaactggtgtgagatggtatttcattgtggttttgatttgcatttctctaatgaccagtgataatgagctttttttcatatgttggccgcataaatgtcttcttttgagaagtgtccgttcatatccttcacccactttttgatggggttgtttttttcttctaaatttaagttctttgtagattctgggtattagacctttgtcagaaggatagattgcaaaaaattatcgcccattctgtaggttgcctgttcactctgatgatagtttcttttgctgagcagaagctctttagtttaattagatcccatttgtcaattttggcttttgttgcaattgcttttggtgctttagtcatgaagtctttgcccatgcctatgtcctgaatggtattgcctaggttttcttctagggtttttatggtttatggttttatggttttatgttgtaagtctttattccatcttgagttaatttttgttaaggtgtaagaaaggggtccaatttctgttttctgcatgtggctagccagtcttcccagggccatttattagatagggaatcctctccccattgcttgtttttgtcaggtttgtcaaagattagatggttgtagatgtgtggtgttatttctgaggcctctgttctgttggtctgtatatctgttttggtaccagtagcatgctgttttggttactgtagcattgtatagtttgaagtcagacagcatgatgcctccagctttgttctttttgcttaggattgtcttggctatacaggctcttttttggttccacatgaaatttaaagtagtatttcctagttttgtgaagaaagttaatggtagcttgatggtaatagcattgaatctacgagtacttagggcaatatggccattttcacaatattgattcttcctatccatgagcatggattttttttctatttgtttgtgtcctctcttattaataagaggattttttatcagcagacatgattatatctgtgatttgtaaagtgaactggatagtgatcaagcccagtgggcaagctattaaaataattcaaaggaaaaatgagaatagcaacagtagtgatagagaagagattttaaaaaatgtattttttttctctctggagatgttaagtatttttgagaaaaggagtaataattgtaacttggcaagtgtgttttgcctttcctagttgaaactacttttcagcagtgagtggataggttgtggtacatgaattttattgttactcattattaaaaagtgtcttaaaaatatgtatgtcttaaaaatataagtaattttccttgttaattatgaaatatgtaatctctttttttttctcttaatagccttatgttaatattggggttttattgtttttgcttttcagtactgtaagattgatgttaaaggcatggtgttcaccccacttcatcagcgtacataagttatctcttcttttggacccttattttatgccataatggtaagcttcagctcagtatgttcaaatttgtgttttagaatgttctcttccttcatcttcataaagatatttgtatggtagatatagaaatactcttgtaagctgtacaggttatcccaactgggaaa

SEQ ID NO: 11198 - DNA, 2300 bp, Homo sapien
ttagaagagacttcggacttcagattttagagttgatgcttttgagactgttgaagtggtatgaatgtattttgtattcaataaggacatgaattgcaggggtacagaagtctgttgaccaaattatatctccacaaaattcatatatgtaaccccaaaccccaatgtcactgtattggagataagatctataaggaggtaattaaggtttaagaagatcataaaggtggggcccttatccaatagaattagttactcataagaagagacatgaaagctagtgtgcttgcacaatggattcttggtgatgacaccaaaagcacaagtaacaaaatagataaattagatttcatcaaaattaaaaaggtttgtacactgaaggatattacaaagaaagtgaaaagacaacctacagaatgggagaaagtatccaccaatgatatatctcataagggtctaatatccagaatatatgactacacataactaacaacaaaaacacaaacaactcaatttaaaaatggggaaatacctgaatagagagttctccaaagaagatatacaaatggctaacaagggcatgaaaagatgctcaagataactagccattagggaatgcaaatcaaacccacaataaaataccactttataccctttgggatggttactatcaaaggaatagaaaattatggtgttagtgaggatgtggagaaattggaatcccccgacaatgctcttggtatgtaaaatgaatggttcagctgctgtagaaacatttgtttatgggttcctcaaatattttcacgtagaattactataagacccagaagttccactatgtttatacccaaaagaattgaaaacagggactcgaacaaatacttgtatacaaatgttcatatcattgctattcacaatagcccgaaagtggaaacaacccaaatgtccatcagtggatggacaggtaaaactgtggcatctaggtacagtggaatagtagccataaagagacatgaagtaccgatacatgcaacaaggtgtacaaggtgaacctgcaaaagattatgctacgaagacagaccaaaaggtcacacattccatttatatgaaatatccgtaataggtaccacagtttgaaagctgattggcatttgccaggggctgagagagggaggaatgggagtaaccacttaatgtgttcggattttattttggagtgtactttaatacacttataatgtgtgcaaccactaactctaattccaagacactttcattcattatgacccttggcattgtgaacggcaaataataaatgctcattaaaaagattcaccccaggccgtgcatgatggctcacgcctgtaatcccagcactttgggaggccaaggcgggtggatcacttgagatgaggagttcaagagcagcctgcccaacatagtgaaacagtctctactaaaaatacaaaaattagccgggtgtggtggtgcacgcctataatcccagctactccggagactgaggcagggagaatcgcttgaacccaggaggcaaaggttgcagttagctgagatttctccactccactccagcctgggcgacagagcgagactctgtctgaaaaacaaacgaacaaacaaaacaaaacagaccttacaatgtgtgctagtaatgcggtttctgaatttttagaacccttctctggggtggtttttttaaaaacataaactcattggcagttgatatactacagaaggttgtacgcattggactagtaaatgtaggtaacggtgtcgctgtttttccatttgtatgtgctaagcaaagagaaaagctagttctatgtttcttccactctagaaattcaacagggtcgtttttccccaaattcacatctacaccctccctcccactttgcggactcggactccaggattgagcagagatcctgggccccgcctcccgcccggacgcaagtctctgcgggcctcaccggcgtcctgcgcggaacgcagcgctccaggctcctggcagcggccccgccctcccggctcctccccttccgcccgccttccccgcccctcggcccagcctgccaatcggaagtgcggccgccggaactggctgttggtgggggtgcagcactgagccgccgacggggcgggtgggctttgctgccgagcaggcggcgccgtcttggggcctagcggcgaggcgacccgcacaggtgggcggtggcggtaggtgggtggccagcgactggcaacgcggtggcttagacgcgcgagatccggccagg

SEQ ID NO: 11199 - DNA, 2300 bp, Homo sapien
acctgggcgatgggaaagataaagcaggctggaagcatttcaggctgaggaaacaacaccataagccaagacccaaagatgaaaaaatgcagggagtatgtgttcggggaaaaatccgcagtcccaccggcttgtggtaagagaattcatgggagactggattggaagctattcagggtcatatcatcacttcagttactgatcctccccattctggagatgctcacaacttccctgtaagtgaaggttcacccaaccaccattataagttacacttgaccttctttatagacagtgcctttatttaactggtacaaaaaagtatgggacttagtaaacaataaataaactataattaaactattctagttccagaattgaaaggggattttttgattcaagcttttgtccatgtatgggttatctgtaacttttttgaatagtgacttctctcacatagagattatttgaatttcaaggttcgtgttgaagccattgactggaagactgaacgggaaggaagcataatgggcagtgggttaacaacataaattttattcttggttattagaaaggaaattgttctccaggcaaatttcaacaaagttggatgagtaaatgaaagaaatgccattctagttggtacggtataaaaagtaactaccttgggtcagaattcagtttcaaattggcctctgacacttgtctgtagtgtggtcttgggcaattcatctaacctctctatgccttgatttccacttgtataaaatgagaagtacaatcataataataaaatatgccagcagtatactgtattactatccacctgaggtaggagtatgtattttcaccccactgtctttggacctggccatgtgatgtgttttgcccagtggaatgtaacatttgccactccttttattatgagaacagcatgctcctaaggaggctgctctttcagcctgcattctagaacaaagaggacacaggaagcagagatgcagctgatctacagcttacataaaacctgaatgataaataaactttgtcattgtaagccactgagatttgcgagttgttcctgctgcaaagccaagtaatatactgcgctacccacctcacatatttgtctgaagtggactttaaaaatgttttaaagcactttataatgttctatgcccgtctatgtctcaaaccagctccttctctcgccatagattgatgcaggtcagaaaagttaacagcactaacttatgtgagacagtaaagtgagaatacctgctttcaaagctgcacctctctctcctgcctttctgccattggcccccaaattcgttgctactgccccgttaggattatactcagttcctatcccatctcctcataaaacaaaataatcgcacgggttttgttatttgtgatgtgaactttcataaaaatattgaaatggtaccgctttttctgctagtgctggccccagttcttctgagaaaatgctcagaactgccggcttctgtttcttctccatattttggttaaattttacttgaatccttcatttagtcagttttgccagaacgtctctgtggaatcctatttaaattcaaagcactctatgaaaaaatttcaaaaggatcgctttaaaaaaaaaaaaaaagacatttcaatttaactagcagtaagtaactcttgttgactaaactcattaaagaagcaaccactgagatcacacagaaaaacctcaagaggtggcaccccgactcgcattaacccagggagacatgatggctaaggaagtagatgggacaatgactgggcccgaaaacaagaaaatctttgttataaaagcctcccatttctgcacgattaagttgaaagaaggtgagcttcgagttaagcctaggcagttttgaattccagctcgcccacaatctcttgcaaccttaggccgcttacctgagactcagcctttcttacccaacaaatcagggaaaataatagctaccttacaagactagcaagtttgtcttaaatggagtgagatgagtggaacacctaacagaggtctcagacaataacagcttctccaaaaattctcgatttgtggttggctgaggtggaggaacaaaatggcggcgccggcggcgtgaccgggccctctggcccacagccgttggtagcggtggcagcagtactgctgccccaactcgctgtgccccctttctcagcccacgacatcgccacgacagcgaggcagcgaccgccaccgagaaagaggtggtggcccagcctggaacctt

SEQ ID NO: 11200 - DNA, 2300 bp, Homo sapien
aatccctaatgcaacagtgttaagagttagggcctactgagaaacaattatgtcaggaggccagaatgaatggattaaggccattattgcaagagtgagtttgttataaaaagggggagttcaatctcttttggctttctctcttgccctatctttgcctttgcaccatgagatgatacagcaagaaagtcttcgcaaaatgccaacacctttttattgaacttcccagcttccagaactgtgaagcaatacatttttttcattataaattactcagcctgtggtcttctgttatagttgcaaaaaacagactaagacagattattaccaaaaaaatctgtttttcttcagaaatggaatatggtagagatgcattatttatactgcagtaacttatgatgtgccattgcattgtaaactcttagcgggttctttttctttattctgtattaaagccagacacttcctcaattggtattggctttcttgatatagtttctagactttttgctttttgtctttctcatgtgtgtattatgaaaacatcgatggctatcgatatagtctttcacatcttctcaaggtttggcttaagtatactagttcatatcctctgaaacttgaaagtggttaatttgtaaccctgtacagatagtatcaactaatgtttagattgtcttgatcccaaagcaaagatctcagaatggaatggctttttttaaaatggttcatttaatttgtggatgttcaaaagcaatatggttattttttcagataactgaaaaagggattcaaacctgtctacatgttgtccttgcatactgaaaaaaaaaaacaaaccacggttagaaaacactttgcagaacttacccaatagttatttatagggagatcaatgtgctattttctaatgcattttcttctgctttttgtttttcactcttttttcttgctcttttagtaccaatgaaacagaaaactggatttagtctcgactttttaatataattattccaattgtccattttacttcattaagtgtcacagataaagatgtagtataattttgatcaaaaaaataggatttaaaaaaaccagggtgtttgaataacttagtttaaaagtgcttgtgtttgcctaaatattccaaatgaagatcttacatgtctcaaataagcctgaccataaataatgttaaaaaataaatatcaaacatataaaaggagaaataaaagcaaatcacaatccaaaacaagtatttcaaaaatacgtatctagccagaggaaattgttttaggaaaattattttatgaatttaattttaataatttcaattttccttaatttccttccagtaatgagaaaactattttccatatggttactatttttttttatattcaattacattcttgggggaaagcttcatttgttgtcatttgtggaataatgcaatctcatcatggcggcagttgagagttctgtgatttggatctgactcattatgacacatctgttttaaagagtatcaaacatgatatccctcaattcatttctcattatgtctgagcttggcttaggaataggctcagatccgagtatgtgatgtgagtatgggctgagattcaggaaggcttagatatggaaggggactgagagaaggacagagttgggtaaataaatgaggtggcctcaagctgagatgtggattacagacgaattcattgatgcatttcaaaagtggaaaggcaggagaaaatgaaattcaatttgcttcattttaaaaatcgtagctctagaattatattattcaaaagatgttaaaaattctaaatattttactgtggttttattctgtttttctataaaaagatggtatgttctctcaaaaaccaactatttagtaagcatagcattatgacaaataattctgaaaatgacaatcaagtaatcaagttctgtaagttcatgacctataaacaaatcagaatgagaagtttaaatatactccttgttttcccttgcccttaaatggtaatctgagtttgaggaataacttctgaatgtatttatagcaggcagatggttctgttgcctactgttagtttggaaagaatagaagaaggtatagataggtgactggagaaggaaaacactttactaagccgacatgaatagaatgcagatttttttaagccaaatcagttttgaaaatgtatatataaaattgtgcaaaagaatttctctagttttttcctgtattatttaatggttgaaggctgtagacttttttttttttt

SEQ ID NO: 11201 - DNA, 2300 bp, Homo sapien
tacactgaaaatacataggtaaaaacttatttcctagctaattagttatctatattagtatttattcttgagacttaaaattgagttattctttgaaatctatccttgtttttttcttgaaaaaaatactataattataattatttaatcgactttctatagtgatgaagacaattcggtattttaagaagaaattaaatcagaaagttttgttgaaaaaatgttccttgatcattgtaataaaacatgacacaatgatctttgataatacaattgattttaaaatcaaatcttgtcctgtttttaaaaatcagattccctaaaattttgcactataattgtgcacagcttctttacctgaaattatttacatgtgccaatgttcttattttcaaagattcttctcctttgaagcttctttattcaacttatttatctcctcaatctttgtcagtaggattctatcctactaatctttattcagttaagatcatactggcgggtcatctctacatggcttcttcttataaagggaacatggatgaaaaatggagttgtgtcacctactcattaataacttgagttcagaaattacactcctgtgtagcataatgaaggaaacaaatatttatcttagtagtaatttacaatggtccagcttccaggattgctactggcatttccttcttactatttgaacaattacagatttattgatgacttttaaattcttactaaatgaattaaactccaggacacaattttaaggtgtctcttataaaagatacataacagcattttggaattaagaataaatcagctaaaattcaattcaacaaatagttattgagcagctattctgctgggtactttctgaggtgttgggagtaaataggaaaacaattttgagaaaatctcttcttttatagagcttaactataaaggatgtttccaaaatttcagtttggcttttctaaagaaatattgatttagatattttattaacgcatttttggttcttaaattccttaggcgtcctttcttttgaagttaccgcaccttaaaaacctggctttatgttttgtgctcaatatcccttggccttatatatcaaatattatggcatgaaatacttatggtttcaaaaaactttacttttattttcattattttggattgttctaggctggtttcgttttggtaatcatgtacattgacaatttctgaacaagcaaaaaaaaatgctctcaaagataagcaagcaacagttgcattccactattgaaggctattacagtatgagttaaatgtactgaacttatttttcttactcctctgtgaaacagtcttaattaactaatgtagtaagcagctttctaaccttcaaaatgattttctgtggtagcaaaatcattttgcaagtcaaatgcaacactagtttatcttttgcatttgaaggactgtttaactattaactggttaattgtgtatcattcccatacagaaggtaagtactcaaattattttcctcataaaacctgacattcagcatcttaaaggtaggtatacatttggtactttcttatgttcactcctatacccactagatcaaaaatataaggtactgagtgattttaaaacttaaatgaaaaattttaataaggaaaaagtaatagacaatatcagtatgataaagtgggatctacaccagttatcagagaaacacaaatgtgtacatactgcatgatctgcaaagtgtagccacatataatattttgcataatcatactttataactacgaataaacagatggatttatccatctgtttaaaagctaaagcagatgaaagtaattttagtagcacacaaacagactaaatcatttgttctcataactcttgtctaatttgaagacaatgggaaatatttaaaagtgatttcatagagcctgaaaccactttgacatttgagttgagtcacaccgaatgttgaaataaatgtcctattccggtaaatttaaaggactgttttaacatgataatttgtctcctaaaataatgtcccaggacccacactaacaaaagtcaaaattgaaggtgaacctgaattcagactgattaaagaaggtgaaacaataactgaagtgatccatggaggtgcgttccttatgttacctggggccgactaccttcgctgtgattattttgaaatagtgttggtttagaaatattgaacatctgatattttctcttagttcttattttataaaaattgtgggaattatttcctcagctatgag

SEQ ID NO: 11202 - DNA, 2300 bp, Homo sapien
tcttaaactgtgaactgttatgttgttgggctagatgttcacttatgtggtttctattaaagaccatgtaatcaggggacaaagaagaaaacagttataatttagaaaataaatagatttttttctcccagtaagttgggttctattttgattaggctaattgaaataactatgttttgaaatagcatcgatatctacttgagagaataatgatattatgagaaagtacaatatggaaaaagataaagactaataagtgttttgtttcttagtccttatcaaaaagtcatattattcaataaaaataaacatatattttcccctaggggacaaaaatgctcttcaaaacatcattctttatcacctgacaccaggagttttcattggaaaaggatttgaacctggtgttactaacattttaaagaccacacaaggaagcaaaatctttctgaaagaagtaagttgtctagaatgaatttatgatagtgttcatccatcattaagttatctaaatattcatccttaatgaaatttcctcattgaaattgcctcctattttgataggtaaatgatacacttctggtgaatgaattgaaatcaaaagaatctgacatcatgacaacaaatggtgtaattcatgttgtagataaactcctctatccagcaggtttgtaattattgaactcattgataggctaagtctttttttaatatgaacctcgatttttattttatgctttcttaccaatattcatttaatatttctcttcatagacacacctgttggaaatgatcaactgctggaaatacttaataaattaatcaaatacatccaaattaaggtactaaaagttacttgatttatttctttttttttttttttttttgagatggagtctcgctttgtcgcccaggctgtagtgcagtggcatgatctcagctcactgcaagctccgcctcccatgttcactccattctcctgcctcagcctcccgagtagctgggactacaggcgcccaccaccacacccagctaattttttttgtatttttaggagagatggggtttcactgtgttcgccaggatggtctcgatctcctgacctcgtgatccacccgcctcagcctcctaaagtgccaggattacaggcgtgagccaccgcgcctagcctaaaagttacttgatttatttctaatatgtagaacatatattacaggtttaacataacaggctagaaatgtacgcattaataagtaagtatgtactgggcttggattactctttgttgtttatgtaccactgacccacctgtaaagaaatggcatcatttcttcatggttttgttcaacaaatatctattaaaagctactcaggaccaagtattgtgtaaagtgttatgaaaaatatgtatttaaattggacatgtctttattcaaaaagtttacagtccaatttagaaaaataaaatggtacataaatgactaaaatcgttgtatcattcaatactttcactgcagaatataaaggaaagaacattcacttataaaaaattgtcactcatcacagattaaagggaacggaatatttttcttctttttcaatgtagggtaaaagtagcaggaaacataaaattgtgtttcataaatatatttaactttggattaattattatataatttttaaatctctgagtaatgaatccaatgatttttatgccctctgacctgatagcattgaattggaagatgatttatatgaggacttcacttctattaagtgtaataatagcttcactatttttactttaataagaattaaagtggtgccatggttttgttaacacaactatcacctttcatgttactaaatataaacatttattttcagtttgttcgtggtagcaccttcaaagaaatccccgtgactgtctatagtaagtatataataaatattggccacctgggtggcaaggtatgaaaaaagaaaacaatacatttctttgtatttacagagattattgataatctggtatttagaattccaaactatggccaatctcatttcacttgaaaaaaggattgaggtctcagataaccttcaactccaatgaacttcttccccactcattggaaaaacagaaatgatatgacatgagaaagacagcaaaatataatattagcgtggcaaagagccaggaaaataaaaagacatataaagggaagagatggcgaaaagaccctctagaaatatctaaaaattcagatgtgtggacacagaaatgaccttagccaagacttgtt

SEQ ID NO: 11203 - DNA, 2300 bp, Homo sapien
ggttgcaaagaacgactaggttaaaattgttcttgaaaataatcaataaaattttaattcgttccaggcaatattaagaaagcaggcaacatggcaggaaattttgattcttccttcactccttgtattcacaatcaggtctatcagttatcattccggactgtatttaaaaatatatatttttttacccttgatacttattacacaagtctatatctctttctctgagtacctcatccttcacctccagtcaaaccctattggatttgagcagatatcagcttcattacaaaaaggtctgtaagtagttacatcagtctaaagatgaaaagtgtggcattagtagcagtgtaatctatattataatgtctaactggtctagagttgaagacttttatatatccatttaaccaggaatgtcctaacagctaatttaataatattgatagtttatccgtcctaatcaataagcagttactgaccacctgccatttgcacaacataagagtaatagaaagctataatataaagcaaaagatgacttcataaagtcagaatgattccattcagagaaatgtaaatgatagactaaactcttccttccacaaaggaccagggtcagaatataatttaacttttatgctatctcctctccagctcttcttttgaattgccccttcattttctataacttaatcccaagattttcatattgaaatggcctctcgatcatatttcagcatttgtggtttcactgtgtgctttcttaataaactaagcagcaagttgtagaatattttaatatcccatagtgagtttaagcataactcaggatactcagaatcctctctagttcagtccagttcccctaaagccttcccaatagaacaacaaggagaattctgacaaaatctctctacctcaccagtgggaaaagaacatggatatgacattacagagggagcatcttgtagcaaaatggattggaattacactttaggatggtgtgcagcttgtttattcaaggaagctgattgtggttaccatttcagctcattgtttccctctgatattcagatttcttttatccaaagttttctgaacatttgacatatgcatggagtagtaagaacgcacattcctttggctagggattgcatagtgtaacattgaaaggctttagttattcttgataaaatcagaagaatcattttggcaatgtccatgtttcctaatatgtatttaattgttctagttatctctagattcgtaacacttgcttccaatattggctgcttttcaccagtggttatcagtagatgtgctgcatagacatgttcaacatcacataaagtgtgtcatgaaaaacaataaagcacaaatgtttttcctttctgcttcatttcaaaccttagagaaatttgtcagagtagatttatgttaactctatatgttccttgatatttgaaaaagaaaggaaatgagaggtagctctcctttttgtacgatagcaaggaaaatatggactctcctacatggttcttcagcaagttagaattcttatttcatatcttacacaagttttaaatctatccagagtttgtttttaatcaacagcctttacccccttgtgattgtcagactcgcatctacctttgttttctggtaaaaataataataataataatctttcagttctgatgtgaactgcaataacacctaacaataatcttgagcacacagacattatacattctactctggaaaggattgcagaatatctcttaaaactcaacaaaagaatttttcttaaaaaccctctaagatacaaaggaataaaactgagacttaaacatgcagtgagtcaattgttcatatgattaaaaataagtaccttctttataatgaaaaggaaaagtagctcaatgtgttccttaaatataactaaccaaaacaaatcttagctggcaatttgaagttgccgatgcttcctggaaagagttcagactctcaggttgatgcagtgttccctcccacaactctgacatgtatataaattctgagctctccaaagcccactgccagttctcttcggggactaactgcaacggagagactcaagatgattccctttttacccatgttttctctactattgctgcttattgttaaccctataaacgccaacaatcattatgacaagatcttggctcatagtcgtatcaggggtcgggaccaagggtaagtgagtggtttggttttataaaccatttttctttttcctcagcttgttagatgtt

SEQ ID NO: 11204 - DNA, 2300 bp, Homo sapien
gaattttgtttttcaggctaagaagaaacattgtcaataaatgtcacaaaaatacttacagttccattaaataaaatagatttccatatatatgtttacagtctcccctcccttgttagaaagtggacttgaatttattataaagttattaccttgtctactgatagatacattttgcatatttttaaaagccttcatttaatgttaagaaaagtaaagaactgtttaaacatgtcaatatattcttcttgtagtaaagagtaaaaagagattcaaggaaggagaaaagccttttgtcgttctctcctttgtttactgcagtagcattgtagaaaccaggtttatctcaatgtatcttagtattttgggaaggacttagtatctcagaaatttagaataggggtctagctgagctgggaacaaacccatagaggagcagttaggcagggagaaagataaattaacaaataagaaaagtgacttaaaaaaaaaaagcagcatgcacagttaccccagcgtgatctctggtaatatcctctttactcatgtgaaaactatttacaaaaacctcaactcatgtgaactctgaagtgggtaggaaagataaaaaaggaaattctttaattttgtgctttagagtctgaatatggatgccagtttgtcagtttatattccttgggaatattccatgggaagaaactggtccgccttgcagtcggcacagcacagcttcccaggtgtaacaacttggttgggataggagaaaacggttgctcctaagcttttgcgcagactggaagctgaatcaggcgtctgctgggatacaatcagagaccagcagctaacctcagggctttcagaaaataacggcaatcaggtagaaacagagtctcgaggagggtaattgccagctaggattcctcaagggctccactctctatcttacacgtgaactctatctttctctgggtcatggggtcacaaccaattaagactttccgagtgacaagctgggaatcaccgtgttgcagttacagcaagtgttattgccaactttgccaatagtgtgtgtgtggtttgtgtgtgtgtgtattcctctctgtactttaatcttattttcatatgtgaacactaaagagattggacaagagataacgtttatcttgaaatctcactctcagtaagatggtaccagtatcgcacacacacacactcgcacacacgcacatcacctgcagccgcagaaccttgcacccttgggctggctcgcgtcttagggttttggtatatttggtggaaacttgctgatttcctatgccttttggaaagaccaagctggatgagggtggttggaacgctgtggctcatcatttattcattgcgactgttttgattgttgacactagtggcaagccgcatcctccagctcttgcaagggaagtctgacaccttgaggacaggagagggggtgccagtcgcccagagaagcgggagtgggagaagctttgagagttgcaggggactacttttttccggtcgggcggcgggcctcatgggtgcttgtttaccgggctgggagcagggcattcaaaagctgggtgtcggagcgcactgaagtccaacacgcctgcagagaccgccctaagcctggaggtgtgtctggcttgcatccagaaccacagggtggattctcgccaccgacttggctggatgacggctggctggtggtgagctcccctgcccactggctgacctcaagcagttggccccggtaggtggaggctattcgagggggacaagctggggacgcagcgtcagctcctgccagcgcgcgggtctcctccacctccaagcagtgtggtgcgtgggacgcgcatcttcccggactatccctttccagcgcggtctgtgcggaccccgagcccggcagccaccagggacggagggcggggtgcctttctctgggctcatccgctgtcagccgtgggaactcttaactttatccagagggatctgtgcaggcgggggtgggagaggttctcctcccctggcggttacctccccctcccgggccgcccctcccccgcctcccatggcttcgctttcagagcatcctcactccgcccagttcggtgccagctgcgtgggctccagcttcgatcgttttccttggaatgctccaaaactcagcagcgactaagggaattccattggaatttgccgggcgtgctctcaccccgcacggcacccgcgccgtcagtcctcggatcccatcacttcagcccgaagattgcaacttt

SEQ ID NO: 11205 - DNA, 2300 bp, Homo sapien
gagtgcaggttcgtagaatgctgccaaactcatatgtttaaattgttaaaaataaactctttggattgctaatgactgtagtatatgcaattcaccagattgtttaaacagatttcaaataattttcctgtaattgctaatcattttgtaggagacctgagaccagcaatcaataatcacatgaaactgttgaaaaggaggctcagtgatcaatacaaattcttctttccgtgggaatacagcctgctcagatggttgacatatatagtgctctccttggtgttctcttctgttatgtatttattgcagtttcataggcacctttttatggaaagaaataacaaattagaaaaaattggtataatatctctttgctgacatcatgacagagataacatttgctacaaagaacaaatccttagagggcaggagcatctaacttggtacagatgctaaggttgcaaagtaaagttcatcacttctaaacaatggacaagtttgtcactgatcagcttttctcttgcatgtattttaatatgcattataaagacctatactcatttcagtatgtggaattctatctaccacgggttgatctcaaagatataaactcaaacacagtatgtagaattttgtttttcaggctaagaagaaacattgtcaataaatgtcacaaaaatacttacagttccattaaataaaatagatttccatatatatgtttacagtctcccctcccttgttagaaagtggacttgaatttattataaagttattaccttgtctactgatagatacattttgcatatttttaaaagccttcatttaatgttaagaaaagtaaagaactgtttaaacatgtcaatatattcttcttgtagtaaagagtaaaaagagattcaaggaaggagaaaagccttttgtcgttctctcctttgtttactgcagtagcattgtagaaaccaggtttatctcaatgtatcttagtattttgggaaggacttagtatctcagaaatttagaataggggtctagctgagctgggaacaaacccatagaggagcagttaggcagggagaaagataaattaacaaataagaaaagtgacttaaaaaaaaaaagcagcatgcacagttaccccagcgtgatctctggtaatatcctctttactcatgtgaaaactatttacaaaaacctcaactcatgtgaactctgaagtgggtaggaaagataaaaaaggaaattctttaattttgtgctttagagtctgaatatggatgccagtttgtcagtttatattccttgggaatattccatgggaagaaactggtccgccttgcagtcggcacagcacagcttcccaggtgtaacaacttggttgggataggagaaaacggttgctcctaagcttttgcgcagactggaagctgaatcaggcgtctgctgggatacaatcagagaccagcagctaacctcagggctttcagaaaataacggcaatcaggtagaaacagagtctcgaggagggtaattgccagctaggattcctcaagggctccactctctatcttacacgtgaactctatctttctctgggtcatggggtcacaaccaattaagactttccgagtgacaagctgggaatcaccgtgttgcagttacagcaagtgttattgccaactttgccaatagtgtgtgtgtggtttgtgtgtgtgtgtattcctctctgtactttaatcttattttcatatgtgaacactaaagagattggacaagagataacgtttatcttgaaatctcactctcagtaagatggtaccagtatcgcacacacacacactcgcacacacgcacatcacctgcagccgcagaaccttgcacccttgggctggctcgcgtcttagggttttggtatatttggtggaaacttgctgatttcctatgccttttggaaagaccaagctggatgagggtggttggaacgctgtggctcatcatttattcattgcgactgttttgattgttgacactagtggcaagccgcatcctccagctcttgcaagggaagtctgacaccttgaggacaggagagggggtgccagtcgcccagagaagcgggagtgggagaagctttgagagttgcaggggactacttttttccggtcgggcggcgggcctcatgggtgcttgtttaccgggctgggagcagggcattcaaaagctgggtgtcggagcgcactgaagtccaacacgcctgcagagaccgccctaagcctggaggtgtgtctggcttgcatcca

SEQ ID NO: 11206 - DNA, 2300 bp, Homo sapien
cttatattagtgtaagagaatcttgagtctgtcatagaacactaataaagatttatttaagttctattttattccctaaattatcattgtttgctataggttgagtaacttggtcacacgctttcatgctgagaattttttccacctcttagttaatatcaaaacggtaatcccatggatagctgtgttttgttttgccctttttctcctgctcttccttgcctctgcatgaagaagaaggtacatataccccaagctctaagcatgagggtaggggataacagccagcagtcacaccccataccaccactagtgccacagaggaggaccctattctaggacaccaaaacccactctgaaagatttatctacttccaaaagaccactgcatttttgtagaagattttctctacttttggctgaaatcaaaagttgatatatgtaatgtgtatttgttgatttgaggagtggtttgaaggatgtgacagacagtagttcaatcagtcacttccattactaccttactcccaaaactcactctttaaataaatcttctgaatctaaggacaagactgggaaaaatgaccccaacctccccacaagacctctctccttatgatatctgtgactttctccaccacagtaatccataaatcataccacagtagacttctgtcatcctgaaatttatcacaatctttagtttgttcatgtcttctgtgcccattcacattaaaaaataaaaacacacaatcttgtacttagctgacacttgaatgattattggggagacatggaaaataaaaactgttgttttcctacagtattggaaaggaactcatggtataggtaactttattggctgcacatcaagctgtgagaacagattattgaattcataggttatacaattttgcatggtcatgcaagaccattataaactcacaattctattccttactcaaatatcaagcccacgtcaatccagtcctggttatatctgctccttatagcatgattccatctccttatgcaactttcttcctcaaattttccatgtatttatataggtatccattcattcatttatgtgccatacatgtattgaactgctcacatgcacctgtttttctgttggacattattgagttatccatgaataaggcacatccctgataaactaacattaacatgcagcaaaactggcatggagaatgattattatatagagcatgacaaatgctctaataaagttatgaacatagtgcagtgggagatgattacccttcactggctattgttcttgtgtaaataaggccacattactgagggctttagtaatattttattatttaaatgttttcatgttcttaaaatgtctgctagtggaagagttttattttagaaacaaatctgctctgatcatttaaaagaaaaaatagagcaggcagtgtgatccagtggaacaagctctgaagagtagagttccatcatgtcactaacttactacattgctgagaataaatcattttactacttttggcttcagttgcttcatctgtaaaataaggactttctctaagtaatctctaatgatcttttctggattagtaatttaggggtggttgtaccttcagccacctgtacagtatctgccctcccagatgcccaggtgaaaatacttattcccagctccaaaaagatggatgtgggatctggaatccctaggaaagggcagttttggagtacccttaggctgagcttcctgacttcatagatgtctttcttcagccagaaatagttacaggaattgccacatgcattcttccatctggagaccaggacactggaggcagcagcttgcagcacaaggagaatggagaaggtcctgagatgcccacactcaggccctgacactgaagcaggatgtttctctgactcattcacgggattcgtgacaggtgtgcctcctttaccaagcccattgctctcaactcctcacaggagggagcacacaagcaaacaagacgggaactggagtacaggggcgctggaaccagccagcgaactccctgcaggccccgcggcactttcgggggcgggggatggtgcctgcgatccccaaaaccccaaagggcgttttttacagtgctcttttagctctgctgaccgcggatggcttaagtgttaacagctcagtgggccctttgccttttctcatgagtcggctgccctgtgccagcaagggcaaagggccagtgtaacagccttttgtatctgcactcgtggctcctgagctc

SEQ ID NO: 11207 - DNA, 2300 bp, Homo sapien
aaaacacattaggccatttatgctatttgttgtcttaaaatgttccattgccaattatctccaaaaatttgctccagagtttgcttctgattacagccattaaacgtacttcaacattttaacttttcagtaaaagagaaggtccttgttttgctataaaattttccaattgcaaatcccttcacaaagttaaaaaaattgattataaataaatccatttataatttctttcttgtcctaagcaaaataaaactcaggaggctgcagaaatcatgctgtgactctgaggagacaaacatgagaagcagagttggggactgaggtgaaaaagaattctaaatatttagaaacagctgctttttaatatctcaagagatgttattttgatatattatacaaatgtattttctgaagcagcagaatctgagtactaaagtcacactgtgggactgaattctgttttcaccactttttatacatacaataaaagctctctgattaatatccatttttctctttaggattttgccacgttttgattcatgagcagaaaccaaactataaatagcaggatgcaaattttgtttcaaaatatattatatgtagtcttatagactgtaaatatgtacactcatctctttcattattatttggctagctgacaataggtagacacaatcacagttttatccttattactattctcacaagttttagtcacacccactaattgaatagtttcagctattaaggctgtaactgttgatccctgtatctgtcaatcaatatttggcttcatctacatatatggtaagaccattattttaaaaagtgaggatggctgtcatgagaatgttggagtcttacttgcctactcagaaccagaactctctccactgggaaatgtcaccatagaagatcagttggctgcaaaattattgtaaagatgaatttgatctccattatccctactacagttccttcctggttcctctcttaagtatctctccttaagaatctgatgcatattctaaagatcaactagattgccccattattttaatgcctacctgcttcctcctttgtctattcatgctaatgttttaaaagggcatttcagtcattgtgagacagacgcatattttccaaacacagaggtttagatctgtaataaagtttagaggacaattttcttccgtcatcactacacaggatgttagatcctagagagttgacgcctacctgccttactcatcttggattccccagagtttagcttagcgccgggcaaatagaaagggttcaaagttggttgttaaattgaataaatgtggtcagtgattagcaactcagcgcactggtttaattagaccatataacaaattactgaaatctcctgttcatagatgtgtcttcccaactagacgccacgttccccaaacgtagaaacctcattttttctcacccaccccagcgggagtcttggcatagataattcgtacttgatagctctcttacttaaccgaaattcaatagttataaatcagtatcggaaagtaaagcgtgaaggagaaactatgagaaatgtaaaggatataacaggattggtttgctggaaagacggaagaaaactaatgataaagcagtgttacaattcctgcttctggagcaccaattaagcttttccgcgctcaggttgccttagaaactttagagcgcgtccgccccagccccgcccccggcctcgccccgagcttcgccccaagtccatctcgctcttcatccgactaccccatacccttacttccgccccaacctgccaactggaacctagggtcctacgctctatgcccacgcttattctgcctgactaaaaatatggtagcaaattaccaaagttagaaagatatcttataaatataatccatacttttttcttagatatataaacgcaaaagcacaagatatttgtaatttaaaagcgccatctagcatgagctcttagggccaattttcaggcagtgcgttggatagcaacaacttcggaggtccccagattgcagagggagacgtggacgtgagtggagcggggcggtccccagcacactagaggaagtcgtgctacccccgcggagttgtcgtgtgttctggattcattccggcaccaccatgtaagtgtttgcttaccgactgccataattcctggtccagctgcccgaccctgactctctcccgctcttttcctcaggtcgaaggtttcctttaagatcacgctgacgtcggacccacggctgccgtac

SEQ ID NO: 11208 - DNA, 2300 bp, Homo sapien
ttgaaagtaagtaaatattatttagataaatattgtttcttatcaaaatttcacttatttttaaaaaatctattgataatcatatcccaaatcattttttactgcagttattgccaaatggtgatattctaagttcataattctttctacatttattgcttatgttttactataatgtagagcaatcccttctctccaatttctttgactcattcattcattcatttatatatttatatcagcattgactcatggattcttattttactccatgggttatattttattattatcattatttatttgctgtcctaattgtcccaagtttggacagtaagagccccttcaagatggctcctctgctcttttgacatatccatatattctttgattccttcttttcattgtgatactgcaaaatgttccagtcccatcttacactttccctgctctggaatcacgcattttccctggagtcttggctttatttagtggagtatttagtatccaagatctgggtgccaagtgtgtttcttgctactaggcttccagaccttctcagcaggaagaactaggaacacacacacacacacacacacacacacacacacacacacacacacaggcacgtgtaggcccatgtaatctgcatctctgtctgtacccatccatccgtgtttaaaaaccaagagtttacagtttccaactcaacattcaggatttattttcaccttcctcctttctatatttgtatttccccaagtagtaagaattcaaggtcctgtaattatcaatatattcacttaatttttatatcctgcatataaccatttaaccacatgggtcttttccttcccctcaacccaagctgcagttcctctggttataggttattctaacatgattaaagcccctctttcctagtatacactctcatattaaagggaacagtaaaatagtttattcttttgttcagaataatatccaggggtataatgtatgttacccatgcagggtcagctgtctaattttgccaggcccagtgcaaaatggaaatacaggaccccagcagggacagggaagtcaatctctccttcctatttgctgtcatcccaacccacagctgacagggtgaccatgcaagaaatggcaaacctctgcactggcatacacttagtacctggatcagttgtgaatgatacgtttgcccccaggaaacatgctgtggcactgccaacccaggcttgggatgacgagcaccatgctccttctccagactctgcagggaacacacagagaccttgacttttcccatgacccttgtctgggcccccagcaaggtggaggtcaagaggatgcagggcgttctcaacagatgtgacctggttactgccctagatataggggtcagcgatcaaagagtgggatcaagaaagggagtcagggcatgtcccaaggccacagaggatggaggttaggctgcctggagctcctcccatggagtcacggaggtggttggaggcagcatcatgtgtgggctgaggtgcctagtccccggcacatgctccactgacccattggacttcacttacaaaacataaactcaaagataacactattaaacgtttcaagacagcaaccagagagcattcaactccaaatgttcaagtgcaaggacttctaaagtggggtcttgtgcaattgcactggacacgtccatgaagtcagccctgtacttattatacagtgactatgttaagggcactcctctttgtccaagcccctggagacagaatggtggtggcagtatggtccgtggggacttcaagaaggagtgagtggaaacaaagggaagtggaaccctgtggcatgagcaatggggtagttggacaagaggtattaccattcaagaactccctgagagaaaataccaggtcctgctatcatgcggcggaactcagagtgccaggctttgtagtatttatgcaaatgtgactggaattgtaatcaaaggatgttcaaactgaaagggtggcaacacttgtacctcaatctttcctgctggtctattagctcaacagcaattgacacctgcaaagtttgtcttttgtttcagaaatccctgctatgtgcttgtcacaggagaggcactcaacaaatgtcagctgaatgtatcaatagaacccacacaagttcaaacatcacattcaaggtaattcggtctagttaatattctacttggttgaactcttagtattatgaaaatattttttcttccttgctaaattatggagctcagt

SEQ ID NO: 11209 - DNA, 2300 bp, Homo sapien
aaataatgcattgctgatgaaagaaaacaaaacagaaaagtgagcagtagctatcagaggcaaactaacagattttgctggtgatgccactggggatagatgggtcagtgagcagcatgtgttctggaacctcagagagaatgattcctttcatcagcatcttggcagtgaattgtagtggatccaagaggtgctgacaaccaactctgtgtgcacaaggaaccagagagctgtcaggaagtctacagcattcaacaagatatgcagccctgcaattcctggttctgtgcccttttttctcttgccattaaatgaatcatgttttacctgctactgtaaaagaaaaatatgatgcaatatttatgttagttattgttctgagatctgtaagacagaaatatttttaataaaatctttttcatcttcactttaagattaaaataacagtcattgatatattcctatatataaatacatattcaaatgactcttatataagcactacgaaggcaagagtttttgtctgttttgttctctgatacagccccagcacatggaatagagcctggcatggaataagtactcaatgaatatttgtggttgaatggatcttatttagttcagtttcatttctagtttgaagaacaaaaggaatttttcaaaagtataatttttaactaaatgcaaaatcttccaaataacttattttcaagatttaaaaaatctatcacaagactttatttttccctcttttatttatttatttatgcatttatgtatttttaatttttgaggcaggctctcactcacccaggctggagcacagtggcataatcacaactcactacagtcttgacctcctagggctcaggtgatccacctcagcctccccagtagcaaggactacaggcatgcgccaccacacccagctaatttttgtcttttttgtagagatggggtttcaccatgtttcccaggatggtctggaactcctgggctcaagtgatccacccacctcgcccttccaaactgctgggatgataaacctgagccaccatgcccagccttatttttccaactcttttacatctgtctgtcttacccacttctctgaaaatgctcaggtttagagaaatatatttgaaaattattctattaacttgactcattaagaggttctggttctgtatttaaggatatagaagtccaagtaccattgccgttttataatttttctatgacattgaatgttttcactgcttttggataatgtaccctatggtttgagtacctggcatggtaataatggagatcatcttgcgatgtagttagagacccagagatccttcaaccttcccagctaactgaaattgaccttgaatgaactaccagagtaagccaagcatactgctcataataaccatatatatttagctctccaattctgtttatttaatttcatggaattctggggtgttccagaaagaaaaattttgcagtgaccatgttgaaaaacactgaattacattttttaaaggatcttagttccattaagtgcttagagaatactatcactttttattattccacttggccatttatgacttagattgtgagtcagagaattctttcatggaggagtttcttattggcttatattttatagttagagaatgtttcttattttttttataatatccaggaacacatgcaaaagtaaatgtgaagagttttaagattgtataacttgtaggagtaaggatattgaacaatgtgaatatacatttacttggtcttgtttgacaagaagttctaatccaaatgtagcttaaagcatatatagcaaaaccataattgaggcaaaagcagaacagaatcacaaactacccaacacctacagtgaaacactttcatcatcagacccattcccaattttccatttcatgaggtcaaagcaggatcaactttgcttttcaggataaaatgacatgcaaaaagttaacaaggaaaatcttaataatccaagcgaaaatgaaactaagaaaatgatattatgtttttgtgaaggtattggcacaagagacagaactgcagaaaaagacaaagacttcaagggcaaagcacagaaacaagtgcagttcaacccaggccagaccagggccacatggcgagtgcggatcctgagtgatggggagcatgagcagtctgaaacctttcaggtggtactctcagagcccgtgctggctgccttggaattccccacagtcgccactgttgagatcgttgatccaggagatggt

SEQ ID NO: 11210 - DNA, 2300 bp, Homo sapien
aaaaccaaaggtcttccaatagtcctgaagggctcatgtgacctgcccaccacccaccccttcaccacctctctagccctcatatcttaggctctccttcttgtccaatttgcttcaagcacactggcctcctggctattccttgtacacacttggcacaacctgccccaaggcctttttcacttgtccatccatttacctggaattctcttaagttgttcatatgggacattttattactaccttccaatctcagctcaaatgagattctaattctaccagagactttttttttcgactttcctgtgtatcttaggcccctctactcacaccctgtccagccacagctttccctgtcaccctcagcatattttattttatccatatgtccctaatatactacttattttcttgtatacatattttcttcctcctccccacccctcaactataataaaaaccctatgaggccaaggattttgttacttctgtatcccctgcacagtatctggcaagtcgatgtcacccaatccatatttgataaataaataattagttacaaaatcttatattcacagatttcttaaaatgggggctttttaaaaattagtatgtcagtcataactccaggagaaaacaaatagcacactgaaaatgagtaatttaaaaagaattgaatcacgtgactattttagaaaggagggggcaaagatctgttaatacctaggcatggtaaaatgcttcgaggctaatgagagcagccccatcaccacctctaggcacaggacaggagaggctagctgagcccagagagtgagctaggccctaggccttccacaggcactctaaccttttgtggagggtgtgcagccagctctggaaaccctgagggaaaccaagggaataaacgcctggcccactctgcttttgccctccaagttccttcctgtattccccattggccgacccaaccaggagccagaatgtaagggaaacattaggcgtggttcccatttgtcagctcctggggcacagcgcagggtgaagcagggtggagcatggacctccaaggctgtatctgctgttccagcagtcttttataatttttaagtcataaggttaactgttttaaaaataatcatgaagtgttttctgtgtgggtgtgagactgtctgtgaaacaaactcccagtcaaatcccagagtatctgtttggggtttacaatgtcaaaccattgtactaaatggttgttattgttttacatgataactgcatttttttttaacaatttacttttgccatttttattatttaacatgccctttgactgtgttaaaaaagaatcattggtaatattgtatatgttattctgtcaggagtgaaagggagccacggaaatattccttatagctgataaatagatttatcaattctaagggaacagctattttttaaaatgttgaacaatgtattattgtaactttaatcatgaattgtccaaaaagaactcactttggatgaaaagaacagcagaacagacatttcaagatctgagttctaatcctgacttggccagccattgacaaataggttcaactatgcgagcctgagtttcctcatctgcaaagtgggagatgggacaagatgacttttgaggtcatttccacctctcaagtggtgctccattggaaggtgttaatgtgtgccaagagaacaaagttagatttataaaaactgtgtcagcatgacttatttatttagaagaaagcaattactagagatataagccatgttgggttttgtttttagatttcagaattcactggcccagagcctattccctttatacccacttcttttcccctctccttcctccttttcctcccactatgttattctaaagaatattcaagggggaaaaatcaatcattagagaaattttaattctgtatgattgtttcagaggtaagaagctcagacaaaaataatgcttgcaattgtgttttctctctagagccaactgtgtttattccccagtccaaatactccgttgaagaagatgttggtgagctgttcattcccatcaggaggagcggagatgtgagccaggagttgatggtggtctgttatacccaacaaggtagctcgatttgccgaaaaactaagataacccccaaaagatataaataagcctttttaacatattggagccataacattttaccatgaggggtatactttattaattttccatagatacagaaaaggatttatttagaagtctttcttcaggatttcac

SEQ ID NO: 11211 - DNA, 2300 bp, Homo sapien
gttgctgactctgcacacattatgcatgtctgttttaatctgtgttcttgtctcctttcctaaatttctaaaactctgtattaattattgtaattacaaactgtggatgacagccatagtagttatttccacaatttgagtttgtggaaaaggcaatcaagattatcaagtagttggtataaataacccataacctggaaaattttttacttttgtttttttcttttttgagttggggtctcgctgtgtcacccaggctggagtgcagtggagccatcttgactcactgtaacctctgcttcccaagctcaatcaatcttcccacttcaacctccagtgtagctaggactataggtgcatgccaccatgcctggttaatttttgtatttttagtagagatggggttttaccatgttgcccaggctggaatctgagaaaagttttaagatgaagttgcaaagaaggaaataactaggtggttggcagaagaaaaaccagaaaagacaagaaggccagggagagattagagattttttctactgttttcacaaaataatacaatataatataataaatgccatacaataaatataatggtatacaaaagaaaaacaagatatatttgggatattgatatgagagaaatgaacatcagaaaattagaaaattggtgttcttagtattggaataaccacaaaattgtctgtggttctatgtggtctgatgaaagaaggaatcctagtacaggatcctaaggatctggatttgagaaagagctttgccatttgagagctgttttcatttgtgatttatatattcattcattcagcaagtattgttgaacatcaatcatgtgcccacgttgttctaattgttgcagatgcaatggaaatgttagaccaagtcactctcctcatggaaatgtatagtgcaaggcaggggtcagcaaactttttttgtgaagggacaaacagtaaatattttaggccttacagcttgtatggtctgtgtcacaactactcaaatccacgggtgcagtgcaaaagtgagcacagacaatacaaaaatgaaagagctgggcatggtggctcatatctacaatcccagcagtttgggagaccaaggctgaaggatcatttgagcccagagtttgagaccagcctgggcaatatagtgaggccccatctctaaaaaaaaaaaaaattaaaaattagccaggtatggtggtgtgcacctggagtcccagctgttgaagaggctgaggtaggaagattgcttgagcctggcaggtcgagattgcagtgagctgtgattgtgccactgcactccagcctgggcaacagagtgaaatcctatctcaaaaaaaaaaaaaaaaaaaagaaagcaacaaaaggacatactgtgttccaataacactttatgttttaaaaacaagtggtaaattaaatttagctggcaagctaaagtttgtcaattcttggtctagaagaagaaacagacacaagccaaaaaattatgcatatgataacacgtgcaaagatccggtggcgagaagacatatcaagctttggaggcactgataggagaccaatggagctgcttcacggagagacacatgagtgaggctggaaagggaggaaggggcaggccagcagggtcttgtaggacacttaggagtttggtctttacaatattgacagttggcaattttttgattattttaagcaggatgaagacatgatcagatttgagtttcaaaagctcactcactgcagtgttagaatgagttgggttaaattttctcatctgaaacataaggatggatacacttgccctgtgtattgaacaggtcattgtgtaatcagtgatcacacaagatttatacaaggtgcatagaagtgttttatgaaatataaatgctatagaaaattacacagcaatattttacaggaagcaataccaccagatggtcatattctttcaagttttttctgtgaacaaaggcagtctgaactcataaaagaaatctttttgtttatgttatcaggcttccctcaccagggtaactaccccttagggagttcactaaagagaaggaatgtctttcactctctcatactttctcctctcccctctcccaagcacatctgagttgctgcctgttcttcacacttagctccaaacccatgaaaaattgccaagtataaaagcttctcaagaatgagatggattctagggtgtcttcacctgagaagcaagataaagagaatttcgtgggtaagttcctttttcctgtctta

SEQ ID NO: 11212 - DNA, 2300 bp, Homo sapien
ccattggcaggaatagcatattgttttcctatgttgtacgatgttagcatgattaagattttattttttccttttggaactgtattaagaaacaaattaagacaaactagtatagcagttaaagacatgagtctgaaagacccaggctcaagtcttggctccaccatgtagtagctgcatgatcttttatccagttgcttagtcatagcaagcctcagattgcccatctgtcaaatgagggtgttagtttctatctcagagagttattgtgaggacaagtgaaatgatgggcctaacttagcacagggcttgacagatcatgttttatggttaataaccaaattagatgactggaaagtgctgtttattatggtatgtggttgggattttttttatttttgttcgtttcatttttacctgcaagtgctatgattaataatgcatagcttttgctttattaaataaaaagatccaacagaggctgctataaataatactctaggatagcttggttttaccttcagatttgtcattagctacatggtcttcagcatatagtttaataaataagatagtgatttctcaaatgatacccaacacctatggacttaaatacctttttggtacattatttacaaacataagattaggtatatattccttatccttttagttcttataaaagaaattaagtacaaaaaacgtacaaatccatttttataggtactgtaagtttaaaatgatagctagtcttattgaaaccaaatcactgcttacaacattaatacggtcaagacttaaggacttttgagtttcagtttatgtacttaaatatgactgtcaattttccaatcattttttttttctaaaacaactacaaaatttgttcagcccaatgtgacaccccttggccttcacatagtgcaaatgaattatgtatgtgttgtttacctccattttcttcctattgtcccttcccatctatgagtagcatagtgtattcgttgaccgtgtcagcttgcttatgtcaaaagaatcttaattatacataaattgtaaaatgtgttagtccatgaaaatatttctcagttggttatcactgcaacaggaacattctctacaactgaaacagaatttgatgtgagtacagtatcagatgatagttgtgtttatgacattagctacctaagtcatgatatcccttgacaccaagattatcacaggtggggatagccattgaatacattcagaggggagcccacatcatcccccaaaatgcttattatttgtagagtttatcagaataaaaatagcaaactctagaaatagtgttgggaatagtccttgagtgggtttgggaactgtagtttgaggtaattatgatatatccagcccagcagacgctcattaactatgcaggtgctgtgttctgtgctaggtactaagactataaagatgaattagacacagcttttgcccctaaaggagttgccaggtaagggttaggggttaatgtagtgtagagcggtcagtatgagcaaatgtatgggggtggggcggggcaactgtacagatgaacaatctggaatattaaattcaactcacagagtggcaacaaacaatactggagagctgggcatgaatcctggaaagccttgtatggccctgcaagggaagccatgttctgaaagctcctatgagggggactgactgactctagataagtagattgaaagaattagaggtaaagtcagtgcagcagcactaatcacaattaaaataaatgctttaatttttaaaaagcggaaaaacatgaaaggacacttcgcaagcttctcaaaacttcctgtgatttggagggctattttgagcagagtctagacgaaaactggatctgactggctccagagtaaagatctgagaaatggaacccagcaatttagatattacaagagcctgttatacttgtcattttttatttggtatttgttaaatattacaaaaatggttatgctttttaattcaaaatttgacgtttcagcatgatgatacattcttgccttttttcccccttccatatagcattttccaccccagcaagtcaactcttttctcctcatggttctaatccttcaacacctgctgcaactcctgttcctactgcatccccagtcaaggcaattaatcatccatcagcatcagcagctgccaccgtttctggaatgaacctgctgaatactgtccttcctgtgttcccagggcaggtctcctcagccgttcacacacctcagccatcaata

SEQ ID NO: 11213 - DNA, 2300 bp, Homo sapien
atttacatttagtaaaggaacagttctcaaattctcagtattcttacaatctcagtttcactcagtgaagtgtgtttgggaaactttgcatacagtgtttccttcctggggaatcgcatataaaggctctgagaagtactataaaaaagaaacttgtttttatatcatctaatgttcctcaaacctctttgtaaaacagctttctcaaagaatgttatatttctgtagctgcataacaaccccacagcttactggattaaagcaataaatgtttattacctcacatggcttttatgggtcaggaatattggaacgcttagctggatagttctggttcaggtcttttcatgaggttacattcatctgaaaatttgattggagcccaagaatagggcctcaaggtgactcgtttacatgcttggcaaggtagtgttggtggttggcaggagtcctttgttgtccaccacaaagacttttttgtaatgctgcttgaatgtcctcatgacatggcagctggcttctaccagagcaagtaatccaagcaagagaagacaagtggaagctgcctggaagtcagatgccatcctttctgcaatgtcccatgtgttacacaggtcagccccattcattctgggagggaatggtgcaagggcaggtaggagatgaggatcagtgggggacatcttgggagttggcttccacactagtatataccatttagccacacacagtgttagggcgatgacacactgcaataatctatcaacttattctgatctgttaattttaacagtcttgaataaggtctcatttacccttgacaatataaataatcacacttaatctttatagagaacaccattttttcttatctactttcaactgtaacataggtactcttattctttgagtattatacatactgtggcattggaagttcatttctgattgctcctatttgtgaagaagaaaaatcagaacatactgtattccgaaaaaaagcaataatacagtaaaacaatgcagcataacaactatttacacggcatccacattgtattcggtattataagtaatctagagattatttaaagtatatgggtggatatgttcaggttatatgcaaatactatgctgttttatataagagacttgagcatccatgtattttggtatttatgggggaggtcctagaaccagtccctgtggataccttatattttcctgtcatcctctctgtgtttttcatgttcacttctgagtacctttgcatgtgatatgagagttccatagcataggaggattgaggaccttatcagggtcatgccgccagccagtgcagaactgaaatgggaatgcaagtctttacactcttaccaagtccttttcttcagtgtaatacagtgaggttggttattgttactggtttgagggttttttttttaagtttcaattaccttttttttttttttttaatagggaactcctttgaaaaaagatggtgaagaatgtactaacgaaggcaaaggaatagctgcacgaattcttgggccatccaaaccagtatgtttagaaaatgatgaaacaagcccaaactccttcctacataaagtttcctttttactcaaagcataaattttatttttgtgttgcaaagtttgaagtattctagaaattgtaggagagtgagagagtgaatggatgagggaaacataaatatttaacagtagtaagagcccctttgagattgagctttttattttaaagtagaatcagtgaaattgctttcagtttttttctcgagatgcattcagctgctcagttggagatacggagtgtggagagcttgttttaactaagtttgtagtttagctgaattagtgttagtgaaaccacagtgaagtcacaggttgaaagtatttacaagatagtgattataatgattgcaatgtaaacaggacaggagaagacaaccccatgggttgaaggatctttggagttgaagtactagaggcctgcatacaaccaccttgcaaaacctgcctgtccacatgacaagaactccagtggagttgtttatggcagaatagtaacagatcatggttcttgcacaagacttcagatagggccacaattatgggagctggaaagaatctggctcccttaccaccagtgggtcctttcccctgcctcacaggcatgcacatgctctctctgtaggtaaaaagtacagcatctggcttagcttcagatacttccagttttctaaagaccagtgctttgaatgctttttgttactt

SEQ ID NO: 11214 - DNA, 2300 bp, Homo sapien
aatttacaaaatctactgtgaagacattctttgtatgagtctgttgcagcattattatgttaaccattttaattattccatttaaataaagtgattttattacttttggtcacattcaccactgtaagtgctgaattatgtatgagcagattgaatgtagtgctgttctttaattcatgttttttttagctgagctcccaatgttcagaatacttatcttttaagaatttttttcctacccctcttctttcttatattacaggctttcaaggggggctgcaaagctcctcatgctatgatatcttcttgtggaacaatcccaggaaatccatatcccaaaggaagacctagccgcataaatggaattttcccagtaagcatacttctgtagctgtatatgaaacttctcatggttaagtatgaagtgtagaataagttaatgatatttaaaggaaaggaattttatgtcggtaacttaattcacaggctcaccactgattgaaagttcatgtctaaacttcattaaagtattaagggtatctatataaaatctatagaacaagacaaatagaagagaggatgattttatttttcaaagtactttagaagcactgatttacatttagtaaaggaacagttctcaaattctcagtattcttacaatctcagtttcactcagtgaagtgtgtttgggaaactttgcatacagtgtttccttcctggggaatcgcatataaaggctctgagaagtactataaaaaagaaacttgtttttatatcatctaatgttcctcaaacctctttgtaaaacagctttctcaaagaatgttatatttctgtagctgcataacaaccccacagcttactggattaaagcaataaatgtttattacctcacatggcttttatgggtcaggaatattggaacgcttagctggatagttctggttcaggtcttttcatgaggttacattcatctgaaaatttgattggagcccaagaatagggcctcaaggtgactcgtttacatgcttggcaaggtagtgttggtggttggcaggagtcctttgttgtccaccacaaagacttttttgtaatgctgcttgaatgtcctcatgacatggcagctggcttctaccagagcaagtaatccaagcaagagaagacaagtggaagctgcctggaagtcagatgccatcctttctgcaatgtcccatgtgttacacaggtcagccccattcattctgggagggaatggtgcaagggcaggtaggagatgaggatcagtgggggacatcttgggagttggcttccacactagtatataccatttagccacacacagtgttagggcgatgacacactgcaataatctatcaacttattctgatctgttaattttaacagtcttgaataaggtctcatttacccttgacaatataaataatcacacttaatctttatagagaacaccattttttcttatctactttcaactgtaacataggtactcttattctttgagtattatacatactgtggcattggaagttcatttctgattgctcctatttgtgaagaagaaaaatcagaacatactgtattccgaaaaaaagcaataatacagtaaaacaatgcagcataacaactatttacacggcatccacattgtattcggtattataagtaatctagagattatttaaagtatatgggtggatatgttcaggttatatgcaaatactatgctgttttatataagagacttgagcatccatgtattttggtatttatgggggaggtcctagaaccagtccctgtggataccttatattttcctgtcatcctctctgtgtttttcatgttcacttctgagtacctttgcatgtgatatgagagttccatagcataggaggattgaggaccttatcagggtcatgccgccagccagtgcagaactgaaatgggaatgcaagtctttacactcttaccaagtccttttcttcagtgtaatacagtgaggttggttattgttactggtttgagggttttttttttaagtttcaattaccttttttttttttttttaatagggaactcctttgaaaaaagatggtgaagaatgtactaacgaaggcaaaggaatagctgcacgaattcttgggccatccaaaccagtatgtttagaaaatgatgaaacaagcccaaactccttcctacataaagtttcctttttactcaaagcataaattttatttttgtgttgcaaagtttgaagtattctagaaattgtaggagag

SEQ ID NO: 11215 - DNA, 2300 bp, Homo sapien
ttgcaaaagcagaacttgttcaaaaaagaatgttcagtattatcaaatatgaaaacttaaacacgtcaatttgaaaaaagaaaaaagctgtataaaaacaaagcaaaacagcaagaccagagacaattttaataatagctttgtaaactgaaataagcaccagagcacatggcaacaatttcttccgtttcagtcaagggtcgtaaaggtatgcagctgacgaaagaataattgcccggaaggccgaaggaaagcaccgtgtgttgatgtaacaatggtacatcaagtccttacattttaaaataagtaacttctcggtatttttgtgcttgagatattgttaggctcaagactaccttccagaattgttgctgtctggttcactctgggaaatgcgatccacacaacagcctcaaaaagcagcaaaaacttggaaagcaggagaaaaaagttttgaagctcaagttattgacggccaattcctaagaacgtgactttaaacttaatgccacacttaccatcaggacacgaattttgcatggccaacgcaacaaatatactctaccttatgcttagatttgaaaaccccatcataataactaccataaaagaaactttctgcgtattacctctcgttttcagtcactcttgtgttactgaaagatgaggcaataaactcaaaaatattaaaccccttacccaaaaagtacagagctattacggatttgtaaagccggctttggaaccgagggctttacaaatgtaattcccacgacaccgtgctgagtctcaaatttggcgttaacgtaacttaatttctatttgtactggaaacgtatcaagatataaactcctccattacacgtgaaaattcaaaccaatttggcaatcctaggacccttattctgcacaatctccatacagtacctcaaagagagtctaaaacacgagaattcatctcataaaataattcatggaatcggtctaattacctttctaatttcatccagcaccatttcaaaggactttttatccatcttgactactatcccgacgtggttttaacagttatacttgcaattaaaagacgttcatccctggtctgctccgccgatagtaaaaaatatttatagctgaggaggaaaaagactccacgagcaagagaggatgcgaagaggtagagagtattgcaaacttcgcaaaaaaaatttctaaaaattgagattcagaaaaactctttttattaaaaagaaaaaacactccagtcaggcttccccagcttattcacacaatggttcagggcacctcgggcaagagccaggtcctctgagttttgcagaaaaacccgggctcggcggcaggtttgagtgcggtttccctgcagctgagggccaggtgccgccagaggtagctcttgaaggcgctttcccaggtggagcggccggcagagtagaaacacctgcgctcagagtccacgggcggcggggagggaggcgccggtctctcgacccgcacctgcgcctcggccgccggccgcgaccctcaccgccgcgaacccggacgcatggtccggctcgcgctcatccccagccgctccgcccgactcctggatacctcggccccggcagcaggcggcccggcaggctctttgttaccagctgctgcagcttccgggagcgggccggcggctggggagcaccaggagccgggcgaagaggggcacggcctcgcatagggggactccggaaaaacgcagccccaacagcgccagacgccctgcctggttacccctacagcccccaccagctcatggggacctacaataaagccagtcgcgcccaagtaaactcaacactgcgccgccagcttgggcccctctttcctgaaagccagaggtggggtcctggtgtgggaatataggcatccatagcggatgcctggatggtaggaataggatgtggcaaaaatccttcccgaagcctagcggtcattattttgaatgtcatccccaccatacctcgtgtctgagtgtgcgatgttttgattttgccctctggattaaaaagaataaatggcgagcgattaaggcatatctacgggcgcccatactttggtggccactgaaagtcagcggcgcggactgccctgagggcgggaaagggtggtcactgggtcagcccgaagcacctgacatgagggcggggaccccgaaatgcacacgaagtccggaactggtcttctgtgattttcattcgccctggtctctgttccctttcgtactcaaagctcgtgcatccagg

SEQ ID NO: 11216 - DNA, 2300 bp, Homo sapien
cgaaaccaaaatacttgagaccaactcaaaaataaattgcacaattagcatgatataaacgcatatggtcagttactacagcaagacaggaaggctgttacttcctttgtgttcataatttttttaaatctctatttacttacttgacctatgtaaaccaatccattgagggagtcaactgcaacacaaaatgttgttccggtaaaatattctgggtgcttaggccaacccacatccagccggtaaagaattttctcagttctccaggaaactgcaaaagtaaagttcctcaaaaccttaaacaaaatcagacaattcagatttagtttaccgtctaggtaagaacaaaaaaagggcgggggggccgggtaacagggcttatttttaagcatgccttgacaactagaagtttgctggactgaaataattccaaagaaatgagcttagatgcctaaagaccaacacgaccacaatacaagtctgcaaattatttgaggatgtagtaagagttgggaaagaggaaaatggcgatgtaacatacacaaatttttaaactcaaagggtcaaggcagtttggacccaggtgcaggctttgagacaagctactgagggaaccagggcctgccacctccatgccacgaccgtggcgacgcctcccaacagggctacccgcacacccgacagtcatttcctcactacccaactcactggagagccacaaaaacgcgaatgcaaaaccaaaaatgcaagaaagaagccagcaccggctacgcagacccagaatctcgccatgaccagacgggaagccaggagagggagggtccgcaggtgtctgggggaggacctgacagcctcaggctgcaacggtttgcagcggcacagagggtctgcccggggcccgaagaccctatctccggtttcccctccctggatgcacgagctttgagtacgaaagggaacagagaccagggcgaatgaaaatcacagaagaccagttccggacttcgtgtgcatttcggggtccccgccctcatgtcaggtgcttcgggctgacccagtgaccaccctttcccgccctcagggcagtccgcgccgctgactttcagtggccaccaaagtatgggcgcccgtagatatgccttaatcgctcgccatttattctttttaatccagagggcaaaatcaaaacatcgcacactcagacacgaggtatggtggggatgacattcaaaataatgaccgctaggcttcgggaaggatttttgccacatcctattcctaccatccaggcatccgctatggatgcctatattcccacaccaggaccccacctctggctttcaggaaagaggggcccaagctggcggcgcagtgttgagtttacttgggcgcgactggctttattgtaggtccccatgagctggtgggggctgtaggggtaaccaggcagggcgtctggcgctgttggggctgcgtttttccggagtccccctatgcgaggccgtgcccctcttcgcccggctcctggtgctccccagccgccggcccgctcccggaagctgcagcagctggtaacaaagagcctgccgggccgcctgctgccggggccgaggtatccaggagtcgggcggagcggctggggatgagcgcgagccggaccatgcgtccgggttcgcggcggtgagggtcgcggccggcggccgaggcgcaggtgcgggtcgagagaccggcgcctccctccccgccgcccgtggactctgagcgcaggtgtttctactctgccggccgctccacctgggaaagcgccttcaagagctacctctggcggcacctggccctcagctgcagggaaaccgcactcaaacctgccgccgagcccgggtttttctgcaaaactcagaggacctggctcttgcccgaggtgccctgaaccattgtgtgaataagctggggaagcctgactggagtgttttttctttttaataaaaagagtttttctgaatctcaatttttagaaattttttttgcgaagtttgcaatactctctacctcttcgcatcctctcttgctcgtggagtctttttcctcctcagctataaatattttttactatcggcggagcagaccagggatgaacgtcttttaattgcaagtataactgttaaaaccacgtcgggatagtagtcaagatggataaaaagtcctttgaaatggtgctggatgaaattagaaaggtaattagaccgattccatgaattattttatgagatgaattctcgtgttttagactctctttgagg

SEQ ID NO: 11217 - DNA, 2300 bp, Homo sapien
tcgctgtgtcacccaggctggagtgcagtggcgcgatctcggctcactgcaagctccgcctcccgggttcacgccattctcctgcctcagcctccccagtagctgcgactaaaggcgcccgccaccacgcctggctgattttttttttttttttttgtatttttagtggagacgggggtttcaccgtgttggccaggatcgtctcgatctcctgacctcgtgatccgcccgcctcggcctcccaaagtgctgggattacaggcgtgagccacggcgtccagcccttgttaaatttcttaattccacagaagtacaaaataaagtttgttaaaaacatgtgatttcatgaatcgttaaagaaattacaattagattcagcaactctgattttaaacaatacaaacaaggacatgtgcaaagatgtgatttccagtaagataatttaatagatattactatacataccacttcctacatccgtgatccagacggattgttcatatagagtactggctgcaaatataccatgaggtgtgtcaactgtataattccaggctcgtaggaaatatccatcctctgtgaacactaatatctttgggatgttatcccctctctgaaggtatacaaaaaataacttcttaggatcagcttaaaggaaaggtaatctgtatcttggcgaagaaaaaaaataactgagaattttactacaaaaaccactttcaaaatctaacatatctttcacattcgaaaccaaaatacttgagaccaactcaaaaataaattgcacaattagcatgatataaacgcatatggtcagttactacagcaagacaggaaggctgttacttcctttgtgttcataatttttttaaatctctatttacttacttgacctatgtaaaccaatccattgagggagtcaactgcaacacaaaatgttgttccggtaaaatattctgggtgcttaggccaacccacatccagccggtaaagaattttctcagttctccaggaaactgcaaaagtaaagttcctcaaaaccttaaacaaaatcagacaattcagatttagtttaccgtctaggtaagaacaaaaaaagggcgggggggccgggtaacagggcttatttttaagcatgccttgacaactagaagtttgctggactgaaataattccaaagaaatgagcttagatgcctaaagaccaacacgaccacaatacaagtctgcaaattatttgaggatgtagtaagagttgggaaagaggaaaatggcgatgtaacatacacaaatttttaaactcaaagggtcaaggcagtttggacccaggtgcaggctttgagacaagctactgagggaaccagggcctgccacctccatgccacgaccgtggcgacgcctcccaacagggctacccgcacacccgacagtcatttcctcactacccaactcactggagagccacaaaaacgcgaatgcaaaaccaaaaatgcaagaaagaagccagcaccggctacgcagacccagaatctcgccatgaccagacgggaagccaggagagggagggtccgcaggtgtctgggggaggacctgacagcctcaggctgcaacggtttgcagcggcacagagggtctgcccggggcccgaagaccctatctccggtttcccctccctggatgcacgagctttgagtacgaaagggaacagagaccagggcgaatgaaaatcacagaagaccagttccggacttcgtgtgcatttcggggtccccgccctcatgtcaggtgcttcgggctgacccagtgaccaccctttcccgccctcagggcagtccgcgccgctgactttcagtggccaccaaagtatgggcgcccgtagatatgccttaatcgctcgccatttattctttttaatccagagggcaaaatcaaaacatcgcacactcagacacgaggtatggtggggatgacattcaaaataatgaccgctaggcttcgggaaggatttttgccacatcctattcctaccatccaggcatccgctatggatgcctatattcccacaccaggaccccacctctggctttcaggaaagaggggcccaagctggcggcgcagtgttgagtttacttgggcgcgactggctttattgtaggtccccatgagctggtgggggctgtaggggtaaccaggcagggcgtctggcgctgttggggctgcgtttttccggagtccccctatgcgaggccgtgcccctcttcgcccggctcctggtgctccccagccgccggcccgctcccg

SEQ ID NO: 11218 - DNA, 2300 bp, Homo sapien
tgctaatggtctctgccagaccccatgctcatttatgtcctgagcttgattgtttattcactataataactaggaacaggtgattatgactctcaaaagaagaggtaaaatcacagcagaagaatgatggttttgtctctaacaaatcttcaagttaatttcttatttgctttaatttagctataaaatgtaatagcacacatgtctatgtaggtcaacttcaaccaggtaaaaaatgatagctagtaaagcagaatgtgtacactgtccctgaattcatagaacatcctggatcagtgcctgaaattcctgtttggtgatatgtgatgaccttgatttcctacaaaaatagccactttctgttcttttgaatttttatctaagtttcttccaccaaaaaatgcattttaattttttttacaatgccagccattaatctttaaaattgttgtacttaataatgtaatagttattccttaatgaaatttggaataagataagtgatcattgggatcacccagccactctgctgtgttgagcttggagcaaaaagaggagacagagaaacaagttctataaaatgttgtgtgtgatgatgtgggttatgttagtgttataggttgaattgcctctcacaaaaacatgttaaagtcctaccttcaggtacctgtgaatttgaccttgtttagatgtaatcaagttaagataaagtcattagggtgggcccttctccaatatatgatggatgtccttataagaagaaggaaatttggacagagatacgcagagaaaatgctgcatgaaaacagaagtagagattgcagttatgctgctacaaatcaagaaaggcccgggggtgtgagaagctagtcaaggaaaggaaagatcatcctctagaggcttggctgagagcatggccctgccaacatcctgatttcagacttctagcctccaaagcagtgagggaacaaatttttgttgttttaaaacacccagtttatggtactttgttatagaagccctaggaaaataaaatgggtagtgagagggtgatggttgcacaggtggcaatgagaagaaaatgcttataattattaatttcaatttatgtaaattggtaatgcatagatatggtccacaattataaaggcataaaagggtatatagtaaaagcatctctgttactacattttcccccacctccccaggtctccaccactcttagccattttcttgagtatcactcaaaaagtgtgcaatgcatttataagcatttaataatttccaccttcctttcccatctctccttaataagtagcaatgtgctatttacacattttggatcttgacttttcacttacaatatattttgagatttgggaatattaacacttacacagctattttgtaatagggaagatttaaatttgacctatatatgaagcccagtaattgccttcttctagtttccgttgttagtgtaccacacaatcatatatgggatgcttaacaccactgcattttgaaaactgccattgctaggtactatgcaaaatggcttacatattttatttaatctatcttgggtgagggcaggaggattaacaagaaagcttcaatttcctttgcctaaagaacataaaaagaaatgtttgctattggaacaggatcaagttccatttttgctgtaggctcctaaaaaacaaaaaagtaaatttatatatgtagttccaaatactgccaaattgcctcaaggttagtttcatggtaaaaaacttatctcttgttttttacttgtcatcattgaaaaacatcatttctttggtgttatagatctaatttttctttctacagaacttatgccaggaaagcagtctgtttttgatatttctgaacgttcctaactaggatggcaacaacaagagtacatatgtattttatactgaggatgtgagccaatcacatgtacaacccaatgttctaccctaaaattactatgactgtcaccccccacccaccattcaaatacgggttcttcactggcaacttgacagctgggaattagaaatgtgtggaatgttgtgtatggtggcaaaggagttggtaagtatctgtagcattattgtcttgcttcagacatggaaatatggaagaccacgtgtcttccaatctgccatagaaatagggtagatgagtccttctgaaagcacactagaagacctctgttcttggcatggactccagtggtggggaggactcccttccatttcacttggttatatgtttgccagagatgtggt

SEQ ID NO: 11219 - DNA, 2300 bp, Homo sapien
ctgctgacttgtgagcttttaccctctaagaatatttttgctcccttgcctcattatctaacacctatttgatctgtataagtcacttatcaacccaccagactcatgtattctagtcacttaggaatatgcttgcttttttcctgtgcacaagatgtatctctctattttgtttctgtcatctgcagatttagtgacttggggcagcatggactgtcacagaggggttttcttgtttgatccattcttctacttttctgcttttatatgatctatataatttaaagttattggaattccagctcccttttatttttagtttaatcctgatttttatttttaatttaattagctctaatttttttaaaaagacatttttaacattgttgctttgctggataattcagagatgctgtgtgtgtgtgtgtgtgtgtgtgtgtgtgtgtgtgtgtgtgtgtgtgtttctagtattgccccatgacctttatgactcatttaatgaggaatttaaacaaattactattactcctactgcattcattatcaactagcaggcatcagctttctgcataaaatattttttttctttgaataccctctatttcccctctgtgaggaatttattctccccttggtgcatggggacagattatgttcataatagccattaatgataataggaagagtgtgtaaatctttgaagcattgaaaactgaatggcgctctggtgggtctttttctgtgtcttaccttactagattttgttttgcagcaggtgctattggttgggtaaagtgccgttcctcatgtttttctctttattctatacacgtagtgtgtgtgtgtatatatatatatgtgtgtgtgtgtgtgtatatatgtgtgtatatatgtgtatatgtgtgtatatatgtgtatatatatgtgtgtatatatgtgtatatatgtatatgtgtatatatgtatatatgtgtatatatgtatgtgtatatgtatgtgtatatatgtatatgtgtatatatgtgtatatgtgtatatatgtatatatgtatatatgtatatgtgtatatatgtatatgtgtatatgtgtatatatgtatatatgtgtatatatgtatatatgtatatatgtatatgtgtatatgtgtatatatgtatatatatgtatatgtatatatgtatatatgtatatgtatatatatgtatatatatacacacacacacactcagaacatggttcttctcacactggaagaggattactctttatttgttggtgtctccatgagggcaggagctgattcgattcattttcctctccatgtttagtactgcacacaatgcaccattcatgctggatagatattcctacctagaggaatgaaagggtacattcacttcctgaacatgaaagcagagtggctgctaatcctgcctggggcaatattcttatgctaaaatgcatattgtaggagttattgcataaatatttgttcttatttataactcatgggaaatagtttagagaaatgaaaagaatacagaacttgaaattagaagatttggccctcatcctgctaattattgactatgtatgagttttaggaaattttttaaaaagtctctagcttcagttttctcatctattacatagagataatagtttctaactcagaggattgttgtgagaatcaagtgaaagcccatattcactctgattcaacaaacatttacagagtagtcactcagtgttaggccctggggtaagttctgagaataaataagatgccactcctggcctggtgccatggttcacacctgtaatccccagcactttgggaggcctaggtgggaggatcacttacggccaagagttcaagaccagcctgggcatcatagcaagatcctgtttttaccaaacaaacaaagcagacatggcggcttgtgcctatgattccagctacttgggaggctgaggcaggaggatcacttgagcccaggagtttgaggctgcaaaattgcaccactgcactccagcctgggtgacagaacaagaccccatctcttaaaaatattcagaactaacaaaccaaatgccacttctctcttcccaaaactcagacactgagagaggttctcgtcaaagtccaaaatgcacattaagttgtggggatcttattaacaatgatgattctgatgctgtaggtttgaagacgactcaagattccctggagacatcaatgctgctggtccatgggccacggcttggatagaaagggtttagggagaggttgacaagt

SEQ ID NO: 11220 - DNA, 2300 bp, Homo sapien
tcattttaggcagaatctctgtgatagcatttactctgcttaagagagtgcaaataatgagatttttttaaaagtcattttttagctgtaaatttttgggcaaattacttcttatccttgcggtaaaataataattattccttcttcataatttttcttttcttttttgaggactggataagtaatctattaagggaccttaatgtactaacacacagcaaggagtcaatctgtagtaaccatgattatcattaatatgtctccagccagcacttgcgcttaagctttctcacacttaagaaagtgtttgagagcaatttcccctgcaggttgtacggaggtgactccgattctcactattattcttttgtcttttatgatcatatcttccaccatcatattatataggtatgaaggctctgtgtaataactaagggtgtggtacctaactggaagtcagaccaatcattcttatgctgtcactgaaaccagtaaccggtgatttgtaagagaagagttaaaacaacttaaactcaacaacaacaccaaaaacaaaaacacttaaattggggattctgaatatgggattcatggatgggctttaagggaatgggaaaccacctgatatttcattcaaatgattgacattttggcccaggtaattttggggactgtcctgtgcactgtatttagcagaatctcgggtctttaccaactagatgccagtaatactccccattcatgggttatgataatcaaaattatcttcagaccttgccaaatatccctttccttcttcagaatcgctgtggtaaagctttatatgtccgcgcatttttttttctggaaggcttatcagtttcatcgtattttttaaaagacctgtgacctcaaaaggcttggaatcaatcacttaaggtctttcaaaataataataaaagaacacatatctccagctgtcgttgtgggaaaaatgtacaccatcacggctaattaaaatggtgcagtctgaaaatctgctatgaaatatatacctaccaatttattactttcaactcctctaaaaagacacctcacaaaaactatatctgggaaactgtctacttcaaaaactgctgttcccagatggcatacttcttaaaatactgtgttcagcagagactcccacagtcatctactgaatctagctctaaacttctaaaggggttagtgctaatgacaagtggaaaaagtcctcaagtccagaggggaactaaaaatcagttgtttctcagaaaagaaatcaaacgatggaataaattgcaaaattgatcaggaggcaggatggaggagaagggagggaggaagtgaagggaaagggagggagggagggagagagagacagagaaacagcaagagagagagagagagacctttgaaagagtgtatctcttgggagaggctcgctagaggtccgcccctgccttctccctggctcgtctggaaaggcagctgcccccatgccatacatgagccttgggctgtctgctgtgctttaattcccacgtccacaaccgcctcattcaccgccttccaaagtgaccacttctcaaaagcctcctcaaatctcaaaggggccactttacccactctttaaggccctctttcccgtctacggcttcttttaacggcggcaggaaaacaggagcataaacccgaacagtaaacccagaaaagccccaacaggcaaagtgtgtcatcttccgtggctcctcggggtcacccaggaagacaagcaactttctcccatacttctcggtctgtctgccttccccactcagctttgaatgagacgcagggagagggggcgcgagggggctcggggctaggggaggagccgcgaaagctgcccccgggggtgggcctggacccgcgcggacagcggggcacccccccactcccttcccggcgctccaggaacgtccccggtgcgtcctgggtctgtctgcgcggagttccccggggcgcgaggggaggggactggagaaagaggagggccgggcagcggaggggaggaggcggtgcgtgcctcgcctgccaaagggagatccgctcctctgcgtgcgatccccggcgcccgcgcgcgcccacagcgctccgccagagctgccgccgcggactcgccgggagtgggggtctccgctggtgccagcccgcttctggagaccctccgcctcctgccaacccctgctcttccaggtcgggccccggggttctgcggctgttagggacagaggcaaagaagggcaggacggtccggt

SEQ ID NO: 11221 - DNA, 2300 bp, Homo sapien
gccaactctgtaaatgaactaaaagctgtcatattttatacttttaataggtgaagtttatggcctgtaaattatatctaaataaagattttaaaaattaatataaatttgtattttttattacttaaacattttgtctatttatctccaatttactttttaaaataaacagctttattttttttttttcaattttaagatagggccttgctccatcacccaggctagagtagagggcagtggcatgattatgacttaccgcaggcttgagctcaagtgatactcccacctcaaccttccaagtagctgggaccacaggcatgccaccacactcgactagttttcgtatttttttttttttttttgtagagacagggtctcgctatgttgcccaggctggtctttaactcctgaactcgagatccccctgcctaagcctcccaaagtgctgggaatacaggtgtgagccaccatacctggcctaaaaaacagatttgagatgaaacttgcatgccattcaattcattcatttaaagtgtacagttcagtgttttttagtatatttacagagttgtgcaaccatcaccacaatttagctttagagtattttcatctccccaaaaattaacctgtaccatgaactgacactccccattccctcttcccaacactcctcttcccagaaccactcatctactttctatctctattgatttacctatttgggagatttcacataaagaggtcatacaatatgtggtatttcatgaccgctcctgacttggcatgttatcatcgtcattccttttaattgtacatatttgcaagctctacattatattattgctttgtatatatgcaaattcatttggatatatacaccttaggtaaacctttgatattttaattttggttacactgaacttaaatttatctgtgaaagagaaaagacatcttacaatattgagtcttcctgttgaagagaacaatatattttttcattgatttaagttttatgttctcccagtagcattttaaagttttcttcatctaggttctctgtattttttgttgaattcatacctagatattgctgctttttgtatatttttttcttttggatagttgggccttctcttcttcattagagtagagatgagtggttttgtcagtgctttctttatgtgacctctgtaataggtaattttcccttaagtctgatatacaatataactatgtacatagacatatatgaaacaaggaaaatttatgacaagagccaaatagtgtttctgacaaataattcacagaagcccagcgattttattttgatccaaattttaaaaactgagaaaagaaagaaaaaaagcaatgatgtttgttttccagagtttcccgggaagttttttcaacttgttacatttttatccattactttacagctacatgggctctggtccatttgtgtcagggccaagttcatcttgttttgaggcctgtacacttacacactttcttctgcctgggaatgatttctcctcacattctgattctccttcaaatctcagtttaagtgtcaactcctctccaaacctccctgagtgaagtgggcctttccctccattttctttcactgtactacttcatcccctgagcactcatcacaacctaataacatctattaacagctttgtctgtttcagacacacaatgtagattctccaatgcctaccagagtacctggcacatactatgccttcaataaataattttcaaaaaaatgaattcagataaggcaaatgtaatttaaactttcagttaacttatattgaatgtatatgccaggcacaagtcatggtgtattttacatactacatttggttgtcatctaattagctctgaaggtcgcagatccataattccaaagtcctctctaatcctataaattttctccttctacctgagggtcttgtcccgccccccacatcttctccgcccctcacgcttctgagagcccaagcagggttacccggcgaagacttccggggccgatgcgcatgcgcggccgatttgcacatgcgcaatactcgcgctgcctccgtggtccctgcctggctgaggtggcagcagggggcgggacgcgcagcgctatggcagagggcagcggggaagtggtcgcagtgtctgcgaccggggctgccaacggcctcaacaatggggcaggcgggacctcggcgacgacctgcaacccgctgtcgcgcaagctgcataagatcctggagacgcggctggacaacgac

SEQ ID NO: 11222 - DNA, 2300 bp, Homo sapien
tttaccatgaggaaaataaagcatggagagagtgcagctaggttgtcatataactagtaactggtggaactgtaatttgcatctgagtctgtgatttcattcgttcaacattactgattacttctttgaaccagaccttaggacatttcaaggctatagtctaaagaaactgcttcacttcatgggttttttttttctgtacagtaagtatttatagttgtaaacatatttttgcttcctctgaaatattaaattgaatttatataaatagttttactgtttttgtcaatccagccaatatttcaaaataacaaatagaaacatgaaagggtaagcctactagaatatacagtagtggaggtgtagaaatgtatatctgcagaatttagtgtacaatggggatgtcctgggcttggttctctgctctctcttccattcatgttttctctgtaagaaaaatcttgtactttcatggttttaagtagcaaaaagcatgattactctcaaatttataactctgtttctgacatctactgagctccagatttgtagaattagttgtctatactatacctccaattggatactgattgacgtcatagaacttaacatgggcggaactcttgatttttccctaaactggttccgctctcactaaagaacgtcaccatttacccagtcaagcaagaagcatatgaataattttggattcttgtcacttttttttttttttttttacatctcctgcaaatccacaaacatatcttataggttctactttgaagaatatttttggaatatcttttttttttttttgagaccaagtctcactctgtcgcccaggctggagtccaatggagagaacatggccttactgtagccttgatcttgctggctcaagcgatcctcctgccacagcctcccaggtagctgggtctacaggcacatgccaccatacctggctaattttttgatttttttatagagataggggtcttactatgttatgcaggctggtcttgaactggcatcaaactatcctcccaacttgacctcccaaactgctgggattacaggtgtaagccaccgtgccatattttggaatatctctttttcatttgtactactgccatcttggtctaagccactatcaaaccatactgggattatttttgttttttctcttacctacctcctttcttgtacccctttaccattcattttccttacaaagttggaataaacttttataaatataaatcgtattacattactcccctgcctaaaatcgtaataatttctcataacttcagtcatagtggccttccttctaccactttagggtctttgtactcattgtttgctctgtctgtggaaggctttgtccccatgactggctgttgcctacactgaggcctcagttcaaagtcacctcagagaggccttcccctttaagtttctccaagttctacttccagttattcagtttctagcctggaggattccagtacttattcttaaatagatcattccagagatagttaatgtgcacattatatatgtgtcaactaggtatacacaagtaagtatgcatgtatatattccttttaagtttttaactgttggtattacaactgtttctatgccttgatgtttcacttaacatatctcaaagcttatactacgtaagtgcataaagattttttttttgtgaatgagtatatcataatttatttaaccaatcccttttagatggacatttatattatttctagtctttgcaattcccaacaattctgcagtgaataatcttgtatatataacactatacacaagtaagtatacccttcttgtgttctggaaataagcatgcttcagtaatttgaaggtcattcaatatttttcggattggttaatgaaaataaatcatttgaaaatgatttcattacattttgtcttgagatttgaaaccatttaaaaattagttccagtaactgtcttctgttaccaattgtataggagatgttagaagctctcaaggcactttcaaccttttttgttgaaaatagtctgcggactcgaagaaatttacgtggagatattgaacgtaaaagtttagccatcaatgaagaatttgtaagcattttcaaggaagtgaaggaggtatgtaaactcttttcatttagcatatattgagaacttactattacgcctggctctgtgctaagtatttttttgaattaggttgatatgtttgctatttgtatactatgcccaaatagaaagcttagctaatttct

SEQ ID NO: 11223 - DNA, 2300 bp, Homo sapien
ttgggaggctaaggcaggaggatcacttgagcccaggagtttgagaccagcctgggcaacatagcaagactaccatctctacaaaaaagaaaattagcgaggcttggtggcatgtgcctgtagtcctagctgttaatacttgggaaactgaggtgggatgatcactcgagcatgcagtgagctgtgattgcaccactgcactttatcctgagtgacagagaaagaccctgtcaaaaacaaaaaacaaaaacaaaaacaaaaccctatagttaatttttcatttcagttgtgtactttttgactccagaatttctctttggttgtattttattattcctgtctctttattgatattctttatttggtgagacattgttttcatactttagttcttcagacatgattttcttcagtctttgaacgtatctaaaatagcttgtttaaagtctttgtctagtaaatctaacatctggacttcagagaatgtttctgttgaggtgtttttctgtgcatgctgtgcatggactatattttcttgtttgcttgcatgttttatgatttttttgttcttgttgtttttatgaaggagagagtatttttggacatgcttactttgctattcctggtgatgtcacttatgtattaactttctacatgaaaccatcttataataaatgccgatatttgaaaattcttacacctttctgcctacctgccactaagatgtagtctcttacattgtcttctaagtgctatttttaaaaaatttacaaaatgttactttattaacattgtaagtattctgaaaatatttttaaagaaattcataggcacttctttttatgtatcatggtgccaccaaataaggatagtgaacttggcataccttctacttagtaagtgcaaggcatgttactcagccatgcaacaatctcatttaatatttacagagtccctctgaagctctgaaaacttaagtaacttgctgaagattacacaactagtaagtgatagatccaagatttgaacttaatgtgtttaactctagagcccaatatattaatggtaatgttatactgtttctgtgaagtgattttcaaaatgtgggacccatgggttaccttcttgagagactcctggggtgcttgttgaactgtcaattcctgaacccctaacctatacatattgaactaaaatctctgaaatttgggcctgagagtaggtgacgtttctcaattatattatagttggaatagtgctggtctatagactgcttttttcttatgatttgggctaaaaaataaaacagtaggccattttaaatccatattaaaatgtaattctacaattcaattgaacactaacttttcaaattaattttttgaattttagagtacaaggtgacatattctgagataatctgacaaagaacttttctctcactttgtgtgctgttaatatagttcaaagtaagctattgataaattataggtttctaatgtgtgagtctgtgctttataacttttacatttttttttactatgaacttacatttatacattaaaatttagtggaaaaaatataaggagtgggtaaatcatctcttgttttaggttgaactcccaccacctgatcttggaccaagttctgcactaaatcagacactcatgttgctgcgtgaagttttagcatctcacgattcttcagttgtaccattagatgctcgtcaagctgattttgtgcaggtatgttataaattcatttttaatgattgttttttgctcttctattgtacactgtgtttcaattctggaattttgtaattcatatactttgacagtctctttcttactgttaattttccatcaaatattaaaccagttatcataacttaaaaagcattgatttatgtttaatcttttcctacgtgcttctataaattggcttccttccaattagtttggcattaaatatcattaacccaagaccctatcagtgattgagaaataaagagttcattttatttttcatttgtaggttttatcatgtgtcttggatcctctcctacagatgtgtactgtatcagccagcaatttaggcacagctgacatggccactttcatggtcaattcactatatatgatgaagacaacattagctctatttgaattcactgacagacgtctggaaatgctacagtttcaggtaaatttttctataaaatgactattgactatgattgaatctttttctctatgtgatagctttaagttattggcttaactagttttaatgaccta

SEQ ID NO: 11224 - DNA, 2300 bp, Homo sapien
ttcctatggccttagatgtcctattgtaatgctctgtgcatactgtcttgcccccaagtgcccatggatctgcattccctttgcagttttcatgtacacacccgccactgccttctacagcttctagcctgagatccaaaatatgccagtgtcccctatctgagctctgagtcaggcaaggcaagaccagaccctcaggtgacccacagaaaggtcagaatgttgcaaacaattctaccctgctctttccatcccaaagggaaaaccaggaattaggctacttcctccagatttcaccatgctgggaaggtgagacaaggtaagtaaaaatgctatgaaatgtcccaccatgttgaaggtagatttctcttggttgagcttttgtttggttgctgtagatctttgacttgttttcagagttcctataaagttatttttgtcaccctagcggtttatttggtgtttctatgggggaacaagggcctgaagcttcctcatccactaacctgctgatgtcattgttaataaaacatttcgaaagaaaattgatgatgggtgaatagcacatgagaaggtacagttatatgtgtggcttcattccatttaattcctctgtcaagaaagaatcaactagaacccgaagacagcccagttaattcaactggttttgtgaggaaaaaaatactgtattagtatgtgtatatctatttcattcaattcaatctaacttaacaagtttgttttagcccctataattagcaaagaaaataaaatatttgggtagttgtataaaaaagcaatgcatagataaaagaaaaataataaagaataaatttatgaaaagaaccaaaaggaacatttggggaaaatttatgaaatgttagctaaccctcataacaatagtttatttcataagtgttgaaatggaatatgaataagcagaaaaaatgtgagtacaatttaggagctattgatgaactctaaaagtgtgaaaagcagaggtaatataaaacatgtacttccgttgggcccagtggctcatgcctgtaatcctagcactttgggaggccaaggcggggtgggggaataacttgacagcagttcaagaccatcctgggcaacatggtgaaaccctatctccactgaaaaaattaaaaaattagggccaggcgtggtggctcatgcctgtaatcgcagcagtttgggaggccgaggcgggtggattgcttgaggccaagagttcaagaccagcctggccaacatgatgaaaccctctctctactaaaaatacaaaaaattagccctgcatggtggcaggtgcctgtaatcccagctacttgggaggctgaggcaggagaatcacttgaacctaggaagtggaggttgcagtgagccgagatcacaccattgcactccagcctgggaaacaagagcaaaactccatctcaaaaaaaaaaaaaaaaaaaatttaagaagttagttggatgatttatgttccagatccctgaggaatcgccacactgacttccacaatggctgaactagtttacagtcccaccaacagtgtaaaagtgttcctatttctccacatcctctccagcacctgttgtttcctgactttttaatgatcgccattctaactggtgtgagatggtatctcaccgtggttttgatttgcatttctctgaaggccagtgatgatgagcattttttcatgttttttggctgcataaatgtcttcttttgagaaatgtctgttcatatccttcgcccactttttgatgagtttgtttttttcttgtaaatttgtttgagttcattgtagattctggatattagccctttgtcagatgagtaggttgcaaaaattttttcccattctgtaggttgcctgttcactctgatggtagtttcttttgctgtgcagaagctctttagtttaattataaatcatgctgctataaagacacatgcacacgtatgtttattgtggcactgttcacaatagcaaagacttggaaccaacccaaatgtccagcaatgatagactggattaagcaaatgtggcaaatatacaccatggaatactatgcagccataaaaaatgatgagttcatgtcctttgtagggacatggatgaagctggaaaccatcattctcagcaaactatcgcaaggacaaaaaaacaaacactgcatgttctcactcataggtgggaattgaacaatgagagcacatggacacaggaaggggaacatcacacaccggggactgttgtggggtggggggagtggggaggg

SEQ ID NO: 11225 - DNA, 2300 bp, Homo sapien
ttagtcagtttcagtcaggtctaaaaaataagaactattgacatggggactgtgggaagcaaaataatagtcccccaaagatgtccaagtcctaatccctggaacctgtgaatatatcacctcatattttggcactacctggtaaacggacttcgcaggtgtgatgaagttaaggatcttggagtggggggatttcctgggtgatctgggtaggcccaatgtaatcacaggaatcctaaacagtggaagagagaacagaagagtagagaaccagagagctggtagtatgagagagagcttgtagcatgagaaagacccggtctgacatgctggctttgaatataggggaaggggccatgaacaaggattgtctgtggcctctaaaggctggaaatggtaagaaaatgggttttccttgaagtctccagaagcaggccagccctgctgacaacttgattttcacccagtgagacccagttttgacttctgacactctgatctgcaagataataaatttttgtggtttgaagacaccaggtttgtggtaatctattacagcaatgataggaactaatagcaggaacatgcgtctttcgcggtctgtttcctgtaacagagtctaaggctaaatggatgctcgctcagagtttgattgaaagaaagaaagaatgaatgaataaatgaatatgtaaactatggaacaatcttctcatcccagaacacttggaaatgatgtcactactttgctatttaaacttctttttctctttcataagctttctttgattaggagcatagaacaccaacaaacccacagacacacacactctcagaatacacacagatacgcatacaaatgaaacaactgtggcttccaaaggacaggcagaggctccccactacccctcgatgtttttaatttaaattaagcctcggttggagaaaacaaaaggctgtccagtttggggccccacagtggtctggtaggatggcccgtagcacctctaatgtcacaacccaggctgtgaaatgttctgaatcacatgaccttagacttttggttcaggctaattaagcctcttccgaccgtacagaatgttctggtttgcagcagttgttgtgcaatcatttaaactgtacacctttgttccagagagctagtttgattctctctgcttctcttttgtttttctgtggagaatccaggcccaggtgggctgtttccttttaaataaataagaatgtaatctacttggtgctctcatgagatgtctgggcttgtggccatcaaggaggctattttcagaggtgggcagtgggatagaaccagttagtacttccaccctgcaaatctcctctctgcctaatggcctctttcttccctcctggggagggcttacctacacgcactctgtatttgaaaagggacagtggtgggaaaggtcactgggagtcagtgggagaaaagttgttgcaaatgaatctctgtccacagagttagtgtgggagggagaggagcaggtcatagtttaaaatttattttatcagatgttccataagcatgaactgggcttaatgatcggactatgtgacttgggtattatggtgttatcattaaattactagtgaatccttactaggggtgaataaggaagaattctcaccatctgtggaagtgagacgatcgcttgaggccaggagctcgagaccagcttggacggcatagcaagaccccatctctacaaaaaaataaaaacagttagctgggtgctgcagcgagttatgattgcaccactgcattccagtctgtgaaacagagtgagacactgactccaaaaataaagaattctcagaatttgagtctgtggtgtctacacatttcccactgtttcagcgtcagcttggactaacgtttttacaacccccagttctgcaatggcgttagaggttttctcaatttcagattgctttacctactgtatatctaaagtgataaagatcttggaaaagaaagtagtgctttcactttggggcaagttgcttagctcatctatgccttagtttcttcatctataaagtggggataatagcaccaaacataaacagttgctgtggggattgaatgactagtgcatgtgaagctgccagtgtggtgcctgcctcggggtgagtgctctgcgaaagtcagctactcttgttattgacaaatgctcatgaggtacaaccacgtgtcaggtaaaggctaggtgactgagtacgaagataactaagacagagtatcctgcccaagggattgtttg

SEQ ID NO: 11226 - DNA, 2300 bp, Homo sapien
gcatgtgttcatcttttgtcattgttcctaaatgacacgtattattaaacaccaatatttgaagtttggtaggagctggcccttgactccaagcttgtttgggttgggacattactttttaatgataggtaggtgacatggtttggctctctgtctccacccaaatcatgtgaaattgtaattcccactgttgggggaggggcctggtgggaggtgataggatcatggtgggagatatcccccttgctgttcttgtgacagtgagttctcatgagatctggtattttaaaagcatgtagcactccccccttctctcgctccctcctgctgccatgtgaagacgtgcctgcttctcctttgcctgtcaccaggattgtaagtttcctaaggcctccccagccacgcctcctgtacagcctgtggacctgtgagccaattaaacctcttttctttctaaattacccagtctcaggttgttctttatagcagtgtgagaagggacaaaaaagtaggagttttgggtttactttatattcaccttcttccatttttaagttgtgcctttgttgtccttcatgagataatttagcaagtcttggtcaacttggaagtgattctacacaggttgtgcagattgtggggtcaatgttcacagcaggacagcctgaggaggagcctatggggagccttgtctgagggtggacctgctgaggctggtggaaagccggtgtcctcctttcctggggatgagggaccaactccagggctccctgatgtccgctttgatgacttcacatacaacgtgtggctctagtgactccacaaccactaagccgtttcaccaacaatgcccagacggaccattcttagccattcccccctactgtctcttgtctctgtttctccctcttctcttacctcccacaaaatagcctttgccatcttagtttctcccgaggctaatttcaccgaactttttgctggccagtgagaattaacttcagttaatcagttaaagagattattcagctaaaaggtaaacaggggagggtatttctagttaattagtgagaaagaagttaaaaagtttaaaggactccttgatttgtagtatgttgtaactggggagctggaatcggtgttacttctgtaggtgctgacacaaaatcagtgggggtgaggccgaggtacctggattgtcagtggcctcccacaccgccctgtgattctgatgcaccccaaagtctgagaactgttgccctgacccaattactcccacagccccagagcacggcaggggtccttgtacagggccctagttcccttgcaatctctttgccttttagttttaaaactagctattcatcgctggttagttaactgttatgcatttctacaggactgcattgttaggagcctcgacttggcttctccacaaccacattcaacattggccttccaaacccactccactcctgtgctgtctattgcaggcctgtgccctcaccatgcgcccggtccggtctggaaacccgagtctctgtgtttccgtcccctctggcttggtcctcaagcctctgcatcttccctgggtcattcaagtcttccaggtgatgcctatattgttagtctctacagtctggccttacagcatcgtcagagctgccctaaggcccaggtggagttgtgggtcctctctccgctgcctccctgagttctgactcttggtgtgttcagggacttcctgcctccgcacctcccaccccatgctttggccacagcacagactcttctgattccgtagctatgcttctgcttttccctccacctggctgctctggtcatagaaattctacccctcacttaagaacacccccagaagtcacctctgtgaagccttctttggttcttctaaaataagtgagttgctccatcctctgtgtctgccagcactttctctgctcctctggacttcattggtcgggggtggggggtgctactgttggtcttgcagccaccctggattgtgacctcgcagaggtcaagggctgtgctgacgccccccatgtctgcgtgttgacagcagacttactggggacacgctgtagagctccgatgatggctgttggccgaatggatgaatggcttcattaacttcactgcaacacgcaggagtccttgatctccccccttgaaaggtattgggggtttccctagacactgccacttcaaagccatacagaaaaaattagagctaaaagaggcaacattgtttatttctcaagaagatgctttggtgt

SEQ ID NO: 11227 - DNA, 2300 bp, Homo sapien
ataaatattctctgacgccctgaaaaaccggaatagaaatgaaggcaaggccaaatttgaagctggcttcctttgccaagaatgatccagtagggcaccgcctatttttagggtgcggctgtctggatcgggggctgcttctgcagagtgtaattggaaaggtggggggaagcaacagctgtactttgggggcctgcctttgagctcatcatctgagttactgaggtcccctagcggctgtcagaggaggcccagactgtccaaatttgatagtaaacgtgaagagaccacaagaccagggtgggaaccagtccccgcccgtccccaatccatccggctcacgctccccaccccacccatgcctagtatcagcaagaagctgttgtgataaatagattatgaagaaacaggagcccggactagagagacgatagtgagaatataaaagaagaaagataatctctctcaatctttttaacttttgtaagaggcctaatttttccttttttcccctcttttctcttttattttttcaacaacctcttgtccaactgactaattttctctagatgccactttttccattgcagaattacttgtaagaaagaaagggattaaaaaacaagagttggaagctgtccttttggacaagatatttaaaaccctactgtccatcttccatcctaagtggtcccatctttctaaaaggaaatgccttccatattcttcctaaaaaagcaaaagcataacaaaacaaaactggaaaactgtttcttctgcttgagacacaagggccattatcttcccacctttggccccactgatccttgacaggatgtcctggacctgcagcccagatgaggaaaggtggggtgtgggtggggggttgactgacacacacagcaagtagcctcaaggaatttgggggtggggcaggctgcgccccaaggctttggtcctatctcccgccccccttgcgtttttacttaacacccgatcacttccgttgcaaataaaaaagaagtaacaaacagctaaatttaattagggataagtaataaaatgacctggttctctctaactgcgctcctgagcccttcgctgccggccctggacttagtggacggagcgggagattcccgcccaggggaagaggttcccacggagggcatgcggtcgcgggtgcctttggattcgtgtgttcagggaggccagataatctcctccccgcgccggagcccctgttcctcatttctagcattttaaaaaaggtcaagaatacagtgaatccggctgggggctgccggctgggtgacgcgcctctggctagaccgaatggcacaggctgagcccgggggtgcggaccggtgggcacggagaagggtccctcggcgcggactcgactgcaggagccgcggcgccgggggtggggggcgtgtgccgctcgcgagggggccggaggacttgacagatcgcagcgaaagaaaacattaaaccaaaacaaaacccaccgattccccacgtcgttcagcaaagacatcgtgggtggagccaggagggagcgattgagtagaattcctcgcggccgcctccgcccgcccaccccgcgcccccggccctcggccccctgccctgccagcccgccgggctcggcccgcagcggaggtcagggagcagcgagcgcctcctcccacccgggcttcccgagtactcggctctgctgctccgtagtaaacaaagtgtcgccggcgcctccacgctggtttgcttcctagcaatcaaaacactgagaaggcgagagaatcacagaaacactcgagaattaccagaaaataatagagatccaaaaaaaaaaaaaggaggtgagtgtgtgaaagagaaaaacaccccactaccccccaccagcccaccgccgcctccccgtggaaaaccgggccccacccagcccggcgcccactggctgcccgggcggcggtgccgcatgcccattggccgcgcgggctgtcggtcaggggcgggccggcgcgcgcgccgccgcgggcggggggcggcggcagatcccgtaagtcgggcggcctggtagtcgcagcagccgctgccgcagccgccacattcaacaggcagcagcgcagcgggcgcgccgctggggagagcaagcggcccgcggcgtccgtccgtccttccgtccgcggccctgtcagctggagcgcggcgcaggctctgccccggcccggcggctctggccggccgtccagtccgtgcggcggaccccgaggagcctcgatgtggatggccccgcg

SEQ ID NO: 11228 - DNA, 2300 bp, Homo sapien
tgggactacaggcgaccgccaccacgcccggctaattttttgtatttttagtagagacgggtttcaccgtgttagccaggatggtctctatctcctgacctcatgatccgcccgcctcggcctccctgcaaggttatttcttacagaatagtctatgatagctaaagactggaaacaagtgaaatattcaccaacatcctggggttcagtaaattgatatttagatacaacagtgtggtggttagctgtaaaaacccttcaatatatatttttaattttttggacctatgtgtcagggacattggtgttataggttctctgtgcctgcctcgtcaatttttttaaagaaagaccaaataaaagtaaactatgacatttgaagaaacaattgggcaggagagcctcaaagatttcaaggatttggggaaagtctgtaggaagactcctttaaccaaataaatattctctgacgccctgaaaaaccggaatagaaatgaaggcaaggccaaatttgaagctggcttcctttgccaagaatgatccagtagggcaccgcctatttttagggtgcggctgtctggatcgggggctgcttctgcagagtgtaattggaaaggtggggggaagcaacagctgtactttgggggcctgcctttgagctcatcatctgagttactgaggtcccctagcggctgtcagaggaggcccagactgtccaaatttgatagtaaacgtgaagagaccacaagaccagggtgggaaccagtccccgcccgtccccaatccatccggctcacgctccccaccccacccatgcctagtatcagcaagaagctgttgtgataaatagattatgaagaaacaggagcccggactagagagacgatagtgagaatataaaagaagaaagataatctctctcaatctttttaacttttgtaagaggcctaatttttccttttttcccctcttttctcttttattttttcaacaacctcttgtccaactgactaattttctctagatgccactttttccattgcagaattacttgtaagaaagaaagggattaaaaaacaagagttggaagctgtccttttggacaagatatttaaaaccctactgtccatcttccatcctaagtggtcccatctttctaaaaggaaatgccttccatattcttcctaaaaaagcaaaagcataacaaaacaaaactggaaaactgtttcttctgcttgagacacaagggccattatcttcccacctttggccccactgatccttgacaggatgtcctggacctgcagcccagatgaggaaaggtggggtgtgggtggggggttgactgacacacacagcaagtagcctcaaggaatttgggggtggggcaggctgcgccccaaggctttggtcctatctcccgccccccttgcgtttttacttaacacccgatcacttccgttgcaaataaaaaagaagtaacaaacagctaaatttaattagggataagtaataaaatgacctggttctctctaactgcgctcctgagcccttcgctgccggccctggacttagtggacggagcgggagattcccgcccaggggaagaggttcccacggagggcatgcggtcgcgggtgcctttggattcgtgtgttcagggaggccagataatctcctccccgcgccggagcccctgttcctcatttctagcattttaaaaaaggtcaagaatacagtgaatccggctgggggctgccggctgggtgacgcgcctctggctagaccgaatggcacaggctgagcccgggggtgcggaccggtgggcacggagaagggtccctcggcgcggactcgactgcaggagccgcggcgccgggggtggggggcgtgtgccgctcgcgagggggccggaggacttgacagatcgcagcgaaagaaaacattaaaccaaaacaaaacccaccgattccccacgtcgttcagcaaagacatcgtgggtggagccaggagggagcgattgagtagaattcctcgcggccgcctccgcccgcccaccccgcgcccccggccctcggccccctgccctgccagcccgccgggctcggcccgcagcggaggtcagggagcagcgagcgcctcctcccacccgggcttcccgagtactcggctctgctgctccgtagtaaacaaagtgtcgccggcgcctccacgctggtttgcttcctagcaatcaaaacactgagaaggcgagagaatcacagaaacactcgagaattaccagaaaataatagagatcc

SEQ ID NO: 11229 - DNA, 2300 bp, Homo sapien
ggaggtggaggttgcagtgagctgagatagcaccactgcactccagcctcggtgacagagcaagactccatctcaacaataacaaagatacattttcatcaacatatttataattcatacacttttctgtattgaagttgctaaagtttataggaggccgtagttttggacaagcttcctgtactagcccccagcacaccagagcaaaccagaatagtcacttgtgctaagtgccaagtaatcaaactgaactttgaaatcagggccagttttccaaaagcaggagattcacagcaccaatcagaggggccctagtttacctgagccagcatgacaaggaatccctctgttttaaccctataaggaaggtaactttgaaatgaccaatctgatttttgttccctgtttctattttcttcaactcttttgtgcttgtaaagccaaacccctctgctcaactcactggaacactattctagaatcacaaataaaaaccaattatgctaaatttgccataattttgttttttgacaaagttatgctttaatttttgtttgtttttttacaaatcagacaaagtaagcatccccaagtgtactgtgtagagcattcagtcacaaaggttctgttagtgttagtggatctcaggaagatctgctcaatgtaagctgtgttttagtatcacaaaaactcacctccccaccttgattattttttgagaggacagggaaaatgttgatgtaaactttggaatgcctttatggaattttaggctagtggttcccatgtgtcctattagccaacatttcccaccagatttattctcatccccttccaagtttgggaaccccacatctcttctggggtcacagttccctgtttcatgagggacaggtaaaagccaagtctctctcttgcatcttttcatccttttttttttttgagacggggtctcactctgttgcccaggctggagtgcagtggcacaatcttggctcactgcagcttccgcctcccgggttcaagctattctcctgcctcagcctcccgagtagctgggattataggcactcgccaccacgccaggttaatttttgcatttttagtagagtcagggtttcactatgttgaccaggctggtcttcacccctggcctcaagtgatctgcccgcctcggcttccgtaagtactgggattacaggtatgagccactgtgcccccggcgtaaatctttttttcttttcttttttgtttttttgagacaaagaatctcgccctgtagcccaagctggagtgcaatggcgcgatctcggctcactgcagcccccacctcccgagttcaagcgcttctcctgcctcagcctccccagtagctgggattacaggcgcccgccaccacggccggctaattgtgtgtgtgtgtgtgtgtgtgtgtttgtattttttttttttttttttttttttagtagagatggggtttcaccatgttggccaggctggtctcgcacccgtgacctcaagtgacccacccgcctcggcctcccaaagtgctgggattacaggcgtgagccaccgtgcccggccataaagctatttttgaaaaatgaaacctatgtctcattttgactctacatcaaaaataaagactgaaaggaaacgctaattcatagggcagcaggtcttttagtaattttttttaaacctctttggtggccatggcgcattttgagaacgtggtgaacgctgtagacccttcccctccaaacatcgcaaaatattgtctgttaaagaagagactgatctcactggcaccatctgtagtttttgcacaactggtcacgccctccactgtcgggttcgccggtctgggacccgcctcggccagcgaacctttgctgaactctggcgaggactccgcctctaggactacaatcgcggggtgggtcgggtcgcttggaggcaactggctccgcccggccgcgggcgagtccggaacacagttacccgcccctgtagcccaccggagcgcaaagggggaggaaggcgccaggccggaagcggaagagagggcggggacgtgtttggcagcgggacgcaccatttcagttgtgttcttggttcatttcgtgtctcggcgatgtttcctagagtctcgacgttcctacctcttcgccccctttcccgccaccctttgtcctctggaagcccggagacatcagcggctgcgattatgctactcactgttcggcacggaacagtcaggtaccgcagttcagcgctgttggcccggtaggtcctca

SEQ ID NO: 11230 - DNA, 2300 bp, Homo sapien
catctggttttgtggcccccacccaggaaccgactcagcgtaagaggacagtttagactccctatgatttcatctccaacatgaccaatcagtactcccactcactggccccctacccaccaaattatccctaaaaactccaaaccccgaattcttggggagattgatttgagtaataataaaactctggtctcctgcacagctggttctgcgtgaattaaactgtttctctattgcaattcccccatcttgataaattggctcagttgaggcagcgggcgagaagaacccattgggcagttacatcactgtgttgcccaggttcaactcgaactcctgggctcaagcaatcctcctgcctcagcctcccaacatgttgggattacaggcatgagccaccacacccagccaagtctgtccttaatcagggttcctttgggtctcattttctgaagctgcaaaagctattggaccaggtgacattgccaacccctttaagctgctgtaactgtagtttcagctgctggatctgctttcagttagttatgttccccatcactttggacaagtcatcccaactccctggcttgtttttgtaactcgattacagtccagaagcccaagttctaaagtgctgattctgatgagtgtccatgtaccaggcactctgatcccatcatagcatctactacagcctgggaggtctactcaagtgtgcattcatgttaagcactaacaccaattaaatcacttaaataacgtaggtaattatccaatagcacatccagacgtggtggctcacacgtgtaatcccagcactttgagaggccgaggcaggcagatcacctgaggtcaggagttcgagaccagcccggccaaggtggtgaaaccctgtctctactaaaaaatacaaaattagctgggtgtggtggcgcatgcctgtaatcccagctacttgggaagctaaggcaggagaatcgcttgaacccaggagggggaggttgcagtgagctgagattgcaccattgcactccagctcgggtgacagagtgagactctgtctcaaaaaaaaaaagaaaaaaaaagaaaaaaataataatccaacagcacatctaaacaaggcttaaagttgtaaaataaaattacactgtgtggagggtgtgtgtgtgtgtgtgtgtgtgtgtgtgtgggtgagagagagagagagagagagatgaggtctctgtcatccaggctggagtgcaacagtgccatcatagctcactgcggcctccaattcctggcctcaagcgatcctcccgccttggcctcccaaatagctaagaatagaggcatgtgtcaccacacctttttttttttgtcgttgtttgtttgtttttatgaaacggagtctcgctgtgtagcccaggctggagtgtagtgatgcaatcttggctcactgcaaccttcacctcccagattcaagcgattctcctgcctcagcctccctagtagctggggttacagacacgcaccaccacgctggataaatttttgtaattttagtacacggggtttcaccatgttggccaggctggtcttggactcctgacctcaggtgatccgcctacctcggcctcccacagtgctgggattacaggcgtgagccaccatgcccggctaattcctgtattttcatacttagttgtatttcctattagggccttggatcccgagtataattttgtactcaaatataatttataaataaggccttagcctcccaacaaggtcaaagtagctaaaaagtaagtcctcccaaccactgacattaccagcccccagcccccagtcccagcccagcgggctaacaagggtccggcctcagagagggtctcggggatcccagaggtgggaaagtctccggaggcgcaggccccgctctccaccttcaccagggtcggcggcagcaccacgccgggtcgcgggctggctgtgcgcgccgcggccccacgcccacttccgcttcccgtgctgggggcggtggcagggccggtgggcggtggcggctcccggtctcggctcgggcacggccctgggcaggccgcccgccagccgcaggggcgctcctgagcttcgcggggccgcagtccgggatgcctgcgcgaagggaggggcgaagggccggccgttgccgacgtgggtgttaagtggccgccccagccggcgacccggagccgagagcgggcggcggagcctgagctggacgcggccacgccggcgcggcggtgagcgcagcccggtctggcgcctgcagctgc

SEQ ID NO: 11231 - DNA, 2300 bp, Homo sapien
taagcagaccctacatctagaatgggttaagcaaccatttataagcatcttcatgagaaatgatcacctctgggtttttctgatatttgaaataaacaaggtaccaaactgtatttccctcaacacataactgtccaaattgcatgtacaagtggaggtttacgtaaaagccctgacagaactatattccaccttttgaattaggtgcataaggctactgaccactctatattttaccaagagcaagagcggtcacttttctatttcagtacaattatggacagaaatgatatgatgcaaaatagaggttcttccataaagtttaagatgtagggtagaagggaagacaaaaagcaaaattcccaagaaatcagaataacttcacactggtcttgtactccaagaaaccctgagatgaactgtagtcctcaaacacctgtgcttggctcaggcccaccaagacacttcagtatgcttccaactggttcatcatcaacttcctgctatattcgtaggccaaaaagagtgctccattggcagggaatgctcgaatcatagtaggtttcagtccagaatataaggccgttattcctagcaaataaaagggcggtcaaagactgcaacaatccctcctttggggatacccacgcagctgcatagcataggtatatttacacatgcaaacccagacaacagtgctaaaaaccaacaagtcatagaaggatgcattcccagcttttcctaaatagactaatggaaacaaggacaagtatcaggtctcctggcaaaactgactgatgctcaggtaacataccccaattccacgcttggttaactcttagtatatggatggggcagagctgaggcctgagatggccagacagaggcaaccatggagatagaggtggcagcagctttgcagcttcacctgggcagtggcaggaacaccaaccttgaagttggagacctgtgtatagtattagtactgcccagggtggttatgaagattgaattagataagggaggtgtaagtactttgtaaaactttacatgttatacaaatgtaagggaggattactatgagtaacagacaaggtatctgtcctctatttgggacacaaagtttctgtgttactgtcctctttctttttacaatcaaaacagagttcatatctcagattttttttttttttttttttttgagacagagtctcgctgttgcccaggctggagtgcagtggtgcaatctcagctcactgcaagctccgcctcccaggttgacgccattctcctgtctcagcctcccgagtagctgggactacaggtgcctgccaccacgcctggctgatttttttggtatttttagtagagacggggtttcaccgtgttagccaggatggtctcgatctcctgacctcatgatccacctgcctcagcctcccaaagtgctgggatcacaggcatgagccaccacgcccggcccgtatctcagattttaagatgtatatagatgcttgaaaaacaggtatttactcaccttcatttttcacaacatttataaaggttctgataaatcctgcctgttttccagacatggaaagaacttgaattctggatttgatacaatccactgggtataccgcaagccagaggcaaatcccaccaactccaccacttaacatcaaaggtacagggcctagagaaaaaaaaaatagcaaatggtattttgtctcaagaacagctgatgtgacatttccagaggtcaatgtagtaatggctgcaggtagatgaaaataaaaatgctaatgctacagaatacaattctttgaggaaaactgtcaaagctcttgttcccaagctctaagaacacagggttttgtttggtagcccaggtctactcctgggtcttgccaagtacaagaagccttagtgagggttatatttcgcttggtcactgaggtgtcaagggctggcccacacgaaccagcaggcctccagctgagtggcaaccccctacagtggggagaagacaggccaaacacaatctatgtcttttttcaactttctcactcttaagtattttaatagccctgattcttcatttatcattaaaagccaaaattgtttttattaaacatagcaattaagtctgggagcttgactaaccacagaatagattcaacacacactgagggagatggtaagaaaaactcacttatgtgagccaaacattgcatgtagttgtaccaaccagctaaacacgataagctacaaagaactatggttttcactgctctcaa

SEQ ID NO: 11232 - DNA, 2300 bp, Homo sapien
ataaaccttatatctccttagctggctctgcctctcctatagtaccatcccaatcggaatcaatggggatctggaaggacaactggccatttagataacaagtgaaaattaaccaatgtaattggttacattgtaacattattattaaaaatatttttaaaattactatataacatattattattaaaaaatacatatgaacatttcaataaaggcagaaaaagcacttgatattgaatgctttcctcttgatgttacaaccaagacaaggaagtccattatcactatttctattcaatagtggacatactagccagcaacaaaactaaaacgtataaagattacagagaagttaaaccatctttattcacgattgcaagattgtcatcacataaattccaaaagactctacacagtattacaaataataagggaacttagcaagatgcttgaatgtaacatcaatatgtaaaaatcaatagcgtttctatagtcttacaacaaacgagaatatttaaaaaatgctatttaacatcgcattcaaaacactattcaaaaagaaatctaatgaaagatatgtttgatctctatactgcagtctatccaaacacagctgcattaaagtataaatatgtgtataatctacaaaacattgccaggagaaattagaggccacttaaataaacggccacttaaatggattgaaggacttaatattgttaatatactagttatccccaaacagatctatagatccaatgcaagcccagtacaagtcccagcagttttgttttttttaaaactgacaagctaattccaaaatcacctagaaatacaatggccttagaataagccaaagcaatcttgggagaataaaggacttcaagacttattataaagctacgttaattaacacagtttggtagtggtataaagtcagataaagaccactccctccagctcctcaatctgaccccacccctggaacgcgctggcagctttccccatgggatgtgcatgggtcaaagggcgctgagggaggacctgaacgactgggttgggaaacaaagcggccctgagatcacttcaggccaccttccgcccctcagtgctttcgtatagaaaaggttttccttcttgatctgggaagcccactaagaagaaagcctgggctgtggagttatgaggaagggaatgaatagtacgcgggcgccgggcgcgtctccccgggcaccagaaggcttttagccgctgctaggtcagaacgacttctagcgagtcccagcccttttccattcccagcgcaatgatcgcgggaatccaggcgccatccaggcccctctgttcactgaaaagaccacgcagccgccagtgacatcacggagacgaaagccatgataaaacccagggaaaacggagctcgaagtagcttgtgttttatatatatatatatatatatatatatatatttttttttttttttttttttttttttttttttgagacggagtcttgctctgtcgcccaggctggagtacagtggtccgatctcggcttactgcaacctctgccgcccgggttcaagggattctcctgcctcatcctcccgagtagctgggattacaggcgcgtgccaccacgcccggctagtttttatatttttagtagacggggtttcagcatcttggccaggctggtcttgaattcctgacctcgtgatccacccgtctcggcctcccaaagtgctgggattacaggtgtgagccaccacgctcggcctgtagcttgtgttattaacggacaaggaaacgcccctgcgcgtacacgttcttgagggataacagtatgttacaaaagtgcttctgagctactactcctggaggctcggtcggagtgcccgcggacgtgggcgcggtggaaaagagggagaacctgtaggcccaggcctccgtaaacatggctacgatgggcggggactgggagcgcaggtcccgggccgggttgcgggctgggaggactcggtcctccactgtcccagccggccacgcgcccgcgtgtcgcctcccgtcccgctagcagcacgctgcgtggctgctcgttggctgcttaagacggaagctcggttgatgtttctgcagaagttttcccccttggtcggtggcggagctgctgagcgcgatagtagcagctccggcggcagcaacattgactacgaggaatggcggcggctgccgcaggacctgcagcatcccagaggtgcgtgtttttccttccctttgctatttattttataccccttt

SEQ ID NO: 11233 - DNA, 2300 bp, Homo sapien
atgttgccccggttggtcttgaatgtgtagtctcaagtgactccttccccaccagcctgctaaaatgctggtgttacaggtgtaagccaccatgcctggcctgataagatatttaaaacagtatttgtcatcaatataatcctttttgtcatcactgtgggcacacaggtttgggaggtacagaagaaattttagacaatggttatttccccagaagaggttttgcttcagttgtcttggtgcctggcacattgccttgcaaataattggtactcaaacatgtattcagttgaattaaggggacacagttttcaaatgtaagacaatgtactacaattcatgctaaattggttgtacgggcagtaattgctgtgtttttgaagggagcagtccttgtagtttgaggcatagatgttgggaggctttgtgaaataaatggggcttgagcattgaatggaaaagatgggattgaatgctggcaagtagaagatgggtgtgttgcaggcataggaaataacagaagttgagaaaagaggcaagactgaatagtttgtgtggaggaacataaggcaggtctactacagaggaattgggttggataataatttaaggaaaaaggtattataaataataataagtacaaggccaaatgtatctatctgtgatcaatttaaatcaaaacactttttttttccctcttctagatatggtacattgctcaaaaaccacctgaatgtgctaaaaatactttcccagtgttggagttaaacttcctgttaaaagggagtggatgagagtgggaaatttgctgggttggaatttagtgtagtgagtagaaatatcatctgaattggattcttaattcttattttattttgagttcttgctaggaaaatcacagtcatccatgatgacccctaaagcccaggacacatagggacttggctttacagaaattaggaaaccgattaagtgatttggctgacacatactagctggatttacgttttcagggaaactgattcactagatcagcttcatccccagacttgtctctttaaaattattaggaaattactggccatcctttccttggagtcaacttcttttttaaagtgtttgtaataaaactgtaaatgctaattcaaagaactaatgttatttaatgtgattatttttgtatctttcttttcaggccataatcatttgatgaaaatgtagtaagattgtgataaacacctaaagaattttttccttttgttagtattgataactttttttttaaataggcaaacatctttggcagacattttaaaagcctttgtcccttcgctgtgaaattgttttcactactaagttgcgtttctgtttttctactattgtaaagtgcagttctttgcatgttctaatttgccatgacgtggtcaagtgctgtttccttcctgttgcttgcaagcctatactagagataaggatacatttcagtgcattaaaaaagaagccactgaagacaggcttaagcatggtaatttttaaaacattttacttatcagaagcctttttaaagaacagaaagagtgggctttaatttctgcttatttttaaaagatttaaaaatacttcttactaaactttaaatgtatttgattttaaatccttatataaatcctcttaaaggtgaaaatatatacgttgtgaaattactcattgggtagcagtttctatgtatgtgctttgctgagttggtgaaaagaaggaaattgtttatatatcctttattgcgattacaaccctcattattgctggggttttttgaccttttttttttttttaatattgagtacttttaacagtagtttaactggagagtgggggagagaggcataattttcagtagtgacagatgatcttagcaggagcaaactgttcaaataaaatatgtaacttttaaaaaagagcgtatgtgcattagtcgtgtcgattttatttaaaaacgttaataataaaaaaatgctttagcgatactgccctctgtatcagttattatatcctaagtgggtgattgctttttcataactaatctgagcttttgttttttaggccaagaagcttgagagaagaaaaatttcagaaaaattgtctcaatttgactagaatatcaatgaaccaggaaaactgaagcaccttccctaaagaaaacttgggtatacaattactccacagacagagctgagggttttttacccaaatcagtcactggattttgctgcctgatacgtgaatcttcttggaatttttct

SEQ ID NO: 11234 - DNA, 2300 bp, Homo sapien
ggatacccctgggcagagggataatatattgtaatggcagctctggagtcatctccttaggaacagctaagatatttgtttctgttgaagaggtgtaattattttccctttaattctcttcacattactggtggccagagtacttcctttaaattatgtttggaatatttgccattattaagtaatgaggtgcattatataaatggattttctcaatagcagaagcttatccttttagatacctgttctacataaaacatctcacacacttgatgttacacactttggctttcgaaggcctgtcttaaactaatgctgacttggagacacttagtgtatggtaatatacttagggaatattacaacttactgaccttatataatggcttcatatctgaatacttttaaagttatgtttatttttagttttgtaaggtgggtttttttaatgtcattatcagctatttcactttttctgacatccttttataatactgttgccctcttttacctgttacagtttttatttctaattagccaaaagaagataatcaaattgttaggtttacattcatgttatctaaaataaatttcagatatggaaaattacctggggggaactttccagggaacaagtgaatctcccgtgactgctcagcggaccttgtttcttggtgcatgggctctgaatagtcattttgtgtaagtgaactaaagtaagctaaatatgacatttgacaggagaaaacatggtctatatttctttttaataaatttttaattaacagtttgtaaaaccatggagattatttttcagtaaaaggataaaccaagcaatcttcagtgtaaggaataaatagacagcaggcagaaagttggttcacaatcattgctgttttgcagcattttgtaaagttcctaagtcagtgacagcttgtgctctcaactatgcctctggtaagccagaataaactcccaactaattaactaaagggagaaaaccttgctaaatcctatttactttttgtaagataccaggacgaaggctatctattgagttgcatttatcatttcaagcgctttggaagtacttagtgctttcaagccattttgattaatttaagctcttagaataaattaataagtattcacccagaggccagaataagtaggtgtagtaatatttcagtggcttgggcactttgtcagatgtattctgacttggaaggcagagcttcactggccacagttgtccccttaggttggccttgccacaattgcagtggagctgtagcagggtgcctggcacaagaggcttgaaatacatgtagaaaattttgcttgaaaggtaagtcaaactgtagctatcatttggaagtagtagagttatgaactatgatcgtaccaatacttttttaaaagggttttatcaagcttgcagtttatttaaaatcattttgctttgttggactttaaattcctaacattggagtgtgggtttttaaaaattctgtaaaccagtttaattcacacttatttttccactgaactttgaattttctagtggattttatctgtttagtgaacttacagatctgcatctggctttgtagtttgctagcctttccagactacatagcaatatatctctttcatatgagggttaatgagtagccagattacactcaccagtccattgttacattaagagccacagagtttgctatctcccttccatcccctttcatacttttttcctttcacagttttatttgatatagtaaagcaacttttaaaaattgagatttttatattttaaaacaatatatagtttttaattttgctcccttgtaggttcttactctattttattgttagttttaaattatggcaattaatatgagcttagtaatggtctaatcaaggtagatcttgctccttgcctcttcatccccactttcctataccgtttttacctgcagatttgcatgtttgacctagcagaataattgggtccacagcaacatgggcgtgcctcccttagaaacacttggtttcatgtatgactcataagctgaagcacagacaccacttccccaatctacaggagccattttaacagctaaaacttgtcggattgctttttattttcaagctcaaaagacgatagagaaagaatacttgaaggtaacttgttacaattttgtatgtttgcttctggctttttcttgagctgataaacagagggtggttcttacctgttgaagaacatggctgaatgtgttctttaaccctctgat

SEQ ID NO: 11235 - DNA, 2300 bp, Homo sapien
gacgatttaaaatacttaggctttttctttctttttaacaaggtaagcctaattaatccttaatcacgcagatcacattaacaaatttactgtgcagttaaagctacaaaatagtctgggaacacacatactaacaaccaaaacatctgctttcagtaatggcactgaccagaaacccatctacaagagtcactttttccttcttcgtttgttcccagaggcccaataaacattatagccgaccctattttctaatttcagcttgcatttaagataacgcttttgtttcatttacagctcacatgctgctgacacagctgtcccttctttgtaataaacacagggcttctatatttaaaaatacagtgaaactttgttttaacgtcccctccccagtctccagccaattttctctttcccaagccccacctccaccccaggatgttttgccgttgttttaatcaatttttttctttaaatcaaccgcgctcaaaatgttagaccctttggaaagtcgatatacttatttaaagccatctcatcagagtggtatttttctcctccatagctcgtggtgtgtatttttaaagggaaagaaaaaagattctcgttcccaaaggccttttttcgagggtactttccgtgactgcgaccagcgccccttaagtcaagttgggaagacctcgcaggccggcctcgcgcttgctcaggcgccgcgggtggagacgcgagcgcacacgcggcggaaaggggcgccgggcggctgcgcggccgggaaagcgcgtccccccgggagggcgcggaaggcacactgtgttccgtggggcctcgtaaataccctgcggccagagaaccactagagctactggtccgggcgcgggctctggggcgcccagggcaggggggtcagcccgtcctgcataggaagagtcgcaagagcggctgaagagggtgtgggccggacgggggcgctgggaggagataacgcaaggccggagttaatcatcacctcccgggcgtctggaaaactacgggccggaggggcgggggagcagcccaggggaaagtgaaactccctcagggcccaccagccccgtgagccggaggcgggagggagaaggatcggaagcgcattcgcttctccagcaggcacggcgtggcactcgaggctccaaaagccgcagcccagctcctggcgccactaactacagtaatgcttattttctacaaactcacccagacggggacaagaaaggagccagaacacaagatttaaaaagtcagccctccaaaccgatagttgcaaaaaaaaagaaaaataaggaagcgttcccataccgggagtcgaacccgggccacctgggtgaaaaccaggaatcctaaccgctagaccatatgggaagtgctatgagaaactgccgtgacccacctgacaagcataagtgcctctgcctccttcgccgcacctctcgccaccgccgcctctgcgctactgaagctgctgctgccgccgccgccgccgccgccgccgccgccgctgctgctgcccacacgctcccgagctagggaacaagccccatccgagcgcgtgggcgtcgtaggggagaggaggggcggggccgctccgctgcaacagcaaagtttgaggcgaagcctagcgactcgcagcgccggtcccgcagtttcacctcttttttttttaactccgccagaggaccccgacccacaggtcccggttgctccgctggtcaaagtgcgtgcggagtagttggcaaagttgagagcggagacgtctctgggaacagctgtttgcgttccgggcggaggcggcgcgctgagctccttggccttgagccagcgagcctagaaggaggatggaggttttgggccccaggggaggacacagagacggcgggatggcgcagggacttgaggcttgagatcccgtccttcagctcaggtcccgtcgcgcttttaccccttcccggtgacctcaacccctttataccgaccccacctctttggagccgggagtaccgcccctgtagggggaggggagaggaggcgatttcgaacgcggattggatcgtctgggcacccgtagttgggaacagcggaacgctggtcccggggactgagtaaggtgtctggatcggagggaggttcgggtgggcatcgggcggctggaagagctcgactcgtcccgctgggaaagcgcgagtctgagtggaaccctggacgacttgcagagcggctggcgcagtcatgtgagttgggtctcaggccctgaacaacgaggt

SEQ ID NO: 11236 - DNA, 2300 bp, Homo sapien
cacaattctttgggtatgacagtattatgaacaccaccattataatataggtgcttcataacatgaatgatatgaccaactcattgcccatttcccaaaaggccacagagaaataatttaatatataatcaaagtcaggttgatgaaaaggaagaaggctcacagctttcataggggactgagaagacagaaatcttctgatgttttgaaaatgcaagagcaatgtacataaaagtgctttgtaaactgagtttacatcaaaaaggagcacttcattcaacacaattattattagaatctctaacagcggaattatcatacaggcctattgtctgctatccagcacttgcagtaatcacagaatttctttggctgtgacttccagtagtccgccctgaaaaagagagacaacaaggctaagctcatgtaaaacttaaaaaaggttaaattctgcatgctttacagtttttaaagtttgaaatatatgcccctgctactgaatcttgtcttgttatgtatagtcgttttattatttatctggttggagcacagtcaattgaaattctgttgccagcggagtagaaaaagtctgtatctgattcattacaaaactcccttcaataaaatggctttcaaaaattcctcacttgttatcgtcatcgttatgaaaaactaaggaacatcttagaagaacatttatcctttctggctttgggggaggttgctgtaatggaaacctgaagaaactcataaagtttgccttaaatcaagttattcccaccaagagaacaacgtacaagactactctggggaaaactgtagttcctcccagactctcagttaaaacaaactgttcttgagcctcaaggcaagagagaactggaaaagccatgggacttcgtagacggccgacaaaaaaaaaaaaaaaaaaaaaaaaaaaaccattacgctatccagggctggccgcttccagtgggcgggggaggccgcagcccagccctagtttcacaataccctagggttcaggggcttcggaaacccaaggggtgcatgcgacccccgacagcgtcgtagagagagcactgcgtcgcttcacccgcggccgtccaaccagccccctgaaccggccgccggcctccccctagagcccgtgccccataccccagggcgttcagcggggtaacatttctaccccgccctgagaaccggccctgcaggtctggggccggtcccgagcgagttaagaacgcgtctgtcacgcccccggccgaagggcgggaggagaggaggggaagacccgggcgagaaagggcggcccagagaaacaacacctcgttgttcagggcctgagacccaactcacatgactgcgccagccgctctgcaagtcgtccagggttccactcagactcgcgctttcccagcgggacgagtcgagctcttccagccgcccgatgcccacccgaacctccctccgatccagacaccttactcagtccccgggaccagcgttccgctgttcccaactacgggtgcccagacgatccaatccgcgttcgaaatcgcctcctctcccctccccctacaggggcggtactcccggctccaaagaggtggggtcggtataaaggggttgaggtcaccgggaaggggtaaaagcgcgacgggacctgagctgaaggacgggatctcaagcctcaagtccctgcgccatcccgccgtctctgtgtcctcccctggggcccaaaacctccatcctccttctaggctcgctggctcaaggccaaggagctcagcgcgccgcctccgcccggaacgcaaacagctgttcccagagacgtctccgctctcaactttgccaactactccgcacgcactttgaccagcggagcaaccgggacctgtgggtcggggtcctctggcggagttaaaaaaaaaagaggtgaaactgcgggaccggcgctgcgagtcgctaggcttcgcctcaaactttgctgttgcagcggagcggccccgcccctcctctcccctacgacgcccacgcgctcggatggggcttgttccctagctcgggagcgtgtgggcagcagcagcggcggcggcggcggcggcggcggcggcggcagcagcagcttcagtagcgcagaggcggcggtggcgagaggtgcggcgaaggaggcagaggcacttatgcttgtcaggtgggtcacggcagtttctcatagcacttcccatatggtctagcggttaggattcctggttttcacccaggtggcccgggttcgactcccggtatgggaa

SEQ ID NO: 11237 - DNA, 2300 bp, Homo sapien
ttgttggtctctgagaccaagggaatattattcatttgcctccattctgccctaactgggttgtagaccttcatgactgggatatcacagatacaatagatctcctcattgaagacgcaggcttcctgaaagtcattgcgcttcagagaaacgcacttcagccacatattgtggctaggatcataacagaacatgcgcttactgttgagagcatagagatagtctcgaattaccattaggtcaaaggataaaaaagaatggggcagtggagccaccaatgcccactggtttctcttaacattgtagcattccacttccttcaacttaactccagtaatagggtctcgcccccccaaaatgtagatatagccattgagatatgccacatccatgccctcacgacacagcaagcgatctgcaagttgctgccaactattctgagctggtttatacacccagaggtctgtcctgggctgagcagctagatagatgtcatggtcaggagagatacagacagctaaagtggtgacagtcctagtgtgagccagacaggtcaaaggtgacggcactttgtaaaggtcccccgagtatggatcacagcagagaaagggatctctggggtgtccaaagaagatcaccatctccttggcacacatacccagtctctggggtggattttctgctgcagatacaagagagttgctgctgctactgctgctgctgctgtttggcactggcaccagagacttgtacaacaggtcaccatagcgcatctgcagggccccttcaataacgtccaggcagtacttcttcacgatgggcttggtcagcagcccttctaagtagtcctgatcttcttcagtgaagtgcatccagcgcacgcacttgaagacttctgcagcactgggaccccgctctttgggagcagcctccagccactgcactgccacatggcacactgtctgctcactctccacgtccagactatccaagcgcaggacagccagcagctgggccagggtcagatctgctagagtctcctcccgaattgaacccatgtggctgagttgcttgaagttctgagctatataggactgggcctgggatcgcagcttgcgatggccaaaggcatctgcaaacttgaggatggcggtgcagttggtcaggtcaagacgtcgggctaagaaggaggcacaggcttcccgcacatattccagctgtagcatgtcggaggccgcgtacaggcgctccacgttggcctcactgagagacacacgacccgtgtagcagtagtcgaccaacacctcgaaggactcggcgtccacatcgtgcatggtcacgctggcctgctggctctcgtacatgccacctgtgaacatgctcttgaagtagggacatgccgcggccagcacattgcggttgcaggggaacaggcgacccgtgccaggcccgctgccaggcgtcaccacctcgatggtcacatcacacagcagccgcgcatcgtagaaggacttgagctgtgccagcagggctgcagaatgggccgtgtcctttaattcctctggacccgtgaaaaaggccgaaactgtgggtttgtgaatcttcttgggccgcttcccaccacggggactggctaggcggcgagagcgcggggcgtcttcccgggactgcatggtggagatggcgacgggcgctgatggcgagaaacgctgcaggacccggctctggctcctcctcaaccttccctcgctgacgctaagatagcagcgtctccgaagagacagcagcacgagcccatttactgaattcaaccctaccccgcagaaccgcctcccgttatcgtttagacagtggctgactcaccctctctcactcccgcgtcctttctccgcgtctgctcgccttcacaggacccgctggcttggagccgcagaagccgctactgcagcgtgggcgacaatgctaggcgcccaggagaactaccgctcccaggttgcctttcgcgccccgagggctgctgggactctcggactcccgggccgagaccgagggaaagaatccgctttgcatgtcgggagtagtagtttgtgtaatatcgcgatccttctctggtgttccttgttttagctgacgacactcgagagcgccaattttcctagattcgattttgtggtttggaactgtggttttggaatccagagtagtcgcctcgttctagtatgtattgtttgacttgtctctttgaactgtttcttcttttgtaagacgtgaacagtagtatttcataggattgtgtgaag

SEQ ID NO: 11238 - DNA, 2300 bp, Homo sapien
gtccagccactagtgtgagctttgatttttgagaatggctaatttctggatagctgtaaggacttaaacaggggggctgggcgcggtggctcacgcttgtaatcccagcactttgggaggccgaggcgggtggattacctgaggtcaggattttgagaccagcctggccaacgtggcgaaaccccatctcaactaaaagtaaaaaaaaaaaaaaaaaaattagccggtcatggtggtgggtgtctgtaatcctagctactcaggaggctgaggcaggagaatcgcttgaacccgggaggcggaggttgcagtgagccaagaccgcgccactgcaactccagcctgggtgacaagagcgagactccatctcaaaaaaaaaaaaaaaagacttaaataagttagtgagttgggttctgagtggtactcctcagttgtcataaacctctttctttccatagcataccaaaataacgtgcaattccaaaagtaaactggctgtctctataaatgttagttcccttatcttgtgctaacatgcaagtttgggtgagtgcttaagaattcaatgatttgggccatgttaacttaagtggagatttcaacttaataggctgttgaaaatctgcaatagtgtatcctgcttaaaattccccatttgtactcctgaggtaagaaccatctacaaaggtgatatcaaggtctctgagaggagttctggtgatgtcagagtgaggaaatgtgaatgactgtgtgacggtgattcagtcacaaggttgtccttcagagggaatgggaagaagagtggcttgattgttttgactacggtggacagtgatgagagaggaagacagtggcagggtttcacaggaggtgagtccgaagcggaaacgtgttaggtgttctcagtgacttctaatgtctgaactgcacggggtaagtaaaggttgagtgaatgactagaaataaagtcagctctgatggagaggcaacttcatacaagcaaggggagaaatgcttgagccactgggtctaaaaggatgctaaattaccaaccaggcctctggcttccattgtgttttggggtgaggaccccctaaagcatgtctcttcttttgtgtaaaaaagggaaaggggtactgaatattggagagaccaagtgggagaagtggctacagaggacttcaggttttgaaatgcagatatggaaggaaagtctcaaagtcaggtgactggaggtggtctccttttagtcatggcaaataaggacaggcaattgtgaaaaagccagggatctaattccagcgatagccaaccaatcctacaaaccctgagttatcttttggtaccagggagaggcatagtgagtaaaaaaaaaaaaaaaaaaaaaatcacttctaatggatacatacactaatacaagatgttaataataagggaactgtgaagtggggagagatatatggaagttccctgtccctgctgctcaatttttccgtaaacctaaaaataaaatctaatttacacacacacacacacacgcccctaaaaagggatctctgctggaacttgcaaggttttctgttttggggggttttttgttttcctacaggctcataatttcaaattagtggtgcttcctttttttttttttaataaaggctggaagaaaacttatcgaacctttataattctaagaactgagtaattattctacaaaccaacaaatatttattaacagcgtcctataaccaactcatgtaatcttcacacaatcctatgaaatactactgttcacgtcttacaaaagaagaaacagttcaaagagacaagtcaaacaatacatactagaacgaggcgactactctggattccaaaaccacagttccaaaccacaaaatcgaatctaggaaaattggcgctctcgagtgtcgtcagctaaaacaaggaacaccagagaaggatcgcgatattacacaaactactactcccgacatgcaaagcggattctttccctcggtctcggcccgggagtccgagagtcccagcagccctcggggcgcgaaaggcaacctgggagcggtagttctcctgggcgcctagcattgtcgcccacgctgcagtagcggcttctgcggctccaagccagcgggtcctgtgaaggcgagcagacgcggagaaaggacgcgggagtgagagagggtgagtcagccactgtctaaacgataacgggaggcggttctgcggggtagggttgaattcagtaaatgggctcgtgctgctgtctcttcggagacgctgct

SEQ ID NO: 11239 - DNA, 2300 bp, Homo sapien
aagaagttttttaaaatggccattcctgcgctgggcatgtggctcatgcctgtaattgcagcaactcagaggctcaggcaggaagagtgcttgacaccaagatttccagaccaggctggcaacacagtgagaccctgtctataatttttttttaattaactgggtgtggtggtatgcatctatagctctagttacttgggaggctgagggcaaagtattgcttgagcactggagtttgaggcagcagtgagctattatggtgccactgcactccaacctgggtgacagggcaagaccccatctcaaaaaaaaaaaaaaaaaagaaaaaaaaaaggcttttttccccagctggtattcactgcaagtcaggaaacaatcattgttactgataatgactgacttgattctctctggtgtatctgagggatatctaacatctctttttatttacagaggagttattagagcccagaggctgacttaatttaatgtgtctaccctagagtatttccagtggacttcagctgataagttgaagttatcttcagctgataagagaaaaacaatttgaaagttattctcttgtaatgtgttatccatacatgcatgtaacactgatgattttctttattaggttatggtaacataacaaactagcagcaggagcagtcatggttttgtaataaaagttatctgaaaaagtctgttactggtggagggtgtccaggttcttggcgttttggacaaaaaattggacaaaacacataaacaaagcaaggaaacaatgaaacaacaaaagcagagatttactgaaaatgaaagtacactccacagtggggagcgggcctgagcataggggctcaagggccctgttacagaatttctgaaggtttaaataccctctagaggattccactggttacttggtgtacaccctatgtaaatgaagagaatgaagtaaagttacaaactcatttactcagcatacaccctatggagaggatctttcctgttatagctaaagtgtgaatcagccttatgttccctgcctccagaccctattttcctgcctcaaatctctaatacttgattttgatgatttaactgttgatcccaatgcaaatataaaagactttgtaaagcatagactatactatatattaattcaaggaatgtcagggcatgtactgatgttgaattctgagaatcatgtgcttttgtacagaacaaagtctgtttgttgaaatattttgagttaaaatactccctaaaactccttaataaagggaattacataatctgttaattgatttgtggaacggcagtgaaagaggctgtattagacgacttgaaaacactcatatttggagcttaacgaaaatactcctgctctccagagatgaaatgttagtgagagcagcaaataatttatttttatatgctggatttgcgtatttgagaccatctattaatactgttctttaggacctcaacctagtcgtctaagacatccttattaaacgagaccaatagatatcatttaatattgaaaatattgttaatgcccttcaaaatctttcgaaggaataaacattaaaaactagaaattctttgtaaaattttgcggtttaaaataatactcggtttcaaattagtgggtgcctcatttatcataaattataaaagagaatctaacagttattggctacattctaggcacggggtaacgctttactattcttctaaccaaaaacatacatgtatctaagtatcccatgtaaggtatcattgaaccacacaaaaccctatgaaatactggcagggggcggtggctcacgcctgtaatcccagcacattgagaggccgaggcaggaggataatttgagccctcaggagttcaagaccagcctgggcaacagtctcttcaccatcaaatccaggagaattaatttctactgttagagcagtcaactaaaggacagctcgcgatattacacaaactactactcccaacatgcaaagcggtttctttccctctgtccccgcccggccgtccgagagccccagcaggcctcggggcgcgaaaggcaacctgggagcagtagttctcccgggcgcctagcgggatcgccagcgcggcagtgggggcttccgcggctgcaagccagcgggtcctgtgagggcgagcggaggcggagaaagggcgcgggagtgagagagggtgagtcagccactgtctatgcaataaagggaggcctcaccgcgggatagggctgaattcagaagtgcggcccgtgccg

SEQ ID NO: 11240 - DNA, 2300 bp, Homo sapien
ttttatttaaaagttgcagtctaagtcttaactttaacatgattaacagtattatggtttttctttatgttttgagtttttttgtagacatggggtctattttgcccaggctggtctcaaattcttacctcaagagatcttccccctttggcccttcaaagcactgggattacaggcataagcatccactataggccaaggtactttgtatttaaataaaaggtttataaggaagtctaaaattcatattttactaaattttaccatattttcctgaagtagtagattaaaaatatatttaaattaattcatagatggctggggaaaaaaggcatataaagagaacaagtgacttgtcctaaatgacacaatcaattctcaatactttctcttttcaatgatgcatgcttattttctacttgatgagttggattgtactttacaggaaacctaaaataaattcttaggtcaggaaatgtgacttcgattaattacaaaacatatatttatgtgtaatgtgttcttaaagctgtaatttacaaatattcataatgatttccaagcttcagtctgcctcttgatataggtccatttcatttatataatcataaataataataagttagtatttattttgctgatttaaggtgttcatccaaaagttcagcaatggcttcttcatctgctgattgaagcagtctctgaattagctgatccaggcccttcccaccacataaaaattcctggtaaaagagagagctattatgaaacctaatgattagaaatataagcaaagactttagtgtttatttatttaatttctttgcagtcattatttaataacaataaaggattactaatgttctgtaatacaatgaacacaatcgctaacttgggaagatccccactctgtagaagaattcagttagcattttattttaaaataaatcttctgagatttggattttcctaacaactccagagacaacaaaacaaagagatctagatggacttttgaaactgaccacctccctccctttaaaattccactgattggcttttatgacaacaccattctaggctctcaaaccatctttaggagaacgggtttgctggattttctcttattgtaccctaaaaaaaaaatgcttttattcttgtcctgaaaattctacccttttcactcacattatgttatttcccagaggaaaaagactgaaaggtctcaattccacaagcaatttgttccacaagcattttgtgcattaatgcacatactgctccttgccaactcctctggatctgactgagaggaagcctcccccgaccattcaagctcacccttctgctaatcctcaaagtttagattatttcatctgtaagtggtttatgatagttttttatttttaaaccgaaaacatgatgatctagaagtcctgtgtaactgaaaaatatttttgttgaaatatttaggggtgaagtgtctttgaggtctgcaatttgctttcaaatggttcaagagcaacacaggtttatagagagacagaggaaatggtggggggaaagagaaggaaaatacagtaaaatattaacaactgttgaatctaggtatagtctatattgtgctgattgactaatctttttttttgagactggctcttgctctgtcgcccaggctggagtatagtggtgtgatctcggctcactgcaacctctgcctcctgggctcaagcaatcctcccaccttagcttcccgagtagctgggactacaggcacatgctacacacccagctaatttttttttttttttttttttttttttttgtagagataggattttgccatgctgcccaggatggtctcctgagctcaagcgatcctcccacctctgcctctcaaagtgctgggattacaggtgtgagccactgtgcccagctgacccaatctttaaacattatgtaaacttgaaaaagtttgaaataaaaagttgagaaaaaaaattttcatgtttaccactaaataactccactgggtgaaaactgttttgagttgacttccctgaagtctcgtctacagttctctgaaaaatgactaaattaatgacttcaagaacttttcctgtataacagaaattctgtgtagtaaagttgttgggattaatgaatttgtacattgccattttagaaatgcttgaaatttagacactggcttaatgaaaatactttaatgttggcatctggaacacaaaacatttagttttgatatagttatgaactaatcttatagttaagtctttctt

SEQ ID NO: 11241 - DNA, 2300 bp, Homo sapien
ttgtttgggcagggacagtgagcaagatctctggtgcctttttagaaaggcactaatcctattatgtcagggctctactcttacgacctcatctgaccttaatcaccttaaaggccctatctccaatacagacacatgtattggaggggttagggcttcaatatatgaattttaaaaataaatattagtaatatgcacatgattatgaatataaacaattcagtccatagcagtaagactacttttttttttttttgagacggagtttcactcttgttgcccaggctggagtgcaatggtgcaatcttggctcactgccacctctgtctcctgggttcaagcgattctcctgcctcagcctccgagtagctaggattacaagcatgagccaccacgcccagctaattttgtatttttagtagagatggggtttctccatgttggtcaggctggtttcgaactcctgacctcaggtgatccacctggctcggcctcccaaagtgctaggattacaggcgtgaaccaccacgcccgactaagactaattttttaaggagaataaagctttatatataatactcaagttatatagctgaaagcacaaatcagaataaataattaaagaactttttggataacttaggagaatgactttatgtagaccctttgaaacttttcccctactggaacataagctccatgtgggcaaaggtttttgtcttttctgttcattgctaaatcctcatgactagaatagtgaatagcacataactggtgttcactatttattgaatacatgattgaaggttttttcttttttggagcagggtggccctatatcagagcttaggagccacagatcattaaagccattgccttaattgagtcttggctctatcacttactgttttttaccttggagtagttactttagctctgtgtgccttaattttctcctctgcaaaataagtattttaaggttgtaaaaattaaatgaattaatagggtaaaaccatttagaacagtatttagtacatagtacatagaagtaggtaccttgaagttggctataaacgttagatattattttgcatatatagctaattctcctatctatgtatgtgattataatctaagaaaatactctgtaaagtcagtaatatggtacattttttgccttttctttcaggaagaaaaattgaggcatggagatagaaagactgtaaattgcgatagccaagggctggatcccactggattagtcaaagtaggacaatatgcttgcattttcctgcaattgtttattaactggagttttcattcttcacttaatcagtggttcataagctatgaatctaggttgagcccctacattcccatgtgcaaagaacattataaaatcactaacatgtggaaatacacggtctcctaacttttggggctgttactacttttaaaatataaatttatttgtattatcctttagtcattaggtattttctgaagcaatggaagctgaaagtatagaaattacacgcagaatcttctacatttgtggatgatgtaaaaggagtctttattttttttaaatattggaaaacagtgctttacgggcttctaatacataaggaaattattgtaatttcacatgcaatgtgttctaaatcttgatctcttaatcagaatcgtaaagaatctctcttctaggtttgcagttaacggtgaaaaccaaaaactccacatttggctggatagtgagtggagggggttggaggctgccgcaaggtaaactacaactcccaggattctttggtgggcgctctgggagttgtagtttagtcccaccttggcccctccctccctccctccctcccaccatctccatccccgctctgggctcacgctctggataaggacggcgcgggggcggttgtctgatgacaatttcattctcgttttgtcatttttctcatttagctcatttttgtcattttagtccattgttaggcatgctcgaggacaactcctccggagagcggtagtggcggaggaggggccgggagcgtgcgttaacccggaagaagtgaaccaggaagtgaacgtgatctcgggtttgtcgggctgaaatgtggcgggtctcggaaggttccgacctcagtaaagagagctaacgtgtattcttctttttcttaggtactcacagttctttcctgatcttccccgccgcctcctgtattgcctctttatggaatcactccatatactgagttacacagcatggtttgcccgtgctgctgccc

SEQ ID NO: 11242 - DNA, 2300 bp, Homo sapien
cgtgcatgtgtcctttttttttttgaggcagtttgttgcccaggctggagtgcagtggcatgatcttggctcactgcaacctgtctcccaggctcaattgatcctcgcacctcagcatcccaagtagctgggactacaggcactcgccactatgcccagctagtgtgtgtgtgtgtgtgtgtgtgtgtgtgtgtgtgtgtgtgtttgccatgttgccccggctggtctccaactcctgagctcagggtgatccgcctgcctcagccgcccaaagtgctgggattacaggcgtgagtcactgcacctggctgtgcatgtgtctttacggtagaacaatttatattcttttgggtatatacccagcaatgggattgctgtggacccccaattttaatgacagtactttccctattttaaaggactcctatgatgctttaaaatcatgtgtgaaacgtaggagattgaaagaaaaaaaaagactcctatgattctttcatgtccaaccaacttaggctagaaagaaggaaaatcaaataggcaggcactgtggctcacacctgtaatcccagcactttggaaggccgaggtgggcagatcacctgaggtcgggagtttgagaccagcctgaccaacatggagaaaccccgtctctactaaaaatactaaattagccaggtgtggtggtgcatgcctgtcatccctgctacttgggaggctgaggcaggagaatcgcttgaacctgggaggcggaggttacagggagctgagatagcgccattgcattccagcctcggcaacaagaacaaaacatcgtctcaaaaaaaggaaaataaaaaagggcagcccagttctgattacagccgactaaatgcagttactcatcaattactttatagtctcagaaatatgcacccattaagattcagcacatgtataaataaacttatgtacctaatgtttacacacaccttactactaaccctacactgaatgtatggtttattcttgccactgttgtatctttctagactcacacattaccatcaatatgctgccttttatttgttgtagagagtatcccagagttggaagatcctgaatttgaagcctgtttctcccattattatatggctttcaggaaggggaaccatctgaagagaaagggtaggtagactcagaagaccagtggccttataaaaccgtaattccggccaggtgtggtggctcacgcctgtaatcccagcactttcggaggttgacgcgggggcggatcacgaggtcaagagatcaagaccatcctggccaacatggtgaaagcctgtctctactaaaaatacaaaattagccgggtgtggtggcgcatgcctgtaatcccagccactcgggaggctgaggcaggagaatcctttgaactcaggaggcggaggttgcagtgagcccagatagcgccactgcactgcagcctgggcgacaagagcgatactccatctcaaaaccaaccaaccaaacaaaaacaaagattgtaaatgtttgtttggtttgccctggaaagagaaggcttctacttagagtctgaatcaaggaggaaaaggaaagaaaacaagttcatctttcatcaaaagtctactttgcatcggacacttaaattcctaaatggggagaaatgcaaaaaactctgactcttcagagtcataactaacattatcttgcgccacaagcttatcaagagtgcaatacaagtcagtgtcttctcttttctacttaaaagaaaattctcgtttttatttattactttattgcaaggagaagcagacaataagtaggagtcttatgaggcgttctgatgcataggagcaatggtgaatgagggtggtgactcaccaccccatgggactccaaggttttggtgacagctcgcctgagccccagggggtgccgagattgcggcgaggagagccgcagcacaaggcaaatccacgcggttggtccccgctacgcccccgtagtcacccgcagcccctcgccaaagggcgctccgcgcatgcgcacaggatccggctcgggaggcggaccctggctgccatcttgcagtgcgcgggaaccgccgccgccgccgctggccaaaaagcggagcccaggggaagcgtgtcctgctcagaccgccttccttctccattgccacccgtgccgaacagccaggctgcccaattgcaactgtagaccaatgaactaatccatcgcccgcagcccgactctcagcagcggttcgtcccggtgcccacccccgcgaagcggagcgc

SEQ ID NO: 11243 - DNA, 2300 bp, Homo sapien
tctagaggtgggattttgccatgttgtccaggctgatcttgaactcctgagctctagcaatctgcctgtctcagcctccgaaagtgctgggattacaggtgtgagctgccacaccctctatgagtttttttaaggcacattccagacttactgtttcatctgtaaatatcttagtgtgcatctctatttaaaacacgtaaacagaagaagtcatcgcagtgccatgtcacacaaaacctcataacataatatctgatacccaatcttagtgtgcatctctatttaaaacacgtaaacagaagaagtcatcgcagtgccatgtcacacaaaacctcataacataatatctgatacccagtccgcattcacatttcccccattatccaaaagaagtctttgtgtttggtttatttgagtatagatccagttaaggttcacaccaaataattggttgttatatctccataagttgatggttatgtctcattattttaatctagaacaataactctcccctccctttcaaaaaaacagtcatttgttgaaaggtcatttgtcttacatatcccatattctagatttggttgattgcctttctcatggtatcatttgctgtatttcactgtcattcatacttgtaagttatagttaggtttacttgctggattagattcaggttctgtttaaatacgggtggtgctttgtgcttcctgttgtgtcatgtcaggaagcttgagacattctggttttctctcttttttgatgttaagattgataaagattcagatgttgtcagcctgttatactcattaaaaaggtccatgacggcgtgggggcacggtggctccacacctgtgatcccaacacttttggggatgctgaggcagaaagatctcttgaagccaggatttggaggccagcctgggcaacaaagtgagaccctgtccctacaaaaaattaaaatattagccacgttcggtggttctcacctgtagtcccagctacttgtgaagctgaggcatgaggatcactggagcctaggagttccaggctacagttagttatgatcatgccactgcactccagtgttggtgatagaacaagacaaaaattcctcattggcctctcagcaattgaagatcattgcctagatcccttgttgattctaataatttctgcattcgttagctggaatttttcttataaagaactttccttcatcaaatacttggttcccttgaaatatagtttatataagaggaacagagtagaagcttaactcattgcctttattttattatttgtgttttaatgtgtgctatagtatgtttgcatgtcatttgatcagctatgctaggaaacctgtttgttttgatgtagtgtgggtatattcactctttcctcctcatttttacacaagtatgtcttcccttctgaaatccattttgagagcttgatatttcttttctgctcctctgtagttagagggtacaggatggggaacaggatagaactcaggtaagtgtatatatgtgactgcttttttaagaggactgggctgtgttttttctacttaggtttttgtcagatggtagggttgtttctactttgtcaggtgtatcttcttcctataggtcatagtcttcaactttgggtatccctgatttagtattgaggcctggaaaatggtaagccatggcagtttggcagttcttgcctctgctgaaatcttgcagtggtagttaggaaatctctttgccaagtttttttccttgacttttcctggtcttgctgcccttttgctttcaggctgagagttcacagaattagtttgacgtatatcttttccccagcattgtttctttggagtgagattggggttagaagcctgtcaaagtacaatcttatttctctacatggctgccactttttgaactttatgaagtcatacctctttcttttgaaattagtagtttttgctgagtctttcttgcttattattattgcaatagtcatttcattatgaattaggagagagaaaatatgtgatttgctttacattctttctataataatttaatatttgtttgattgcagagaatggggagaaggaacccccgacaacactactctgggttcagtatttcctggcacagcactttgataaacttggacagtattctttggctttggattatattaatgctgcaattgctagtactccaactctaatagaattattctatatgaaagcaaaaatttacaaggtaaaatctgaatcctgttttttgagtagttga

SEQ ID NO: 11244 - DNA, 2300 bp, Homo sapien
aacaaaaagttaaaaaaaaattcaacccgagattatttagttgtttctatatagtattctgcaatacactgttttttccaaaagcaaatattacaatcagctgtagctgcagtatcccacttgtttttaatttagccatattctgtctatcaccattagtttattatggagtgattaacaagccaggtttgcttgaggctgagtgggttcgcaagacacagtgctttcagtggaaaaactgagagagcctctggcaaactaggataagttggtcacccaatttatggaagacattaactggagagaggcagcctatgggctgttactgataaagaggtggcttaaatatttgtggttacatatggccccctccaagacttgacttaaaatctctgtctattaatgctgctaggaatatctcttgaagtttgtcatctgccttttttcagatgtttctcaacctaaaagaatgtcctgtaatctcttagatgttttcatctgattatgtgttccaggacttttagcgccaccatttttccttagttaactgtattgaatttttaaaatattcttgtgctagttataacttgatttacattaagagaaaccactaacaactttatgaaatatgtaatcctttgatttaaaaaaaaagttcatgttaatatttacgatttgattttattggtgggaaagatgcagttttcaattacaacatcattaaagcatggctttttagtcataaactaatgtgaaatgttcacttttcctgtttcttaccctccatactatgtacttttattataatttttgtcttaaagtctcaggtacttaatataattctgtatatagtgtgtttctaattaccaagcaattatcagatgattatggacaattactaatatgtcctctgcggagtgacttaactatccccaggacagagggaacatgaactagtaggaaagcttgatctatattggtgtattgaatcactcatttttctatatgattttagaaaaactaacgtatgaaaaaagaagttggagatggaaatgcatgcaggggaacagtataagtataagattgttttgttgggggaggggcagagggttagtgttcacctttcatggaagggattagttcttaacctcttttggccatggatccattgaaaattggatgaaagctttgagctctctccttaggaagaagtttttatgcttgtttatacatagactccagtttcagaacttctgctaaaatggaatgtaggtagagtaagagaaaacaataaagttctgtatttatataacagtttactgttgaaaatgaactttaaaatacattatttgatcctttaacaaccttaagaaattggctgtatggatttctttattcttaacttagattaaataattgtctaggaaattaaaaggcttattcagggtcgcatccctaataagaagcttatctcttgagtgggcaaatactgtgcttactgaatgtctgctatgtattaggccctgtggcaggcggtgggtaaggattgcccttgaaaatggtagagttgagtagagcagtcagatttgtaaatatttagtgtgaacctacacatatttagtcttcattcagagctctgtttaactgtgccatgctggtttttagggaatatggaggaagagtatttcattaaaactaaaatattaatatatactaactttcaggtttaaaaaataacctgatcttttgacttatatagaagttgagtatcatcacaaaacatgatttgtagggaatgggcatggtttgtaggaagagaaagttcaagttgaatgccaaaaataattcatatcctttatagtgtaaaacattggagagggcagctaagtgaaaattgtgactgtttaaattgttttttgggctttttacaattttttttttctaaaggtagacattattgacataaatgtaaaggttaattttgtgatttttgtttttaagcatttttttgagataactgatgaccaattcgacttccatacatactgcatgagaaagatgacccttcgtgcctatgttgaccttttgagattagaagatatactcagaagacatgccttttatttcaaggctgctagatcagcgattgaaatatacttgaaattgtatgataatcccttaaccaatgaaagcaaacaacaagaaataaactcaggtaactgaataggaacttaaaagattttaaaaggacactaaatttcagaatgccattagcgtaaacaatacctagaaaaatatta

SEQ ID NO: 11245 - DNA, 2300 bp, Homo sapien
tgcgctattgggagtaatatcatcctctctccctctggatagtaggaagagtttcataggggtgtgtacaccccctgtgatattgggagtaatatcatcctgtcgccctgaggagagaagccatttcgctactgtctcctgtctctgaagaggaggaggaagtaaaagttggaaaacaacaggaatgaagtcagtgtcaagaccagccggtggcaatgaggagccggcctgaggtgaaacaatcaacccccgtgactctaagtacatgtgctctcaatccatcaagaccctttcacgtggaaccccttaaagctgtaagcccttaaacgggccaggaactctgtcttccttccgggagctcggctcttaagacgcgagtctgccgaagctcccagcggaataaaaaaaactcttccttctttaatccgctgtctgaggggttttgtccgctgctcatccatgctccatttctttgttccctgaccgggaatcgaacgcaggcagcagcggtgagagcaccgaatcctaagcactagaccaccaggggaacttagaaccttgtgggaaatagattgcgcaccattagaagtgggttggccatcagaaggaagcctggacaggtcccttgtttctaaggcgtggcacaaggtaactggtaaagatacctagaccagttcccatacatagacacttggtgacagctggtgctagaacccccacagtggctgagggcatgcagcagcaatactagtagcaaagggacagatagctaaggaaggatcccgctccactcacccagggaaatcaactcctgaagttctgttcgaccccacatcagaggatccattgcaggagatggcaccagagatcccagtggtgtcctccccttaacagggaaagaggctccccactcttgagcccacagtgcttgtgcctccacaagacaagcatatccctaggccacccagagtagacaagagaggaggactattcatatgattagtggtcattaacatatactcctttgtgaggtgtatgtttcaatgttttgctcatttttaatttttaccaggttgtctatttgtgattactttgtagatgggtctttctatattctgaaaacaaatcctggctgggtgcggtggctcacgcctgtaatcccagcactttgggaggctgaggtgggcagatcacctgaggtcgggagttcgagaccagcctggccaacatggacaaaccccgtctctgctaaaaatacaaaaactagctgggagtggaggctgaatgtttcactccgttacatgttaattgctctacatttaattagccgtctgtggtgagaggcgagaggctagcgcctagctcagcgcacagtccagggcgttcgcccccgcaggccgcggggcagggtggctcgttactccgtggacactgcaaggcgccctgttcgcgctgcgtcgacgcagtagtttcttcccataataaaccccttctagataaagtcaggctggcgggagcgccctggaccgtagttcaggcccccgcgctccgcggtgggaacagttcaggactcccccaactcctgcccctctcgccccgaccctctccactccgcccgcccaccatctcggaagtccccttgggacaatgcgtaggggacctccgcgtccccgacacccgactgggacacggccgcgggctccttcgtccctcaccgccagccagggaggctctgcatgcccacgtccacttcacagccgaggaagctgcggctcgcggaggtgcctggcacgcggcgggaagcagcagagctcgcgcccagcagtcagctctggtgacgccgaggacaccgcgtgggccgggttgtcagggcgcgggggcgagaggcgggtaaatatttggggctgtaaccggggcttcggcgactcctcgtcaccgcggttccagggcgggcgcgtggcgagggcggtgcctgggggcaggggcctcctcggagggcggcggggacagacccgtcgccccggctccgcagccccgccccggccccgcctccgctccggccgccgaaggctataagatctaggaacccgagccggtggtagggcgggcgcggaccgtgctgggagcggcgcggctggagcgcagcgccgaagggactggcagggctgaagtgtgcgggacagcaagcccccgaatagccccggctgccacctcgcaggacccaaggccacgcgcgccgggcccagctgagccgcctcatgaagccgcccgcggcgcagggcagccccgcggccgccgcg

SEQ ID NO: 11246 - DNA, 2300 bp, Homo sapien
tctggcctggccctgggagaggggaccttgtgggccctggagaaccagcatgacagatggcttatgtggcttagaagccactgaggtagaacctgaacttgttcaagccatgagagaataaggccaatgaggagccttcagggttccctggtactgtgttagcaattctgcatgggtaatggatcttgtgatgcttggcaaggcatatagagggacagtgcgatcccagaaagggagctgggacaacagtggagaagttgaggaaagatgctctttcttattttgcccccctttggcgaggctatcagaatttagattttcaggaggagaagtcaacccacacccccagccattccctgtggcaaaagggaggtaggtccaaagctttctttttcttggttaattactatagtttgcttgctttaaacgtgtgggatcgttctatatttacaggagccttgggtaaggtttactgtctgtggttttacttccccctggagcagcacgttgacatgcgctaaccctaaattacctttctcccaacccccctagctaaaaaaacacacctaccttttaaacaagcctctattttgcagcagtgtttctcagactctgttagttgtatatttcatatgcttttctttcttttgatggtgccttagaaaacacggtcccagaatttgaggttcctgacttcagtacactaactagacttgccagggatgtttctaatgggaatttgagatacatgtgagatggtgctttagagctgattgaagccgatattgtaaggccctcaaatatccagccttaccacctgccagggttccccaaattatcactgttctaggtccttcgagcccctattaatagcagcacctgatacccacgcggggcaataatacatgaatatgtgatcagccagcaacacattgctgtcatttaatcagactaactggctattacttttgcaaggaatagagttccaggggagggaaaagaacaggatgtccggctttgcctaccttgaaatctgtcttgcgtgagattttgcccattgtatgttcttaataaaactctatggaaagaaattttattggttaagggtaaagagaggtctagagcttggggtacctctatgttgagagtttgttcttgggaggtttgttctaggatgccactgaagagaaagttctcttaagaatgttgctgctctctctcaagaagagggaggatcttgattctgtttattctctgtgattaccttttctctctcaggagtgctattctgcactttgctaggaactttagagttaaatcattaaaaccacaggcattatacacagagcacctaggttattgttcttcttctaacaaggaagaaacagagtgactctacagggtcatgcagttttcacgtggcctctagacacccactcgacagtggcatagatgctagatgcccactcgccagtggtgtagctttggggccttgagggctctcttttcatctgtgccatacacgatgtgtagatatcatcacagggtgcgcctcagctgcagcaggtttggctcaaggatgctggcggtcggcttcttcttggtggtcgaaggttgaacagttcaaaacttggagttgggtctgtcccagattgtacacctcacggaaagggagtgaagtcatggtgtggcaacgagctggggcgtgagctaatgtgtatctgtgtgtgtgtgtgtgtgtgtgtgtgtgtgtgtggtgggcagggcgggggcgggcaggaggaagtgagtgtagctgtgctgccatgcctctgtttgcgtgtgtttctatataaatagatattgtaactagtatttttcctcctcttcctccctcactgtgggagtggctgtcagtttgtctgtatattttctcagtttgggaaaaattctcacatcaagaaggcatttagcctgtgaacctaaaggatcagaggacagtcctggcaatattctggatctacggctcattctctacagattctctccaggccccatgagttatgctgagtctttcctgaatctttgctggattccttttttcccctgctaacatcctcttttgtaatggcctttccatatctagattgttccttcttccaacattcaatagcgtttggcctccttgcctgtgaggtgaacaaattgtggtgtctttctcccctgcagaggagtgtacgtggatggaaacttgctggagagtaggggcagaagagagctgaagttcaaagtcagggtagggcctgtggtgcatgccgggt

SEQ ID NO: 11247 - DNA, 2300 bp, Homo sapien
tcttcattttagagatgaagaaacaaagatgccgacaggttaagtaatttgcttcagatcagatattgaacagtggtgaaagaacagttagaaccaggctgatgctggaacacataatctttttttttttttttttggaattaacagagaagggcttttaataacactattataaatattttcaaggattttagggaaaatatgaacataatgaaaagagaaatggaaactattgaaaagaaaaacaaatagaacttccagagctgaaagctataacgtctttttttttttttcaaaacaaataagagtaaagatctttactaaatttattcattccttggtgtcaatgcttcctgaatttttctttttattttattttattttattttttttattattatactttaagttttagggtacatgtgcacattgtgcaggttagttacatatgtatacatgtgccatgctggtgcgctgcacccactaactcgtcatctagcattaggtatatctcccaaagctatcccctcccccctccccccaccccacaacagtccccagagtgtgatgttccccttcctgtgtccatgtgatctcattgttcaattcccacctatgagtgagaatatgcggtgtttggttttttgttcttgcgatagtttactgagaatgatgatttccaatttcatccatgtccctacaaaggacatgaactcatcattttttatggctgcatagtattccatggtgtatatgtgccacattttcttaatccagtctatcgttgctggacatttgggttggttccaagactttgctattgtgaatagtgccgcaataaacatacgtgtgcatgtgtctttatagcagcatgatttataatcctttgggtatatacccagtaatgggatggctgggtcaaatggtatttctagttctagatccctgaggaatcgccacactgacttccacaatggttgaactagtttacagtcccaccaacagtgtaaaagtgttcctatttctccgcatcctctccagcacctgttgtttcctgactttttaatgattgccattctaactggtgtgagatggtatctcattgtggttttgatttgcatttctctgatggccagtgatgatgagcattttttcatgtgttttttggctgcataaatgtcttcttttgagaagtgtctgttcatgtcctttgcccactttttgatggggttgtttgtttttttcttgtaaatttgtttaagttcattgtagattctggatattagccctttgtcagatgagtaggttgcgaaaattttctcccattttgtaggttgcctggaacacataatcttaactactactttagtttgcatgcataaaaacatcttagctattcttcccactcattaatgtaaatatagtagttggctgtaataagcatatgccttgattgggatactataattctttatcattttactgccgtaaaattagtctatctggcataattgtaagttattgtagcaaagtattatgtgaaaaaacttttagaaaagtaatccagaagatttctgaaaatagataaccagaaagacttgtggggtacaaaatgttcacatactattgttttcagctatttccatttgcactctaagtcccagagaacttgagtaacaaactctttaccaaaaggtagaattctaaaggtcacattttctctgggcttacagacaatgttaacaaattcaagctgattattttaactaataaacttttgagaagcaccgtgacagaaaatctgtaagaaatgcgcccccattattatatttccagatactggacatctctccagggactcatttgcataccatctttcattcattttattgttccatatgttgaaagaattaaaacggacaaagggcatttatttgtcagcagagcagaaaccacttcatttatatgactgtgttcatgcagaaccatcacttactgaaaagatcccaggtgtgtttcctgttattcatgcacaaagtatgtcagagactctgcataactaattaaggctttgtgtgtgtatgtgtgtcttttgtaggctaaaggtaaagaaagacaatggctaagacatcaagctactggagaattagatgatgccaagatcattgatgggctgactggagaaaaagccatctacaaacgtcggggtgagctggagccacaagtaagtcatggtgaactgctagcctcagctctgcatagtctagccctctttacagaaacttgctttcgtgagttgt

SEQ ID NO: 11248 - DNA, 2300 bp, Homo sapien
atttatttatttatttttacaggtggagtcttgctccatcaccaggctgtaatgtagtggtgtgatcatagctcactgcagcctcaaattcctaggttcaagagatccttccacctcagcctcccaagtagctaggactacaggcatgtgccaccatgcctggctaattttttgtttgtttgtttgtttgttttttgtttttatagagatgaggcctcactgtgttgcccaggctgatctggaactcctgggctcaagtgatcctcccacttaagccacccaaatctctgggattactggtgtgagtcatgcgcctggcccgttcttcttttataagtccataatttcagcatccttattaacatggtcatcatttatattttaccagaatcctcactccttttccagtactttccaaacgccctatattcgtttattcacttgacaaatatttattgaacgcactctcaggcactgtgctgagctctggggatatagtgataagcaaaacagatgtggtttctaccccctgtggcgctcaataaataccatttcaattgatttgaatttctatccttgatgcttgtagaatgcttttcttcacaagatgtttgcgtatgtagtaaaaataccagtaaaaatacctgcttccctattgggcttctgctattgttgctgtataccatgcattgccccagtctacctaattatttctttaggatggacctagaagtgagaaaggagataacttaaggcccagattaccaaaatcaatttcaaactgaaagaaagatattccataatgcagggactataattatgagcatcagaatcatatagacctggatgtgagtcctggtttcactagaattacctggatgtgagtcctcgtttcactagaattacctgtatgtgactgtgtgcacaatgcttacctctgagccttggtttcttgatttgtgaggttgaaataattttaatgcctacctcatgggactgttgtgatgatgaaatgaaataacccatgaaaatacttaccctacagcctggcacagtatgggttaagtgtcccttatctgaaatgcttgggaccagaagcatttcacattttagaatatttgtgtatacataccagttgagcatccctaatctaaaaatccaaaatctgaagtgctccaatgagcatttctgttgagcatgacctttgcacatcttgttggtgctcaaaaagtttcagaatttgcagcattttgggtttcagatttttggattagggatgctcaacccatataagaatcagtaagagttatttttgctagcatgtatgatatgaagtcagcttttaaactataactctttccacacaacctgcttgttaaaagatttacaccccattaattatatttcacttctaagtgaaaactttgaaatagggaaatagcttgggggtggattccatttttaacaatctgtcttctacaaaaggatagcaactctcagcagcagtaagtggtaaggaaatgagggcatttctaggaagagcacatatagttgagttttattaatacaccttggttttaagtttaggtttccaaggttttaaaggactggaaaatgggataaaaggagaagaaatgagtgtttgattcaaatagaaaaaatacagtattatatttacctttctgtaactgaaaatcataattctgaagaactgattagaaaaaccattgttttatacttacttgatcacctttgatgacattcttcaaatctgaaatagttaatactataggcatctgctgtgatgcctagacttcagtgtaaatttacagaacagaaaagtcaatatgtaggaggctaatttatggatttcctttcaaataagaatggcttagaactagtacgtttagaaataaattttttaaacccttatgtcataggagatattccatatatgtttgccagtttggttttcatgaacaataaactaaaacagtaacaaggtgagaaagcaggttttggtaaaagattcttctgatttggcataagcttatctccagaaaatagcctctttttgtttaatgttttctgtgtaattacagggtgtaggaaaaaacaagattgttgacagattccttcacctgctcaacagaccccgagaatatattcagctacacaggtaagactattagacccacaacctcttaaaaatctcatttaatcatttgtttccctcctggtacaatttaaaaatactttcttagaggcccattttataaaccagttttatttctgttctt

SEQ ID NO: 11249 - DNA, 2300 bp, Homo sapien
aaacaaacttggtttcatgtcttctaaaggcaaggaaacagaataattctcaaatagctaaaactgtacatactaagaataaaaaagctaacttttattgagcattaatatgtgccacagattatattaattaataaatcctcacaacaaccataatagatatattcttcttatccttttacagttaagaaaactaggacacaaagttaagtaacctaccctcaacgacccatggttagatagtggataagtggattccaacccaaattgtttaactccaaaacccaacctatagtttatgctatacttccacctttgacctctgccttctagggcaaaggagcaaaaaacaaataaagaacacacaaaaaatgtaaaaaacaaatgaataaacagcccagaagtgagagtaattgagaaaaagcaaaaaaaaaaaaaaaaacaaaaagtaaaatttgaaattgcaacactatggtgggggacgggggtggtgtatgtcttcaatgaataaaacgaaatacgtgggacctaaatatgctttttttttttttttttttgagatggagtcttgctctgtcgcccaggccggagtgcagtggctccggtcactccaagctccgcctcccgggttcacgccattcttctgcctcagcctccggagtagctgggattactggcgcccgccaccacgcccggctaatttttctgtattttctttttagtagacacgggggtttcaccgtgttagccaggatggtctcgatctcctgaccccgtgatccgcccgcctcagcctcccaaagtgctgggattacaggcgtgagccaccgcgcccggcccatatgctcatttcttagcaaggaaaactgggggttgcggggaaaatgcaagaggacaacgaaacctacaatttcatagtgaaaacctgttattccaagcagcactgacattgacaaaatcttgtctggaatcacttcaccattcaagggtagcaacaacagatatcctttccttaaccatcacagtaactctaactccaccaacacacaagaaaaagaattcctaaaaccagctcaagtagagccaaaaaatactgagcttagaaatcaaagcatgtgattctagcatagtaattagttgtgtgttctccagcgaatcacttttcccttctgggtttcaattacctcatttgtagaggcaagtgttttaactaaattaaggtgtaactgtcagctctaagaattacgtgaaactttaaggaaaactcctgtaaaacttggaaaggctcggggatgcatttaaaacaccgtgaactatgggttctttggcaagaatgttcccttctaagccgccacaagccctggctagaacatgacacagaccggcttccaggcccttgaggctcagagagcaaggtcaaatccagctttcaataattccatagggctgaggcattaacctctacgagtattataacctaagtcagaattctgggggtaaaggcagcggcaggggaaggagaaatcactcttctaggtcatcagaaaccttagtccagacccctcgggttgcagaatcaggcacagagagggcgagcgccttgcccccacgttacacagcagttagcgccgaggtcgggactagaacctcaatctttcagctccccgctcggcaaacggtccttccaagcgcagcgaagcaacagagaggaggggcgggggcgcgcggggacccggcacggagcgcaggggcaccagggaggacaggggcgcaccccgagttacctgtgtcggcccccgagccggcgtgcaacagtctgacctccggccgctgcctgtcgccacccggcctgcgctgcaccacctgccgcaggagcagccgcatgcgccgcgaggccgggccgccgtggcctccgggtgccccgaggagtagaagccgggattgcatggcgccgggggggctgtcggggacggcgagggggctcggggatcgagcggcgtcccgtgcaggcaccgtgaggcagcgcggagaaggggacaggaagcggcacctagccgagtccgccggaaactccttcccccgcggcgcggccggctcagtagactcagcccggccctacccggccctgcatggcccagacgggcggaaagagcctgcggagctccagcccaaagagccggcaccgtcccgggactgcccgcaccgcgggggtgctccgagctgcggcgctgggctctggcaagcgcctcgcagtccgtgagactgtctgttcacctggatgcaccaggccttcacccgcc

SEQ ID NO: 11250 - DNA, 2300 bp, Homo sapien
tgatctgtctgccagatttgacttgtctcagcctgacaaactcttgtataatatatcctacatgaatcatttcaaacactaccttctctgtgaagactccaggtgcagcaatccactccacagtatgttgaacctaaatctcttgacacgtgtctcactgtattgcaattctttatttgcatatttatcatcaatacctaatgtgagcccattgattcacagtatctagcagggtactgtttatacagcagttactcaataaatgttgtcgttgggaggctgaggcaggaggatcacttgaggccaggagcttgagaccagcctgggcaacataacaagactccactgctacgaaaacaaaaacacaaaaattagccaggcacagtggtgcacgcctgtagtctcagctactagggaggctgaagcaggaggatcactcgagcccaggagttcgaggttgcaatgagctataatactgccgctgcaccccagcctgggcaacagagtgagactttgtctctaaaaaaaataaaactaggcaaaaaatgttgttgaatgctctaacttgtgttgatctctccattgtcttaactccaagagctcttagtgcttatatcaaccactttgcaaaattgccttaggttgttctcccattctttcaggtgtctactgagttccagcgagattaaatggagatatcttgaccaaggtattcaattcttctagcctcagtttcttcatctgtaaaacggaggataataatagtacctcaaagcatttttatgtgaaatgggataattcattaaaatcttgatacatacaatgtgctcaaagtaggaaaagcattttataagcttacatcctaaatttatgtcttagggttgctatgaggattaaatgagaagatacacatgaaacgaagtcataatatattgtgtaactacttattacctttattttcactgtctcctcatctaggttagaagcctggttcagccttcattcctcaagttcttccgctggatgcccaaagccttccttacctagccttgtttgacttttacagtctccactctaacactctcttctcagcactcatcacagggtcaggcgcagggtaggtgctatgtatttagacagtggcagctctagaattagcaaggtctttagctgaaagtgaggtcttctgccttctttttgatgtttgcttgtataacttgtctcaaatattttgccttagtcaattcactgtgacattttggggatgcagtctaattacattaggcttagtttgctttgtggtaggaccatttccgatgttggaatgtacaagagggaggcagccttagccagtgtcctactttttcctttactaaagacataaatcatctttatataacttttgtattacagcatgactagaaaagtgcttgatctggatcctttctgatatttaagcaatttccatctatcactaagatgtgaattttttccttagaatttaggaagcggtaataaaacacagaaacaaacaaccaccaccaaaaggacaaagggtaaagctttcacgtacggtttggaaacactagtgtggttacaatgaatcaagacagttgtgaaagttcccatcatcttgtgcatgttttctccatttccgaaatctgaagccgaatacagggaaagctccctatacttactgggcctttaactaagaaacgaagacttggggcaagcatctgaagagtcacaccgacaaatgctcctaaaacccttggcatttactgaactcctgagattctgtgggatcgcagggaaacggcgggtgaaggcctggtgcatccaggtgaacagacagtctcacggactgcgaggcgcttgccagagcccagcgccgcagctcggagcacccccgcggtgcgggcagtcccgggacggtgccggctctttgggctggagctccgcaggctctttccgcccgtctgggccatgcagggccgggtagggccgggctgagtctactgagccggccgcgccgcgggggaaggagtttccggcggactcggctaggtgccgcttcctgtccccttctccgcgctgcctcacggtgcctgcacgggacgccgctcgatccccgagccccctcgccgtccccgacagcccccccggcgccatgcaatcccggcttctactcctcggggcacccggaggccacggcggcccggcctcgcggcgcatgcggctgctcctgcggcaggtggtgcagcgcaggccgggtggcgacaggcagcggccggaggtca

SEQ ID NO: 11251 - DNA, 2300 bp, Homo sapien
tcaggctgggcattagataatgcctttcagtttaatcactcgctgcctggattctggaaaatgttgctatataaaacacataatgtatgaatagaagtatatggtaactgacagacttttgttatacagtgtgataaagtgaatagaacattagaatactaaccgcatgattttgactttggtctcagtttgtcagttggggccttagtttctttacattaaaggagaagactaaactaagtttattctttcaaaagaccctttactaggtgtccttgtctacatttccaaaatattggacttgtccatgaccaaacaggtgggaatgaaggccattattttgattatttttctcttttaagaatttccagaaatatgttctttgtagataaagaattacatatttgtagagttctaagcgttcttaaaattcattttgcccaactccttcctttcctaaaggagacaacagaagctgcagaaatagcctctctgttattattacatagcagcagtctcctgtctttaaatatttgaactaaacacattttacattttaatgaatttaatttacagtgtgatgtccagtattgggattgcatactatttcttaaaacttcttagaactgttagctctaatatatcaaatttcttgttgggagtaagactgcaagttaaaaaaaaaaattagaaccttagtttggaggaaccttaaaggtcatgtcaactgaaaaaatacgaaaggaatggtactgaaaggcatgaacataacagagattgaatgctttctccaggtggagagactccacagtctggcagggactttttgtcctatttaaaaatatagctaacaccagtttggtgttctctttggatgacaagagggatctgtcgttttaatgtcttctctcgcagccccctcaccgcagccccctcacacctgtgaggcttctttgacgttgagcgtgcacaacccgctgccagtccgcggttcccaagtgcccgcgcagccagcttgcaggggagttgtgcgcggtggctacagcctgttgatcccacttcctcctgctctagtccgggctagggagtggctctgccaggacttccaaggctttttgtctcgggtactggtgttcgcatggctcgagtgtattgttttcttccaggcaatctcggttagcgcttcagcttagacacttcttgtgcgttctgtcgtcttgggctgcgtgtagtctcttgtttctgcgctttctccacgcccttcccagtttcctgttagccgaaggggatcgctctttctgaacgaaaagttctcagagcggagctgaacctcccggaaaatgctcttctcttccgtgtgcgccggatgggggtgggggtgggccagaaactgaacgccgccgtcaggagagctgaggggacccgacggccctggcggaggcgggagaggtacggtcctcggagtggggctgggggtggggaaaccgacgaggggcagcccccgactgtcttggtggcagaggggacttttattcagctggaaccgcgcggcgaggcccaagtgtctctggagagattcggggttcaggaggtggcgggtgcacccaagggtgctgggaggaagctccaggttcccattcttccccagggatcggcgttgcccctgctgtccagaagtgagagggggtgtgcgggcatcgccactacggggtgggctgcagaggtttcctgcctcccccaccctcctgtccatcctagggacccagaccgtaagggagtggaagagatgttgctccaaaccctgtcaccccatcctctctacccgcgctggtcctatccgaggctgggtgcgcaggggtccgaggcgggcgggggtccgttacctctgcgtcccaccgtggccgccgctccggcgggaaccgagcggaggagccgggtggacccctgcctggagggcgcctgccccgggcgacccttacctcgcgggggtagctagggaaacggaagatggcggcggcggccgggcacggggttccgggctccgctcgggcagagcccacccgctgaccaacgccgccgcccccgccgggcggtgctgtgtccccgcaggagtcggagaggatggcaggggccggaggccagcaccaccctccgggcgccgctggaggagcggccgccggagccggcgccgcggtcacctccgccgctgcctcggcggggccgggagaggattcgtctgacagcgaagcggagcaagagggaccccagaaactgatccgcaaagtgtctacctcggggca

SEQ ID NO: 11252 - DNA, 2300 bp, Homo sapien
aagtcaaacagcctgggtttgggtcctgacttggctacatccagttatgtgaccttggacaaatgggttaacctttctaaatcccagtttcctcaacagtcattgagaataacaagagtacctacctcataggattataaggattaaattaaatgtgataatacaccacaatacctgcagtttaataaaagtggcagttattctcccgagtttatcatctccctatttccaagtagcagtatgttgccgattcctgaaagtttgggaatttggaagaagaatgtggatgaactttatcttgagaaaacattccatgctgcttatctttcagagatatagcaaagatttatttccacttttatctcatattaataactatgactgggaataataaatgaaattataatctgaccatgttaggtaaatgttatttgcgaaagaagagctatttaatgatatgaaagtcatcacaatcacatggcatatgttaacctttcaaagcatgctgttcaaatgactgttttctttaaattttaatgaagattaggctaactcttaaatgagtcacaattttaaagaaatttttgtactggtattgttaaaacttcttatggaagtttgctagagaaagtagcatgtgttttttatttgtttgtttgaagtagaaagaaatacataggtaatttaattcatttatttaaccacccataacattttctgggggcagtctgtaggtgtgtgtgaaatttcatgggtacggcacacccacatgggcttactcggttgatgaaacacaggcaccctctggtaacacttatatttagaactaaatgatcactggaagaaaaagggattttagttcaggggtccctttccacagcagatgtgagtaaagtttattagcattagattattattctttctacgagggtttaaaaggtctacataaaaagacaccaataaacatgagaacatactcttatggcacatcaaatatcagaaattatgcattcataatataattgaaatgagcagagtgggttttagtggtacagaacaaaatgttcttaagaattcctttaatgtttcctttctatttattctgcttttcccttagcttcctctcagttaatacagtttacttcatctctctcttagagggagatcacatcctttgaacttaaaaagctgtcagtttatttttctccattaatctatcaatatttacttacaaaggcaataactaaaagctactttcttttcatatcacttgtgaatgcacacacacaaaaggtatttagattatcacctgaataatcactgacaagtaagttgcctaccttatttgatatttgttgtaactgttatatttctgttctgaatgctttatgtctgataactcattcaattctttatatgaatcctagagtgcaagaattattgtgattcccatttgatagatgaagaatctgaaacagagaggctaacatctaataatataatgactagaatctgaacctgtccacatcatctggcctcaatttctatcttcatgactttgctatgctgcgtctttattgtggagttttaaataaatgtggtttaggtagtattcctctaactggttattacatgttcagttgttttttctacaagtcaagcagagtcttatgctgcatcaccagatgaatagcaagcacttgctggtcagactacaaatttagaatatttcattgtattttggcactgtactttaaagagaaatgttgactaaagagctcacagaggatggtaaccattattataaaaaaggtctgggaatcctgggattgattggcatttcagggcactctttattttaaaaatttggaaaaatgtgacaaatgtatttttaatatttgaggcgttatcatataggagaggctgtagacaggttttgtgttactgcagtgcgcaggacctgtggttgaattcgtggaggaataattcaagctcagtataacagagaactttctaacttgagtcatctgatagaacaggccccttgtgaggtaatagctcttcccattattagaaatctttagtcatctcattccctgtgagctgaaaggggccttcaagaagagagttctcagagcagactcagctttaggtgctgaaatgaatttctcaaggttagatggctaatagcagggcacagctaatatggaattcagggctctcagctcttgatgtttgttgggaataggcaaagaagagtggatttagagactgctgggcactatgctagacactttaca

SEQ ID NO: 11253 - DNA, 2300 bp, Homo sapien
gtttcttcacctctcgtaatacaagaaaagcagaaagaaacaagggcttgcctagtgcatgcttttctttctgtatccctcttcttttccctccttatccttgtgcattttccttcctgcactttctttgagccaataatcccttaggcattgttcactcctttgcaaaccaaagctttgaaggggagtttgccacaactcagccagatgtgccatttatgacgctcaaaatggtgcattaagtcaattactttttttaaaaagttgatccaatgttttgtgtaatgtatagcaaattttgtgtaattttttatataaagcatccctttgtataaaatgtctgttgtgttattttgagaaaaatagctgtataaatattataaagatgtttttccccatgaaatggagtctgagtggctctgaaattatataataattgtgccaacttaaaaaattataaattatttcatgtagtaaacatcaataaagccattgtccctctaaatcaaaagccataatttaaattatagttgtctatctctactaaatggagattttaaaattagctgcttccagaaccaaaacatctacaaaattaaaggtgagaattttggtgtttttctctctagtgattaaactttcaaaacatctctataaaaatttcttgtactttgtctgctgatcttgattctttttgagtatttttctcattgccatattttcctctcagtgttcagtcctaaacgagaagctcgaacaactgctgcaggctttgcacacagattcccaggctgcgcctgttctccctggcctcagccctctcattgtggaagaagatgctgtggaatcgtccagtgaagagtccctgggtgaaagcaaagagcagcttggggatgacgttacaaaaccttcctcccagaaagccgtcaaaccaagggaaatcatgttgcgggcaaatagtttaaagaaagcagtgaggcaagtcattgaggaagccggaaaaggtacacattaacaaatttagctttggaagaagttggcagcatttctactgcaagcataacggagtttccatagtggtcagattggacacactttttaaaaataaaatttttaaggcaagatagaagatacagtcattataagaaaacttgtacatagtcttatatattgttatggtagtagtaagaatcagcatattagtgaggaataaaataaaatagcagaaataaatggaaacatttctatctaaaatacaaaactagtttaaatgacatttaaaaaattttagatatagtttacttaattggaatctgttgaattcttaaagaaaataaaacctataaactactttgaaaatatagaaaaaaaaattttttgagaaagggtctcactctgttgcccaagctggagtacagtggcgtgatctcagctcactgcaacgtccacctcccaggctcgagctatcctcctccctcagcctcccgagtagttgggaccacagatgtgcaccgccatacccagctaattttttgtagttttggtggagatgggatttcaccatgttgcccaggctgatctcaaactcctgggctcaagtgattcgtccacctcagcctcccgaagtgctgggattacaggcgtgaaccactgcaccctgccagaaaatattttcttaacattaatttcccaaatgtttatgttgctttattaagagcttataaaagctctgccttgttttaattaatgtgtatattaatacttctcagaattttagctatagtctaaatgttaattttagtatgaataattaatgttcaaaaacccctttatagattgtaacttgtaattgtatttcattctctaaaattcttatactttacttgtttattctgataaaaatataattttagcaactttagtttttgatctttagttcttcggacatcaaccccaagttcattgctaaatagtgtttatttgtgaatctggaattttgtttggcatatgtttcaatttgcctttcctgagcatatcttaatattaatgggctttattttcacttatccaaactatttgtcttcttactacctgaagttatggatgacccgacagttcacccctgtgaaccagctaatcagtcctctgattatgacagcacagaaacagatgaatctaaggaggaagctaaagatgatggtgccaaagaatcaataactggtgaggaaactgggaaaaaattattttggaattaaataaaatgtcattttgcttttagttttcaaaaggctgatcagttt

SEQ ID NO: 11254 - DNA, 2300 bp, Homo sapien
agggtggatatttttaacatatgtttgcatttggttctgggatagtaaccgttatggataattgtttgtttctgtcaagtcggtgagattttaattgtttgaattatttctatttaaaattactctcaatttaactgtttaaaaaactaaaaatttaaaacataatggcacaacatacgacacagaataaaacacatgttttcaaggaagaagaaaaaactgttttgacttaatgtgaagcaggggtttaccaaagaaaattgctttaataagccctaactttaactgttttcttctatgttacagtgttagcggttgatgtattgtgtactgtttaagaactcataggagactaataattaatttactataattttaaaggcaaagagttttatattaattttactgttgcacaagcagttattggaagtgggggaaaaaaagaaaactggtgagagaaattacatggaaattataggaaaaaggaacttgaattggtaatttggcaaagatttgggaacaaatagtttgaacatagatttctttcaccttatatgatagaaacacaaggcacacgtgagctgtatagtgtgctgagcacacccccagaaaacaaaaaatatcacattgatgaagtccgagactgtatctagatcttagcataactagtgaattcagggagcacatcctgctgctgaaattgagaagtcagtaagaaggtagttcagatgacctaatcattcaagacatttgatggagtccacacaagggtttatgatgtggggcaaatatctgtgctttctcatctcagtgattgatgtctggagaactagtcagacacacttagctggttcctatagaaaaacaccagtaaatgtggatcagaccataccctgcagaccaaggagattttcttaaacttgctaagcctttcttaaacttgccaagtattagcaatgataattgctaaatggattttttcctttcactgaaacaacaaaacaattattgaaattcacaatacctagagatgggaacatggtttaggtttatccagttctgtaactgactttggcattggctcattgtgtcctttctacaagttatgttttggtgacttggtgtccccagttagaaatggcacacaatattatcagttgttagtacttggtaacgtttcttttactaaaggaattatataagtatgaatcatacctaattttacaatttctttcccacggtcattttggatataaagatagacttcccagacagtgaggttagaaattagaagttcaaattgatatccctgatgtttaatttaaaaatgaaagtaaagttaaaattagtagcatttgtaccagagtagattatgggtattttcatctgttatattacatgttcatattattcattttaggataggccaaaactcacttctaaaatcttcaaaaattttgaatagtttcattttttcaatacttaagccaaatgacaattttatagatgtgaatatatgttttttaaagttaagtccttcatatcttttcttagtttaactccccaaagaggaaaatgtctctttaaaccagtagttaaaaagatggagtatgtgatgttcctttctctgtactgagttctgaatgtttaatccagagcatggatcactgactgcgttctctgactgtggaatggtattctttcatgcaaagtactttcaaaacttcccataaagaaactaaactagagattgtctttattaattaatggaactctgggtatgattaagggaattaaattagaaagtagaataacctagttaaaatcattatattagttatacatgagagtcagtgaacgatgacttgatttttacatgacatttgaattctgtcactatctgattcttgacctaaaggtttctttgctaaatctgatatttattatagtataatatgataatttggagctcctgttgcatctcactgccccaaaaatgttggaatgccatatgatacagggaaaagattggagttcatcaccgtggaattttgatctgtcttaatgacacaacttaattttcatgatgatagatctctgaatgattaatccagaatgatttggtacagtgactggaagaaattgtttttctgggaatttgcttcccataatgacctgatatacaggtgaccttagtataattgaaattaattataattttaattagaacatgctctgtttacagattataattgcgcagcattttaaaaaaatatacataattatgaggatgagagaat

SEQ ID NO: 11255 - DNA, 2300 bp, Homo sapien
cggtgtttccgttttcacactctgagaaggccaaggtttcttagggaagcattcctggtatctgtatcaaccgttttcagagttattcagctggtgtgtgtgtgtctaatttcatttgggttgagccgctgactctgttaggttttcataaaaaatcatttcatttccctttccagcttccgtcctactggtatgtgcatgttaaagtgtaattcaggcttaactactttaggtgtaggctagttacattgctttgttttatgtatgaggaagctgagactcagtggtgataaggaaccttgatttggttgtatcactaatgacagagcttcgagttggaactcatctcctgattcgtttcttttggtgaaacatcctcttgatttctgagctttcaacctctatcttttcaaatcttacactaaagaataagtatctgcgtagaatttcattttctgttcccagaattgactttaagaatagacagaagaggtggttgtcagtgtagcataatggagggaaaaaaattaaagatgggcccttccttttcagccatttgttttcccccaggtaacaaaagaaaatcctccattttatttttcctagtaattaggagaaatccacatgtttcaacaaaggcagaaacagcatgaggactctgacctaatggattttagaaatgttgagatcataggaaattaaattaaatttcatgactgtctctcacctggcctataaatctcctaatctcccttacttctgctttggcctctttaagacccattcttttcaaagacgagactttttttttttaaaaaaaagtaaactctgggtgtctctcccctattaaaaactctgtaataccttatattgcgtttagaataaactttcaattcctttcttggctaacaaagccttacaggatctggcccatgctagtttctgacagagcaagagcatcaccatcttggacaagcaccgccattttaagttccccttgattaaaaaccgcctaaatccagccccagaaacatcagcctaatggctaatgtcagcatgaccataaaccacaaataacacttctgaccagaaactttccaaccctgagataaaccccactctgatcagaaatatgcctcccctccaaccagagacattacacccctgacaataaaactctcctccacccagaaacattccaagtctacaatatgctctccctccctaaaccactaaatacctttagtctgtaagagagaacactcctgaccgaaatcggccagaagcccctctcaggtttattctccaaaataaacctgtctctgttaagctgctttttgtgtttctttctttaactcttacagtttccatctccaggctcaagaaagtttactttctcatttcttcttccctcaaatgcactagaatagatccttacttagggcctttgaattagtgttatccttttcctggaatgctctatgctctgatttttgcgtctgttattcaaatcgctgctaaaatatctcctccttaaaagggcatcccctttactagccactcagtcaccatcaccatcacgtcacttattgtaacttctttgcatacagcttaaaaccaacagattttttttcttttcaccctcagataagttccctagaatctacactacttgtcttcatcattgttcaatcaacagcctagagtagtgtttgttgaatgaagaaatgaacaaacgaatgcaccctttcttccgtgaccctctcctctgaacagggcaaaacttaactcataacgaggatacactcaaaaatgtctttcttattgccaggtgtttccactcttgaggaacagatgccctttaggagacagggcaatttgactggactggcccttccgattttaggtgaaaataatcaccataacagcttttcatctctggctaggcttcccagtgaccaaagctttactttccgatttccataccacgtaaagacatcagggtgagcactagggccctgagaaccctggaagctacttcttggctgggatagggctggttgcccggtgcgctgtgagtggtcctccccggagatgctgggagaaggggcggagccatcagaaaggatgagccttccttgggccttcggatctggtggggctgccactttgggaagggccccgggcttcggaagaaagcaaaactagccttgtggcgaagaaggagcccagctggccccaggctgttaagactaaggggtcgagggaaaagaggcagagcctgaaaccaaatctgcgga

SEQ ID NO: 11256 - DNA, 2300 bp, Homo sapien
aaatgttgagatcataggaaattaaattaaatttcatgactgtctctcacctggcctataaatctcctaatctcccttacttctgctttggcctctttaagacccattcttttcaaagacgagactttttttttttaaaaaaaagtaaactctgggtgtctctcccctattaaaaactctgtaataccttatattgcgtttagaataaactttcaattcctttcttggctaacaaagccttacaggatctggcccatgctagtttctgacagagcaagagcatcaccatcttggacaagcaccgccattttaagttccccttgattaaaaaccgcctaaatccagccccagaaacatcagcctaatggctaatgtcagcatgaccataaaccacaaataacacttctgaccagaaactttccaaccctgagataaaccccactctgatcagaaatatgcctcccctccaaccagagacattacacccctgacaataaaactctcctccacccagaaacattccaagtctacaatatgctctccctccctaaaccactaaatacctttagtctgtaagagagaacactcctgaccgaaatcggccagaagcccctctcaggtttattctccaaaataaacctgtctctgttaagctgctttttgtgtttctttctttaactcttacagtttccatctccaggctcaagaaagtttactttctcatttcttcttccctcaaatgcactagaatagatccttacttagggcctttgaattagtgttatccttttcctggaatgctctatgctctgatttttgcgtctgttattcaaatcgctgctaaaatatctcctccttaaaagggcatcccctttactagccactcagtcaccatcaccatcacgtcacttattgtaacttctttgcatacagcttaaaaccaacagattttttttcttttcaccctcagataagttccctagaatctacactacttgtcttcatcattgttcaatcaacagcctagagtagtgtttgttgaatgaagaaatgaacaaacgaatgcaccctttcttccgtgaccctctcctctgaacagggcaaaacttaactcataacgaggatacactcaaaaatgtctttcttattgccaggtgtttccactcttgaggaacagatgccctttaggagacagggcaatttgactggactggcccttccgattttaggtgaaaataatcaccataacagcttttcatctctggctaggcttcccagtgaccaaagctttactttccgatttccataccacgtaaagacatcagggtgagcactagggccctgagaaccctggaagctacttcttggctgggatagggctggttgcccggtgcgctgtgagtggtcctccccggagatgctgggagaaggggcggagccatcagaaaggatgagccttccttgggccttcggatctggtggggctgccactttgggaagggccccgggcttcggaagaaagcaaaactagccttgtggcgaagaaggagcccagctggccccaggctgttaagactaaggggtcgagggaaaagaggcagagcctgaaaccaaatctgcggagcaagccaaggcctggggacttgccagagggaagggttaagccgtttccaaggcaacggaccaggaagcgcgcaagacgtccgccgcaggttcgtaggtcgccctcgaatttaaagctcccaaggctgagtgggtcccggccaatggagaggccccctttaagtcatgtgaccagcggggctgccccgcgggctgctccgcgggctgcactggagcacgtgggaaggctttttttcctgttccttctttccctttttaaacgcccacccacttttgcgcgggctcggccgcggaatttttctcgcgagaggcgcgctgccctctcgcgagagagagtgggaggcgtggagagtaggcggtgttgcgggccggagctgcggcggcggcggcggcggcggaagccgaggggtgggcagggcgggggcgggccgcggggctgggagggggagggctgggggtcagcgcgggagggggccagcttgcttgcccggctcgctcacgggtcgttgaggccggtgacatgtctgtgagctgcggaggctgcggcccccaggtgagccgggcgccgacgtgctcgccgcggaggctgcgtttagatggggtggcggcgggtgtgcggccggcatggatggagcggcccggctccggcgctccagcccctccgcctgccgctggtc

SEQ ID NO: 11257 - DNA, 2300 bp, Homo sapien
gaatctccatatggtaacctgtgtgatgctccggattctcctcgcccagtgaaggcatcaagggaagatagtggtttatttagtcctattcgatcctctgcttttagtcctcttggaggctgtactccagctgaatgtttttgccaaacagatattggtggagataggattcatgaaaatcatgattctgtttattacacctatgaagactatgcaaaaagcatttcatgtgaagtactaggctcagttcttcgtacccaccatactaataccctatcaaatattaacagtattaaacatggagaaaataaaactgtaacttttaagcatggaaaccttgatcaaaaaaataaatctaaaaataaatccttaatgattaaagatagcattcaaaaatttgcagcagatcttgtggaaaaaagttttggcagtgcatttaaagacttacagaaaggagtctcttcatgtaccaatgctttgtaccacttagccatcaaattgacatcatctgttttgcagatggcatttgatgagctgagaaggcagcgtgcattttcactaaaagaacgtgccattagtggcctggctaactttttggtgagtgaagctttatcaaatgccttaaaagatttacagtatgtaaagaagcagatattcacaaacacagttgctaggtttgctgcagatcttgctgaagagcttgtttttgaaggcatcatggaggtgtgtcagttttcatatcctcaaacgcctgcatctccacagtgtgggtcgtttgactttgaagacaaagtagtgaagttgtatgcaaaagatttgtctgaatctgtaatacaggaagcattcattgagctatcacaagttgatgtgacctttacaacaaaggcagcagttagtgtctctacggataatatcaagtatgtgagtgcagaaagtgtagtgccatcgacacaggctgtcacgttttccccttcttttcacaatcaagcaattatggtgacaaaaccagtgcaggaatataaaaaggaatacacagtgcagcaggccttgttttgtacttctggaattgttacttctataccggtgcccttggcaggaagtgcccttctcccatatcatatttcatctactgcatgtcaggccaaggctcatctgtcatctgatgatagtaattcaaatggtgattctgcccaagtgcatattgccacaaaaaacagagaagaaaaagcagcttgtctcagaaatatttgtttaccttcagaacacaatccaggtaatcagaatgattttaaaccaactaatgacgatattgaaatgcagagttcctcaaaattaccaaatgatcctgcaattattagcaacttttctgcagcagtggtgcatacgatagtaaatgaaactttagagtcaatgacatcattggaagttacaaaaatggttgatgaacgtacagattatttaactaaatctttaaaggagaaaacccctccattttcccactgtgatcaggcagtgctgcaatgcagtgaagctagtagcaataaggacatgtttgctgaccggttatctaaatctattattaaacattccatagataagagcaaatcagtgatcccaaatatagataaaaatgcagtatacaaggaaagcttgcctgtttctggagaagaatcacagttgacaccagaaaagtctcccaaatttcctgactctcagaatcagttaactcactgctcactttcagctgcaaaggattgtgttccagaatgtaaagtttctatggttcatggatcctccctagagacactgccatcttgtccagctgtgacaggtcagaaatctgacttgaaggaatctgctaaggatcaaccactgaaaaagcataacttgaatagtacatcacttgaggccttgtcttttggacaggaaaacccctttcctcattcacatactttctcatctacagcacttacctgtgtagatggtttgcatgtggaagataaacagaaagtcagagacagaaatgtaatacctgatactcctccatcaactcctctagtaccatcccgggctagttctgaatgggatatcaagaagttaactaaaaagctcaagggagaattagccaaagagtttgcacctgctacaccaccttctactccacacaactcatctgttggtagtttgtctgagaatgaacaaaatactatagaaaaagaagagttcatgttgaaactcatgcgatctctttctgaagaagttgagagtagtgaaagtggagagctcccagaagtggatgt

SEQ ID NO: 11258 - DNA, 2300 bp, Homo sapien
gctactgctctctctttgggtccacacggcttttatgagctgtaacactcagcgtgaaggtctgcagcttcactcctgaagccagcgagaccacgaacccaccgggaggaatgaacaactccagacgtgccgcgttaagagctgtaacacttcttgtgagggtccgcagcttcattcttgaagtcagtgagaccaagaacccaccaattctggacacaatatgacattggttcaggcattcaatccttaagaaagctccatctggatatctcagtttttactctttttattctacctttcctggaaggctggcagtactttgtttgcaggtggtacatgtgtattgttgtagtgatgatatcttccccagtgggtatgtctgataggtgtttgttcagaaagatcatactgtatacatgtttgcatctgtattactgcttcgatgttttcagattcaggaggatccactgtattcaacaacactaataaagagcctactatgtgcaggaattttgctaggtgatgagagtacaaatgatgaataaaacattctgtattttcaagacttttataatctactagagaagacactcatatagttaaagtcactgtaatgaggaaagtgataggataaagtgaatgacaggctggacgcggtggctcacatctataattccagcaatttgggaggcgaagttgggcagattgcttgagaccaggagttcaagaccagcgtggccaacatgctgaaactctatctctactaaaaatacaaaaattagccgggcatggtcacacacacctgtagtctcagctactcgggaggctgaggcacaagaattgcttgagcctgggaggtggatgttgaagtgagccaagattgcaccactgcattccagcctgggtaatgcctcaaaaaagtgaaataaaacaaataaaaaataaaggtgagtgaggagcaagagaggaagggctcttagaaaattctgggaatttgggaacagcaagaaggcgatatcctctgggctgaggtttgaaggttgaagaaggttgtcaatgaaacaaacagaagcaggaaaggcttccccagcatctcagacctatgaatgtgaagtgagcttggccaacctgctcttcctccagagtgtttcatatcagcaagtggcaccaattcagttgccaaagagagaaacctgtgtggcatctttgactccttcctcttcttcaccatgtcatggctggttagtcaccaaacccaacagactccactcctaagtgcctctgagacccattgcttctctccaccccttctgccaccaccatgctcagtcctggcctggatgtggcccgtggtctagtgactggctctcttgagtccagacttgctctgcccacctctttctaccaccctccctgaaacctattctccacattgcagtcaaagcacattctaaattacacaacagacctgtcattttgctgagaaaaaaactttcaatgactctccattgcttccgaataaaattcaaatttttattgtgagtgacaaaagctttgtgactcaatccctgctcgttttctagtctcatttttcactattcttccttcccctctgatcaagctacactaaacttctttcagttccttgaatacatcctgttttgcttcttggctgttatatgtgtgtcttcccactttgcttggataactgactcatcccacaagcctcatcttaaatatggcttcctccaaaaagtcttttctggactcccaagtctaggttaagaactctcatgtgctcccaggacacattttactaattacattttatggtgactgcatttgcttgtgtatcagcatgttaaagtggaaactaaatcctaggttgcaaaaactcccatatttcaaagaaagatacttgtagagaaggaatctggaaaccaagttaaggatatacataattgaggttgaagtaatcaagccatagtttgtttagagaatctgtgagaggagctttgagataagcagtgggcgaggttgatatttgttgtgacgtttcaggtaacaaagagcctgggatttgtctcacatctaagaagactgaaagcaaatggtgtggccgaagctgcctctctggtggcatagctaagaccaagctgcacgcagtgaaaacacagtttgttttcactgacaacaaggcagaatgtgtaccagggatgtgacgtggggaaccaggaagaggacagtctgaggatcattattaaagggactccatccaagaaggtttccagccagaggca

SEQ ID NO: 11259 - DNA, 2300 bp, Homo sapien
aaagaaaagaaaagaaaagaaaagagaaagagagagagagattagagttagagtcagagagaagctgtgaggacagaatcagaggtcagagactggagtgatgaggtttggagatgaaggaaccaaggaatttaggtgacttctagaagatggatcctctccggagttcagcaaagtgaaacgtctgtcataataataacgaatgacttcctttttcattttcattcatatagtgaagttttctaaaggctgcatcatgtgcaatattgtaacagagtaagtgcaggactgaatgtgactctatcaggccaattgtagagatgtgaaaaaatgtaaaacagtggcacttttctccctacttttttttgaaaatctgtttttttaaataaaataattttataaaagtattatgaattatttataaaattatattaacattatgttaacatgctaatatggtaaaattttctgcttggagtttgaatacaccaaatatttataaatataactcacacaaataaaacctctttggtgttctcaaaattttgaagaatgtaaaaggtttgaaaattgctgatctagcaaatgactgaacatgaacagctatagtatttgtacctgcccagcagtgcagcaattccttatccttctcatatctgcactttaattttcctttgacaaatatctctccctcctctcagcccatgacatgaggttcacatggggttaacttaattccctggctcaaaggaaaggtattaaattcagacttgtatccaaccattcctgaagctagacttagccctatttttcaataacatgaaccaatcaattttcacatgagtccaaaataattctatgttaatacactaaggtactaggaaatatagtttgagaaatgttgatccaaacattgtgttatttacagtggagtattgacataaactttgaatcttcaaatatgttctggtgtcttggcatctcttaatacctattagcttacaaggctttcactcaactattttataattttgataatgacttaattgattagttgatatattgttaaaataaatatattaatgaatttatgataaataaggcagataaataagacatgcaattaggaagacatgttaaacaaattgttataataatacaatcactctcagcttaggatagctcctggccactttctctctgggtggtttttactctgggagtagtttaaatcattatctagtagtagtttaaagcattatctttgcctaagagctttcgctgactccccacatttgcattgtactaagagttttctctgactccccacataggtctagaccctagtattataagattctcattgtacttgcactttgccttcaaagtactaatcacggttttgttagtgatttgtgtgatgatttgttgaatctttttttttttcccactagggtgtaagccccatgttccatcttgatcaccatgtttctagcccagtgctggcatatagtgggttctcactaatatatctgtagagtaaatgaagaaatgcatgagtgacatgacaggagaatttaaggatgccatgggagcataaaacagagggagccacctgggtgaggagagctgagaaagacttctggagaggcgacatttgagctgagaaaggaaagacaagtgggagagtcctccaggtgtagaagttggagagatgagcgctccagttaggtagtatttgaagctgatgtagaaaaggagtcttgagccagcttgtgaaggactattggagagttttatttttatttttatcttttttttaatttttgagacagaatcttgctttgtctcccaggctggagtgcagtggcatgattgtagcttactgcagcttcgacctcctgggctcaaacaatccacctatctcagccttctgagtaactgggaccagagatgtgcaccaaaatgcctggctaatttgttcattttttgtaaagatagggtctccctatgttccccaggctattctccatctcctgggctccagtgatcctcacgcctcggccacccaaagtgctgggattatagaagtgaaccactgcgcctggcctattgaaggtttttaatcttcagagtttcgactttatcaacaacacttagaagccaccaaagaattgcaggtatggaaatgacatatacttttgcttttagaagaaaatcctgatcagtgtgcacagaattcttcagggggcaagtgtgattcattctgataagatatagcatggcttagactgggagac

SEQ ID NO: 11260 - DNA, 2300 bp, Homo sapien
gatacattacctgtgaaacagcagcaggtagactgacagtggagtatctaatacagcctatggaagccagaagatagtgggatgacatttttggagtactagtagaaatgtcatatgaagaactctgtaggaatgtaacatacggtcccatatatgaagctcctgggtcaagtatacctgaacataattcagggatttgagggactttcttgtaacctgaggatcaagatgtcaaggaattaaaaacatgtataaaacattgttgtataaaaacccattaaaaagaatggaagacactatagtaaaatcattgtgggtttagttgttataacacattttaaaaatctttgatcccaatcaatatttataagaaagaagaaatatggaattatttcctgagtcaaggagcagggagagaatgaggaagaagaggaggaggaggagggggaggaggagacaataaacctacttcccaaagttaacaaacaaaaagtgggaagaggtcaaagactacaaggagtagaattaacgtcaattgtttctatgtttgagtctgaaaattttttgtcccttctccaccaacctatatattgatacacatataaatgctaaaggcatttttgaatttgaacagatcattttctttgtatggctgcctttaaaaaaaattcaacctggtcactcttcctcaacatttactgaggtctaagtgttcaatttagaacacatgctttaataactcagagacctgtcatttgtcacaaatcttgcctagagaaatactcattagcgaattaggcagaaagaggatgcaaaataaaaaggcacagtagtcccctgatatccatggaagactggttccaggacaccaccaaacccctccccgcaaataccaaaatccatggatgttcaagtttcttaacatatcatggcatagtatttgcatttaacctacacacatcctcttgtacacttgaaattatctttagattatttataatacttaatagaatgtaaatgctatgtaactagttgtgtatcatttaggaaatgatcacaagaaaaaaagtctacagatgttagtccagacacagccatcctttttttttttttcaaatatttttgatctgtggttcattgcatccacagatgtggaacccatggatactgtgggctaactgtattaataaaaaagtggaaacatcctaagtttcatgggtgtttaaattggtcagcaacttccttctgaagaagtatcagaatttgtgagcaatgttaatatttttgttttctcactaagagccacagttctgaatagaggtttttaaaaagccctagcaaggtttctttagcaatgaaactaacatttaactgtatcatcagcttcgtgttacatctctttcctgactgttgggtgagccctcctcggatgcttgcttctggctacacgcccctttacccttttctctgcactgttttcatctttataaagtcagagttggtgtctataggctctctactgccacattcaagacctgcctcgctcaatgtcaccttcaagatgcagaaatagggatttgggaaggggattgtgaaattttcgaagtcttccaaaatactttgagaaactatatttggaagcactttggggggagaggttggacaggaagggtcttcagagatcatcaaatttaactttctaaatcctaaggaggaaaccgagactccaggatgtgaagtcccttctctaccaaactagaatggatgcaggaggaatgtctgaggtgcaatccttatcctttagcaaaggtgtcctctgcgtcttctttaacccatctcttggacctccagaaagacagctgaggatggcaaggggagtctggaaccactggagtagcccccagcctcctccttggagggcccccatgaaggaggcccttcagtgacagagattgagagagagggagggcgaaaggaaggaaggggagccagaggtgggagtggaagaggcagcctcgcctggggctgattggctcccgaggccagggctctccaagcggtttataagagttggggctgccgggcgccctgcccgctcgcccgcgcgccccaggacccaaagccgggctccaagtcggcgccccacgtcgaggctccgccgcagcctccggagttggccgcagacaagaaggggagggagcgggagagggaggagagctccgaagcgagagggccgagcgccatgcgccgcgccagcagagactacaccaagtacctgcgtggctcggaggagatgggcg

SEQ ID NO: 11261 - DNA, 2300 bp, Homo sapien
attccatgaaaacactttatcacccaccttctaaacagccaatgtcttaagcagtgagtctcattgctgtaccaatattttaactgtgaaatagtacaacttttctactaatagttgacattgtattccctatagtaattagattatgggtgtttctttcccattttttttgtaatcagtttaaatcctttttgaaatgttaaactagtctttgggaaaacattttttgtcccaaacttaggatatgcattactccctcattcttatattttaaaatatgtctacaaatttagatctcattctttgataccatctacatagctagttttatcttatttcctcttttcttataaattgacaactttcagtgatgttaggtaaacattgactgtatgtctaagtccttcatcctcctgcctgacttcataggtcccaaaggtacctcttagatttgtgtttgtgttagagagtgtccaccatctgtcggcctcatgttgattcttctatacccttctgtttatcagagtagtaggaagactgcaaaatacatttcccaaaatcccttgctagctggcatccaatggagggcaggacatgaatgaaggctggagggaagaagccattttttaaaaatactttctgcttgcacctgtggcagtgccagcagcagcagccacatggacagcaacagtggtgacagcaacagcaagattagcagtttgggcaagaacatagaagcaagggtgcctggtgagcacaggttcctgaggcgctgctcaggcagcagttctccaaaggaagcagcctctatggcacagtgtccatgggctgtgggtaaaatcattttccctattgtcctccagctctatgtgcaatcacagtttagtgcaattgccagtccttggataacctaacccttcttgttttactcctctaacccatttctatattttcataacagattccttacattaaatgccctctgtcaaacacagatctgttactgttctcctgattgagtagcgtccaaggcaagctggtaggaatttcagcatgtgtgtgcaacatcagcagatgcagtgcacccagaatgaatttcatcatatcctggaaaaacgtttgaggaagactcgattgacaatgtcaactctgcacaccactgttctttatctcttggtaaagaatcatcaacctctcagatccagtgaaagattttatgttatttactggcatttaaagacacttgtttgtgctgtgcttatttcccaggaggtctgcattcaaattactggggaaaaaatgcaagacttttgcatctgttgagccctttcttctttaaggcatatgattcatcactctcatctccctgcttttttcttccccttagtctcctaagaattttgaatgtattttcttttgatatttcttcttcccttttctttaggaactcttcatctttgcagataagctggcattcagaaggaggacacttgagaaagaaaggaagccagtagaataatgctatcacagaagaaaggatgaggtcagtgtgggctctagtcttacgccacaggttaattatcatcatatgtagcctctaattaagataaaatatggagaatatcttattcccccacaaaatgaaagggaacttagcttaaactatggaataatttcataggttaccacaggcaaattcatgcccatacctctatattcaggaactcttccttcatcatcctgagcaatgaggaaggggactactgactccaaattttggaaatatttatgtcatggcccattgccctgatggatttgttgacctttaatatttagaatctctgcctctatgcatgttacccccgatatctgcatgtaacacagatatggtagatttagaagatgacacttgattagacacaaaatgtggaagaaaaaatatcaaactgtgtagctgaatgttacccagaagtgaagaaaggcatgcagccagatttccccagctctttgtttcatcacatgatgttgcttggatatcagcttatcaacagacttccaccaccaccaccagcatataaacagagtccgcgtaagaaaactacactgaataggaatggcagcttttaaaagtgggggaactacagtatagggtaagttctttttaggcaaatctgtctttttgtttcagatatattattttgtagatgtttctctccctgaattccatgagtattttaatcaaattttatcaggtataggccacttgaataggtaagataaatttattcagcagtagcccc

SEQ ID NO: 11262 - DNA, 2300 bp, Homo sapien
tctcaaagcactataaaagccatctccccttctctctgctgccttccagtactcaattctctctttcatctagtttttatctatgctaatctctcatgtgaaatgtcttttatgttttatttatttgttttgtagagatgaggtcttaccatgctgcccaggctggccttaaactcctggcctcaggtgatcctcctgcctcagcctccaaaagtgctgggattacaggcatgagcaactgagcctggcccatgtgaaatgtcttgattttgctccccactttctgggttgccttagctcagatctgtatttcttacctagacgtaactaggctctgaatttatcttcccgatttcagtctcttcatctttcaatctccgttttcacattgttagaagctaactttgtaaaacagatattattgagtaactgccctattgaaaaacttcctgtgccttccacattgcctacaacagtggttcccaaagggtgatcctgagactggcatcattggtatcacctggaaatttgttagaaatgcaaatccttgggccccatcccagacctgaatcagaaactatatatatatatttttgagatggagtctctctctgtcgcccaggtggaggtggggtttcgccacgttggctaggctggtcttcaactcctgatctccaggtaatcctcctgcctcggcctccaaaagtactggaattacaggagtgagccaccgtgcctggccataaatctgttttaacgcaccctcctccaagtggttctgatgcttactgaaatttgtgaaactctggcctactctacaaaaccctaatgtcttaggatggcatagaaatcctgactgactttcctaccatgttccttgtcattattttctcctctcctgtcccaccctggcccacccttcaatttcattctttcattagctatcaaacctgtatgtgtctttttgttctaagcaccaataatataaggaagacagtccagctcctaactgtcttgctgacctaggactggggtgctccagccacatgacaacccctggaattaagtacacaccatgtcattttaagtgacaagcctctgccatagcatctccttcttcttggtgaattcctatgtctttggtggctcattctcaaatgtccctgttcctgaattactcagagggctaatccccagtttctctgtgcctccacagctgcctgtcatttcatttatcccaaagtggcattcccatttgtttacctgtctactaggatactcctagaatgcaggtagcatgagggaagagccttcactcatctttgtgtagacggcattgtgaccctggtgaccaaccctggcacacatcagaatcatctgggagcttttcaaaaatatgaatgccagagctcacccctgaacctacaggaactgagccttacacatccatattttaaaatgtccccacatcaccgttgcacactgttctgcacagagcaggtatttttaatagttctcgaatgtctagtcaattacttagcaaggctgcctggagaatcatgtctaccttagcttacttctccggctttgtaggtttttgttttcttttgatttcagtttccatttcctctaacttgaaagtatgtgcattggtaacagccacacagcagtcattactgataaaaggcgacattttgttgagatgattttagttattgacctaatctctggtattttaaggttaatatattttttacagtctcaaatatccagcggtaacctcaaattagagttgcctgttaaacagtttctcaagtatctttcaggattgtagtcactctgcgggctaatcgctcaccaggtgtccgtggctgatcccagttattctgattaacctctaaggtgattgtgagactttaaaccgtctcacctgtagccgaccaagccagctcaagtcaacatcctgggctgttaacccgcgataaggtcggacggggcctcagtggagaatacgtggggaagttctctggggcgggcgcagtctgctgctgattctgagaaaccgaaactcagctgttaaaaccgctgcctctgcactttggaatcccatcttgagactcgctaagcgtcccagccgcatccctcccgcagcgacggcggcccgggacccgcgggctgtgaaccatgaacacccgcaatagagtggtgaactccgggctcggcgcctcccctgcctcccgcccgacccgggatccccaggacccttctgggcggcaaggggagctgagccccgtggaaga

SEQ ID NO: 11263 - DNA, 2300 bp, Homo sapien
taatggaggtacactagaactcagatgtcttccttattcctgtaaccacccaatgggtttactttgctggctgtctagacagagccaaatttataaagacggggtaattgcaatagagaaagagtaattcatgcagagctgactgtgcaggagactggagtttcattattactcaaatcagtctcccagagcattcagggatcagaattttttatttatttatttattattattatttttttgagacggagtctcactctgtcctcaggctggagtgcagtggcgcgatctctgctcactgcaacctctgcctcccaggttcaagcgattctcctgcctcagcctcccgagtagctgggactacaggcacccaccacgcccagctaatttttgtatttttagtagagatgggatttcaccatgttggccaggatggtctcactctcttgacctcatgatgcacccaccttcggcctcccaaagtgctgggattacaggcatgagccaccgcgcccagctggggatcagaatttttaaggacaactcggtgagtagggggaagccagtgagctgggagtgctgattggtcaggtcaaagatgaaatcacagggagtccaagttgtcttgcgttatcagttcctgggtgggggccacgagatcagatgagccagtttatcgatctgggtgatgccagctgattcatcaagtgcggggtctgcaaaatatctcaagcactggtggtagtttttacaatagtgatgttagctccagcagcaatttggggagggtcagaatcttgtagcctccagctgcatgactcctaagtcataatttctgatcttgtggctaatttgttagtcctacaaaggcagtctagtccccaggcaagaaggaggtttgttttgggaaagggcttttatcatctttgtttcaaactataaactatgaattacattcctcccaaagttagtttggcctacggccaggaatgtacaagacagcttggaggttagaagcaagatggtgttgattaggtcagatctctttctcagttgtaattttgcaatggcggtttaattcccagtccagttctctttatactgctatgcaatgcatgtgctcatgttctggtatgtactattattctgtgtcagtgttatcttccctacaagattgtaaatttctaggacctaacttcttagacatgctaataatattaactaagtgaacaaattaatagaccctcaaaactttaaattcaggaatagaaaaaaaataaagctttttcttcctgtcagctgattttgcaaagggtataaggagccaaagagctgccacgttggtacagaagttggaaaacaccatacgcttcaactgctggttaatttttgctctaaaaacttgatggaggccaggcgcggtgactcacgcctgtaatctcagcactttgggaggctgaagcgggcggatcacctgaggtcaggagtttgagaccagcctggccaacatggtgaaacctcgtctctactaaaaatacacaaattagccaggtgtggtggcacgtgcctttaatcccaggtactcgggaggcagagggtgcagtgagccagagattgcgccactgcactcagcctgggcaacagagcgagactccatctcaaaaaaaaaaaaaagcttaataataaaatgggcttttatatatacaaatcagcacaaactcatttgagggagagtaagatttacctacttgctcacaactttttttcccctgcctcaggctcctgagtagctgggattacagggacgcaccaccacacccagctaatctttgtatttttagtagagacgaggtttcaccatgtcggccaagctggtgtgatccacccgcctcggtctcccaaagtgctgggattacagcgtgagccaccgcacccggccacaactttcttctgtgtaatttcaccttaaatacagccatttacttgggggtggagtaagcaaattgcctctttaatttctctcccggggtggtagaactgtggcattaaacagaagtgcgaacagaagttgagagtgggaagaaaggctgcccggaagggggtcaggaaagctcaggcaagcccaccctcaggcactacagctagactccgagcttactgggcagtcatctgattcgaccaacatcagttcgcagggcttaagcccagtcccttacggcggcctggggagggaccaggcccaagtatataaagctccctgagggtccgcgttggctttgcgcctgtgagtgtgattcaag

SEQ ID NO: 11264 - DNA, 2300 bp, Homo sapien
tttcttacctttctactgactcaaactggcagagtacaaaccagaggaaacatacaaatctgactcagtttcccgattcctagcagttcttctcggagcagaagcagcaaatacactttgtgcaagctgaaagagccccaggcttacctggccgcaccactgacaggaaataagaattctaaagagaacctcaacagtgtcttgccagaggggtgcagaatctgcaatctcttttcagtgctgaggccaagagtgaatttggccctaacccagaaccaggtttcctgctgtgggagggagcctagtgcagctagtagctgcaattcagtaatccaaattctagcagtctaccctgaggaaaataaactcaaagatttatggaaaaggacatgcattgcagtgttattaaaagtggcaaaaatgtaaaaacttaaatacccacaaatagaagaatgtttaagttatggcaccttcagaaggcagaatattattattgcagtcattaaagactcatgtttttaaagaccacttaaccaaatgggaaaatacattatgttaagtgaataaagcagagttcaaagtggtatttacggtatgagcccatctaattatatgtattacatacacacacacacacacaaacacacacacacatatacgcacacgtatgtatgcgtgtatatatatgtgtatatatatgtgtgtgtgtgtgtatatatatatatatgtgtgtgtgtggttgtatgtatatataaatgcctaggaagagactagaataaaatattccaaaaaacattttacagtaatttatagctagatagtattatgtggagttccatttttatgtattttttgtatgaaatattctagtataagtaaatattttatcagaagtatttacatatcttttttttttttagtttgagaagttgcagtatatctgtacacacaccctctattctacattgaggctcacaaggtaatccttttacttcatgtgtatatgtttctttgtagtaaagggcaggagcttcagcttttgaagtaaaaccaacaaaaacccttctggggactgtgtattaatggcaataagctttaattgaggggagagtgttttaattgtatttctatcttaaatgatagggattcctagttactgctgtcttattcttggaatactcttttcacaccagtgttgaaagtagggtttaaggactaccatacaaacaagcccagaaaataaagatgtggtgtaatcaagtgtgagggactaaacagcgaaagtggatactcatctggcaaaattgctgttgctcaaccttagttcttacacatgcaatggcttatttccgcccctgaaaagaagctgcctataaagggtgtccacttaatgcttatttgaatgatagcagtccaccacattctcccaaaatactgactaaaacatacaaaaataagcatacatggtgagaatggtgggattagggaatagtcccaataaaatacctcaaacttcagggaagttttgtttaatataatctgatttagaataaaatagaagacaccaggaactggaataaaaattcccttctcagaactctgcgtagtgttcacttttgttaagtggaggaggcttagaaaagctccactaatcaccttcaaattagatgaactagggctaggtgggaggcaggcaagtgaaaggaaggcatctactagaagctcactcctgaataccattacttcttttctaccctgtaagaagaattttctataaaaaaagttcttaagttgactctaaaatggcagatgtgagggcaaaaacagatggccaagagcaatttctggaatgaaaaccagtggtgtaaaccagtgttaactctgcagaaatgtaattggttcaactgaaatgtaaatgtaaattgatacatgtatggaaggcaattaggtaacagctatgtgaattaaaaatacagaattccactttcgagtaattggagtggatgtgattttcctattcctcccactaaatacaatgaaaactcctggacattccatatagaacaaacacaagattctgaaaggcagagaggaggaagtagactggttaaggacatgagacccagaggaataacctggtggtaagttccctgtgttgtcttcttatcttacatatccaagacttgacactgaagaagctagcaagctgggaataccaatgggcacagacaaaaagcccccagtgaagcctactctctctagccagaaatgtagaaaaagggacattgcagcaagacaga

SEQ ID NO: 11265 - DNA, 2300 bp, Homo sapien
gttagtgaagaaaagggaaaggagcaaagaaaaaagggaaaaaaagatgtttggttgtccttccttctctcccttagctccttcttctcacaaaaggaagggccttagctccttcttctcacaaaaggaaggggtgaaaaaatgggcagattgaaagggaaaagaagggagttgaattagagataggagggcacttggaggtagtgagggagaaggaaaatgagtcagagaaatcacaagaataagtgagggggaaggagatgggataagaactgtttaaattcaggaggaagagaagggctcagagaggggagtgcatactttggtcacactgagagccttcaattactcccagcagggcatctgccaaatagccagtgtcccttgctgaagacattttcctgacttttgtattaactttaatgtgattctctttatggtccccgtattgctggttgcagtttcattgacactctgtgtgatcaaatagcaaatgtggaggtacagttctgctattcctgcccccttgcagtttgcagccgacttctgagtagtgcatcttgtgtttgatgtttgccattcctccttgtcttgtaggatagttgaaagggaagagacgtgttcctaagggctgtcacatttatagctcatgcatacaaatattaaagaagctgaaaaaacttgataaaatcacatttggatatttttttgaaataaggtagttggctccttgctggtctagtgacctgccctcattcactatacctgtaggcggactgcttcttaaaagatctttcctcatcctttttcaatactcagctcaggaagccttcccagtgtttcccacctgggtcaggtactttctaagtgtgtaccagtaccttcccctgcccctggcttcttgtgctgacctttccctattagatctatcatgccatgtggtaatttttatccttccactttggggctctttacacagtattagttattactgagcacctagttatggaacaaataatgtctatcttcaatgtctacagatgctggtctttagagtgtaaaatacttccaaatttggctatgcttttagttatctgtttacaattagtctacatgttctggaaagaaaagagatttagccagatgtaaggtgtttctggagagtttagtagaatatttgtttccagattcgtgcaattataatagaggaattgtgattccattaagttttagataccagaggatggtcttgaagttcggggcaacctatttcttatgattctagcactcacaggcctgatgtataaggcactttaaaaccatgcttctcagactttaatgtgcaaagggattatctgaggatcttgttaaaatgcagattctgttgcagtaggtctcaggtgggttctcagattcagcacttcaagctcactggtgaggctgattttgctgcctgtggaccacactctgagtaacaaggctttaaaatactttctagaaaataaagttgggatttatcctatgaaaatatctaggtgcactttatagtttgcagaacaacaaatttcctgagagaaagcttataagtgtgtaactcttatttcaatttggaaacttgcaagaatttctcatacttaaaaacagtacgtctgataccagtcaacccctaaaactgcttctgaatgacatttttagattgtactgccattaattaacacacagctttatttatttaggctttcttagatttgggaggccctggccctagcactggctttagtgtagctactttagcaacaaagactacttttaaagcagaaatactctttgaaagattgacagttcggaggctttgtttatgatgagaccttcacatttattgattgttaccaagttagcaccatgcggagaccttctccaagggcattcaattgcagtggccagaaatggaaagggctatgttcagctcgaactttgcaggcgaaaccttgcatctgcttacatatatatgttcagtcagctctctgaaattgatgtttgaagttttttctaacaagatggcctttattttacaggtcctttgctgccagcatgatgtcgtatttataatatgtggaggagagagagctcaccatgctcaggtaaagggatggtatgtgcaccacaaataacaagcaggttggttgtcaccatatgggaagggatgtagtttaattatacctctggcatcattctctaatgtgtgtcttagttatatctggggttcagagggcctgtggcagaagatctctgaactaaca

SEQ ID NO: 11266 - DNA, 2300 bp, Homo sapien
attgaaatttagcatgaaatgcaaaattgaagacttctgcttctaagacgatgattgtagaaataccgaggtcgaaggatgtggacttggtgctacaccagacagcagaattagcagtctggggtgaccctgcatgtattggtcagtgtccatgaacactactctttacaggagaaaaatgcgtacctgataagctattagaaatgtgtatttctggcctggagcggtggctcatgcctgtaatcccagcactttgggaggccgaggcaggcggatcacttgaggtcaggagttggagaccagtctggaaaacatggtgaaactgtgtctctactaaaaactaaaaactaaaaaaaaaaaaaaaaaaaaaaaaaaaaaaaaattagccgagcgtggtggccggcgcctgtaatcctagctactaggaggctgaggcaggagaattcgcttgaacccgggaggcagaggttgcagtgagccgagatcgcgccactgcactccagcctgggtgacagagcgaggttccgtctcaaaaaacaaaaaacaaaagtgtatttctcttaaaactgttttccccatccttctgctctagaagggacagtataaactgctggtgaacactgactttcacattttgagaggttaggttctgagctttggccccctcacacccagggcatcccactggggtccctgcagagtgcttctacatgcatcctttgttaagggtgcacaatggataagtattattttctttctttgcattggggttctgaccgccagggggaaaaatagccacacacaaggaaatggcataagttaaaatcaggcaagcctagtggggtggtaatgactttcccagcatccaagtctttgccttcaggttacgtgaagctagaaaacaatgtcattcattcaacatttacagggaactcacaaagtacagagtactatgctaagcactggaaggcatgcaaaagtgtgcaaaacacaatccctgcattgaggattcctgccagaaagggtatttcaagtattacccagaccttacgacccttgaagaaatgcttgtgtgaataaaatcccactcagaatttaaaataagcaaggaaaagtatactactaagacaatatatctgttaagaggcagagaatgtaaatgtgctttaaacatttatttctgaagtattacaatgtagttgggatggaggatcgggggatgtgggtgtgtgtggggaggtggtgggagcggttcttggacgagcctgactctaaggaggcactgcttagatgcctgcacagctaagttgaatcctaacaaagaggaggccggcattcttacctgggaagtgggtaactttgagaaaaagtagcctccaaggaggaaaaaaaggcaacatgtcacctggggttaggatcccctcacccttaccaacctgaatgctgaccgcaccccggccgagccactctgggccgcacaccccgcatcatctgcccaggccacgcggcccaattccaccgtctaccccaagcccacaatcctgtaacacgcccgctccagcctggagtcggccacgtgcgcccgggttcttctcttggcccttcagcgggcccggcccctccaaggtcgccgtagcaaccgtgcggtccctctctcggttcccccgctcccagtagagcagtcccgaccgcggcggcggtggcgggagcgagcggcctcggcccctcccgagagggggcagcgcgaccgtgggctgcgggcgccgcctctgctgcatcggtggctgcgcgctccgctcggctctgccgggctgggatccggagccctagcgcgcctcgctgacttcccctcctcctctgctgccgccccgtgggcagcttctccaagcgagacacgcgttcgatcctccttccccgcgtttacggatttccggggtcgtagaattttgcctcggtccctacgagcatctctcggcctctctccccctcccctcgcgactcccccaccccgtgggcgcgcgcgcacccatacactcacactcgcaggcgcgcgtgcgcacgcccgcgcgcctccagccgcggagtctccagcgcccctcagcagatccccgctctcccgggcgccgctactcacacaggcttccagccgccacggggcgtcctctgtctgctgcagcggcggcggcagcagagggaacggcgactgcagcccggccgcgtctcccagctccgtgcccgggacagagtccgggagaagcaaaggaggaggaggacgccgaggctaggaggagccgcgccgc

SEQ ID NO: 11267 - DNA, 2300 bp, Homo sapien
tttgagtggcttgggaatagggtgtttttattttttcaaacttaattatgcatctaactcatacatagaggttaaaacaaaacaaaaaagcaaagcaaaacatgctcaggcctaactcctagagattctgattcaatgtatatttgggatagagtctctacattaattattttttttttcagttgcacttgcagttctgatttgcagccaagactgagaaccactggagtaggatagagtgaaaatgggatgaggaagtgttaggacatgacactaggaccagatggtgaaaggaaatggtatgcaaatacaatataacaaactctcttccctgacaacttcattcttttgaaatattttctttttcattttttttttactgccactacttttgcatgaaagaatacgaatcccaccattgtaaaaacagagataaatgtttaaaacctttgtaactaaaagacctctgttttgcttgaggtattaagctggtgcaaaagtaattgtggtctttgtcaatggcaaaaaccgcaattacctttgcaccaatctaatgatatttaacataaacaaactcagggcagagtgcaccttctgattgggtgtaccatctaccgctcggggctctttaacaaatgaccaaagaaaacatgaattttgacataactggtgctagggttattgaagggtgggtttccattctgggttagtgctcccagtctctagtcaagcacaagaacatgcctaccccagagggctcttccaaattcccagctatctgagattatgagacaaaggttctttagcgcctaccaaatgagcaacaatgaagataaaagggacctctccttccatcataaccagttccccaggaagcaccatttctcttactcttggaaggtcggatattttttccctttaccatacactggccttccatgtcctaactgctattttcaaataaatgaacgttatattcttggaggacagatcagggatgctaaactgcacctttatcatgattttagggatgagcgccttttacttaagtcctgctagtggcacatattttaaaaggccatagaggacatccgtgttgtcaacacaagtgaaggcgctcggaagagtgttggtcagcaagaatcagcacaaagacattggaggagagacaacagcttgtttctggaaacaaatgaacaacaaaaaaacactaaaacatctcgagggggcccctgacttgagccctgcatgggaaaagctgccaagagctagcatgacaagggactggccctgggctgcggtgaggaaacccagcgtcctgaccacactgctgggtcagcgaggcgtccctcagagaccggaaacgcggacttcagctcgcttgggaaacggcttccattagcagaagggagactgcggtttagtcccgaggtcgctccagcagcccggcctcacgcgacccaccattcccgccgccccctcacggtgcccgccgttcccgccgcccggctttctaaccgggcccctagttccccgccccgtgccctctggagacctgcagctcctgccgccctgcgcccgctcccagggcccgtcgttccgccgccctatccctcctcaaggggcccctagctgcctcctcgcgaccctttccggactcggcctgcccactcctgcccgctaacccgcctggctcccgggcgagagccctcgcgcggctctggttcctgttcctctaacgccgccggggctgcgggatgccgactccgcggaccgcccagacccggaactgctgaggcagcagcgggctcgcggcgcttggctcatcccgggattccccagctctcgcgctgggcccgccgcgttcgcaccaagcacgccaggcggccctggcctacctccctcccgcctcccggcagctggcacgagggaacctggccgtcaggtttcccctgggatcctgggacggtatcaggcggggaatctgtgcggccgcggcgaggtaggtgaggtgaggcggggcgaggtgggcgaggggggcgaggtgaggcggggcgaggcggggcgaggcgaggcggggcgaggtgggcgaggtgggcgaggtgaggcggggcgggtgtcgtcgcgctgggccgagcttacgactccagctgacccgctcgcggctgcccaatttcgttgaggctcaggacgagggacggggcggcaaattgtcacagaggtcgccgtagaccggtgtgcaaccgaaggtgaagagcgggaaggcgaggaccgaatcgcctctggtgtgcgttgtccga

SEQ ID NO: 11268 - DNA, 2300 bp, Homo sapien
tgtctcatcatcaaatttttgtaaagcaaatttatttatttggggtggctttgaaggctttatcccttgacacccctgatactacagggccaaacatgacacctctgtgttgccactgatgctaatgagtaatcagcccacaacagtcaacaaaagaaaggaggaaaaaaagaggtgaactacctctgaagaaagactagttttccatgtacaaagtaaaaacaacagttagtggttaatatacctgggatcaaagaagaagtgataatagttaattttcctctcagtgctggcagacttctcaaaaatgtttctatttcattctgaattcctcttagttcttgagctgtgattacgtttatttcaatggactgtttaaaaagccctcccctaaaagtcacttgcaaatcttcaaattcaaaattgtaaacatcagtgaagagttgatcaataaaagctttcattaatgtcttcctgtgcctgggtacaattaccttaatgctgctcagatttttttcatcaattttctgtttaatggtatacaaagtggcagccatgctgggacagctaacaatctcaaattcttccaagagagctgataatccattgcttgtttctatttcacaattatcttgttctccatccctttcatagctgatgttactgcaacacattatacagagaaacttggccttggcagcatggtggtattggacagcattcaaagtcttcagtaatgtctgatggcagtttttttgagagttcaatttcaaaccaaaaagatcaatcaaaacagcttctgccatccttgaaagaatacttttatgccaaataaatcacctgcaaataaaaattagtgtaagaatataagattatataaatcttatagttacaacagaaatttgtggtagattaaaaacgaagtaattacactgattttaaaatgtaactaaaatagtaaatctaggcccctcccagaaaagccagtctactctgtcacaacagaaccatgacagtgaaagcaaagccatcttttaattcgttttgtgaaaatgctggtacatctttccagcagcacgacagttcctctgttttgtttacacagaacttttgagtaaggaattacttgtggagtttagacaaagtcctgtttttaaattgcagagtgtcaacctgtgtgatatatcattagtcctgacatgattgtcatattaggtctcatcctttcatatgcgggggcttaagtttacgaagctaaatggagctgcacgcgaaattcgcgttttaagatgataaaagctgagatggctaatagagttcccttcaggatttgcgcagtactccacacttagcaatgaccacaaaagctatagtgatttggatgagacaggcttcctctcaactttcttaattcattctccccgtgcagctttgctcacctccagcccagccctcccaccccaacctgcggggctccggtgaccccctttggtgacgccctttgccccaagaaggttttctcctgccgcttcccctaacctttgctccccatctctcggggctccctctgaggttcatttagccagttttgagtgggtgaccgtccccccttccctgttcattgtgaatttccgcccaacgtgtgtcgccgccaggtccctgttcctcctacccgcctcggctcacggggcgcaggctgtggctctgcacctgcccgggcacctccaccggcggctcacagcccattcgggacttcctgtcggacaacgcacaccagaggcgattcggtcctcgccttcccgctcttcaccttcggttgcacaccggtctacggcgacctctgtgacaatttgccgccccgtccctcgtcctgagcctcaacgaaattgggcagccgcgagcgggtcagctggagtcgtaagctcggcccagcgcgacgacacccgccccgcctcacctcgcccacctcgcccacctcgccccgcctcgcctcgccccgcctcgccccgcctcacctcgcccccctcgcccacctcgccccgcctcacctcacctacctcgccgcggccgcacagattccccgcctgataccgtcccaggatcccaggggaaacctgacggccaggttccctcgtgccagctgccgggaggcgggagggaggtaggccagggccgcctggcgtgcttggtgcgaacgcggcgggcccagcgcgagagctggggaatcccgggatgagccaagcgccgcgagcccgctgctgcctcagcagttccgggtctgggcggtccgcggagtcggc

SEQ ID NO: 11269 - DNA, 2300 bp, Homo sapien
gtgtcttagcatcaatactaatggcatcttctttcagaaccaaaggtgtgcgcatttgggcaataaatcatatgagtatcctgtgcttcaccaatatttgtttgttgggtcttcttggctgagtcagactcaagaaaaaccttacccttgtctcagtagtgggtaccagctggagtgacctcttccagacacaggaggttcttgctgtcttgttgctgagctgcttggctcttacctgctgccacatttctggcccatctcacctggttctctcctcacatcttacaccttgaatatgaaatgtcctgctgcttaaattgagaaacaattctgcttcgccttttggcttcccaaaaaggaaattatttcagctggactgtgaaaagaagacagtaattaatgtaaagaaaaagtagtttgatatagtactgctgattcaaagacataatatgctgtaatgtagtcattcctagtcctattagatttgatgctatttttcatcaaattacctacaatcataatataattatatcaatactgactgaatataacaaaaattaattttaaaatatggagctagatcaagaagtgagatgttgaaacaaaatcttctgccactcaatttcgagtatctctaaacatactctttcattctcttgctatcatataaaaaagttacacgaatcactatgtgaaataaaattgttttcactataaaacaaagcaatgatctatagaaataaaacataaaaagaagatagttttaccttattctttttaataggttaaaatggactatataattttattatactcttaatttgcttagcaaaacgtttcctcccagatactgaaagaaaaactttagctcaggccagatttaataatcctaaactttctgaatgtcatctgaaaaattaaacaatcagtcaaattctctaatctgtgtttctggttcaaaatcctcttccccgtctttctaggtaaacttcagctattcaatccagaaaacgtagtatgttaatgattgaacaaacatcagaagactggcatcctattcaaaatactgtttctgcactctgctcatgggtttgaaacaaataatttctcagtagtaattgcttgctttccagaaagagctacggttcaagaagaagggttggtgggaaacttgtactagttacaaacctgattggctaacatctattttagaatcctttgggacaacattgaggttggttatattggctaaaagatcatatttctgggaacttgccaaccagaaactcaaatgaaagcttgtgccctggaagctctgaaacaaagatatcaaagtaatactgtgtcccttcatagtgcctgctccgtggtcaggaaatgacgctaggtgacactgggaagacccaaggcctggcagggccttggctggtctacaccctaaagaggaagaaaccaccagcatcttttatttgattcagttcagtttaaaatatcatcccatctgtgccaaaaaggggcaatttgatcttacgagcaaacaacaaaaggaattttgcattagaggattaaaaaaaaaaactgtttgttagtttcttacacttcctgcaaatatcttagtttgaaatgctaaatgtttttaggacactttaactttattttagatgtgtattaagtacaaatcttttttatgatattgggcatttatgctcaatctcttttctgttaataatttttcttatttgattatttttaaaaagaaaaagaaaacaaatgtctctttgtccagtgtctggttccagatattttacttttaaatgtttacctaaggaaaaaagaatgagattgctatttgccaagcctggaaggatggaatttgctatttgtttacggaagtcattggtgctactgccttacctgctacccactgccctacgcaaccactttctcattcttcaaaagtttcactgacatgaacctcacttgtgggtgccaggttatgaccacatgcatagtttcatcttcatcttatgcaacatttggggtaaaaggaaggttatgtggtaaccagtttatgacttgaactataggcaaagattgaccagaccaagccctgagacacagtgttgagagccaagacataaagttgtgaagattcagacccagagcccagcagggcacaggctggaggggtgatgtgagtgatcagtaacaccatgaagactctgctcctgggtcaggaatgcttttttgtccctgtttttggattttccaccatgatcaggtatgtttgctcacctcag

SEQ ID NO: 11270 - DNA, 2300 bp, Homo sapien
attcttctccctctgtgtctgaccttgaaaaggagagattgcagaataggaaaaaaaaaaaaaagtttgaaccttcccaagagatgggtaaacagctctccttcagaagaggatgagctgtcaaggatactggctgtgtgacatctcacaaaggtagaaacactattaggccatcactgggattttagtttacaggactctattctccttccctcaaaactttgacaagatgcaacttctttcctgagctaaactgttgtgttggttgtagtatcttgtcttatgcctcattactcactatcagagctcagtgatgaaatgatagaaaacttgagtcagtgatggggactacttgagactgaacgggcaacaaaatgaaaccttcagaagccttctggaaagagggacaggagaggaagcagtggaggaaatttcatgcagggctcctggaggtgccataaacaggataaagatctgggacttgtctgtaatcaaaaagcacaggggataactcaaaagtgctcaaggaggggaaagaaagcagacttggtcttcttgcagtagcactggctggtaatggttgaaatgtgaatgatcacattctagttaggcacatttcttcaactttcattccatattgtgttgtaccttatatatctgaaaaatttaatatgaaaatgaaattgctttttgattttttttattttaaagagcataatcaactgtgttcctgcttcctccagtttctcctaatgaaggaaagcctgtctgcagacctctgtacttgtagctgatacctgtgtatacacagtggggtacattataatttcagagttagtgcactttcataaattatttaacaaataatcagcctccataagattggtcttgaatatccatacctgttaagtgatggcaactctcaaaccctaggaataacaaatacccactcagttcatcaagaaataattaatgtaagtttgggagcagagagatgtgtgggctcaaatcccagttgcagagaaaccaccgtgtcacctgtaacctctgagagcttagttttcccattcatattaactataatttctaagaagctatactgttgtaggaattacatatgatgtatgctaagtgctagcacagtgacatacagagctttggagcctcagttaatgctcattactgtcattacagcataccatgagaccattcctatttttagaaatataggtactagatacatgggggatcttaaatctagttgttttaaagtcccattggtcatctaaatataaagtcatagcattcttgaaagtggttttcagaaataccaagaactacaagatttctacttaaactagaaatagttttggtctcacataaggtgaccaactggggctcccaaggtgaggtccccggaccagaagcattagctttacctggaagtttaggaatgcaaatccgtgtctcccagcccagacctaatgagtcacaaactctggctggagcacgaagtatgtgtttgaataaattctccaggtgattttgatgcacgcagcatgctaacatttaagaaatcctggtctataatgtttcacttatgccaaactaagacattttacagaggggaaaagaaaaaaaaaagcaataagcctgtttcaatttctctaggacacatgcgtcagtacttttatagctgatagtctgtccccatcactaaaatgactcaagttttctatcatttcatcactgagctctgacagtgagtaataaggcataagataaaatgctacaaccaacacaacagattagctcagcaaggaagttccatcttgtcaaagttttgaggaaacgagttttgaggaaaggagaatagagtcctgtaaaccaaaacgcctaatagtgatggcctaatagcgttcctacctttgtgagatggctcacagtcagtatccccaatagggactagagtaggaagtatatgggtagggtcagataatatttctgaaaggaaacacccaggagtatcccaagttaatgacattttagaccctccaacaaccacacaagtcagctccttggaaagactctggttacttttacaaagcaaaccaggagaattttcataatacctgataactatgtaagacttggaatatttgaatttctaggacatgggattgtgcaaccattcattttatcccataatattgaaatctccctcagataagcctctcggcacctaatagagttttcttagtgaagggctacctttctgtgggtaacagggaagggcaaaa

SEQ ID NO: 11271 - DNA, 2300 bp, Homo sapien
acccactggagggcagacactggcaggctgtgggagaagctgaggatagggtgagtgaaactccacacgtgaccttggacaagtgcctaaactttctgtgcctctgtgtgtacatctgcaaagtgaagtggtggactttgtgagccccaaggttcctcatgcattctagaattgcagcactttctgagggattgtaagaggaaagaagcagttacagaaacacaattttgaaatgctaggtctttggtatttgaagccaaggaaatggctaggggtctctgaaaaaaaaatagtattatgaataagatggaaccagacagcaccctaaaagtttgtgacaaaggaagtctcaatcctcacatcagaagcaaacttctcactgtatacctttacattttataaaacatggtcacatggaacaatagcttgcagactgggaagcacttgaacataatagtgtttcatttgatcctcgtacactcttgggagatagaaagcattatttttactctctctattttatgaacaaagaaaatcagtttccaagtagttaaggtcacagagctgagtattgggctctgttcttatggatttctgtaccctccatagagaatggggtcagtggggtcttatccttgagcagccgtgtcagaagtgggagccctgggcatagagccttagggacttatggaacatactgtgtcctcactaggctggagcagggactatggttgtggatgccataattggtctgctttggaaagggcttcctttatctccaccaaagagatatcaccaaagatctgggggcagcttggccagtctatgtgctgactctctgctggagctgtctcctaatcaggtcactgctagagttcctcttcctaaatgtcccagtgccatgactttggtgctctagcttgtgggattgaatcaatctaagagtccagagtctatgaggactccttcttctctattgtatgctgctgtctgaagctaaatgctattgtacaagttttgttgctgtttagatttttttttgttcccagattattgttccaaaaatagacctacgatatattcttatacatttgaatttaattaagaacctttttctcaatgacataaatatggttttactatttccagccaggccagacaaagatgcctgaagacagatttctaaatgatgctatgtgccaatttctctgatctttttaatattgtaactaaggggccttgctctgagatggtggtttacgattttgacatgctgtcctgtaccactctctgatcacaagggaatacgtagaaactcaccaaagcaactgctgtcagtcatcaaagtggagccacattgtcccttctaacctcataaggatccttatgggattcaggatgatcacattttcagtgctctaaggactgtctccgtatgaccccagccataccatgcccattactgatgtatttgacctgttgagcctccaacagcattgcagactccactttttgtgttccaacaggactaaggccagaagcgaatgtcctattttttcctgccatttctctgctgagcaacagttcacccttgaagctgctgctgcctaaagaacaggagaagattcaggaatgctaacaatagttacctacatatcgcatgccctctgcccttgcccattgtaagagcctcaccacttggatcagtaagagtccacacttgctcagtacatcttggtgctcacttcagctgtgggctctgatttaaacatccagctcaggggatgcctctttggtgcatgtcataatcaggagaagaatgctggctttggattctggaactgactccatttgtagtgaagagtttggagagcatcaataatgggatggcaacattcattcattcatttatacctctaaccagtctttcctcacatactggttgagtactcaatacgtgccctgtgcttagctgagtactgttcaatggtgaacaaagaagacatggtcttaactagaagttcctatttcaacagagtagcccaaggaacttcaaccacttttgctacaggtgtattagttactgccaagagtctgtaagtgttcatgggcctcattaagctctgccttccttctgctttttggagcctggcctttggttggccttgaatgaagagtggggccccaaaagtaccactgtcagcactctccaggtgagtattatcctgggagaggccagggcatgaggagggccagggcgtggggccctctgaaggctgtgtcatcccaggcttcagcca

SEQ ID NO: 11272 - DNA, 2300 bp, Homo sapien
ctggtgaagaattggctaagaagatatttttgggactgggaaaacaagcaagagctggtttagtatgattttcattgtaacctgaccttgaggctctaggctgagtaaacaaaagatgagagacaaaatattggatttaagaaatgtaattgtctccatgtttaaaattttaaaaatctgatgctatttgactcacagagggaaaacaaaagtgttgctatgagagagctgtgaattttatctcatctccggggcaacagagtgaataattttatggagagaaggggagaaattaagacaagagtctcacaacgcaaattcagtgttccaaccaaaagtcatttaaagaacaaaacagaacaaaacaaatgttccaaaaccacaagggtaggtatcaaaacccaaataaaaggaaatgaggcagattcccgatacaaaatcttctgtggtggaggctaagatggcgaaacaatggaaattttatgagcatcagctttgtcgaggcacagcaatgcagatcttgtgatgctgacagcaaggaagaaattgcaagtcagaaggaactgtaagtgtgaaccacctcccaaggccaagtgggaaacacaaccagccccacgtggtgtatgaaggaatatgattaggggatttccctgaaaaaggctggccgggaggactgcccctcacctcttgctatcgttctctggcctggagtgttctcacgtcatctccatcaggaaaaagtttcaagtctgtttttcagtggggttgattccctcctggttccggcattctgcaaattagttcgttgtcatggggacaacatttagacaatttgtctgcacagggcctcgttaagtgggcagaagaggactgagagaagtatccacttcggcttgcaagcgcctccggggtgggaaagctgtcactgtgtgcgtgggcggtagccatggtgggttgtcacaaggcttcctgagtccggccttatccattcattcttttttctctccatctactcagaatacagtgtgcattgcttcatatgtgtgcccatgatgtgcgacttcaacagcgatgtctctgacttcctggactctcaggatcctcttgcagtgtccaggctccccacgcttggtcagtacattcccacaacagaccacagtggttgtttctgtttccagcatttcatgtttagaatgtggaagatgtgagcttctccttactgctgatggcatccatcgtgagctctccaattgccttgagccctctgggcagtgccatctgcaggagtgtccacagcgccaagcctagcagttgaatggccagcaccccaagtcatgtagtgggtgtaaacaggtgcatgcttatggcactagtgtacaagccactggggaaaatagcccacagggcacgtgcattttacagcatgtatgccatgtgaagccattctcagggcctcaccatgaacagtatgtgaaataaagcatcatgcagatttggaggcaactgatcacatttaacacagagagcaacatctactcagagggtattctgggatcatttagcacccccaaaatgattctggaggcaaagagtattgcatatctcaatagccaccgaaggccttgttctgtttccagaggtacaaatattggtgatcaaaacaataccaatacgtcaccaagaaaagctagatatgtatgcatatatacatgcatgcacacacatatatatagattctaaggtgatgagtgtatagtaatatttcaggaagatttcctactgacttgataacataaaacaggggaaaacatcaattttgtggaaaatgaagttctgtgaactatgactttctagtacaatgtcataagaattaagagttcttatgcatggatttcacagaaacactgctagagtgggagggatttttcaatcctctgttatggcggtttaaaaataattatcagccttagaaccctttttacaataggatcttgtgcaggaaccccatctatatgtgaaaacccttctctctcttgtggggaaggagctgtaagaatggtggttccaggttcgagtgttgtattcgttagctcaggctgctgtaactaagtgccacagagtggatagcttaaacaatagaaatttatttctcatagttctggaggctagaattccaagatcaaggtgccagcatggtttctggtgagggcccacttcctggctcatagatggcctcctgtctgcatcctcacatgtcaggtagagagagagagacagcaagctctctcgcgtctcttctt

SEQ ID NO: 11273 - DNA, 2300 bp, Homo sapien
atatattaagttagaagagcacgtggcagaacagtttgcatactactattccgtttttttttagaagggaatatacaaatagtcttgtatatactggaagggcaacccaggaaccgtgggaactttttggggagggtggcaaggaaagagagacctttacttttcattttctatcctatttctgtttgactatttactgtgtagatgtagtctactcataattaaaacaaactaatttaaaatgccggaaaagtgaagcatagcaggaaaaaggagtcaacagtaaagaaaaattttccccaaaaggggcttctctcagttaagaacacttctgaactgtactcactgaatgtgaagacccaaagagaaaacagtctctgtctgtgtcttttccttaatgtcgctcagagccagacctctactcacctggtgaggacctgggtcagtctcctggtatttggacatgatctgagaggagtgagtcaggtaaaggaaccttctggaccacagacaacagccaggctcagcagggatcactgaggtaggaatccccccacccaaacccctaaaaaagagccaacagttattaaaaacatgggactagagtggggcagactgggtttatggtcctgttacaacagtggtgatgctaacagttaaaagaccatagaagcttgtttcaaattaattggcctgtagagtaggaaaaaaaaaaaatgactctactaatgatcctaggcaattctgtcttctaggttacagcaagcagcccccagaatggcctttattgaagcctgagtgacaagaagcctgtagcggggtgagggggacccgcttggaaaaaggccccaaaagaggagctcttcctaactctccaatgacatgggaaaattttactcacacaaaattccctggaaacccagccacctcccgctccaagagaaggcctagagatgcagtggccagagacagcctcaggccttcttccccatgctgggggtgctgctgcttgccttcaccccgacccggtatccccacttcccgctgccccagatctcccaggctgaatgtcccctcttcgcctccactcttctgagcttctaagagctaactccaagtgaggaactgaaccccttccacccctacctccccaggcaatctgtagagctcttgagccctaataccagtgtctgggaggcgcgtaaacgcttccatttttatccttccactgcagaaaatgcccagtttagtctgggagacactcagacccctcgggacaagggtggctagagagaggtccaagctgccctgggtgggtggggagtcaaggcaggccaaagcttcagatttagacagtaaccaccaaatccgacctgggctgcaggtccaaggcctcttcctctttcctgcatgctccgctctgccgctggcccatcttccaatgcaacccctacaactaccaaagcaaaaaggcctgtcccaactccatcctcacggcccgatccccaaccctcaggggatgccgcttcgtgtctcctctttattttacaacgcggccctccttgcagccctcacgaaaagttctgcagtggggtcccccagcgtggggcccttctcgagacccttaaagagaaggctcgtttggtggaccatacccgggcagcgcgggcccgggcctggactggttctacttgtgttctgaggtccctgaccaccgccttgggtccagccctcgtccagggggcggcggtgcaggggagaccgcgcggcccggcctgaagcgcggccgccctcatcccttccccggggctggggtgggtcaccggccgacaaacacaggaggggccgcgtccccgtccccgacgcgctcacaaacgccgtggtcgcccgaaccttcggccccgcagcattcggctacaggaccgcgacactgcagggccccggctctgcgcgctgcgctccggccgctcggcgcgggaggacgtgcggtcgcgcctgcctcggtggccgcgcggggtaggtggctgcggggaccggaaggatggcgaggaagtcggaaagggtttcctgagatgagagattacttccgtccgggctgcggcctctctctggagtcggctagccggggctcggggagcggggtgcgcagggctcggggccacgccttgccacctgcagcgcccgggtgggccgcgggggcctcggcgggacgcgctcggccctgtcgcaggagctaacgcagggggaatccttgcaggtgggagcatttcagagcgcacaagccatggtggccaaacagc

SEQ ID NO: 11274 - DNA, 2300 bp, Homo sapien
ctggcaccagcagcttctctttagcaaacacatttcttagtgccctggttatgtgcagggttagactgaatgcacaacacaggcccatccgcatcgccaggtctctgtgacccacttgcggttggatattctctcaatgcttcaaactcagccgaagtctgtgatcttgtccacctcaaaaatcgtatgattctattttaaaaactgagttacgtatgttcgctaaaatggaatctcccctcttaattcattccctgtcattcttctgatatctaaaccgtaaggtcaagttaaaagggtagaagatgatcatagatatatagctgtgattctgagtcaaattcccaaaccctgtcatcacctccctgcaaggttcttgagagagaaaaatgcaaaaaaggtaaggctcagtaggtgggcttgtggccaggtgggggcactgggctcaaatttccaaggggagccctggcaagctgggcagacactcccatttccttgtttcctcatcatccttcaaattcatatgagcacctacaatctttcaagcataggggagagaacagtgaacaaaacagagcccctgtgctcctgaagcttatattctagttggggaaacagaaaataaataaataaagatatatataccagcataggagatggtggttagtgctgtgcagaaatctgctacggcacgtggtgggcagaatgtgtgtgtgtgtgagcgtgcgcacgtgcatgtacatgctttactatagttagtggtgtcagtgagggctttttgaggagtgacatttgaagaaagagctgagtgaatttgagtcatggaaatattgaggggaaaagcatcgggtgaaaggaagagcatgtgcaaaggccctttggtctcacgccggggggtggaggcaggcttcgggccttatcatagaggtctgggcagcgtcatttctctccccctcaacgcttgccaaaccctggccactttttggacacatacccaacaattttttaaattattatttttaattgtggtgaaatgcacataaatttaacatcttagccatgtttaagtgtacaatttggcggcattaaatatatttattattgtgcaaccgtcatcatttccggaatgttcttataatcccaaaccagaactctgtgcccaggaaacaccagctccccgttccttcctcccctgagctgctggcagccactgtttcctttctgtctctataaatgggaccactccaggtacctcacacaagtggaatcacacagtatctgtctttttgtgagtggcttatttcgcttaagcataatgttctccaggttcatccatgtgggggcatgtgtcagaatgtccttctttttcattgacgaatagtgttccatggtgtggatgtgccacgtttagtttacccgttcatcctctacggttggtggacacctgggttgcttctgccccttggctatagtggataatgcctctatgaacatggctgtacaagaatctctccaagtccctctttcagttcttttggggacattcctagaagtagatagacagttttagctcccttttccttgagttgatccactgtgctttgcacgctgccccttgttagtttatgtcactgttagggagagcgtgttgatcggctcacctgtttccctcctctcagctgtaagttcctggggaatagggagtggtgcttggcactgcaccccctgatgccatggaaggcgcacagtctgtgccccagcaggatttattcagtgagcaagtctggaaagggctgctccagaaggagggtgaaggctgggctgcacagagcctgcaccttctttgtatttttacattgggcttctctgactgcccctaaaataaaaatggggataatccattttcctgtgagagaaatgaaaacccacgaagactaaatgtcctgcccgctgtccaggtgcagtgaggggcgtggccgggaccagaatccctgcttccctgttctctagtcagtgctgctgctggaaaccagagtcttcttttgttttccctctcacctctggctgcctctctctcccctcaaaggtcagagcagtgccaaggacagaagagagagtagatccagccttggccctgctaggctgggcagcctggcaggtagagtcagcagggatagagcttgctttcctgttcacgatcttcagccaagttcagggaggtctgaatactgaggccttcatagccactgcaccccaggtagctcaggagaacctccgagcgcaggagtgcaaaggctggc

SEQ ID NO: 11275 - DNA, 2300 bp, Homo sapien
gttttttaaagctctttttatagcttaaatggtgctttaatacccttttttcatgaagttggcattcagttaaaacatgtaaatggaatttagcatacaaatagttttaggtataactttaactttcaaaatatagagactatcatgtagtaaataatattctggttagcattcatagacatagggaccacatgccagcttcccaaataattacgatttctaagcttctacttagtctccttttgttggaaatgggtatctttttttttaaagcatcatatgagttaatatatgtaatttttataaattataaatatgttaacaattattgttattcaaaagccaagccttaaaatttggagaatatgaacctttcagtaaaaagggaatctcatcactttatagttggtcacactttggtttttaacccaaaagagaattgtggtcttcatcatttactgtgcttaccgatctggtctggttcctaataactttggacagtttctgaaaaccaaatctacctacccccactaccagcattgagtcaacttaaaaactgtctaaatggatctgatggcaattttagaaaaggatgctgcttgaggaaagatgcttattttggagagaagactgtgtgtgtttgtgcatgtgcgtgtattacatatatatgttctacggtcagattttatgttggaattatttgtgatgacacaattttatctacagattagagaggtctccccaagtactttgtagattttttggtttttatattatgccattagagggcagtattgtagaggttaagttttctttctcgcatgtattgacttggaaactgtttatgttgtattataatttagcaaacttcagggcttagatttctagtatattaaattgtagccttaattgatgcatccctgcaagtattttaaattaatataggaaattttgaaagggttaagctattttatacccacatctctcgattttggtttggagaagggaattatttggtcagtgtggccaagagggtgaaacagaggtgagcctacagcatctattggctgcttaactatttttaaccaccattatatcctcccttttctggttctggacactgcaaatgggcagagactaacttcaaggatttgtatgctttgaatacatactttataatatttcaatccctctgatgtaagaaggctcataggattgagggattgagtcttagaggaattgtcactcagcttgcaaaaacgtgccttagggacttaactaaaaatagatttatgtggaattcaacctgtggattgacttttttgggtctaaatagaagaaggcatatttagttactagggagaagatgctaatagggagatgtgattttaaggtttgtggctctacgggctttttgggaagatcctggattttatctggagtctttccctcatgcctagcaaagaatatataatgttttttgttttgtttctataaaacaaaaggtagtatctctcaaagagcaaatgtgattttttttcctctaaaattaaaaaaatacatgattgcagggtgattattatctttaaaaataaaaccgtctataaaatcctcccagtaccgctgccggtaagaactagataattgaaatcaagacactcgaagtcttacagtggtgggactgggcatgcccagtagctcagacggttcgggttacaaataggaagctttcgccgttaagcagccgcgggacacagctccggggaccggggtctgactcccttaaacgtaagcacgtgtgggggcccccatagtatttttcagggacccttcacattttctgccgaagcaatggcccagtgttttgaggccgccgtggaaacctccgaacccagcaccccactccctctgagcacggcccgcgccaggccagcccaccccacgagcgggatctggagaatgggggcggaggtgggggtggggggaggcggggaagcagggaagcgggaggacctggaagggagtagggggcggtcccagtggcgtgccggccaatcggcgcagctctttcctgcatatattttgcactaagactgggagtcctggtctagagctgagtggagcccggctgcggatctgggaagcgcctcttcacggcactgggatccgcatctgcctgggatcatcaagccctagaagctgggtttctttaaattagggctgccgttttctgtttctccctgggctgcggaaagccagaagattttatctagcttatacaaggctgctggtgttccctc

SEQ ID NO: 11276 - DNA, 2300 bp, Homo sapien
ggaggagcaccctgctgaataactgaaggtggaacctgggtagagggctgctgcactgcagtaggtatgtttgcttgctgaccaatatttgcaatctgactgccagtaggtacagcagacactgctgccggagcctggccaacaggctggacagatgcccctgcaggttgtgctgggactgctgtgggctgcactggcagctggataccctgtggctgagccacaggaatcactgttgttcctgctcctactcctgcagaactgggctgtccggaggacattgctgtttgaagaattggctgctgttgtacatactctgaagcaggattttgagtcactgatttgacatggcctggggccatctgtgtagaaaccattggttgctgttgtccatactgtaactgttggggtggtggtgcccctggaaggggagtttgcactggaggagccgcctgagaatatggtagctggggttgagccaaactggaaatggaaggctgctgacctaaagctgaagttacaccaaccacatttacaggcgatggctggataccagttgcagcactcatagtggcttgcagaggtactggctgaagaccttgcttttgctgatagctcagttcttgagactgtaattgtacttgtgagatctgtgactgagaaatactctgtggtatactaactgctggaatactctgtggaccagtgctaccaaaatccatctgttggagggtcacaccttggagagctggttgttgctgttgttgttgttgttgctgctgctgctgctgcaccaccacagtaggggctcccatctctccacttcccacactctctgtatagtgactcagtgtgctgacactactgctcactgaactcccactagtgctctccctttcagaagtcacttctatcggattttgctttacagtctccaccactttatttatcagcacaccttctgtagcaggtacagcattttctttttcatagaactcagtgcaagtccatctaccttttttaaagggctcagaactagaatctaacttcacaactctgaacctcgaagtgttaactgttggttgttgctgctgacttgaaaccgatcccccagtcatccctgcagctgcattaggaacactgctaacagcagcagaggaagaaatagtaccattgcccatgccactcaagatattcacattaacaccactggtaactccaggcccaacactcacaccagcagcactaggaatattgcttgtacttatattaacattaccaagcatgctgcttgtcacattaggattaaaactacccacagcagtaatgttaacattatttactgtactagtgccagtaacagaatttatacctattccacctgtagtacttggagcacgcatattagtcattacagatgcaggtgaaccactggatgatacagcagaagttggtgcaactggtgtgatactgtcagagcttccagttgtagagagttttctagatactgggcttgagggtggcccaccagtaatggatgcactggccacagcaacatgagatggatggtggtgaccatgttggaggtggtgcccatgatgaatctgatggtggtgatggaggtggtgtggatgagcattcccattgatcacaacattctgttgtggaaggtgaggcaaatgaggctgaggaaggtggggctggttgggagagactgccccaggtgtctcggcttcctggaagttatttagggtctcttctgaggagctgcgttcgggctcccctaagtcagtagccctggaaagtgacacatcaaggatctccgaagaagagagatcttccgtgtgagattcatccagatcatcatagctctcagtgtcctctgctatactgttgttagagctgatactagcggagatctgagcaggagtaacgctagttatctggaagccacttttctttttcatttgagttccgcctggcgcaagaggctgtgcctgcagctgagcctgcgaaaggaggttcaggctttgtggaggcggaggctgtggtcccgacgtagaagatgctgcagggggcggcggctgaagcagcgacggaggcggaaaatcctcggaagatgtggcattactaccgacgccggtacctgctgcattgagagcagaggcgctgccactaccgctgccccttcgagggaacattgccgggtgcgccatcttcctagcgctaatgtctgcagcggcggcggccgcggcggtggactcaggcggctggtgcattgtgttgggtaccgggggcgc

SEQ ID NO: 11277 - DNA, 2300 bp, Homo sapien
actcactcccccgccccgtttgccgacaccgaccaaccccacctcgttcctttgaacggcgtcggctgcagtcgctgcaccagcccgtctggccaccaacgccgcggagaaaggagccgccgccgcctgcggccctctcccgcccggtcgcgggagcagcggggtgaggaagagccggctgcggaggaagaggataagagagggtcgcaccctccgccctagcgcacgtcccgccgccctccggagaggctcgggtgccggccccttcctccccgaggacgtgtgccgagtcgaggcgcctgccctgagggaggaaaatgctcgggctccatggctgccagtgatggagcggtccctgggctcccgctgccaccgccgccgccgcgccccggccgtgctccgcgaggacccggcgtctctgcgcgcccgcccgcgcctcgttgctgggctcaccgtaccgggcgcctcgccgccgccccgctcgcagccgcgtcgccccggccccagccgcggccagcgtttcctcaccgagcagccgccgcgagcccagggggtttgaaagggtctgcggggcgcggggggagggccgagcggggccgggaggggaggtttgagcgacactgagctcggggctcgctggcggcggcggcggccccgggggtggcgaggggaaggcgacatttgcttggcgctgcctccgtgcagagcggccgggagggctttgcagcggccgccgacgcggcgggaggagggggctgaggcggcttcggagttggccggagaaggtgggcatttctcgcttttcctccccttcctgcgctctccccctccctcctgccccgcaccccacgtgaagcagaatataaaggggggtgtgaggctagaggggaaagtgaatggcgaaggactgaagggatccccccttcgggtccccggccgccctgttcaccctcgttcatcctcctttccgaagctcgctctcgaaggcaggagcgaccggcgcctttggctgaggaggaggagaaggaggaatcgcgccaggcggagcgtcaggtcccgttttcctctccggcgtctccaatacaaagattacggtgcagaaggaaattgcactcgtctcctccgcgcccccggtacccaacacaatgcaccagccgcctgagtccaccgccgcggccgccgccgctgcagacattagcgctaggaagatggcgcacccggcaatgttccctcgaaggggcagcggtagtggcagcgcctctgctctcaatgcagcaggtaccggcgtcggtagtaatgccacatcttccgaggattttccgcctccgtcgctgcttcagccgccgccccctgcagcatcttctacgtcgggaccacagcctccgcctccacaaagcctgaacctcctttcgcaggctcagctgcaggcacagcctcttgcgccaggcggaactcaaatgaaaaagaaaagtggcttccagataactagcgttactcctgctcagatctccgctagtatcagctctaacaacagtatagcagaggacactgagagctatgatgatctggatgaatctcacacggaagatctctcttcttcggagatccttgatgtgtcactttccagggctactgacttaggggagcccgaacgcagctcctcagaagagaccctaaataacttccaggaagccgagacacctggggcagtctctcccaaccagccccaccttcctcagcctcatttgcctcaccttccacaacagaatgttgtgatcaatgggaatgctcatccacaccacctccatcaccaccatcagattcatcatgggcaccacctccaacatggtcaccaccatccatctcatgttgctgtggccagtgcatccattactggtgggccaccctcaagcccagtatctagaaaactctctacaactggaagctctgacagtatcacaccagttgcaccaacttctgctgtatcatccagtggttcacctgcatctgtaatgactaatatgcgtgctccaagtactacaggtggaataggtataaattctgttactggcactagtacagtaaataatgttaacattactgctgtgggtagttttaatcctaatgtgacaagcagcatgcttggtaatgttaatataagtacaagcaatattcctagtgctgctggtgtgagtgttgggcctggagttaccagtggtgttaatgtgaatatcttgagtggcatgggcaatggtactatttcttcctctgctgctgttagcagtgttcctaatgcagct

SEQ ID NO: 11278 - DNA, 2300 bp, Homo sapien
aattcctccctacagtttttcggcttgctttatcatttttaaattcctgggaaagacttacattctcgattattggtaagaaacgcttagaactaggttttgacatgaaataccaagaaagtaaccgccagtaaattgcccccaatcaaacctaacattgcttctgtagaactacatttggacccatgaaatgtaacgtgtgtgtgtgtgtgtattttaaaactggaatttcggatggctttttcttttctagccctaaaaggcattcttatcatttgtgttgctcacatgtccggaccaccttgcctcctgagtcaaaccaatgggggatatagccaggacgatgaacgaaaaaggcgtcgctgcttggagacacctgttgaggtcagtcgattacagggccggcctgcttctgtcctccagttaaggatggattgcaaccactcctcgttagagaagagcctagcccagaggagctcaggcagttaactggaaacagctgcaacatctgcccggccgcctcgcccctgcccgtggaagggcgaggggaccgcatggcagcaactgcactgcacaaaagacaacacctatcaccgggagccaccggccttccatagaccccacagctcccggccctagggcatcccccgaggaggcaagggccgggggcgagcccaggtgcggcgagggggaggaggtttccgccacgcgccagggaagaaagcctgactcatgtcgtggcagcggcagcagccgcggcggcgggctcctgggaactgaaactcgtgatgctgttgctgcggagaaaagcctcattacccattccgcaggcgggggacaccacccaaggcgcgcacaccaagcgccggcgctcccgccgcctccgccggcccttccgcgccgcgccccctcctctgccgcgtgcccgcgcgcgccggccgcgagtgtgaaaagagcggacacacctaacctgggcgcgcggcaggcgcgcaccctgcccgcccccaccgggccgaatcacgcagtccgacccggattcgctccttcggccggaattccccacccccactatcccctccggctccaccactcccggcttcggcgcctctgccagccttcggtaatttccgtcgggagacctggcgctcgcctaggcccgaagacccgccgcctcctgccccgccagacccggctttatgtctgcggcgccgaggcgcatgcgcagacgccatcttccctcctcctcctccgcctgccccctccccccagccaccaccgcctcctctcgccggcggtcgcccctcctcctcctgcgctccgcgctggtccctcccctcccgatgccgcgagagactgggggatacggtggagccgggggagccgaagaagagcactagtaacaaccaccacagccccctccccgcccgacaccctccctcggcacccactcactcccccgccccgtttgccgacaccgaccaaccccacctcgttcctttgaacggcgtcggctgcagtcgctgcaccagcccgtctggccaccaacgccgcggagaaaggagccgccgccgcctgcggccctctcccgcccggtcgcgggagcagcggggtgaggaagagccggctgcggaggaagaggataagagagggtcgcaccctccgccctagcgcacgtcccgccgccctccggagaggctcgggtgccggccccttcctccccgaggacgtgtgccgagtcgaggcgcctgccctgagggaggaaaatgctcgggctccatggctgccagtgatggagcggtccctgggctcccgctgccaccgccgccgccgcgccccggccgtgctccgcgaggacccggcgtctctgcgcgcccgcccgcgcctcgttgctgggctcaccgtaccgggcgcctcgccgccgccccgctcgcagccgcgtcgccccggccccagccgcggccagcgtttcctcaccgagcagccgccgcgagcccagggggtttgaaagggtctgcggggcgcggggggagggccgagcggggccgggaggggaggtttgagcgacactgagctcggggctcgctggcggcggcggcggccccgggggtggcgaggggaaggcgacatttgcttggcgctgcctccgtgcagagcggccgggagggctttgcagcggccgccgacgcggcgggaggagggggctgaggcggcttcggagttggccggagaaggtgggcatttctcgcttttcctccccttcctgcgctctccccctccctcctgccccgcaccccacgtga

SEQ ID NO: 11279 - DNA, 2300 bp, Homo sapien
atgcagccataacacagatagaaaataaaatagatgtgactcatattaccaaccattttatctttgacatgctgatctacaaatattggaagtttatttattatcactgcaagcaatacattgtttttgcacagtgtgcccgtgtcttttctaactttcctcagtgacacttatttctggaagtgttggaaatttaatttgaaattgtgttatagtaacttctcttgaatctctctgttgacatcagctcattttctctatttgatgtttcaggaaatagctcatctctggtctggccttaaagctttccttaacgaacagcttcaatctttaacatgtttctgggtctactggaggcattttcattccttttgttttggcatctatattcatgttattgtttggtggtgaaatgactcctaagtaagtagaatcaaaggatgaacttgaagactgctgattaaaaacatgggcatgtattaataacagaaggtaaacttctaggaggttatcctaagagtaatcagagatgaagttaaagattttcattcaaagatgtccatcaaagccttacttatgacttaataaataaaggattacaatacatccaaatgacagaactgtatgtagctgctagacaacatattaaagaaaatatcaattggtatggaaaatatttataatatgttgctaagtaaaataaatagatcagtgaccaaaagactttatgtataaacatgtaatttttgtaaaaaaaaatctatttaaatataaaagagacatacattagaatgcctgaagtagtcctggcaagatcttaaagtgaccttgaatctgttgtgtttttgttttccaagctttccccatgaagcataaatggattttgtaattaggagaaaagtgctattttaaaagcaaaagccaacaagaaaatacaccctgacttatttttcttgtcactgaggagacttggctttgctggaattaagattattggaggaaaaaagagtagaaatcctttcagtcaatgctatctgggtttggttctgggtttggaaggcttagcattttttggccatttctgttatttgttctggccgtgtgagtagacgtgtttcttatcatcctctagattcttcagattactgccattttaaagtagtttataacagcatggctactcaaatcattcaaaggtatcagatttaatagatttgctatttgacttaaatcaaaggctctgtaattggtgagcaaggtcacttgccagttcctgggcaattagaagatcaggcttcctatatgttttttcccctgtctgcttagacaagaggctttttgttaccatataagtctttcatgctacacttgcagcagtagtgacaaggaatactgaaatttagtaaaatgctcacaccaggccacagaggggagggtgtggaaatggtgtctgtaacagcagttggcatggtgccagggaaagacagcttgagatgacaactagcacttgcagaactgcttttgtgatgcccatgtcccagactagctggagaatgtgccagggtgtggcagggagaaggaggcctggatgcttccccgcatcgtttactgtggtcctgcatttgaaagagataactacgatggggaagatggcagttgaattatagggtaagacatctgagcccttaaaacaaaatttcccttgaaatacggggctatgtttgtccacactgtgctaagcttccctacagacatatatggagtgtctttaaatcagtggagaacaggttgggtgtggtggctcacacctataatgccagcactttgggaggccaaggcgggcggatcacctgaggtcaggagttcgagaccagcctggccaccgtggtgagacccccatctctactaaaaatacaaaaactagccgggtgtgctggtgtgcgtctgtagtcccagctactcaggaggctgaggtgggaggatggcttgagcccgggaggcggaggttgcagtgagccgaggtcacgccactgcactctagcctgggtgacagagctagaacttgtatcaaaacaaaacaaaacaaaacaaaacaacaacaaacagttgagaacagactccaccttgtaggacagtggcatttctgaaagttcagaacaattccccgagcaactttacctcacaatctcattggaacggctgcatctgtggggccctgggagagactcagcagcagacagggtctccagagcacacgacaagaggaagaatgcatgaaggtccaccggcagtcgaatcag

SEQ ID NO: 11280 - DNA, 2300 bp, Homo sapien
gatcctcccacctcagcctccacagtagctaggactacaggtgcatgccatcatgccaagctaatttttaaatttttttgtagagatggggtcatgtgaggttacccaggctggtcatgaactcctggccttgagtagttctcctgtctcagcctcccaaagtgctaggattataggcatgagccaccacgcctggtccatatgcaaatttttgagccaggttgtgacaggattggagaatttttttttttttttggtgtcagtatgtaaggtttgttggaagagggggcttatgaactggaagacaatataggagtaatctggtggaagatcagaatttctgacttggggcatggtaataagaatggaaaagtacagtgggatttgagaggagatatatttcacaaggttctgttttcctggtgcgaaattgatgctgaaggagcagtgttggggattttactggttacatttctaatatttgaaataaccgaaggaatttcatcaggttaggttgtccatttctgcactttgacgcctaaagtttctgtggacatataatcacaccagtctttctttgtttgaaaaatagtcatttggtagactaatcttaatctttgttattttgtttgaactagtattcttcctagaagggtagtttactagtgtttttactgaaatatttgtaacatgctgtagtagataaaatttaattataatttaaataattacattgttgcaaacatttatggatctttttttttttagttaaaaattcttattatccacgaaagtatgatgcaaaattcacagacttcagcttacctcccagtagaaaacagaaaaaaaaggtatttgaaagatgttcttgaatttgaccccttggtccctatgttactgtttcatatcttgcatttctgtcataactgtcttcagtgttttgcttccattattgacacagtggagccttgctataaaaaggaattttatggttaaacatgaatatagcaaattgggattcaaaaataatacataactaaatttttgtttcttttctgtggttttagaaatagatatatatttgatacttttattttaccttatttttttttagatggagtttcactctgtcgcccaggctggagtgcagtggtacgatcttggctcactgcaacctccgcctcctgggttcaagcaattctcctgcctcagcctcccagagtagctgggactgcaggtgcgcaccaccacacctggctaatttttgtagttttagtagagttggggttttactgtgttggccaggctggtctcgaactcctgacctcaagtgacccgcccacctccgcctcccaaagtgctgggattaaggcgtgagccaccatgcctggccatatagttgatacttgaacaacgcaacagttagaggtgcagtcagaagtttgtgtgtaacttttgactcctctaaaacttaactactaatggtctactattgactggaagtcttaccaataacataaatagtcggttagtatagaaatgaaatggtgtccacatatattttataccttcttgacatacttttttttttgatatttctaaggctatgtggtttatctgtgagtttttccaaattgtcacaaatctccaaaaaaattttccaatatatttactgaaaaaaatccttttataagtggacccttgcagttcaaacctgtgttgttcaagggtcagctgtagttatttttttctaaaagatgagctgctgtttttattctatttattttcagatcatttcaacatattctgtactgagtcttaattagataaccaatttgcaatctgctcataatttatattagcactatttggattaaaaaagtttaaaattatgcctgggtttcactaatatatttgttaaaaacaaaatgaaagaaagaaatagaataatctcttcattggaaatatactcacaagcttctcccacacgaaagggttattggaaacatcaaagtgtgtattactagaatgatagttatgtttttattattgattacagatttttcaccaaaagcctaattcctctctgtttttgtttgcagaaaagaaaggaaccagtttttcactttttttgtgatacctgtgatcgtggttttaaaaatcaagaaaagtatgacaaacacatgtctgaacatacaaaagtaggttttcttagttgtcctgaaactgatgtagcaattgtgcttcttctatctgtatatttggtagaaatgccaagcttgttttcctttaaagtttat

SEQ ID NO: 11281 - DNA, 2300 bp, Homo sapien
ttttttaatcaaggtatgtaagttgttttttaagacataatggtattgcacacttactagactatggtataatgtaaaaataacttttttgccccataggatctgcaggaaaacatacttttacatgcaacggaaaaccaaaaaaaaaataattgtgtgacttgctttactgcagtggtctgtaactgaacccacaagagctccaaggtatccccagatctagaatccaactacttctcaccatcccttgggcttcaccctggtccaagtctccaatatctcttgtttagaaaagtaactacaatagcttcctaaccggtttccctttcagtcagttctcaccaacagacacattaatcctcttaaaacgtaaatcaggtcatgtcaatccgctgtactacccacctcacaacagtaaaagtcaaagtcccacgatctacaaagacataccaggtcttaccctcctcccccatcttctacaattatactccagactcagtcctctgtagccacactggttcccattctgatgtatagcttctaagcctcaagacctttgcacttgcagttccttctgcccgtacccctattctcccagttgtatgcatggctgtgatctctcacctccctaaagtcttcgctcatatgtcaccttccttatgactaacaatgacatttaaaactgcactacctggcccggcgtggtggctcatgcctgtaatcccaacactttgggaggctgaggcgggcggatgcctgagctcaggagttagagacaggcctgtccaacacggggcaaccccctttctactaaaaatataaaaaattagccgggtgtggtggcgtgggcctgtagtcccagctactcaggagtttgaggcatgagaattgcttgaactcgggaggcagaggttgcagtgagcctctctgcagagactgcataggctggagtgaagtagatcgcgctactcttcactccagcctgggcgacagagcgacactctgtctccaaaaaaaaagaaaaaaagaaaatcctgcactacttaccattcttctttgttttatctctctccatgccactcaaccttctaatgcacaatattttattttgcttattgtctgtcttcctacacaagagagataatattaagctccataatattttttgtatgttctgctcactgctatatacccagattctggtacatagtcggaattcaataaataactgctaaatggaattaacagtcaacaggaaaacattctagtcagacatattttgagaacaaaggatttacaatattatataaacttagttgataaagcagcctcgacttcctgggttcaaggaatcctcctgcctcagcctcccatgcatctgcgaccacaggcatgccaccatgcctggctaattttattttttttgtagagacgggggtctcactttgctttgagatgctaatgaccagactccaagagtgcagaggcaaggcagagtagagagaggaagcagagaaaggggagaggaaagaacgggggaaaaaggtaaaggggtcgactcacgtggaaaaatagcctacctgcagggttgaaggacttctgatgccgaggaaacctatcagaagactgtctccaataccacgatgtggaagcatggaaattccaaggctggccgctgggttgaggctgagaatcaaggggagactgggcgtcgaaggggggttgcgccccgggaagaatctgggcgtcgaaggggggcggagccccggggagagactgggcctccatggggggctgcgactcagaggaaggctttgacccggctgcgggaagcgaggacgtaagtggtggtggcggtggcggcagcattgcccagaacatccagctgtcccgcggcggggcagtgtcgctcaggggccctaacgtgggagtcagctcgggagacgcatgccacccgataggagtctcgaaatcactagtcggctcagccataccactggcgggtccggagtctagcacgcgactgtggagcaagcattaggcgtcacttcctttaccgtgaactacaaggctcagccaaccacaggctttacgtcatttctcggcgccgggaaacctgccattcttcgctgctgatcgcgggattctttttggatagggttgacgttcgtggatagactcatatctgtgaccagtgtccgccaccgcggatggcaagagacctgatcggaccggccctgccgcccggcttcaaggcccgcggaacagcggaggacgaagagcgggacccgagccctggt

SEQ ID NO: 11282 - DNA, 2300 bp, Homo sapien
ttatagcaggggagattatgtgtttaaaatgacacactacgtgtaagatattgtgcttgacgaagagaagtcattcaacaaatatatacgaagaatctttttcttttttttttttgagacagagtctcactctgtcgccaggctggagtgcagtggcgcgatctcggctcaccgcaacctccgcctcccaggttcaagcaattctcctgcctcagcctcccaagtagctgggactacaggtacgtgccaccatgcctggctaatttttgtatttttagtagagacagggtttcaccatgttggccagaatggtctcgatctctcgacctcgtgatccgcccgcctcggcctcccaaagcgctgggttcacaggcgtgagccaccgcacctggccttattttatttttttaaagctatctcctacaggaaggaaagcataatttttcacatttacttttatttatttatttattgagacaaactctcgttccgtcgcccaggctggagcgcagtggcactctcggctcactgcaacctccgcctcctgggttcaagcgattctcctgcctcagcctccagagcagctgggattacaggcgcccgccaccacgcccggctaatttttgtatttttagtagagatggggtttcaacatgttggccaggctggtcttgaactcctgagttcaagtgatccgccccgtctcagcctctcaaagtgctgagattacaggcttgtgccacctcgctcagctggaaggcataatttttaaagtggttatgacagaaattatattggaaaggggcctgtagtagaaacatagcctccgggtagaccaggaagaaaaattagattcagaaatggcagggttactctttcagctttactcttctccaactgggtgtcggtgctagtctacaaatgtgaataaacattaaagcagataggtatgcatgccggaatccgagaagcattcgtttcgtatataccaagtgcctgttgcgtgttcaggtagaagaccatagtgcaatggtggagacagattatgtcgacaaattattcaaatacagtgtactaaatatgcaatgtaattaggaaaaaacccgagggcaaaaagaaaggcatgacaatgcttcggggaatctggaaaggttttattggtgtgacatttaagttgggccttgaaggatggggagaagtttgtcagttatgtttaggaatgcaaccagaggaagcccagaagcctagagcgttaaggaattgcgcagcaactcagactggattgagtattgggctgtgtttgtcagatgcaataacagaatgagaggctaggaaggcaggtcgggggctggagagaacaggatctgcaaggttcttgtaatcagaaggcaatatggcacagaggttaagagaaccgcttccttctaagtcgcgctccatcacttgctagcagtatgatctagacactggcatgggcttgggcgtacccatttgcaacatgggaaaatagtttttttcttatacggcttaaatgactgagtgggtatcagtcagttagggcagcgtgcagctcatattaaggctaaatgagaatgtattatcatcacgaagccaaaccacgccaaagctcgtttctaggagggtcccccagcctcctcccccctgctactgtttgggaagagaaaagttctctcgggtcaggccgcgcccactccccactcctccgccctcctaggcctccgactttcttcagcgagcagggcccggccagggagtgggtagatgggcctggtgggcagcggagacgccgccgcttaccagggctcgggtcccgctcttcgtcctccgctgttccgcgggccttgaagccgggcggcagggccggtccgatcaggtctcttgccatccgcggtggcggacactggtcacagatatgagtctatccacgaacgtcaaccctatccaaaaagaatcccgcgatcagcagcgaagaatggcaggtttcccggcgccgagaaatgacgtaaagcctgtggttggctgagccttgtagttcacggtaaaggaagtgacgcctaatgcttgctccacagtcgcgtgctagactccggacccgccagtggtatggctgagccgactagtgatttcgagactcctatcgggtggcatgcgtctcccgagctgactcccacgttagggcccctgagcgacactgccccgccgcgggacagctggatgttctgggcaatgctgccgccaccgccaccaccacttacgtcctcgcttcccgcagccgggtc

SEQ ID NO: 11283 - DNA, 2300 bp, Homo sapien
aattcttttaatgtttgtttctctagaagtatttacttaataactgttgttggatggatggttgctgactattgagtattggctagtatagtggttaaggatataggctttgaaatcagactcctgggttcatgtcacagccccactacttagttgtatgaagttaggcaagtcacttaacaattcttggcctcagtttctccatatgtaaaatagaaataatatctcccttataggattgttatcagaattaaatagaataatgtgtatgtctcttaaaacaattcataacacctaagaactcaaaccatgttatttgttatttatttattacacttaagtttttgtagtaacaaatattactattactataatattgaatgaatggcatacccagaatactctttggaaaatcatgtttccaggccctcctccaggccaactgggttagaatatctgagaaaagggcccatgaatcttttaaaaatacatagattttagggagtctgataaatatccaaccttgggaactatgatagtaggcttttagcatcactatttaggatcaacctggacagttgtgtctgtgtgacatcatcagtgacatcatgacactgcagtgacaccatatagtaatttgtaattttgctgagatgtaaagtgagagcaagtcattctgataagtggacctagaagacccttaccactctccctaacatccccattacagtgcagcctcattctcttccctgtatctctgttggcaagcagtaaaacttagagtgactctaattttatttctgcttggaaaatcatctcaaaaagaaaactaaccaagaaatatggggatgccaggaaagattttttttttttaagtagtggttctaccgtaaactgtaagaaaaaaaaaaatcatgaagccattggggtttttttttgtttgtttgtttgtttttttgttttttttggcaggtgcaccaaccaatgcaaaaactgcacattatcaaggaaattacatgctattgctatatctataagttcgggtttataagttcagatattaacaaagcttttgtgaatctcatgaaagagattgtgtaagacatgatttctgccttcctagagctggaaagacaaaaccactgtacacaaacaacagcaattgagattaaagtgaataataaatgatagacagccagtgctgtttatttcagaaaagaaagtgaaaaatatcagctagaagggttcattgaaacagtagtggctagtgatgacaaacaacaagtgttctttagttgcaggaccagctctgccccctaattataaaagcagtagttcagattcatcagacagcgatgaagacagtagttctttgtacgaagaaggaaatcaagaatctgaagaagatgacagtggtccaactgcaaggtcagtcatttaattaaattaaatgatagaccaaacttcagagctagtataagttggctggaacagatagctagtaaggggatatcatatttccatttatacagcacagggagaaatcattttgtgtggcatttcatcctgaattataccttttacaaagaaatttattctagtagtttgcagctatagagatatctagaatttcaatatatatgtatattttttcctgagacaggggctcactctggcgcacatgctggagtgatgtggcacgatcttggctcactgcagcctctgcctcccaagctcaagcgatcctcccacctcagtcttctgagaagctggaaccacaggtgcccgcaaatttttgtattttttgtagattttttggtattttttgtagagatggggtttcatcatgttgcccaggctggtctcaaactcctggactcaagtgatctgcccgcctcagcctcagaaagtgctgggattacaagcatgagccaccacaccagccaataaaattcttacataaatgatttttcttaagatgtcattgaagtgccaaaataggctacataaaccatagaatttcttattaaaattatatatgcagtgtatgttttctttaaataaactaatggttttcttttttttttttttttttttttttttttttgagatgaagtctcactctgtagcccagactggaatccggtggcacgatctcagctcactgtagcctctgcctcctaagttcaagtggttctcctgtctcagtctcccaagtagctggaactacaggtgtgtgccaccatacctggctaatttttggattttttagtagagacagggtttcaccatgttggcca

SEQ ID NO: 11284 - DNA, 2300 bp, Homo sapien
gcaaatatcagcaagtttgggctttataattacagctgaacctcctctgccactttttctagcatgccctatgggtttgtttttagagatactagaaagacacaacagtagatgcctgacatgctgtcagaatcatgctgtttgtaaaatactgtgaaatctcccatgatttgtggagcaattttgaaagtcaagtcagggaatcttagactccttatggagggaatttgtagcaagctggcagcagcagtgggcgtttaatgtatgtgttcattctcttactccaattttaagtgggtttcccatcttgagggagttgttttctcccattttctctggcacctgtcttcttatgcaaaattgcgtgatgctgtaagtactctcatgagatcgggaggtggggcagggagtgaaagcctagggaaaaataattatatcaaggaatcagattaaagagctgtgaaactttagagctagaagaggactgaaaaactatttgtcttgttcgctgttctatccccagagcaatgaatattcaatcagtaattatcgaatgtgtacatgagtgaagcatcactctttcccattttacagatgggaaatctgcagtcacaacgatgaatgatgcacctatagtttcacaggaaattgggggagccagaattctaaactaggcttctcagactttcacatgcacagcaatcacctggggatatttttaaaatgcagattctggccgggcgcagcggctcacgcctgtaatcccagcactttgggaggccacggcgggtggatcacgaggtcaggagatcaaaaccatcctggctaacacagtgaaaccccgtctctactaaaaatacaaaaaattagccaggtgtggtggcgggcacctgtagtcccagctactcgggaggctgagccaggagaatggcgtgaacctgggaggcggagcttgcggtgagccgagattgtgccaccgcactccagcctgggctacagatcgagactccatctcaaaaaaaaaaaaaaaaaatgcagcttctgcttcagtaggtcagagatgggcctctaaattctacatttctaataaagcgctgagataacttaatattgttagtcctgggactacactttttggtttttttttgttttgagacagggtcttgctctattgtccaggctggggtgcagtggtgccttcatggctcactacagccttgacttcctgggctcaaggatcctcccacctcagctgctcaagaagctgggaccacaggcatgtgctactatgcccggctaattttttatttttttgtagagacaggctctagccatgttgccaaggctagtgttgaacccctggcctcaagtgatcctcccacatcagcctcccaaagttctcagattacagatgtgagccaccatgctcggccacaggcaccacactttgaatagcaaggttctaatcacacatttcaaacttcttcttcttattattattattatttttttgagatggagtctcactttgtcgctcaggctggagtgcagtggcgctatctcagctcactgcaacctccatctcccaggttcaagtgattcttctgcctcagcctcccaagcagctgggactacagacatgtgccaccatgcccagctaacttttatattttatgaaatataaaaatatagagatggagtttcaccacactggccatgctagtcttgaactcctgacctcaaatgatccacctacctcggcctcccaaagcgctggaattacaggcatgagccaccacccctagctcaaacttctcataagtattcctatgtttaaaaaaaatatacaactggctttaccagttgtgcattttgttttactcattaaacttgagattttaaaactgggttatgttacaatcagcccttattgcatcacaaatgagtatgtggagattgtaaactaagtgaactgacttatccagttgccaaggtgatgcaggatttttctcaacccctttgtcagacttgtgacgggggtaccccatttactcagcctgccacgctcaaccccttgcagcagggagcacatgagtgagcaagtgcgggatctggatggctgctttgggtgcttccaggagcaggctgcgtgcaggcctggcagcagtgcccaggttggggtgcctgcaacccctgaagctccagagggcatgttacagtgttcttttagctctgccgtctgtggacagtggtgtgttatcagctcagtgagccccttgcctcatcgtgtggggtggctg

SEQ ID NO: 11285 - DNA, 2300 bp, Homo sapien
aaggggtttgaaaaggacagacaggagaagcttgctctttgttcaacagcgtacgaggaagaggtgctcaatacgttgtttttttctttcttctatgtatcattttaaaatctccacttttccgttcttcgctagccctttcatcagccattttttttctctctcaatctctgtgtacacacacatacacacatacccacaccacgtacacattttaaggcctcccatgacccagagaccaaagccagggttccaatctttaaagtccattcctggggtgctctagactttgcttctcttctcccatggtctcatatttcaatttattccttctccttgattaaagtttagagcagttcccttaatctgcttactctttatatgttttaaaaaggcccttttccaagttgttgcacaagaagaaaccttcattttctgcttaaaaaaatttttttttgtttttcttttttttttagagatagggttcttcctatgttgaccaggctggtctcgaactcctagcctcaagtgatcttcccatctcggtctcccaaagtgttgggattacaggtgtgagccactgcgcctggccaaaaaaattttgtttttagtatttattttttagagacaggaccttgctctgtcacccaggctggagtgcatggcacgatcatgacttactgtagccttgaactcctgggcagacacaatcctcccacctcagtctcccaaagttagggttacagggttgagccactgagcctagcctgaaactttcatcttcaacacactcctggtctctcccatctttcctattagttttcctagctaaaagcagagttctgacagcttttcctggccctatgctgaacacacataaaatttcctcaattttgtgcaaggctctgatgtgtgattcaataaattacttgccattcttaacaataccttactgtttgtttctcttcagcgaatgttctttcacccaaagcctactgaaacctgacaatgtgttaaacactgtgctagacattgtggatataaaatgaataaagcactattttttatttgtcaattatacctcaataaagctctttccgcctaggaggagttcattgtctggaaagcaaaggcagatatgtaaacatatatattatagttcagagtgctaagtatcacactgtgatgtgaagaaaaactaatttcttctggggaagttgataaaagatctcataggaagtgacattttcattggtcttgaaccataagtaggagtttgccaaccagagcacaggggtgagagtgagggcaggggtaaaatagggcttccaagggaagggaatccagtgtgcagaggctctgaaatgaccgacgaagattctgacgtgtttagggaagtctgctgggtttgatgtggtttggtgcatggcggagtgatggtgggaggtgcaaagagatgaaattgagagggcccagttgaagcaggaggattgaactttattctagaggcaataagagaaagagaaaactgtttaagcaggggaggaaacgatcaggtttgtctcttacttgttcgtttcgttacagacttccgggttttggaaactgaggtgctccgcttgcttcatcagaacagctcgggtagcctctgagctgaaacacggcttttttttttccaggtctagaaacggcatgttttcaatatacccaaggctactaagtttgatcccagtgcccatttgtgctaatgacgttggccagggacgccaatttactaccctgaccctgtccttcaaatattgtctctctctccttggctagggttggacatgttctgacacctttcgtctctttgaaccccatttttccgttctgataatctttttcttcagttatgctgaccatgtctttaaatacattgctaacgttttagctcatcccaccctacgttttaatccctcagatgcagacatcgcggacagccacgcccactcaagaaatttccgaaacagaaagtttgtctgcaacagcgcgccgtactgacgtagcagtgcgcaggcgcagtcccggctcctggcggcgtgttcctcttttcctcggttcccagtgttctggcaggtaaggaacgccggctcttcgcctctcagcgcggcttgtcctttgttccggacgcccgctcctcagccctgcggctcctggggtcgctgctgcatcccgcacgcctccaccggctgcagacccatggccgagcgcggggaactcgacttgaccggcgccaaacagaacacaggagtgtggct

SEQ ID NO: 11286 - DNA, 2300 bp, Homo sapien
tggaagcctatcctccaacagcaacagcattggggcttcccatgaagacatctatagacaggccaaacagggtgtaaggaagcagacccagagtacatagtatctatccacatcactttatttaaacaagaacatgctagcacagtctccatcactatactacagttatgttgtactaattctggtatcctataaagttcaaaaaaagaggactatacctataaatgaaattgttatgcctttttgattttgctattatatgatgctactcatgtgcagtgactatttgtaatggtaacacaagaattccatgaatgtacttccagagttgtatcccttctccctcaaaatctattcagtatttcttaaaaagttgtattgacagaaaagacttaatctaaaaaagcaaaatcaagacaaacatgagattgtcagaatataagagtaagtcttattaagtgctgcaggagtaaaggacgttttagtcaaaatgttggctttgctgtgaagtcctagataaaatactaaaaattctctggaatgcaatgttatctttggtgaaatgaggaagttgaatttcacagtctctaagcaaaaacacagctctaaaaacattatgccttagttttctagttcgatttcaacgaacttttgatctcaataatacataaatgttaacttcaagatcactataagaatataattttttatacctgaaaatctaatattgtttaaagaaaataagaagtatgcattttagaagaatctcttccaatattcctatgtcaacatacagttaaataattttaaaatacttttaatgcaagagaaatataaactaaagtctaacttttaacagtgtggcccagcgcagtagctcatgcctgtaatcccagcactctgggaggctgaggtgggcagatcacctgaatccaggagtttgagacccgtctgggcaacatggcaaaaacttgtctctacaaaaataaattaaaaactaaaactacaacaaaaaacaatgtagtttcccagaataatttagcagataggccaaataatagtgtactggggacaatgtttacatttcttaccactgagcctttaaatgctagaagtgaaacctcagaaccctaaattgctttggaagggaagttataggggaaagaggaaaaagatgtgagaagtggagggtgacatcattcacactgttccagctcccaagttgaaaaacaaggttaggctttggtgatttattttgcccactgtgaaacaaacaaacaaacaaacaagaaactaacttacccatgacactattttgtagtaggtattctgaatctagatctttctcctatcttcctacggtatatacatgcatgcacatacacagtcacagtattttctataattgtccaagtctttgttcagcacagaagcaggctccgagtgaaacaagttcatgaattttccacagaaaatcttaagcaaaaaaattaagtgattactgtaaagcctatttgattttttttttacttttagggtaaataaaataataaaaaataaaaaataaaaaaaattcttaacatcctttaacatagatctccaaatcagaatcatatgcaaatccaattaaattcaagtgcagtgtcacaagtagcaggttaagtattcttatttgtgtctcaaaaatgactacaatactttgaaatgtgtgactttttccgggaaagaaaattgtatacacctagaattttcaccttatgtttcctacttaaatttactttaaaaagatgacactaaatcaatatacattattttccaaaagatgacaatattattcaacattaagcctgcctgattaaaaaataacttaggcatttagaaatagttaaacattcacatttggatgaagaattaaacatttggatctgcttaactgacaagaggaaattcaatttattctgagtaactcttattacttcaaaggatagacatgaaaatcctttcacaacaaatcccttccctgatacagttaaatgcaaattctcttttccgtcttactccagaaagctcctgcatacataggctgatacgccacctactgcaaaaccgagctgacagcgcaggcgatgctgccagcgtttccattccatcaccaggctggggctgaataaaggcgtgcttgtgtggtagtgtctctttttaaaaaatctcaaagccaagaagaacaagctgaaatagcatcttcaaaaaatggagcgtaaaataaacagaagagaaaaagaaaaggagtatgaagggaa

SEQ ID NO: 11287 - DNA, 2300 bp, Homo sapien
cacattaaaattgtaagcaaaaaactgaaagaacacttaggtggttaagcaattcacaaaaagaaaaactgagaaatgtcatctgggaagcaaattttcaatcagaagacaagatttggaaacacctgcgagctgggaaagccactttctacacctggaatactagtatagaattgaagattaatcaacttaatttttgctcttgcagttaaaattgtacaatcctttgatccagatacttaaggtatttacctggtagtttttgaaattagcaaggatgtgcttgatttgttctgcagcccctgtcataaaaggttttactctttctggtctctgttcttcaagtttccctttgattctaaaacaacatttcattaacaggttgaagtattgaattttcagtaaaatcaatttttaaagtaaaaaatatccaagcttaaaaaaagaaaacactgaaaaaggcaaccagctgttaagaaattactagttcacagaaggtatctttcaagaatgtttacatttcttgttgactattttcaaaatactattctaattctaaacggaaacagactgcaggcttcagtatgctcatattatagaaaagcaaccactcttttccgtgaactcattaataaaaaagcaaggactttcacaaaagtatacccactgcgaaagaacctcaaaagttagccaatctttaaatcctgtaagattctagacatcagctaggtactgccagtatcacttacgatttcatgtaatctttgatgtacttcttgtaggcttcttttgtgaaacttgtttcctgcaggtgatggttcatgacaatatcgacaccagtgattactgtgctttcggtaccttcgccctcggggccttcagcggaggcatttccaccaatgagcgagtcatcaatgttaccttctgtcctactgaccatctgcattaagaaaaagcagtataattgcaaaagacacaaacgcatccaaagcaccttccacgccaatagttcacggataagaagtattcttagttcttgctgaaaataaaaaaagcaccattttgggaataaagttgtgacccgtggatttctcaaaacgacctaacttaaaagagttgtctgttggccggaacaaaaaatggggtcattaaaaagttgtttccagttgcgggcatgtgatgcctccggttggtaagtggggacaggacaaacacgaaaggactccaggctcctaagccggaagcatcatgtcccggacaaccccgggaggaggatgggcgccgaggcggcgggcctatttccaggatcagctccgcctccagttttctagaaaaacccaagcccggaaagagcgtctcctccgccaggaggcggcggggaggattgcacaacctcaggcgggggagcggaggaaacccgagcccgctcggcccggactcccccacgcgcaggcccgaccgactcaccttcccctccacctccaggcacaacccgtccgcgatctcccggatcttgtagatgtcggagaacatctcatcgtctgccggatacacagagccgcccatcaccgtgcgcctggcgccgccatttcccgcatttcccgcgccggcggccgcacgcgggatctgcccctccgtagcacaccagagctgggcgcgagccccgggcaccgacccctccgcgctcggctaagaccgccggcgtcccctaggcccgcgacggctgcgccttccccgcccccacccgcaccccagacccccgtgtgcggcagtaaggatagtgcagtgaggactcacggctgatgaggtcccggtagataatcatgatggcgactgaagggagacgacgacggcgctagcttagcacgagcctgaaactcggagcgagcgcggtgcagccggagcggcgctcggggggaggggggagcgggcggaaaaggccgactcagccgctccccaacctcatatagagggcacgtccctctacgtcatcgcccgctgcgcctccggaagcgacgcaggcggtgacgtggcacgaagagccgcgcgggggcggggccacagcgggggcgagtcggggaggtgagcatccggggacttgaggcggagacacaaggctccgttccactgggcacgccagcgggtaggggtgggggcggggaggtgcgcgcgcagcgtgggaggaggccaactctcggggcgctccctagccctgggtgggtggagcgggggaagcggagtacgttggacccggctccgccctaccccacggggccgcctggagaggtgctgggagctgg

SEQ ID NO: 11288 - DNA, 2300 bp, Homo sapien
tagaattgaagattaatcaacttaatttttgctcttgcagttaaaattgtacaatcctttgatccagatacttaaggtatttacctggtagtttttgaaattagcaaggatgtgcttgatttgttctgcagcccctgtcataaaaggttttactctttctggtctctgttcttcaagtttccctttgattctaaaacaacatttcattaacaggttgaagtattgaattttcagtaaaatcaatttttaaagtaaaaaatatccaagcttaaaaaaagaaaacactgaaaaaggcaaccagctgttaagaaattactagttcacagaaggtatctttcaagaatgtttacatttcttgttgactattttcaaaatactattctaattctaaacggaaacagactgcaggcttcagtatgctcatattatagaaaagcaaccactcttttccgtgaactcattaataaaaaagcaaggactttcacaaaagtatacccactgcgaaagaacctcaaaagttagccaatctttaaatcctgtaagattctagacatcagctaggtactgccagtatcacttacgatttcatgtaatctttgatgtacttcttgtaggcttcttttgtgaaacttgtttcctgcaggtgatggttcatgacaatatcgacaccagtgattactgtgctttcggtaccttcgccctcggggccttcagcggaggcatttccaccaatgagcgagtcatcaatgttaccttctgtcctactgaccatctgcattaagaaaaagcagtataattgcaaaagacacaaacgcatccaaagcaccttccacgccaatagttcacggataagaagtattcttagttcttgctgaaaataaaaaaagcaccattttgggaataaagttgtgacccgtggatttctcaaaacgacctaacttaaaagagttgtctgttggccggaacaaaaaatggggtcattaaaaagttgtttccagttgcgggcatgtgatgcctccggttggtaagtggggacaggacaaacacgaaaggactccaggctcctaagccggaagcatcatgtcccggacaaccccgggaggaggatgggcgccgaggcggcgggcctatttccaggatcagctccgcctccagttttctagaaaaacccaagcccggaaagagcgtctcctccgccaggaggcggcggggaggattgcacaacctcaggcgggggagcggaggaaacccgagcccgctcggcccggactcccccacgcgcaggcccgaccgactcaccttcccctccacctccaggcacaacccgtccgcgatctcccggatcttgtagatgtcggagaacatctcatcgtctgccggatacacagagccgcccatcaccgtgcgcctggcgccgccatttcccgcatttcccgcgccggcggccgcacgcgggatctgcccctccgtagcacaccagagctgggcgcgagccccgggcaccgacccctccgcgctcggctaagaccgccggcgtcccctaggcccgcgacggctgcgccttccccgcccccacccgcaccccagacccccgtgtgcggcagtaaggatagtgcagtgaggactcacggctgatgaggtcccggtagataatcatgatggcgactgaagggagacgacgacggcgctagcttagcacgagcctgaaactcggagcgagcgcggtgcagccggagcggcgctcggggggaggggggagcgggcggaaaaggccgactcagccgctccccaacctcatatagagggcacgtccctctacgtcatcgcccgctgcgcctccggaagcgacgcaggcggtgacgtggcacgaagagccgcgcgggggcggggccacagcgggggcgagtcggggaggtgagcatccggggacttgaggcggagacacaaggctccgttccactgggcacgccagcgggtaggggtgggggcggggaggtgcgcgcgcagcgtgggaggaggccaactctcggggcgctccctagccctgggtgggtggagcgggggaagcggagtacgttggacccggctccgccctaccccacggggccgcctggagaggtgctgggagctgggtggagcttagaggaattaaactttggccctgcgcctcgtccagcctaggttccacccttttctgggaacgtgagtatcaaccaaggtaggagaacgtcgcatttagggagggtcaggccctctggcctggggtagatctcgggactgcccgagggcctctgacaact

SEQ ID NO: 11289 - DNA, 2300 bp, Homo sapien
ccgagatcatgccactgcactccagcctgggcaacagagcaagaccccatctgggcggggcggggtagaaaataattatactgtaataatctggaaaaaaaatgttcacacagtattaatgtgtgataatcatctcatacattccagaaatgaggtttgagagccttcactgaccatgtgtcatatccatttattttgggatccctttcaccccatttttaacttcctcccagttgcccaatgtcctctggagttttccatccaagacccccatctttttttttccctttcccccctttttagcttcctcccagttgcccaatgtcctctggagttttccatccaagaactccagcttctttttttgggggtgggggaggacggggtttcactcttgttgctcaggctggagtgcaatggcgcgatctcggctcactgcaacctccgcttcccgggttcaagcgatcctcctgcctcagcctcccgagtagccgggattacaggcgcgtgtcgggatcacacgtgtgagccaccacgcccagtccccccatcttcttaaaggggttaatttcttggctcttgcattttgacttttccatcattccaattgccatcctgtgtcctgctctttcccaagggttgcattcttactctgctgaatgctatattattggatttatgaacaattgttaatgtattataattgtctgatactttgatttaccagaatgaacacttctataagtaggactggatcgaacttgttcacaattggaatcttggtgcaaatcctagttctaagggatacaaagcacaaaatatttgcgaaatagaacaagctttcagacttcatactggcatgtatctttgccttatgccaaagatgtgacgatgtgactaaatacggaagttttgttttgctattgagccaaggtcttgctctgtcattcaggctggagcgcagtggtgcaatcatagctcagtgtaacctccaactcccgggctcaagcgatcctcccagctcagcctccctaatagctgggattacaggcaggcaccaccgcacccaattaatttttaatttgtgtgtgtgtgtgtgtgtgtagagacagggtttcagtagttgcctcccaaagttctgggattacaggcatgagctaccatgcaggacctgttttgttttaatacttagtaattgggtgtaaagtccttcaaaaaacaggtggggcaggtgggaaactccctttgtgtgaccctctagcaccagggataaaatttcaacttcatcttaaagcgacaacatacttttccaagaccaagtgcgaaatagtaaagggaagagctagctccgtagccgtccgccacagaatgccacaagctttcaattatgggacaaaattggaacacatggaaaccctgtgcagactcccgtgacatcttccctcctctccaagtcccttcccacagaccttgcgccccacacgattattccccaggggccgagcaggacgacttgggtcccactatccggactcagcggtgcccccacaaaagcgtcccaaaaactccagctggggcagccctggggcagatgctgaaaagttgtcagaggccctcgggcagtcccgagatctaccccaggccagagggcctgaccctccctaaatgcgacgttctcctaccttggttgatactcacgttcccagaaaagggtggaacctaggctggacgaggcgcagggccaaagtttaattcctctaagctccacccagctcccagcacctctccaggcggccccgtggggtagggcggagccgggtccaacgtactccgcttcccccgctccacccacccagggctagggagcgccccgagagttggcctcctcccacgctgcgcgcgcacctccccgcccccacccctacccgctggcgtgcccagtggaacggagccttgtgtctccgcctcaagtccccggatgctcacctccccgactcgcccccgctgtggccccgcccccgcgcggctcttcgtgccacgtcaccgcctgcgtcgcttccggaggcgcagcgggcgatgacgtagagggacgtgccctctatatgaggttggggagcggctgagtcggccttttccgcccgctcccccctccccccgagcgccgctccggctgcaccgcgctcgctccgagtttcaggctcgtgctaagctagcgccgtcgtcgtctcccttcagtcgccatcatgattatctaccgggacctcatcagccgtgagtcctcactgcactatccttactgc

SEQ ID NO: 11290 - DNA, 2300 bp, Homo sapien
ttccctgtgagttctcagggctctatttccattgaaattaaaacccagttccctgtagagtaactgtctatcagtagttcgtgcctagtttccttctcctttgtattaagtgacaccatctggccttcccagtcaccttgggctcgtgtttcctttggatggcttcccaaggggcagagggctcctgagcagcatgtcttgtgacacaacttaattaggattgtatttcattctgcattttacaaacagatgacttcagctttgggttctaaaaggaagaaaagcagaccctcttccctttgggacttagttgagtgaccatttctcttacacatcttactagacactgtatggaaaagaatctggacagactcattcccttcattcttctgtgtacataagctcctactacggtgtcaagccctggggactagaattctgtctttaaacttcaggaagtcacagtagaatcacaatgtcagacacagtctacgaaacgcttcgtatatgttacctcatttgatctttgtaatcaacccatgaggcaggtggggtgtggcgggtatgatagtctccttctatgttgctggcttagagaaggtcagtgacttgtttaaggtcacactgctggttcctggaagaactgggcctaacacaggcctgttggctctgttttcatccctctggaatcttaatccttagcacttcagagtggtggaattcaagattgggccacttagcaaactggtcccttaatttattaaattgtattgacatgtgagctgcatgaccactgcttggacggggcttctcaggtagacaagttctgttttcatagcgagagaatgaacttcctgggaggctggaagaaagtgagggaggtgaatgatgagcaatcagctggtctactcataatatcctcaacagggaccacttccagtggtagccaggtaacctatcagaatgacctcctgtagataacaactctaaactctggagtgcagaaaaattacctgaagtcactaagggagatcaaaagccagaatctcagaaaggagtcaatacttgaaggaagggaatggcactgggtgagtttcctgtattttttttttttttttttttttttttgatacagtgtctcactttgtttcccaggctggagtgcagtggtgccatctcagctcactgcaacctccgcatcccgggttcaagtgattcttctgcctcagcctcctaagtagctgggattgcagacacctgccaccatgcctggctaatttttgtatttttagtagagacagggtttcgccatgttggccaggctggtctcgaactcatgacctcaggaggtctgcctgcctcggcctcccaaagtgctgggattacaggcgtaagccaccacgcccagcccagacatttatttcttactggaaaattgaggatcaaggtgcagcagacatggtttctggggaggatgctctctgcttgtcttgcagatggcaccttcttgctatgtcctcacattgcagagagagaaagagaaagaggtggggggagggcggggaagggagagagagaactctggtctctcttcctcttggtataaagccactaatcccatcatgaggaccccactctcttgaccttatccttaatcacttcccaaagccccccgccctgcaactccaaataccatcatactggggattagggcttcgacctacacatttttattactacgtgttatgaactgaacacaattcagtccatagcaggtagtaataaaaaatacaagtggtgctcttcacttgtggcagctgaagaacctaaattctcgtgcctgaagcctcctttctgcttctctggccatgtggtcctcgcgaccaggggtgcacgctgggcccagattgtcccccacaggtcaggaatttacttgaaaggaacgctgcaggccagtgaagagctggcaaaaattgtcatggagaagcaatgatccaaagacagctttgggacccgctggctcaggaagactggctagatgtgggccacatgtgcccagaaggtgggagatgtgtgtgctgctcattgtgtgtaccttcttgttacttctgtcagagctgaacttgaaattgccatctcatttttggagacctacagttgaatatttgcatatctctggaatggtgtcttagtctgttttgtgctactataacagaagaccacagactgagtcatttataagagcagaaaatttatttggctcatggagcagcctagaaccctactattaggtctgagtc

SEQ ID NO: 11291 - DNA, 2300 bp, Homo sapien
ccctcctgcgatggtggtcctaagagccagagggggaagaggggctggctctcagtccctgcctcgtggggggtgcctccctcccctgcgatgggggtcctgagagccgggggggatgaggggctggctctcagtccccgcctcgcggggggtgcctccccccctgtgatgggggccctgagagccaggggggaagaggggctggctctcagtccctgcctcgttgggggtgtctccccccctgcgatgggtgtcctaagagccagagggggaagtggggctggctctcagtccccgcctcgtggggggtgcctccccctctgcgatgggggtcctaagagccgggggcggaagaggggctgcctctgagtccctgcctcgtggggggtgcctccccctcctgcgatggtggtcctaagagccagagggggaagaggggctggctctgagtctccgcctcgcgggggttgcctccccccctgcgatgggggtcctaagagcctggggcggaagagaggctggctctcagtccgtgcctcgcagagggtgtcatcgcccctgcgatgggggtcccaagagccagcgggggaaaaggggctgactctcagccaccacaaaatggggagcctttatgttcaggttttgcccaagagtcagcttatttgcttcttgtactagcagggcagttgctgccaaggccctcaaacaggggagccatccttcagaaaccctgtctagttgttcagagacgtaggccaccggcctcagccagggccccacagtttgggttaaaagtccagctgccatcttttctctctctaacgcatacaatggaaaagcctttgccagatcgggtagccccagggctggggctgccagaagtttttcctttaactcctgaaagactttctgttcttgggatccccattccaaaggttcccggtccccgccccctttgtgacctcatacaaaggcttggctaacactgcaaagtttgggatgcacagtctataaaaccccacagcccctgagaattccctcacctgccttctgcccttaggctccggtagattgcaaatgacctgctttctttctgttcccgggctgcgttcggacccctgtcggatagtaactcccaagtaaggtacctgccgtcggcagattggagctttcttcttggagacctaatacccacagtcctccaggtgggtcctaaggatcttaggatccgcgatgggggtcctaaggcagggggggaagaggggttggctgtcatccaacccaaaatgggcggcctttatgttcaggttttgcccaagagtcagcttatttgcttcttgtactatcagggcagttgatgccacggccctcaaacatgaggggccatcctttagaaaccctctctagttgtttagagacgtaggccaccggcctcatccagggccccagagtttcggttaaaagtccagctgccatcttttctctatctgacgcattcaatggaaaaggctttgtcagatcgggtagccccagggctggggctgccagaagtttttcctttaactcatgaaagacttgctgttgttgggatccccattccaaaggttcccggtccccgtcccctttgtgacctcatacaaaggcttggctaatactgcaaagtttgggatgcacagtctacaaaaccccacagcccctaagaattccctcacctgccttctgcccttaggctccggtagattgcaaatgacctgctttctttctgttcccgggctgcgttcggacccctgtcggagagtaaatccgaagtaaggtagctgccgtcggcagatttgagcttttttcttggacacctaatacccacagtcctccagatgggtcctaaggttcttaggatccgcaatgggggtcctaagccagggggtgatgaggggctggctctcagtccctgcctcgtggggggtgcctccccctcctgcgatggtggtcctaagagccagagggggaagaggggtgcacacccagttcatgatcaggtcccaaaatcaaatgtccagtttttagctaggacccagtaagaagagctatttttcaaagagagaaaagttatttgcaaaagataacatggatttgctgcaaaccgccaggggtctgcactgtgattctcctttcagggctggttgaaggctccatacagtatctctatctgccttggacacttcaggcatatgtgccatatatgacagaacatcttgcacaacagtctgaatttgctgcaacccttctcttgctctgggccc

SEQ ID NO: 11292 - DNA, 2300 bp, Homo sapien
ttttgatgacactaccaaagcctaaaatagcctgacccaacatatacagtctcagagattagcaacagttgagagtcagtgttcagcgatcctgaaacagtcccaagtattttcctctcccatgacaatggccatgggtctcttagggcttgaagaatgatttttagtatatattgcagcaatgtcagtgggctccaggtctgcaaaattgttcagctcccagaactgggggaagggccatgactattatggtgatccaaattagaattctacttacctgataatttctaattatgtagatcaacatatattttagtaggctattttattcctagagatactaccaaagaccctcacaagtcaaaaacattcattttaccactgtggccctgctgcccatgaaagtaactgtgcccactgtgtctctggtgttaaacactgtcacttggtctctgaaataaggaaggcaatttaaagagtagcatttcttattgtcacccccagcaggcagaggatacccgctacaaagctcctaaagggaaatggagctctcctccgcacattttttttttgtaagagaaggtcttactctgtcacgcaggctggagtgcactgtcatgatgacagctcactgtggccttgacctcctgggctcaagccatccttccacttcaacctcctgagtagctgggactagaggcatgcaccaccatgcctggctaattttttaattttttatagagatggggtctccctacattgcccaggctggtctcaaactcttaggctcaagtgatactctcgccttggcctcccaaagtgctgggattacaggcctgagccaccacacccagcctgcacatttcttaaaacctcattaaagggagtgtcctctgggccctgagggacacagtcaagggatgaattttttttataatcttagtgtgaaggtccacatatgatgcaaaataacaatggctgcatgaacgtgatcccaacttgttcccacaagggtcaggtggctaacttcataggatattctacctggctctgtctgccctcctacctagtggtgaacagagtgctggcaaatgtttaacaaccagatctccagagcaaaaacaaaacaaaggcctgatttgtagcatctgtcagtatctgcagtataagcactcccattgtgtccagaatttatttcttctggtggattcttggtctcactgacttcaagaatgaagccagccgggcgcggtggctcacgcctgtaatcccagcactttgggaggctgaggcgggtggatcacgaggtcagaagatcgagaccatcctggctaacacggtgaaaccccgtctctactaaaaatacaaaaaattagctgggcgcctgtagtcccagctactagggaggctgaggcaggagaatggcgtgaatccgggaggcggaggttgcagtgagctgagatcaggccactgcattccagcctgggcaacagagcaagactccatctcaaagaaaaaaagaataaagccacggacctcgcagtgagtgttacagttcttaaaggtggcgtgtctgcagtcgtttgttcctctctgtgggttggtggtctggctgactaaggaaatgaagccgcaggccctggcagtgaatgctacagctcttcaagttggtgcggaccgaaagactgagcagcagcaagatttattaattaagagcgaaagaacaaagatctccgggcgttgaagtggaccctagcgggttgctgctgctggctcaggtggccagcttttattcccttatttggcccccatccatgtcctgctgattggtccattttacagtgtgctgattggtccattttacagagtgctgactggtccatttttacagaatgctgattggcgcatttacaatcctctagctagacatagagcgctgattggtgcatttacaatcctctagctagacagaaagttctccaagtccccacccaacccagaagcccagttggcttcacctctcaccatcatggccaatatcaagctatcaacaatgtcaacgtgcagctgggaagatgtgcaatagcacattttacagtatttctaccagacagatacaacagacagaaataacctcaagagcacagacactagtgaataattaggaagtggtgaagtttatttgcctttgtctttaatataatctatttaactatgtttatataacttaattgttaataatgtctgtaataaccggcccacaaatttcctgaaagtgtgacaatctgctctcatacgct

SEQ ID NO: 11293 - DNA, 2300 bp, Homo sapien
atatatatatatacacacacacacacacacacacacacacacacatatgaatgataatatatatgtatgatatatccatacaatgtgataatctgcagctattaaaaataaatgaaggccaggccggcaatggctgacacctgtaatcccagcactttgggaggctgaggcgggtggatcacttaagtctaggagttcaagaccagcctgggtgacatggcaaaacctcagctctacaaaaaatacaaaaattaaccgggtgtggtggcatgcgccggcagtcccagctacttggaaggctgaggcaggaggatcacttgagcccaggaggtagaggttgcagtgagccgagatcacaccactgcactccagcctgggtaacagtgagaccccgtctcacataaataaataaataaagtccgtaagtactgacacgaagtctgtaagcactcaaagatatttggaatatgttgttaaatcgcattttattttagagacagggtctttctctgttgcccaggctagggttccgtcgcccagtcaaggctcactgcagcctcaccttcctgagctcaggcaatcctcctgcctcagtctcccatgttgctgggaccatagccatgcaccaccatgcccagctaattttttaattttttgtagaaatggggcctcattttgttgcccaagctggtcttgaattcctaggctcaagtgatcctcctgcctcggccttccaaagtcctaagattacaggcgtgaactactgtgcccagcctgttgttacattctaaaaagcaaataaaagaatgtaaaacatgatcttatttgtgtaataaagttcatataatacacttttgtagacatatttgcatacacgtagaaaacgcctggaagatacatatcaaactgttaacaacagctgcctatgtagaggaataaggacttctacctggtcctgcttcacttctgcattgcaacttttcaaatataagaatataatacttttataataaactttctttagaatttctataattttttaaaaaaagccatgaacatacaggaagtgggtatacacagtgtctcccatcaggcctgagagaataagatgcttcttggtgatgtcatagaccggcagctccacaccaacaacaatagcagccctctgcgcagtaagggacacaccctgggtaaaaatattaacaataaaaatgattctgatatgcctctgtagaacaagccttgcaaatgtgcaaaggttctaatccataaactatgatcaaggtttatcttttcctctggggaggcagaaatgtagagtgacagagcggaaaagatcacagagcaagaactcaaaaactctgaagtctaattctgatgctggcattaactatatgaccttgggccagactttggccaggacaagtcacctctcagagcctccagtttccttctatgaactgagagatcacactggatgatctttaggggctattctatgaactgacaagtcattagaatactaggaaataacactctacaccacatgcttgcctaataacacagacttcagttacaagccatgaaattgtatggatcaaaacacccaatggaactgtaacctaaaatccttctccataagaatttaaaaaaaaaaaaagagcaaaagaccaaacaacaacaaaaaaagtgcttatccttcacacaatatcttatacataaattattcaaaagcaactttaaaaatcatgacataggccaggcgcaatgcctcacaactgtaatcccggcactttgggaggccgaggcaggcagatcacctgaggtcaggagttcgagaccagcctgaccaacatggtgaaaccccatctctactaaaaatacaaaaattagcggggtgtggtggcgcacgcctgtaatcccagttactcaggaggctgaggcaggagaatcacttgaactcaggaggtggaggttgcagtgagccaagatcgtgccattgcactccagcctgagcaacagggcaagactccatctcaaaaaaaaaaaaaaaaaaaaaaatcatgacatattccttatattcccattttatagatagggaaataaagaaagatattttcatgggcagaagatgccactcctcttcccttactccattacgacacttggattaaaattaagtgatagaacaagtaaattcaaaaaaggaaaaaagaactaaataaatcagttcgatccatccttctggcttaccttccacagtcctcttgtcccctcttgctggtaaatgttcatgaagt

SEQ ID NO: 11294 - DNA, 2300 bp, Homo sapien
gtagaaagggtcatgtacttatttccctgccctagaaaggcaagcattccaatgactttcccccacaggctggggattgtatttgtttttatggccagaattcaggggatacttcaaaggggtccaaattttattgatttcaaaacattgtgtggccaaaaatccaggtactcacctagagtccaagttggagcacagaaaagagattgtttaagctcaacctggggcctgagctggagacacaagagaaggaaatgagagagagatggccctgggccctggttctgtaacagggcagttatctcatgaaacctctgttctgtcatctgtaaaatggaaataacatttctttgtcttgaatgaaccaagggatgtaaagattcctggagtagcactttgcatcaacagatgcaagttttatacatatgcattttccttcctcccttccttcctccctctttctcctttcccctttcctttcttccccttccccttcccttcgcctcccctccctttcctttccttttctttctctcgcgctgtcacccaggctagagtgcagcagctagagtgcagcagctagagtgcagcggcgtgatctcggctcacctcaacctccacctcccagcttcaactgattttcctgcctcagcctcccgagtagctgggattacaggtgtccatcaccacgtccggctaatttttgtacttttagtagagatgggttttctccatattggtcaggctggtctcgaactcccgacctcaggtgatctgcccgtctcggcctcccaaaatgctgggattacaggcataagccactgagcccggccccagttatatgtttaaatcatgagttcacagccgggtgccgtggctcacacctgtaatggcagcactttgggaggccgaggcaggcggatcacctgaggtcgggagttcgagaccagcctcaccaatatggagaaaccccatctctactaaaaatacaacaattagccggacgtggtgatgggcacctgtaatcccagctactcgggaggctgaggcagcagaatcacttgaacctgggaggcggaggttgcagtgagctgagatggtgccattgcactccagcctgggcaacaagagtgaggctctgtctaaaaacaaaacaaaacaaaaatatacctgggtatgcttgaacacaaacactgccataccgttaaaaatgttatatattaatatataaataaatatttacatatatgtatattagatatatatgtaaagatttctactcatagtacggttcttttaattttttgttctgtttggacattttctttctttttttttttttttttttttaagagggagtatcactttgtcgcccaggctggagtgcagtggcgcgatcttggctcactgcaacctccgcctcccgggttcaagcgattctcctgtttcagcctcccgagtggctgggattacaggcacccgccaccaggtctggcttttttttttttttttttttttttttttttttttttttttttttgagacgaagtctcgctttgttgcccaggctggagtgcagtggtacgctctctgctcactgcaatctccgcctcccaggttcaagcgattcttctgcctcagccacccaagtagctgggattatagcgcccgccgctatgcccggctaatctgtatattttcaagctaaaagctggggtataaaaaaataagggcaagtttacttccatccaactgtgaaggttcacgggggcaccgtgagaaggttgccccctgcgaaggttgcttttccacggttctcgatgcgttccccaaatttctcttccacctcccagtcgatatcggaggccacatcaggtgtcaccgagtcccgggcagctccctcaggcagcggcaggggaagatcctgaggggcacttgggacgggccccgcccctccgtgtccccatctggggctgtcaggggtgtggctagtgctggcagaaaccaatgggagctgaggaggtcgcgtgtttgcgcggacggggcggggcggcgcggggctgcgtgcaggctcgtgggtctgccccgcccgcgacggcattttttccttttctccagcggcctcaggttcttgttacaactgagtccgggttggaggaggtgtggggccgctgccgccaggtaagtcctggcccgtgcctcctcctgccggccccgctttctctgcggctcctggaacccgggcctggggtaaggttgggctgcgatttccgaggagcctcctttgcaaccgggcgtgc

SEQ ID NO: 11295 - DNA, 2300 bp, Homo sapien
aacagcagggttgttttaatatgcaaatgatatatacaagccagataaaggaaaaatggtattagggatttaccctgagtcaagtgttcccagtagttcaaatggtggggaacacagcatgctgctggtataacagaagtgtgatgaactcccaagcagctgtatagcagtagtcaggactgtcttcgtgttgccagaagcaatttcgttttccagcaaaataatatcccacatctcacttgagttgttaatgtgaatgttattggttatataccgttatatgttagttatatttctgttggcatgtaacttgcatgtctattttggtataaacatccaaagcttatgtcaagtcttatttttgttcatacttaagcaatataatacaattatttacatcaacattggggatctgcagattttttaagggctttgtacagcaggcaacttggagaagctgtggtatataaagggtgtcagacacagtcaggatatctaagttccagtggtgacgctgatgttaaccacctgattgcaggatgttaggctgcttgcttcacctctacgggttgtagtttgctcctctgtagacagaaagggcttgattatatgattttaaaattctcttccaacttcaaattctattctttttttttttgagacagagtttagctcttgttgcccaggctggagtgcaatggtgcaacgttggctcacagcaacctccgcctcctgggttcaagcgattctcctgcctcagcctcccgagtagctgggattacaggcatgcacctccacgcgcagctaagtttttttgtatttttagtagagacgggatttctccatgttgatcaggctggtctcgaactcccgacctcaggtaatccgcccacctcggcttcccagagtgctgggattacaggtgtgagccactgcgcccggtctcaaattctgctcttaaaagatcagagccttcatttgggaacatagccaggcactgatttgtgctataaagcctgaataaagccttcagactttacccagacaatggtcaaaattgctacgaagctgtttccacctgccttgactccagggaggagcaggaagaggcctccataacttgtagaagattgtctgttctccaccatttatttattcaatcgtttatttatagcagtatggactcatgggtatttattttattctgtaaattatgatccaatactatcattatttattttgttgctcaaatctacaatatgatttaaatggtagagtagaattacatgtctgtaccacaaattattattattatacattttgagacagtctcacttgatgcccaggccggaatgcagtggcaagatctctgctcactgcaacgtccaccttccaggttcaggagattctcctgcctcagcctctcaggctgattactggcatgtgccaccacgcctggctaatttttgtgcttttagtagagacggggttcaaccatgttggccagtctggtctcaaactcctgacctcaggtgatacgcccacctcggtctcccaaagtgctgagattacaggcctgagcccccgcgcctggtctgtgccacaaattcttgatccagttcttcaatgttggacatttaggttgtctccagttatttgataccattaatgatgtctgagatacacacatctttgaattttttatgtgtttccgtaaattagttttctagtaggggaattactggatgttggaaaagtttatgcttttggttttgatccaagaggcataaattgtcaacatgccaacatggaaatcatacactccacacattctacccagactacccagctgtaagcagagaggtgtagatccaagtctcctgccggcagggtgatttagcgcagttgtcaataatctgtacaacacgtaacaataaagttattgatgttgaggaaaagacttccggtaggggcatttctatttccattgggtcctgtcttctccaccttctacgtttcaaccggaaatagtcgtacccatttaaagccacgtcggtactggcctcggtcccgccccccacactgcggaaccgtttccggggtcagggcattccgtcccgccccgccgccggtgcagtgttggaagctccggttctcccggaagtggcccaggtctctctgtcggggtcccctccatctcgctgctgctgaaggccgcgagggcggcggcgatggcggaggcggcgctgttgctgctgcctgaggcggcggcggagcgggacgctagggaaaagctggct

SEQ ID NO: 11296 - DNA, 2300 bp, Homo sapien
ctgaaatgaaaagtttaatctcatttgctttctgtcagataccaacaactgctaaatgatatccaccagtgttaccttgatcagcgggagctccttttgggccctagtattgcttgcactgttgcagagttaaccagccaaaataatagagatcactgtgccttggtaagtttctacttgttttggtttaatgttaaatcttcctcttgagttatgttgatatcctagaaactatacctggttaaataagatttggggcccatagttaactgaaaaagcatgtttttcattatgacaaatctagtttggtaattagccttattcacctttgcaaaatattctcattttttacttattttttgagataagaagattcacaaataaatattgttcttgaaaaatgagatttcaaagtttgtagatttatattaacaatttagcttttgctgcagaagtgcttttttgtttagtgtaattttattcatactataaatttttttactataaaaaatgcataagcgctcttttttgaaatgcttttgaactagaaaagtaatttgtgtttattatgagaagtttagaaactaaagcattaagaaactaaaagtcacctataatctcattatgcagtcatctatcgaaaaccaaccattttccgttcttcagtaagttgttttaagagtgtgtatgtgttatctctgcacataaagtgtaggctttatttcataaacatcagaaatgttgtgtgtctttaactgtaggtggtgtgtgtttgtttactgcaggttcgtagtggctgtgccttcatggttcatgtctgccaggatgaacaccaactttacaatgaatttttcacaaaaccaacatcaaaattagagtaggtggacatggaatctaactcttgttcataaaatttaacttgctaatgaccataatgaatcagtatattataggagtattctatcattaactggagaatgttttaacttgtttgtgtctgtgaacagaatattgttgggtgggacagatattttcttaaaagttattttcttaaatgtgcaacttaacatgcttttgtattgtttgtaatgtaattatttagatattatggtgtgataggaagaaatctatacagaattctgtagcctcgggatctagatccctttatctccactaagtacaataattccttctagttaaaaaattctatgattctaactaatgaaagatttaaaaatacagatactatttaataaccttttctttatttttctcaaaatgtctttcagatccactgttagtcacttttggtttcttaatgttcactcttttgactcttacaaacattccaagctcatgactcttgtaatgaggaagagaaaagtattttatggttttagttgaagtgatcacttttgatgaaattctgtgtagaagagtaccattgacagtatgaagcatatagacaacttaagtttttctttttaaatgtttaaaatttctcaaaatacttggcgtatgaccaaagtactttgaattttgtttatctaaatctataagtattcaataattttaaacttgtctttcctcggggaaaaagttaccatttgattgatagtgaagtagaatataaaaggtaattaagtcctctgaaatactttttattgtttttgaaaggacatatagaaaattattgctgaaatagataaaagttgtaataggttgacttttgtttgggggcagctactttgaattgactgctgtggattgcttgattctgagcttttaaagcaaaaactgtttatagaattactttcagcttttcccttatcattctataatgtcctcagatactattttccagtagatacttattgttcttattgactggaagaaatcaatgaggatttctaaattattacaaaatcctgaaaaaactactactaatagacatttttattctttcattttagtgagcttttggagaaactgtgtgtgtcattgtatgatgtcttcaggccattgatcattcatgttattcacttagagactctgtcggaactttgtgggattcttaaaaatgaggtgcttgaagatcatgtgcagaacaatggtaaatgagtagaaatgatcattttaagttatatcactggctcaatgaatttgaaaaaaaaataagtgcttcttccctcaccccactaaatagataaatttaatatttttgaagcttggcttgatgccttaccccttcttgaatgaagttgcaccttattctgtcactaaagacacaatcagatagg

SEQ ID NO: 11297 - DNA, 2300 bp, Homo sapien
gagtacttatctaagaatttgaaagcactgggttttcttcctgtcccatcatttcccggcctttgtgtgatcttgggtgggtgttttagcttctccatgccaccttccttttatgtaaaatgagcataatgaacttgtcatgataccttcacgaggttatcaagatcattaagaccgaaaaggaatgaaaatatatgttaacatcttcataaatttcaggtgcttaaataaacttcagtggtattaaatcagtaatcatgtaagatagggtctttgagttggtaatagacattgaatcatcttgagaaagatgattcatccatcctaatgatttgtctctgaattagtaagagatgatttctaaaagatcagagtagttaatttttaagataattgatcttaagcagttaaggatataccatacacatccctcatgtcccttaattacttacaaatttatgtaaactttatcttaaacatttctaagagatttatgctctgatgccttaagccattcatttatgtgatcagttaacttctctctaatgttttggggcaattaaaaaaatggtcactcaaattattttctatgtgttacagtttagaggaaccccaaatataggatgttcaaggatagcaggtttttagttccccaattcctgtgcctatctgatagtggatttgatttaactcacccgagagccagtgtaacctcatgatgattcttcttaaaacagtttgctctatttcgttccctagtgctctctcttgtccaccacggagaatatgttttggttctgtaaagcatgtgtgttatgtactttgtgattttaaaatttttaaattatttttgtttttttctctaatcttggaagtggcacaccatgtgtttttgttttggtttggtttttaaataggagccagataccctggcttttgcctttacagaacacatagtttttttaaagcttattctcatcagaggcttccatctcccacccattctggttgatttcattcattcctttcagtgtgaggtgtgggaatcatgctcttacaccttgaagaattcccagcttctgacagttcttactttaagtgatgggatagagcagggttgatttactttctttcatttttttctaaagttgtaatttgttgctgcttggttctagtgtagatcaactgaggtgagagaaagtgaaatatcttgagattgtggcaaaatttggttgaaagtgtgttttcctccaaatattacaaagcctgtgtaactctaccatatgatgatttgattctgtgcagacagaatctttgagggatcttatagaaaagacagcagacacaactatttactaaagctttactctgaatactgaactgatagagagagggtcttcttcattactaccagggtcaaggcagtaagtattatggtagtgtgtgcttgccaaaccagggttacaagcatttcatgctttgctttatctggtctggcaaagcaaagagatgtttttttcttactcacttaataatacttgctatctttacttttacgcctctaacctctcaagactaacattatattgtattgcatttgaacatcaatgagacctcagctaatacttcacatagattctagttagtctggaggttaaggggtaaatacgtccttttggtgttttcttcttggctgacacattagtttattattctgcttcaaatgaataaatttctgtgccagccaagattttaataaagaagctgggtaagtatatgagtattttttaaaaacctatttaatatcctaaaagtaaagcagtgaaattttaaggtgccgattaccatttatcatttttcttttttttggtaagtgaataattgagattaatagtcattttgcaatttgaacttctagaaaataactctgtgagtactgtagccatcactggtgctcatctcactctcagcctttcatggaggtgagttgctgaaggtgaattggctttttgccttgtggtggtagagaactggtgtatgttactcatggctttgctgttgaaactttacatgttcactggatgagtaattttgtttcacagatgcagcatttaaaatcctgaaccctatgactgtcccaagattttttaggctgaatagcaacaatgccttgatagagttcttgttggaggtgagaaggagtctgtttcattggtggtgggagataaacgacattctttacatgtctggtgatttctaggcacataaaaacaggaggaaattgttatcttctttttaag

SEQ ID NO: 11298 - DNA, 2300 bp, Homo sapien
atcctaagcaaaaagaacaaagctggaggcatcatgctacctgacttcaaattatactacaaggctacactaaccaaaaagcatggcactggtaccaaagcagagatatagaccaatgcaacagaacagaggcctcagaaataacaccacgtatctacaaccatctgatctctgacaaacctgacaaaaacaagcaatgaggaaaggattccctatttaataaatggttttgggaaaactagctagccatatgcagaaaactgaaactggactccttccttacaccttatacaaaattgactcaagatggattaaagatttaaagtaagacctaaaccataaaaaccctagaagaaaacctaggcaataccattcaggacataggcataggcaaagactccatggctacaccaccaaaagcaatggcaacaaaagcgaaaattgacaaatgggatctaattaaactaaagagcttctgcacagcaaaagaaactgtcatcagagtgaataggcaacatacagaatggcagaaaatttttgcaatctatccatccgacaagggctaatatccagaatctacaaggaacttaaacaaatttacaagaaacaaacaaccccatcaaaaagtgggtgaaggatatgaacagatacttttcaaaagaagacatttatgcggccaagaaacgtataaaaaaaaactcatcatcactgctctttagagaaatgcaaatcaaaaccacaatgagataccatctcatgccagttagaatggcaatcattaaaaagtcaggaatcaatggatgttggagaggatgtggagcaataggaatgcttttacactgttggtgagagtgtaagttagttcaaccattgtggaagacggtgtggcaattcctaaaggatctagaaccagaaataccatttgacccagcaatcccattactgcgcatatactcaaaggattataaatcatgctgctgtaaagacgcatgcacacgtatgtttattgcagcactatccacaacagcaaacacttgaaccaacccaaatgcccatcaatgatagactggataaagaaaatgtggcacatatacaccacggaatactatgcagccataaaaaagaatgagttcatgtcctttgcagggacatggatgaagctggaaaccatcattctcagcaaactaacacaggaacagagaaccaaacaccacatgttctcactcataagtgggagttgaacaatgagatcatatgggcacagggaggggaacatcacacactggggcctatcgggggcgggggggcaaggggagagattacattaggagaaatacgtaatgtagatgacgagctgatgggtacagcaaaacaccatggcacgtgtatacctatgtaacaaacctgcacgttctgcacatgtatcccagaacttaaagtataatgagaagaaaaagaaaaggaaagaaaaggaagggcaaattgcaagcacttcaaagactgaggtccttctgaaacctctgtgacaactgaccaggaatgcctacatagaagtggtttgcaacccagcctcccaccccacctgaccattctgccactcctgcaagtccactcacagtggccagggcatgggaactcagctttctccaacccttggccccagatcaaccccttgtgggtctctctatccctttcagggcagttcctttcctggggaccagctccagtgagcccattcagggccttgagagccacatgtcccatctcttcatctacgcagccaccacaagcttagcactggaccccaggattctagaaagtcccagcctggaggtctgacgtgtactgtctccattcagggaaacacaatccccacggctgcaacttccccctgacacaggcgaccttcaggcagacagcaggaaaactttctggccgccgctgacgactggtccaaacagttccccgccaggagagaggctgggaaagggaaggcaagggcaggtgcagaggcttagaattctccgccacgcacacacgcagattagatggggcccagggaggctgcggagtgcggttcccatggtaaccgagagctgccacaaacgccggggcctgagatcgcggtggatgcacgcgcgggagcctggcttgggtaagggctgcgcacgttagcaatgcgctcctcctcctctttctcctccgcctccctctccacccactctcctcctcctcttccccctccttctctgagggagaaagcagggagcagagtggaggatctgggcaacaaagaagcg

SEQ ID NO: 11299 - DNA, 2300 bp, Homo sapien
tttatcagtactcttttatttataagctaatttggtaccatatagacacaacatataacataatgcatgtatatgcataaacaagacagttggatcaaacttattttcctgataaaactggaatctgttcacatggctaaattttatttgccctgatgagcaaagcagtttccagggcactttgattttaaaagacctctttccttttttttctttagccagtaacctgaaactagtaataccatgaacagtaagttttatttcaacaccagcagaaaagtcagcagattcagagtagtcaggaaggaaaaataggcaaagaacttagaagactacatggtaactctttaaggacagaagaagaaagagggattgactgaaaatgttttacatgtgccatttttcttcaggttttctagtttatggagttgctttgttctaattgagtgtgcaggagtctggagatctcataaggcttctgctgtagccatcacagtctttgacctctgttaagccaaatattgctacacagaccaaaaatacagacagaccaacaaaaatcagaaccagactagattatcttagtggctgtagctttttagtattgccttaattctttgggacttaaacatacaccagatttgggactctgaactgaccagaatcccccttgggtaggactcaaatccacaatcctagacaaggttgggactctcatccataatcctaaaccacagggtgggacttgaacccacagtcgttatgatgagttcaaagacaattaaaagtacaggggcatattaacaaggtactcaccagaaagatgtctaatccagaagcaatttattttcccaaaagagaagtgccaagggagcctgaagtgccatggtggagaagaaggaaccctatagtcgagcctctggacaccctggtctaggtggccactcaggatcagtgcagggggcctgcacaccactaggggcaacagtaccttggacaggctgttcgtctcacctggggttctagtttgttaacaagcaaaaggggctcactgcccaatgtgctagaagccaacactgacaccaaatttttgaaaaaaagaaaagctttatattaaaagtcacctctgaaggagacaggagtcaagctcaaatttgtctctttctgctggcattaaggcagtacttttattagaaaaggttcagggggtggattctgagattagtaggtgatttgtgcaaggaaaagggaggtctggaaagtccttgggcatgcatagttatttcttcatgttaactcctgagttgcatggcaaattcagggagagttagtatgaaacgtggtggaaattcaggctatgacatcagcaagcttattctgtgcaagctccagttagccatcttggttccaaccagtttcagccaggtttttcttgatctcacaagtggagggagtttcagcggcttaagtttcttttcttatctgctatcttgaaactcaaaaattaagtaactggtttcttactctttgggactttccagacctcccatttccatccaccaatcacctactaatctcagaatccaccccctgaatcttttctaataaaaatactaccttaatgtcagcacagagagacagatttgagcttgactcttgtctccttgggagttgactttcaatatacaagtttttcttttttaaagaacttagtgttttagtattggcttctattgcattgggtagtgagccgcttcagctctgtaacactaactctggtagatagcatcaggatgaaattgaattgtagggcacacagttggtgtcagagaattaaggaattgagtagtgtcagaaaacacctcagactacactttctcccttggtatgggaagagttcagtttgtgtttctttcttcttgagtgacccaactccaagaagatgccacttctggagagagaatagggatctcaacttagcctggcagtgagaatacgaatggcagctggaatgacccaacagggggctaatgtttgggctattgtgtgtgtcacactgaccctgaccagccaagtagtcacagcacccacaagctcttcctgcctgtcagatgcctcattcccacctgtgatgctcagagagaaaccatgagccctgaaaaacaccatattgttttgtgatgtcacctctggaatgttctgagtgttttggtgaccaacttctgcataggacctatacctggcaactcacattggtatggctttttacttgagatagaaataatcatcttagacaggga

SEQ ID NO: 11300 - DNA, 2300 bp, Homo sapien
gattagtaggtgatttgtgcaaggaaaagggaggtctggaaagtccttgggcatgcatagttatttcttcatgttaactcctgagttgcatggcaaattcagggagagttagtatgaaacgtggtggaaattcaggctatgacatcagcaagcttattctgtgcaagctccagttagccatcttggttccaaccagtttcagccaggtttttcttgatctcacaagtggagggagtttcagcggcttaagtttcttttcttatctgctatcttgaaactcaaaaattaagtaactggtttcttactctttgggactttccagacctcccatttccatccaccaatcacctactaatctcagaatccaccccctgaatcttttctaataaaaatactaccttaatgtcagcacagagagacagatttgagcttgactcttgtctccttgggagttgactttcaatatacaagtttttcttttttaaagaacttagtgttttagtattggcttctattgcattgggtagtgagccgcttcagctctgtaacactaactctggtagatagcatcaggatgaaattgaattgtagggcacacagttggtgtcagagaattaaggaattgagtagtgtcagaaaacacctcagactacactttctcccttggtatgggaagagttcagtttgtgtttctttcttcttgagtgacccaactccaagaagatgccacttctggagagagaatagggatctcaacttagcctggcagtgagaatacgaatggcagctggaatgacccaacagggggctaatgtttgggctattgtgtgtgtcacactgaccctgaccagccaagtagtcacagcacccacaagctcttcctgcctgtcagatgcctcattcccacctgtgatgctcagagagaaaccatgagccctgaaaaacaccatattgttttgtgatgtcacctctggaatgttctgagtgttttggtgaccaacttctgcataggacctatacctggcaactcacattggtatggctttttacttgagatagaaataatcatcttagacagggaagcaggtacagctatctccacttcaaaaactttcaaaagccttttacatcaactataatatctagcttaatatctgttcagagattgataaaccatcatgccagatatcatctacacgttctttcagactcagactttcataattgtacataattgacaagagagaaataaatgagtagaaagttctgtgttttttaggcgagcaattgaggcccagaggatgagctgggaagcagtaatcttcttcttttctcgtttccacagcactcaaggccaaattatacaagaaaaagagataccagatctgaaagcctagaaattccaatcagtgtggttctacctcaggtagggataatcacagaaggatgtaacctatcagtgttagccagaataaccccccatctcctccttcaaaactctagcaagatgttgtagaataagcagagatagtcagggcttcagattatagtttgggttgggtgccagcaggcggtgtgctggggaaggccacatagcccctctgggccttgggttctttttcccatgaatgaggtggctgggtcagatgatctggtaagaacttccagtcctaacattccaagtttctatgatacactgaagtaacccagccttctcaaaacgagatcttttggtgcttagtgttgtgcaatcactctggatttctgggggagaattagaactgggacttgaaatcaaatgcataagaatgaatccatgagaagaaaacctcatccgtggacaaaggggtacagagttatttggagctgtcaagagaattaagccctgctatgcatcaaagacagatgtaggggccatgggcatagatgctttttcagtcaatgaattggtgaagtcctcacaggctatagagtctcaggtctcctcctgcctgcaatcagctgtttccttagtggagtcctcttgattgaattgtttctactgctgctatgtcacaaaggggtggctttgctttctccagagtcacctaagtcctcattggaagaccagggccatgcaaccagaggggttgaaatgtaggatggaggaatccaatgcagaggtaactatctgagagctctgtccagggatgtgtaggaggaggattgaccactggtgggcattccatatatataattgtaacaatctaggcaagtatgttcagcgggaggcaaaaatatggaagaagaaaacatcctgg

SEQ ID NO: 11301 - DNA, 2300 bp, Homo sapien
cctatttgctggcatccttattttgtgtacaatcattttattttaaaaatacctttccaaaaaaaaaaaaaaaacagcagaaatccccattctcatggaacttacttctagcaggatgacggaaacaatacatctttaaaaagtaaagaaaaatgaaacaaaacagaacaaaaaatcaacacaatcgttccactagagccaaagatgtaaaaataatttgaacctttctaaattatgaatatatctttaaggaatctatgagagtatctgcacacttttagtttttaaaacaagtaagccaatgaaaggacattaaatgttttcccaatgaactgctgaaagcttattttctggacaattcaaactttagaaagcagattctggttttgtgggccagcaacctttattatatgccatgtaacaagtggctccagggactcaggtcctataaaaatatcacattgatgaggttctaatcagttcaaatgttgtcatcttctagtttggtgccagtgtcgttattttaaaagtgcaaagtttccatgtttaattggtgttcagcttgtctcttaaaacattggtttggttttaaatgcaagttaaaatgaacagcctgggctctgtcctggcatcaataaacttgtgcattatttttatcccgtatgttattctgttgttagtttaactgcctgaccaggtcacagacctaggtgttccacgtgtgcatatgttttgcatacattacaacccaagcattgtagccagagcagaacaagagccatgagggagggggctcacactcacagggtacaattcacagtgggggctgatcctgctccaggcagcactggatctggcctgacttctcaagagagaaacaaccagggaagagggaaaacacaatacactgaactcccctgctttagctgcaaagactaaaccatcagagctagtcccgaaaaacccaaaacccttcaagtactgcttaggaatctttcttcaagaaccagcggcctcccgcccacccaccagccctgttctggggagcaaggacaggtttgcagtctgaggactggaatgccctctgcctgtgccagcacagaaatgtgctgctagcatttgcagaaacaagtaaatgatgtggtatgtgcatccttaatctctattttaatgtctccagcaatctagtggttaattagcaatttgctgcccaccaatatgcaaatgaatgacaagcaaaggttctctgcatctgtaattattttgctgatttacaagcctctttcctctcagtgtaggtttttctgtgtgtgtgcattcatgcatcagggatttcattattttttgaagcatactctgtgcatttttatcctttaatactttcagacttcagtaatcacagtattttgaaaaaaagaaaatatatatatatgtatagtaatatatatgtatgtgcttccctccacccctcaactccaaatgaatttgtcagggattcttttctttgataaagagtggagagtaagatttatcaaggggctgtaatccaaattgcagaaagtcagaacgcaagattgaaagatacacatttttgctgctgccaagtccttatctggattcagagtctagtaatattttattttctcccaagcagctctggtgagtcgagccatgatctgcgttatccatctgcctactttggagcggggtgttgtactatttggcggcttaaacgctttacgttcttgccagggcattaagaaaggctctcatgttaaattaagtcaattaataaatggagacacattaagcaatcaattttgtcagcctatctccccagcattaggtatggttggctgtaatcacaagataaatgcaatgtgctgatctatggtaatgttcaataatacattctccgccaggctcaattcatcagggagtttcggtagggaaggcatttgttattggctgtctctgcacctcaaggataacatttctgtccttttgattggccgcctcactgctgcaagattctaaccgtcttattttgatgatgaatatgaaggcgcgctaagccgggctggagcggagtgtctcagaggctgcgctccttccagggcccaaggactcacagcttcctccgctgccttcccggaccaacaaccccccaaaagttgtgatgcttttctttacccagtgctttggggctgtattagatctcattcatctccggtttcagcactacaaggctaaacgggttttctccgctgccgggcaacttgtctgtgtcgtcaacccca

SEQ ID NO: 11302 - DNA, 2300 bp, Homo sapien
tgaaaacaagaagaaagcaaaaattcaaaagaaaccaattaagaaaaagaaagaggatgatgttggaatagagaggggtaacatagagacaacatctgaagatggtcaagtattttcaccaaaaaaaggacagaaaaagaaaagcattgaaaaaaaacgtaaaaaatccaaaggtgattctgatatttctgatgaagaagcagcccagcaaagtaagaagaaaagaggcccacggactccccctataacaactaaagaggaattggttgaaatgtgcaatggtaagaatggtattctagaggactcccagaaaaaagaagatacagcattcagtgactggtctgatgaggatgtccctgaccgtacagaggtgacagaagcagagcatactgccaccgccacgactcctggtagtaccccttctcctctatcttctcttcttcctcctccaccgcctgtggctactgccactgctacaactgtgcctgcaactcttgctgccactactgctgctgccgccacctctttcagcacatctgccatcactatttccacctctgccacccccaccaataccaccaataatacttttgccaatgaagactcacacagaaaatgccacagaacacgagtagaaaaagtagagacgcctcacgtgactatagaagatgcacagcatcgcaagcctatggatcaaaagaggagcagcagcctcgggagcaatcggagtaaccgtagtcatacgtctggtcgtcttcgctccccatccaatgattcagcccatcgaagtggagatgaccaaagtggtcgaaagagagtactgcacagtggctcaagagatagagaaaaaacaaaaagcctggaaatcacaggagagagaaaatctaggattgatcagttaaagcgtggagaacccagtcgaagtacttcttcaggtaataaaattgaattgtgatctagtcactgtttcctaggttagtatattttatacacattttaattctaaagtaatgctaaattggttactttacatgctgccttaaattttatgcaactttttaaagaaaagtttagctgccctatcaaaatgttacctgttatcacattaataccaacattataatagaaatacatacagtagtgttaatcagtttaatatcaggattttagtagtatgtcttggtggaagggtttatgtgttcaagtcccttattgatgcctatgattttaaccttcctgctattcttcatgcagtcaaggctgcctcttttgaccacagaaaataagataggggagtaggaggagatcaaataatggagtgattagttctattaatgcctaatcattttatgtacttcttggaagatattttatggttatagtggaaatagacaaggaaacttttttttttatttattagaactttgagagaggaatttttcttaaaatgatttatatatttggatatttatagagagaaatgtatatgtagaatatagaaatatatagaacatatagagacaatatggaacatagaaagttacatagaatatggaaaaaggtaaattatgttttaaaggaccttgaaatgaagcattttgtttctattttatcatgtgctaataactctttatatatggtatatttattttagatcgccaggattcaagaagccatagttcaagaagaagttctccagagtcagatcgacaggtccattcaagatctgggtcatttgatagcagagacaggcttcaagaacgagatcgatatgaacacgacagagagcgcgagagagagaggagagatacgaggcagagagaatgggaccgagatgctgataaagattggccacgcaacagggatcgagatagattgcgagaacgagaacgagagagagaacgagacaaaaggagagacttggatagggaaagagagagactaatttctgattctgttgaaagggacagggacagagacagagacagaacttttgagagttctcaaatagagtctgtgaaacgctgtgaagcaaaactggaaggtgaacatgaaagggatctagaaagcacttcccgagactctctagccttggataaagagagaatggataaagatctgggatctgtgcagggatttgaagaaacaaataaatccgagagaactgagagtctggaaggtgagtgctacctctgttgtctgtgatactgctttatttcttttcagatttcgtgggaaacaactattttcttttgaaagggcacccactaatgggcaaattgactccattctccattctt

SEQ ID NO: 11303 - DNA, 2300 bp, Homo sapien
atactagtcctttgttggatacatagtttgcaaacattttctcccattctatgggttgtctttgttatttattttgctgtgcagaagctttttagtttaattaggttccatttatttatttttggtttcgttgcgtttgcttttagaatcttggccatgaagtctttgcctaggccagtgtccaaaagagttttcccagtgttaatttctagaattttaatggtttcaggttttagatttaagtctttgatccttcttgagctgatttttgtttgagctgagagggatccggtttcattcttttacatgtgacttgccaattttcccaccaccatttagtaaatagagtgtcctttccccagttatgttttgtatgcttttgctgaagatcatttggctttatttctgggttttctattctgttccattggtccatgtatacaatatgtttcttaacttttgaccatagtatttataaacaaacaatgttagtgaaaaaacaggtagtcaaattttaatgaaaatgggggaaaacactagaataatttaagtacccaagagatataaaacgctactcatttaaagctcaactaaggaacaaaaaatataatgaacgtatgaattattttattaatttgtcagcaagaaagtgatttccatgaaggggaaaggaactaattttatggtgtacccacaacatatttggcactgggtttatgacataactaatttattccttactgcaattttatgaaatggactctcatttcccacccattcagccccacccaccattttcagatgagaaactaaggttcagtgacttcaaggaacttacttaaggctgcgtaataactaatgtagttataagttgaactcatagcttttttacttcaaagccaatattaggttttctcattcagctctgcagcataaggcatttttatatcataagaatgcaaaattgctgaatgtttatatcagagggtacattaatatattggtttctgtgctgcatgttaccaccttacagtatttaaatctggcaattttcacttgagttattctacatgtataatgaagaagaagaagaaatgttgtgtattttaagttcacaattcttagcaaatgaagtaaagaatttgtattaaagacactgaatatcctttgtatgatacactctggcaatattgctttcctacaattatatgttccagttatagtaaagagatactagtaaaaacaaaaaaatctctttttttgccccctagaattttataaattgtgtttgcttgtccaatttaggaagcgctatagaaatgaagggagtcccagccctagacagtccccgaagcgccggcgtgaacattctccggacagtgatgcctacaacagtggagatgataaaagtaagcagactctgttttctgtctctctatattcatattcatttgtaaccatgaaaccatcctttcatactagtaggaactgatgaattaagatttttaaaaagttgtcttgctttgctgcctctaaatatctccttttgtgactaaagtatgtgttagagtactgtcattttctactatttatagtaaagccatatttttatttttactaaaattattgtcattttaaaagtttttaaatgatcttgatctcttgatctcatgatccacctgcctcggcctcccaaagtcctgggattacaggtgtgaggagaaattattataatctatatgtaccatgcagtggttactaacctggtgagagtgtgattgcttttatcttttatatagatgaaaaacacagactcttgagccaagttgtacgacctcaagaatctcgttctcttagtccctcgcacctcacagaagacagacagggtagatggaaagaggaggatcgtaaaccagaaaggaaagagagttcaaggcgctacgaagaacaggaactcaaggagaaagtttcttctgtagataaacagagagaacagacagaaatcctggaaagctcaagaatgcgtgcacaggacattataggacaccaccagtctgaagatcgagagacatctgatcgagctcatgatgaaaacaagaagaaagcaaaaattcaaaagaaaccaattaagaaaaagaaagaggatgatgttggaatagagaggggtaacatagagacaacatctgaagatggtcaagtattttcaccaaaaaaaggacagaaaaagaaaagcattgaaaaaaaacgtaaaaaatccaaaggtgattctgatatttctgatgaagaagcagcccagcaaa

SEQ ID NO: 11304 - DNA, 2300 bp, Homo sapien
agacagatttaagatcctggaaaagcaggaaaaatggaaatgacagagacatctaacatggaggagagatccaagagatacagtaactgtgtaataaagagaactgcagagacttgggtcataaggaaaagttttgaaatgaaaatagaagaaattgagtaaaaagtttgaagtttcagattgaaacagtccatttagtgctggaaaagattttttgaaaatacctggatttagtgaaaatctttttccagtgagtaattttcaagggataatgttcataagcatgccaacagaaaaaccagcttacctgaatagtaaaaaatttgattttctttggacttctgacctgcaacgttaaatgttacaaaatattttaactagagctctgaggtaaaaggattttgacatgaaaatgctatattcaattaaactattgttaaagtaagaggcaaagacagccagttttgaatgtgtatgggatcaaagttatactatttacttaaaattacttaaattgccaaaaagaggcacttaaagaacaaaatttgtaccccaaaatcaattacaagtagattaaagacaaatgtgaaaggcaaaattacaaaattttaggagaccatctttgtgacctcagagttggtaaaaatttcttaaataagattgagaaatttatgatgaatatatactgacagtggttgatatttcatttgtagatgatgtaattgtgttttttgaataatgatgaaaacctggaagccacctgaaaaactatgaaattgttttagaaagttttggagcatctattcagggaaattctatacagtcaataaaaatgattacctaaatctgcttttttaaaaaaaattttattttgagttagagtcttactctgtcacccagactagagtgcagtggcgcaatcttggctcactgcaacctctttcttccgggttcaagtgattctcctgcctcagcctctggagtagctgggattacaggcacccaccaccatgcctggctaatttttgtatttttagtagagatagggtttcaccatgttggccaggctggtctcgaactcctgacctcaagtgatccacccctccctcctctgcctcccaaagtgatgggattacaccatgcccaacctaaatctactttttgttacagaaagatgctcacactatgtctatgttcaatatttgaaaattttgcaaaatattgtaataggatatcccatgaatgtatgtgacacacacacacacacacacagagttaccatttccaatgatgagagaaaatagttgtgactatatatatatatgatttgcacatattttctcgcattctataagttgccttttcactttgttgattgtgtcctttgacatgcaaaagttttaaaatttgatttagtctcatttgtctatttttgctttgttgttacctgtgcctttggtgtcatagccaagaaatcattgccaagtccaatgtcatgaagcttttcttctatattttcttttcggatttttatagtttttgcttttatgtttaggtctttattttgagttaatttttgatctggtgcaatgtaaaggtccagcttcattcttttgcatgtgaatacccagttttaaatgaatagacagagaaagtaagatatatggcaaaagtatgtaaatattcaagatgttaaaaatagttctctttgagtagtagaattataggtgatttttactttctttgtctacttttctgtcttaaaaaaaaacagtttaaacagtcattgtattaacatcttttctgaaagtgtcttcctatttcacctctatcttttctcagaaacctgcccctttaaagttatataataataagcagtgttaacaaaataagtatcaagtaaattaattcttcagccatttctgttagtttttttttcttcttgatattggttagtagtatacaaaataataaagggcaagtaatgtaaaggaacgctgctgtttttaagaaggctttaaaaaatatccttttggcatatttgaacctctaatgatagctttttgttaccttcagaaattcaaaaaccaaccaaagtaaaaagaaaggaccacgtactcctagtccaccccctcctataccagaagatatcgctctggggaaaaaatacaaagaaaaatataaagtaaaagacaggatagaagaaaaaacaagagatggaaaggacagaggacgagattttgaacgacaaagagaaaagagagacaagccaaggtaagtaggattgtatgtttttaaca

SEQ ID NO: 11305 - DNA, 2300 bp, Homo sapien
ggtatttaaagatgtaatatacataaagtttgtcacaaaaacagttttaacttgattggtaaagaaataatttacctagatccaaaattggttacactgattgttttggctatagcatagcaacactataaaaactgaacattagcaattggaattttttttttttttttttagttgaatgatttttttgggggtagtgtatgggtagattttgtttaggagaatttaaaattcaaaccctcaacattagccaacttctttttcacgtaaacattgtacattttagtttatttgtgattctgaatactgttttatttgtatttagattgtcatttgtcacttccgttaatgtgggaagattagtgtttattgtatatgtgtgtttacttgtatatatacacgtagatacatacctggtgaaactatttcgatacttttaatgttttgctttaatactatacttttgatacattttaaaatttatctttgaaatttattagctgactcagaatttttattcaagaaatcattttgagaaaaatggtcagagaaatttgtctaaaatgggaaaaagtaatgtcattgctagacttagaataaagaatatttattataattttgctattttgtgtatgattttccatctgataacttctttcgtatttgtgcattttttttgtcgggaggaaaaacatagttcataatgcgagtcaaagataagaaaagcaatgtattttacagaatgcttatttatatgtttatatacaagacttttacataattaattgagaattcgctgtgtgtaaaacattcattctgttgggtgctgtttaggatagaaacaagttcatactaaagtgttttattatataaaggaaaccagggcacataggatttacatgtacatcattataatttagagcacttaagtactggttcttagtaagagattccagtttcaagtttagctttaactgttaaaacatttaatataaatctattacatgtgcatgtaaacattaatgagatcctttaaagtgaattaactcaaattatttctttactaaccttatgatttatattcataaaatcaaggaactgatttgattgcccaatgactgcttgaaatagatgtgaatatttatgtgatttgtttatatcttttttatatatagtactttttggtagtcaaagaggaacagagcattccttaacttcttttgccctgttttaaaggtgttgtagaaatagtctttaaaggcagtctgttttccatctctcctttgttttttcccactgatagtgaaaataattgcatagccatatactgtcaaatttctagtataaataataaagccttaccactgttgagtataaatatgtatttttcctttagttaaaaaatttacagcagaatatgaaaatcactgttgtaaaattgccttgaatcctttatctttattctgaaataatttaaaatttaagataaattttaaagctcctatatttgctttgattcttacttaaggtacataaaatattttctcagttattgatgttgcatccaaccacaggcatgtgtatacaagaaacttatttcttgtaatatcttcttatatctttcagtataaatgataatgctgctacctctagattaattttgcaactttgtagtttaaaactttgtgttactactacattttgctcccacatataactaatatatttatgtgattaataggaaaacaagtcaagctattagttcctttttctcagttcacatataatttcttattcacatcaccagtacctgccacttcgtggaatttaacatatacattttgattgttattgggagaaaaactgtaagtgttgctcgtgttttgcatattaatatttaaggtgaaatttttcagaaattcaggagtcaaggtcagttagaaaaagtgtattgagatttgtgaggttatttctgtaaatacattcttataaaatgttattaatatataaatacagatttttgttgttttgtttcgttttttgttttgtttctgtgttttggttcaaaggtcaccagaaagacctacaggggatcttagagaaagaatgaagaacaagcgccaagacgtggacactgagccccagaaacgaaatacagaggagtcatcctcacctgttagggtaggattgaatttcccaaaacaaagttcaacttcagtagtgatttgttaatttgagtttcattttaaatattgtgtgctaaatatatggtaaatgtgtaatacggcattataatgttc

SEQ ID NO: 11306 - DNA, 2300 bp, Homo sapien
tgacagaactaagctgactacataggaattagcaaagcaacactgcagtactatgcagaaaaaacaatttgttaaaaagactgtgcacagaaaacatcccatgctggtagctactctaaagtgaagtaaaaagaactgcatcatacaaaaatacaaaaaaaaaagaataaaagactctttctatatcaacagcagttaatgcttcaactactactaacagctggagaaatagctccacctctatatgagatggagttgggagagatgaggaggtgaggaagactatcatccactgaaaaccaactctctaagtaaatttaagttaaacaatgtgtttcctctatgtaaatgccaatgcatattataaatactgatgatattacaattttaataatttgtaaagatgttaagataccatccacttgctggatttttagtatgttaaattcatattacaaatatgaaaatcacataagcttgcaaatctcaaaatatgcaatgttcatttagaatgaccagtaatcaggaagccagtaagaggcatacatttgataaaactgaatcctaccagatgcacagagtgaaagccttagtttcagagtgcaactatttttaaagccgcaattgttacaagcttgcatcaactttgctagtctctagttgaaactgtcatctgttataatctaaatagttcattaagaaaataaaaattatttgaaaatctatagattgtattcacaaaacgctccaatatattgtactaaagccagtaatttcaaatgttacagaactagaccccgctaactggcaccatatacccatagactgaactgcataagtatttattctccaacggtatcgcggacttcgaaaacttgaggtgtaaagatgttttccaaatttttaaaactactttaaaaatccaaaaatcttaagagacttcatactcccataattttcaaagtagttcgaattacctgaaagccccatagtataaccaaataccttaagactacccttcacaaacaacatcttaccaacataattcaagtattatcaactctaaataattttcaaaccacataaattgcgttagcctattacagagagataatgccgccaaacagactctcttctttctattccactttcccccgtttctgacagttgccaaaactacctacctaaggcttgtgaagataaagtagcactcaattcccaggacctaaatcgttatcactgctgagggaaaaaaaaaaaaacaagaccaatcacaagtaagatgtttttctctaacagatctggaatgagtatagaggaagattctaaatttaagcccaaattgctgcacccttccatcgcacacaaatacgaacaccatacaagggttcccgtgcttacatcaaatggtaacgaggggtacagcctattgtctgagtctacttatcgcccttagacaaatgccagaatcataatcagagtgagaaattacgcctgagcacagggggctattgcagagttaagggtgggatgctcaaggaaagctcaaaatcccagtgactcaagcaaagacgggggggggtaacccgggcctccgcattacgggtccgctcaatgccttccccagatacccacaccaattcacagaacgcttacttcctccccaagctcccttcgcaagtgcagtccggaggcaccaccgccgccgccgctccgaggagcgggggaggcgactctgtccccgcgcctggacccaggaggacgacgacgaggagaaagcgatgcgcgcgcggctcccgggaaccggctcttggctagcgaggagcccccgggatggctgagaagcagaaccaacccgcccgccgcctctccagggtcaagcgaaactgggtcgcaggaagaaaaataacgaagagattgtagattaagaaaaggcaacaaaaacactaccaggccgctaggaggaccgcctcaaaatgccgccggaagtcagaggtttgccctgttcctctgtagacccaggcagcttccggccgtcagattagtcgtcagtgcgcagacaccacccttcgtggacacgccctctaggcgtaaggttccatgcgagcggtaagagtgcggcgggacttggaaatcgaatctgtgctctgtgagagatcctaggaaaggaaactgggagcccgggagaactaaaattcccaattaaaagtgaatttaagtgagttttctctttttattacataattccttaccataaacagctgttgtaaatgcgcaaaatgcggcatttgttgacagta

SEQ ID NO: 11307 - DNA, 2300 bp, Homo sapien
agaattacttgaacctgggaggtgggggtggcaatgagctgagattgtgcaactgcactctagcctgggtgacagagtgagactccatctcaaaaaaggtcgaaactgtatttatcatgaacactaaaatatgtacacattttagttaacatgcattaaactgtaacaagtcttctggcaattgtagctttcatgagatgcttcccaaactgtattagatagatgctaaaattataaattaaaattttgggtcagactttgccataaacctggactcaatttagcacccccccaaaaaaagtcagattattcaattaatgcggttggaaaacctaacaagttacctagaaaaaaattaattggattattaacatgtctttcaccaaagtaaattccaggtacagcatatattttcatatgaaaaccctgcataaaccaagttgaaatctcagtaaggagaaaaaattcttgtgaaaggagaaatgaatgaaaggagaaaaaaaggtctacatgccaaacaaagctaataacactaatgtcgtttttataagcaattgataaaatgaaccaagtagacaaatgaggaaggacaattgataggaaatataaagatagccaataaatatgccaaacaaatgtgcaactcactgataatcaaaaaacataaattaagacagttggatattatttttcgcccataaaattatcagaattcataattcctattgatggtatgggaaggggaaatgggcaaattcataccctgcttgtggaagtataaatgaattcagttcttttgacgtccatttgggaacatgccgtaattgcaaaaagtacagagccttagactagcaaatctattctagggaagaatattctaaagagacaaagaagcaattatgtataaacaagggtactcattgtaaagttgtttatattagttaaaaactgaaaaaaatctaaaggtatacaaacaaataaacatttaaatcaaacaattcccagtttgtaaattaatttgaaacgtctgtatttcaacaatttctttcttcttcttttagacctagctcctggaggtggggacgattggatctatgatttgggcatcaaatattcgtttacaattgaacttcgagatacgggcacatacggattcttgctgccggagcgttacatcaaacccacctgtagagaagcttttgccgctgtctctaaaatagcttggcatgtcattaggaatgtttaatgcccctgattttatcattctgcttccgtattttaatttactgattccagcaagaccaaatcattgtatcaaattatttttaagttttatccgtagttttgataaaagattttcctattccttggttctgtcagagaacctaataagtgctactttgccattaaggcagactagggttcatgtctttttaccctttaaaaaaaattgtaaaagtctagttacctactttttctttgattttcgacgtttgactagccatctcaagcaagtttcgacgtttgactagccatctcaagcaagtttaatcaatgatcatctcacgctgatcattggatcctactcaacaaaaggaagggtggtcagaagtacattaaagatttctgctccaaattttcaataaatttctgcttgtgcctttagaaatacaaccatgcattccgtttgctccacggtaattaggcgatggcccagaaaggggaggggtgtcaaaaacgacaaacatagcctctcattccagctcagctgctcaataaacactgttgaacgaatgaatgagtggctctaggtactgtcaacaaatgccgcattttgcgcatttacaacagctgtttatggtaaggaattatgtaataaaaagagaaaactcacttaaattcacttttaattgggaattttagttctcccgggctcccagtttcctttcctaggatctctcacagagcacagattcgatttccaagtcccgccgcactcttaccgctcgcatggaaccttacgcctagagggcgtgtccacgaagggtggtgtctgcgcactgacgactaatctgacggccggaagctgcctgggtctacagaggaacagggcaaacctctgacttccggcggcattttgaggcggtcctcctagcggcctggtagtgtttttgttgccttttcttaatctacaatctcttcgttatttttcttcctgcgacccagtttcgcttgaccctggagaggcggcgggcgggttggttctgcttctcagccatcccgggggctcctcgctagcc

SEQ ID NO: 11308 - DNA, 2300 bp, Homo sapien
caaggagaaaggacagctaaactgcaagggaacaacaattacctgggcagcagattcctaccatgcaacaggaaatgtcaaacaacaatgacgcatccgtcacactcgaatattacattcagctaaactagtacttgaaagtgaaggcaaaagaaagttattgttaaagatacagagcataaaagattttatcacctgtagacttttgctataggaacttttaaaagattgcttcagcaataagaaatgtaatttaaaatttattgttttttatgcactctgtttcttttgtatcctgtttctgtttccccagagaggaaacaggacataaaataaagaagaaacacagatacaaaataagtagcacaaaaattgatagaatttattagcatattttaactattttgactgtttgttttaaagttaacttttatgttaaaaagataaggtaaaagttacttgggttagtttttctttctctccttcagtgtgattatgttattcatttgaaacacaggttcgtttttgtttgtattattttttaaaatttatttgtttgcttgttttaagtacatatgtgaaaagaacatggttctaaaattcagagtagttctaaagttcagaactattcaaaacacttcacccaaagaagcgtccctccctgtctcttctaccctgtcttttccagtgtgtttccactcacctcccgtggataaccagtctcattgatttctaatctatccttcttatgtttctttctccacatatgagcagacacacacatattttcttatttcttcttctttcttatacaacaagtggttacagtggaggtcactttaattcattaaatatcattcaatagttttaaatctcaaaaggaaaagtttgaaatctcaatcattttcttctggccaggcacgatggctcacgcctgtattcccagcactttggaaggcagaggcaggtggatctcctgagctcaggagtttgagaccatccagtgcaacatggtgcaaccctgtctctactaaaaatacaaaaaaaattaactgggtgtggtggggcacacctctagtcccagctacttgggaggctgaggcaggagaattgcttgagccccagaggtgaaggttgcagtgagccaagatcacgcctctgcactccagcttgggctacagagtgagactctgtctcaaaaaaaaaaaaaaaaaaagaaaagaaaaaagaaaaaaaatcattttcttctcagaagttaattgtgggcaggctgatttattttgcaaatttgccaattctgacttcaagaacattcaagtgcattaaccaatgggaatgtaggggaagagggctccactcacttacagagggtaggatatggcctcatactagacaaaatgttatttgatgctactttcaagatgataggggatgggcctggatttaattgatggctattatggtgacctttaaataaatgagattcaaagtaacctgatgtctttactgcttgaaccagcttccatgaaatagtattcctattgggggtgggcctatcattccatatggtcaaggaaacatctttttgaacagagatcctgtaatcatccttacaaactgcacttcaacattggattggattagccagatttgaggaactcactttttacatcttcataaatttaaaatgttgaaaaagtcagaggcaagggaagacatttatagtacttcacggtagatctccctcaacatgggctatatatccattagtcaatattctatagctattgttctgcaataaaccagacaagatcctactgtattactacccttttattcttggccctaccttccccaaggagttacacattttctagatagtctaaattaagagcaactctcatcatactctttttgagtgtttaattatcaagcaacagcctaactaagccaataatatttctctttttgggagtggaaatggaagctaagttgattgacccacaggaacaagagggaacatgccgttatattttaaccagtgtgtaaagaaggctgttatgcaatcaatgatctgggtttttctcttcagagaaatttgttgtacagaaaattgctgttgggatgaagctttgcagccttgcagtccttgtacccattgttctcttctgtgagcagcatgtcttcgcgtttcagaggtaacccaatagaatcttagactgtggtgggccactctcctcacttgtttgcctcatgtcgtgtcaagtcagtgcactgagctggtggacaaaatggtaaac

SEQ ID NO: 11309 - DNA, 2300 bp, Homo sapien
taattacagtttttctattgtggtatagaaattagataatatactcttttaaagtccatgggacacaatgaaaaataattagaaaaattagaacatactttgaactgattgaaaattaaaacacaacatatcaaaatttgtgagatgcagctaaagcagtacctactgaaaaatgtatgggattagatacttaaaaagtagatgttaaaccaatgtcctaagcttctgcctcaagaaacttaaaaaaagagcaagcaaagtaaatccaaaacaagtaagggaacaataaagataagattagaaatcaatatagtagaaaaaagggaattatagatacaaccaaagaaacaaaaaaactggtgatttgaaaatagcaataatattgatataggcctctgatcagactcatcaagaacaaaagaaataatatacacactaccaacatcaggaatgaatttgtaggaacattcctacaaatcctacagacactaaaatacaataagaaaatattataaacaatttatgcttataaatttcattacctaggtgaaaagtacaaattttttcaatgattcaaactgtcaaaggtcactcaagatgaaatagataacctgaatagccctgtatctattagagtaattgcattcatagtttaagatctcctttcaaataaattccagactagatggcttctctggtgaattttaccagacatttaagaaagaaacaatgtggccgggcccagtggctcacatctgcaattccagcattttgggaggctgaggcggatggatcgcctgaggtcaggagttcgagaccagcctggccaacatgatgaaaccctatctctactaaaaatacaaaaattagccgggcgtggtggcgggctcctgtaatcccagctactcaggaagctgaggcaggagaattgcttgaacccgggaggtggaggttgcagtgagctgagaccatgccactgcactccagcctgggcgacagaataagactctgtcgaaaaagagagagaaagaaaggaaggaagggaggaaggaaggaaggaaggaaggaggaaggaaagaaggaaggaaggaaggaaggaaggaaggaaggaaggaaggaaggaaggaaggaaggaaattccacacaaaatcttctcaaaaagtgaaagaagaggaaatatttctcaactcatttcatgaggtctacattaccctggcacgacaccaaacttgataaaggcatttaaataagaaaactataaactaatgtccctcatatatatagatgcaaaaatgcttaacaacattttaacaaatttaatttagtaatatagcaaaagaataatacattatggtcaagtaagatttttcacaagaatgcaatgtttgtttaatattcaaaaaccaattaatgcaattcaccatgttagcagattaaatttaaaagcccatctgaattaaaagcatttaacaaaattcaatattcatttacaataaaacccctcagcaagtcagaaatagtcaggaaattcctcaatctgaaaggaagcatctatgaaaagcttacagccatcatcaaacttaatggagagaggctaaatgctttttctgaaaggtcactaacaaagcaaatgtgcccactctcactacttctattcaacattaaattgaagatcttagccagtgcacaatggcaagaaaaaaaaaaggcatctagactggaaagaaataagtaaacctgtcttttaatcacaaatgacagtatcacttacatagaaaatctcaaggaatatcccaaaaaagttactaggattgaactaatgagtttagcaaatttgcaggagacaagatcagtatgcaaaaatcagttgattggttgtattgtcatataataacaataatcaattgaaaataaagattcaaatgccatcaaaagtgtgaactttgtaggggaaatagttttaaaagtacaggagaaaaactggctgagagaaattaagatctaagtaaaagaagaaatacaccattttcatggatcagaagacaattttgttaggatgacaattctccccacattgatctatagactcaacataatcctagtcaaaattcaagtgagcatttttatagaaatttgaaagcttattctaaatttttgttgggaaaccgtcctccatgtgtctcttgtactgcttgctacacatcttacttagaaggctaagaaaccaagccctgatcatttcttatcacgtttgtttcttacagttgtgtttgcagagagcaactttgaggtatgagata

SEQ ID NO: 11310 - DNA, 2300 bp, Homo sapien
agttgtattaacagggttggtgaggtggttcgtcatgatatccatcctgtgtttcaaaatcaagaaaaaatgaaaatctctttccacaagcagtagcagaagatattgtcagggcagggctgtcgcaggagtgtccacctgctgtgagctcatcacagataaccgtcacctctgctctatctccagcctactgttcagtctggagagctgagcagagttaggagtggatgctggtcactgatgcaagcagattcttccagaaagagatttggaaaggcggcaagcagattcttccagaaagagatttggaaaggcagtaaagaaaagcaaagttgaaaggagctctagatattgaatgggctctggctaccaggggctccttgttcatgtcttagggcatcttcgctgacattgtgaagctggctttactgttttcctcattttataggtgaggacatcaaagctcaagtaacttcctaagagtatggctagtaattgtatgtgatggtccacaaatgggaggaaaatgccttttacctgtggggtgaggctgtagagtgtagtgtatctataggtcacttagctgttaatatgaagtggccagttacatagcccaggggtgcttctctccgtaaaatagctgctgctccagcccattacattaggctgtggcttctggggtgttcttatggggacaaggtttgacaagcgatgctggggttcactattagaaaggtttggcaattcttttgctccttgtaacactcggggctcattttctcctgtcttcttagtaagttgttgcagaattgattaagtaaaagaggccacataatgtactgaaagaaatgtcatactagccccacattccttttatgtgaagcccttttaaaaatgaacacaacccactctttaaaaaaaaaaaaaaaagattcagagagtacatttgcaggtttgttacaagggtatattgtgtgatgctgaggtttgggtttccattgaaccagtcacccaaatagtgagcatagtgctgaacaggtggtttttcacctttaacccacttccaccctccccctgcttgtatttatcaatgtctattgttcctacctttatgtccatacatactcaatgtttagcttcctcttataagtgaatagatgcagtatttggttttctgttactgtattaattcacttaggataatggcctccagctgcatccatgttgctgcaaataacatgattttattctcttttgtggctgcatagtattccatggtgtatatgtaccacattttctctatctagttcattgttgatgggcacctaggttgattccatatctttgctattatgaatagtgctgcgatgaacacaagcatgcaggtgtctttttggaagaataatttattttcctttgagtatgtacccaatattgggattgctggttcaaatggtaattttatttttagttctttgagaaaactccaaactgctttccacaggggctgaactaatttacattcccaccaacagtgtgtaatcattcccttttctccacaacctcactggcatctgttattttttgactttttagtaatagcccttctgaatggtgtgcagtggtatctcattgtggttttggtcctcatttctgtgatgattagtgatgccgagcatttttgcattttttcatatgcttgacacaatccactattttaactttacgtctttctctagttgtgctaacttccttccatttattatttgagaatgactacctgctgttggtagacggtgggttttctgggaagttactgatgctcctacagaaactacagtttatttgaaacactatgtggaatactgctgcatttcccagaccaggctgtatatattatatatttaggaagaaaaagccacccacttcctttgagctgaatgggagtaactttgggacacgttgatgaaaccctccctgtgtctctgcataggacccgaagattagtacaagtctgcctgttctggacctcatcgatgccatccaaccaggttccattaactatgaccttctgaagacagaaaatctgaatgatgatgagaaactcaacaatgcaaagtacgtaaataaaaataaacctcagattgggagggaaggacccaactggcagctggatggttgtaaagtctaatgctcatgcctttatacaaacatttcattttcactatccgtgcttttccttctcatgactttctgcagtctcatcatcactgttttggatatgggacaatagtagttta

SEQ ID NO: 11311 - DNA, 2300 bp, Homo sapien
tcaattgttatgtttcttttatgctattccaagctcattacctcatacactaattattttaatggatcttggagtctccatttatcaaatgcttgaatgtatcccacatgctaatgtcaaacactctgtcctctgccgtgtttaattcaaatgcatatcgcctttcagtgattctgcacactgctgccagtcacatcccggtactgattttattatatctctgccttgctcaagaatttattgtagtaattttacaaagccataatgactgccgttgtctgtcaactaaaatctgctacctggtatccaaagatccccaattctgaatccttcttccagataggcttatctcattgggctgtacaacacacacccctgaccaaaccagttcctgatgttcttaatagagaccttgcctgttgctccctttgtatgcatatttatactaccttctactcccaccccttgctatctccccaaatcctctactctttcctttttctgatccagattttgctagctatccaaggacaagttcaaattccaccccttccaagttcagtccatactgttcttttccctgtctcaattcaaataacaaatatatctacctcataagtgagttctgtagcttgtatgatctctgtttgatgcctaaaagtcctgttttttccagcaagaaggtaagcctttgagagccaactgaacagctaccccacacaggattccacacactattaatagatactatagaaatacatgcggaattgaaatggaaaagaaaaattaacacagtataagaaccctcgtccaaatccaatacagtttattttatttctttctttcattctactttcagtttttattgcatcctctttagttaaactttggtcataaaaaagctatgttttcttcggtcccaaaagataacccatcttcattcatctaggtgagacgagagaagagcggacatttaggaactggatgaactccctgggtgttaaccctcgagtcaatcatttgtacaggtaggaatatttgggaactcattctaatgtaagatagagacctcaaaagagccataggattccaaataccactatgatgtgcattctcttcacaaaatgtgcataccttgctggaaggggaaaaagtgccaagttgagcttcagatgttggatattcagttgaaaaactcacctgcatacatcagtctcactgtgtgctcaatatataaatcatacctcaacaaaatgaaacatttactatatgtcataagtgatcttacatataacccgctcacaagcaggcaaaacaacagatgttaagtttgtggtgaagtgtctcctatgccacttgttaaagcaattttcttcttttttttttcaatatttctttttttttgagatggagtctcgctctgtcgcccaggctggagtgcggtggcgcaatctcggctcactgcaagctctgcctcccgggttcacgccattctcctgcctcagcctcccaagtagtttggacttcaggcacctgccaccatgcctggctaattttttgtatttttagtagagacggggttccaccttgttggccaggatggtcttgatctcttgacctcatgatccacccgccttggtctcccaaagtgctgggattacaggcgtgagccactgcgcccgttctaaatatttcttttacatttatttagttttacaaattgtaaacctttaggtacaggggacatgtgcaggtttgttatataggttaattgcatgttgcaggggtttggtgtacagattatttcgtcaccatagtgctctttcttttcctgaggcagcatatgttggatggaagggcatagctagtcacacctgggaagagtgagtcccccaatctctctgagtcatggtttcttcacctctatagatggagctacgactaccaagtgtgcagggttgttgtgaatattctttgaactaatatgtaagaaagtgtctggcccattgtaggccctgaataaatgttggatatctgagaatccttttgtgtttgttttgttcagtgacttatcagatgccctggtcatcttccagctctatgaaaagatcaaagttcctgttgactggaacagagtaaacaaaccgccataccccaaactgggaggcaatatgaagaaggtaaacaatgatggttctgttgttccaggagacaggcaaagtcatagcctgcaagagcactctaaatactttataaggcagccaaacgtagacaagtaatgtttttccagaaattaaatt

SEQ ID NO: 11312 - DNA, 2300 bp, Homo sapien
gagagatccttgttacttaacctctgagattccttttacttgtgactttctgattttggtgcaggtgcatataggcaataatgtgctgttattaagtgtctgcctgagataaacactaatgatttcagtgagattcccatttcttttcacattatgcaatctgctttgtgcatggagagccttgacccagccctgagacatccttttgcattgcaggagaaggatgacatccagagggcagaatgcatgctgcagcaggcggagaggctgggctgccggcagtttgtcacagccacagatgttgtccgagggaaccccaagttgaacttggcttttattgccaacctctttaacagataccctgccctgcacaaaccagagaaccaggacattgactggggggctcttgaaggtaactgtaaacgatttgcctaagatggggaaaggcactcacaattctaattcaatggcaattcaaactcacttcctaagcaaatataaactatttacatgtgcaaacaggccattaattctctggtatgcaacaaagagaataaatagattcatcaagtcaatttcagccaagcaggaataatcaaataccattctatcacgtccattaacaaagcgttcatccattatcagaattaaatgttttaggaaagataatgcatttagttattagatgaaataaatcctgagtttcaaaaagataatttacgtacttaatggactgtgttgattcctagagacaagaaattgccaccatccatttccaaaaaatgatatttaaggtatgctgggatatgcttactgagtttttggttttcttttgtttcttacgggagccacagaaaagtattttgaggcagaatccctaacagttgtatttttcaggttaatgctctaagattcaacaaaaagcatatagctttaattacgttctaccaggtagaggtgctggagatgtttacttgacttttttaaaaaaatcatgaactagtcccaatattgagacaaaggtcaactaatattaaatgaatatcacccaagcaaggagattcagatttgaagtatgagttgatccttttccacagtgctttactctcactagaaatgcagcataatcgtgctccaacactcctgcattggtgtcatttgctgaattatggtcagggggttgtgtgtattttgttgactcccaaatctatatatcaagcccacaaatcacccatttcagctgcttctagaatattcctgtttggatccttggctatcatttgaggtgcagcatatgcaaaacagaattgattattttccctcccacccccaaccattgcctttccagcccacctcccatcccgtttgccctcttttttttttttttttttttttttttttttttttttttgagacggagtctcgctctgtcgcccaggctggagtgcagtggcgggatctcggctcactgcaagctccgcctcccgggttcacgccattctcctgcctcagcctcccaagtagctgggactacaggcgcccgccactacgcccggctaattttttgtatttttagtagagacggggtttcaccattttagccgggatggtctcgatctcctgacctcgtgatccgcccgcctcggcctcccaaagtgctgggattacaggcgtgagccaccgcgcccggcctgccctcttttagaaatgctccatttccattaatcataccatttttttttctttagtcaccaaactaaagagcttggatcctactatatcttcctatccttcatccctacatccactaaatcagcaaatactaataattcttcctttggaacattttctcaattgttatgtttcttttatgctattccaagctcattacctcatacactaattattttaatggatcttggagtctccatttatcaaatgcttgaatgtatcccacatgctaatgtcaaacactctgtcctctgccgtgtttaattcaaatgcatatcgcctttcagtgattctgcacactgctgccagtcacatcccggtactgattttattatatctctgccttgctcaagaatttattgtagtaattttacaaagccataatgactgccgttgtctgtcaactaaaatctgctacctggtatccaaagatccccaattctgaatccttcttccagataggcttatctcattgggctgtacaacacacacccctgaccaaaccagttcctgatgttcttaatagagaccttgcctgttgctccctttgtatgcatatttatactacc

SEQ ID NO: 11313 - DNA, 2300 bp, Homo sapien
cattgttcagatagtgagacgcaaattacatgcaggtaaatgctagcacctatatttccagcttgctccttggtacaccgcatatgtgcatcccaggtgggtttgcccctcattcagtcactgctctgtctccaaggttcctttccctcccacctcagcagcgctcagcttacaagcaggccctacagagttggatagagacccactgccaagcattaccggcagccagcaggttttacagcaacagtgccaagaagcccagcctcaggatctgcaatctcagacagaatcgcttttgcggctggcaaggtagggctaggcagcaggcacaggtgccatttcacagactacctcgggccagcagctgccctttagacaccaaattaactcaccaaagttgtctttccagcaaagtggtttaatgtgaatttgaagcatttagtagccttgttttgggtgtctgtacctttcagtggatgggattgtctaagtatgtacacaagaatattattgttaaattcctcaaagaaggtgataggggacttttcaagtcctgtataccattaggttatggattgttttgttcatgtacacagctcatttactgagtacctcacatgggccagacactaatctgctaggagagatgaatggtaacagggaccacactacagagatctggaccaaagctcagaggaagggctcactgattctccccagcctccagaacaggatgcctgaaaccatgatgattgttgcgataagtctgagggtgtcattttattattgatctatgaatttggctgtcttgtcttttgaacatttcatctcgtggtgagttgttttaattgggtttgctctttggttgctaaggaaatttggagggccttagtgcaaggtcaagaatcaatgtacaacaaggtgtggtggtgcacgcctgtagtcctagctacttgggaggctgaggcaggagggtggcttgagtccaggagttctgggctgtagtgtgccatgtcaattgggtgtcagcactaagtttggcatcaatatgggagcaggggaccactaggttgtttaaggaggagtgggtgcactggctcacaccagaaatggagcaggtcaaaactcctgtgctgatcagtagtgggatcacacctgtgaagagccactgcactcctgcctaggcaacatagtgagatctgtctctttaaggaaaaaaaatagaataaatgtatagagacaaatgcagggggtaagaatcatcgtgacctagaagatgccagtgtacacaatatttgtatgtgatttggcacatgttaattgcagcctaaacctgaacagtgcctttgccatacctagaaaaattccccttcatgtacaagaaacatacatgaaattatattcgtaagacatttgaaatcttgggggattgttcttactatatgtgaagaaggtcttaattaaagagaagagtcctatcttagggtttaaaacttattaaagaggaaagaagagaaataaggaggcctggactctggtcccagccacacctccaataagctctgtgatgttaggcatgtcctttaacttgggtgtcatttcatgcctctgtgacaggggagtggccagatagatcatctctaagatccctccacctctacattctatgactgctattcttactacattcattctataaggaagttggcatagacccagaagatagcaaagaaaactatgaaagatttggagaataagccctaaaaaagcaggttacaagaatataaagagaccaaggcatgtgatggaatctttatgaattgaacagctcctgttatttcctctgagaatagcccaagagagaccttcaatcgtatcagaaaagatttaggttacaaagtagggatatgagacaccagagaggttgtaggatttccttatttggatatttttaacaaaatagtagatgactctctttctgggacagtttgagtaccgtcttgcctagaaactaggagtgaactggatcaacgtgtcttaagctgtgtgtggtaacatcccataaaacaggtctcacgtgctgctctgggaacttccctgatctgtgcgggggcagtccagcagctaggcagctgagcagagcgcatctgcctggggccagtgaggagaatgcatctagacagagcttttcgtgctgctgaggtaagagcaggaacacagccccccagcccccaggagcgaggctgggctgggagctgcccactccctcacttgctccatttcacagaaggcacctccga

SEQ ID NO: 11314 - DNA, 2300 bp, Homo sapien
tgcaatggtgccggccaggatgtggctgagggggtgtgggtgcctgccgtggatgctagggtagaagacgactctattaactgggtggctgtaagcagtacccaggtcaatgcctttcatcttctacaacctcgacgttgcctggaatcctaaatctttttcttcacttaacaaacatcacctctgctcaaatctgcaactgctttgatatcacactgcctttttcacccctctattatagatggcatttatttacttacatgttttttccccactagactatactccttgagaacagcgattgtgtcttatttatttctgaatcaccaattcagacaggcatgcaaacacttgctgaaccaatgcacaaatatattttgctcttcttcatagattcctccggcctcagatgaccaggcaccactagatacagaacactgtgctttccttctccaaggtaaaggaataaatatctgttccccttcatgaagtgttactgttgggcctttatgccatcctgaagccaccaggatgtggaaccagatcagggaggtccacagttacaaccccttgtatctgtaacaccagcaggacattatctacagagtcctgctgcagggccccgaatgaagacagcattttgctgctttgtagcgtgagcagtgctgtaacagtgatgcatggatgttcctctggtgtcctgaaagaatgtaggtgcttcttgaaagctctctgcaacttattaattgggagtgattatgcgatggagaaaacagagtcccatcaccccctcagtcttccctgggaaatcacaagagggctgatagctctctgtgaggtgaaccgtttctagaatccccaccgtctcgtcctgttcttccgcccacccagttcctcaagatagcccctgtgggcttctgatgaagtcaccacaccactggctaatgaagtagataaaccagaacagtttggtttaacatttaaggtcagaaacaggaactttctagaggagaaatcaaaaaagcaaaagaagtataagggcagccctccaaccagtcagaataccgtgaccacctgagaggcccgtggcccagcggacacggacgcatgtcaactctggagcagatatcttcagcgcagcatctgacctgggagtacagccacataccctcattcctaaacggcagattgactactggagtcacacacagtctccgggcaatgtggagacatgtctaatatttagtcaacataactcagggtgccacagtcttcacaactgttgtgagcacttgaggatgctccatttgaagataggaatttgccctcaagcatctggggtttgggtacagaacagagcttcccctgccaccacctgctaattttataaaatgtgcattcaaaaaaaaatcctgcctgtaagaaggaattaagctacccatttaaatataacagctgcctgtgcaatctactgctgctctttataggaaacgcttaaataattgagatacttaattgggttaaagagatccctagcacatagatgttctataaataaaagaatgagtaaataatctagtaaccttccttttcatgtccttcacttaaagagatcgttctgttttgtttgcaccaataagatcactgttagaggactccagagaggtttgatttcaggtggggtggggctttcccaaggaagtcccttttcatttgtttcaggtgtactgccacctttttccctggctctttcactaaaaatgaaaaatttgttgatctttgctgtaagtaggtaggcatctgggctttgcttttgcaactagagtcaaagaagtcaagttatcaggctgatcttgccttgctatctagaatcagaaaggtttaagtagcccagggactactcaaagacagctggaggagaaagggagagagaaaaatgcttataaagaggtgggcaaaagagcgggaccttgtctcaaaaaaaaaaaaaaaaaagaggaagtggtaggaggtgtctgaatttcactgtgacctgttctgtcaggtgatttttggtggggcggggacatgaaaaaaaagttaaaatgtccttataaagacaaaatctttttctttcctggctgatgatttgtcattctagtcacttcctgccttgtgaccacacacccaggcttgacaaagctgttctgcagatcagaaagaaggggttcctggtcatacaccagtactaccaaggacagcttttttcctgcaaggtaaatgttcttcatgtgtttttgttggttttaagcgcttgtgat

SEQ ID NO: 11315 - DNA, 2300 bp, Homo sapien
aggttccccaagcgtttcccacttattagggaaatcgatagcattacctgcggggtgcctgcggttgcttctgcataaggcttttatctcattttagcaacatttaaaaaatgcaggatgtctataaccttggcactcatcattacgctggcatctttagtacaatttgctaatagagtgaaagcactgtggttcagtttgggaagcttcttcataaggttctgccaaactgcaaaggggacggaacaaataaataggctgaccgtacatacatcagaaaaagcagacccttaaaatccaaaagggagttattcattatttcaaaaacacgttattttacaaaagaagaaagaaaattgaggggataatattttcaaaaatataagaactataaaataatctaaattgaattttgtttgtcctgtctaaactcatcctatactgatatatcatttccatagacaaagcgagtcagatgtgttagaataacatatatacatataaaatataccaagccatggatttaattttcataataactatctcatttgcctaaatgtttggtactaagtggtagaaatagaagacaaaatgttcacacctgagattacatattaaaccgccctaggttttagtctcatacttgctagaagaaatctgcaaggaatgatacctggatgcctgcggattccaagtgtgacaaagcattttttgaaaaagcattcagaagccttgctttcgactacacaaagctaagcataaattttaaaggccaaacgtcagtcagtaaaactgaattcctgtagttctcatggttccaacgatcttgaagagcataggtacctgactcaatttacactgtcattttttatgcttaaaaatataaaccttttttcacatttacaaaatatgcacgatatatattacttgagactaatcttagccacagagctgccttttattttcagctttgtatttctgagaaactaatgaatctatggtgtagataacagcaaaagtggaaataaattcatagtctggggcagcagtataattgggacacagtaaacttacaaggaaaagaaacagtacactactactgtaaaggaaaacaagttgcataatattttccagagtctgattacttttttgttaaaacttttctacttttttcattgattgttttaaaacatgtttgctactaaggagaaaaaggaagacatggttatggtgtgaatcttgaaagatccccaaagctagaaagatttatacagaagtctctcattttccaacttctgttataaagttcctgcgctagtacttagaaaaaaccaaacctggaaggaagctctacctagtttactttctgagttcggatttccgcatctatcagatgagctctttctagtgctctttccccctcaaatctccagagaaacacgcacatttttgcaaacacacacgatgtatctatgactgcacacacaggttcatcaacaccatgacagaggcgacacgtcacaatatgataaccagaacagaggacgatgacagtgagaaatgggtttcttttatggcccgcttggatccctaatgcccttatttctacacaatccagcctcagccaggaactttaaaggatcagaaagagaaaacaggttgcatgaaaggaagagaaagaaaaccgaatgcccgcttttcgagagcactgcaaaattagccccgggacccggctgcacaaaagtgcagccttaaagaatgccagcccatattctagacacccaagtaaagcatcctgtaatcgagagaaaataataaataatagtggtcattgccattaagcataaaaatagtaataacaattgtcaccacggcgttccgtacagcagctgcgcgtggagccggcttctcctccggcccccacggcccgcagcttcccctgcagccccacagtgcgtcggaggaaggcgagggctccgcgcgcgctgcaccgtgggctgggcctgcccctcccggcgcccgcctcgcctcgcctgtcccgcgcccgcctcgcctgtcccgcccccgcgcctgcgcgtcaagtggctgggctggcttagcggaccccggttgctagggtgtgtctccttggcctcctagagggtggggatccgtggtgcttcttcgggaacagcctcctgcaggaagaccctcgctggacctttacctcgctgcctagattccgaggaaaaggagataggagacgaaaagccagttggtttggaaagcggccgattatcctaaagggtagtgtgggagtc

SEQ ID NO: 11316 - DNA, 2300 bp, Homo sapien
aggaggagtgggacatgatggctgtgggctggagctttcgcagtccaggcttgggttggaatcctgcctgcctacatactgttcgtgtggccctgcgtgttgcctaacttcagtgtcttgtgctttcatcagtgaaataggggaaataactgtccctctctcacagactttcgagcacagaatgacatagtaaatgtaaaacatttaactgatctgtggcacagagtaagtactcagcaagattcatttctgtggtcgctcccagccaggccttgtttattttttatttttatttttttgagatggagtttcacgcttgttgcccacccaggctggagcgcaatggcgcaatcttggctcactgcaacctctgcctcccgggttcaagcaattctcctgcctcagcctcccaagtagcagggattacaagcatgcaccgccactccaatctaattttgtatttttagtggagatggggtttctccgtgttggtcaggctggtctcaaattcccaacctcaggtgatctgcccacctcggcctcccaaagtgctgcgattacaggtgtgagccaccgcacccggccaggccttgtttatttttaaagccattatttggaaatgatcttcagaatctacagtgtacgggttctacagcagctgctttcccatccatgatttcattaatcctcccagtatatggcaactaagatttctgttatgctgtatggtattttagttacaaagacgtacatgactcaaactatgaatgataaatatcaaacttggttcatgtcagaacctagtgttgagggaggggcacatagaagacttcaactgaattgttttctttctgaagctgggtggtgagtgcacaggtatttgttgcattagtttttataccttttgtttgttaatgtattttattagacacatttccaaaagtggtcaatgagtgtttattttagtaggttagaaagtgcagtgggcgtggtggctcacgcctgtaatcccaacactttgggaggccaacatgagtggatcacttgaggtcaggagtttgagaccagcctggccaacatagtgaaaccccatctctactaaaaatacaaaaattagccgggcatggtggcacgccctgtagtcccaactaccggggaggctgaggcaggagaatcacttgaacccaggagggagaggttgcactgaactgagatcatgccactgcactccagcctgggcaacagagcgagactccttctcaaaaaaaaaaaaaaaaaagtgtaaagagcaaaaattccttctttctcctaccctccagaaatagtcactgttggctttttggtggggatttagacagtgaatatatgtttatgtgtatgtttatatatatgttcttaaataaaattgagatcacattatacctatttgtaactggatgtccacttcctatgctcttccgtgtactttatgggctgtacagcatttcatgttgagtgcaccatacttatttaaccaattgccttttgatggacattttggctgccacccccattataaatgtgctgtaatgaacacctttttatatcactatgtgtgcctgttagcacttctgtctgatggagtaacagaagcaggattactgttacacatgtgagaattgaagtctatcacaaaaatgtcttcctacaaattagttctatcagtgctagacgtaagtgccctcctctagatactgcaccagttctgggtcttctaaatttatgacaggctgagtcaaaacagagtatctcacttttcttttctttcatttcatttcaatttaattttattatttgtcatcaatttgtgacagggtctcgctctgttgcccaggctggatggaatgcagtgacatgatgatggctcactgtagcctccaccttcaagcaatcctcctgccttagcctcccaagtagctaggaccacaggcacacaccacattgcctggctaattttttttttttttctgtggagatggggtcccactatgttgcccacgctggtcttgaactcctgggctcaagcagtcctcccatcttggcctcccaaagtgctaggattactggtacaagccactgtgctcagcctcacttttaaaatatgcatttttttgtttctgagattgtttttctctgttagttatctgcatttcttctttccgtgaattacctattcccatcctttgtgcatttttgtatttttttctcattgatttatcaaggtctttatgatgctgcttcctaacattgtatatatactg

SEQ ID NO: 11317 - DNA, 2300 bp, Homo sapien
agcactttcaccttcctttatctccttagtgtcctgataaatatcccaatttaagggctgagagcgttttgatgcagaggcacagctggtgaacggacagctggaactggaatccactctgttccgattcttctctgtgctctttcctctatactcagagtctgcaaactatgacctgtggaccaaatcctgccagcttcctgtttttataaatgaatttctcttgtgtctatagctgctttctcactacagcggcagaagagagtggttgaaacagatactgtatggctctcagatcctccaatatataccagctagctgtttacaggaaaagtttgccagccatagcttctgaagctaagaagtccaaatttttccatgcaacaactactttcttgaacatgaagcaagggatttgaatgactctgcttgcaactccatcatgctgagagctgtgtcaccaccatgtgcagcattttgttctaatttagcaggttgggacatctcagctcttgacacagaaatttttgctttaaatgctgcagtaagaaatcacatgacagaaaaaatgtttgttttgatggtggtcattgccagtaatggagtggctaagggtgcaggaatggatgtgtcagcagaatgtaccttctgcagtttgttggttttgactggaagaagactaacttagagaagcaatgctgaccttttttggatggattttatttctctagacaggaggtttagggctgggtgcagtggctcaatctgcctgtaatctcagtgctttgagaggctgaggtggaaggatagcttgagcccagtgatttgagaccagcctgggcaagctaatgagacccccatctctgcaaaaataatttagaaaatcagctggtcatggtggcacctgtaatctcagctgctagggaggctgaggtagaagaatcgcttgagcccaggaggttgaagccgcactaaagtgtgatcacgccgctgcactctagcctgggtgacagagcgagatattgtctcaaaagaagaagaagaaaggaagtttaagatcaatcacaatgagctagagaagcgatctcataatccttaggaccctgcttttggactgtggcttctcactttaccccagcccctgttgggatttcccaggaccctattctctttctaccctcttttcctcattggtctcctccactccggtggctgaggatacctcccagttactccaacagcctctcctagaaatgatcatcattaaagcaatatctgtaagacctgccatcggaaagatctttcttttcctgtcatctgaatttattctagaattgtgcttatttttttacattatttaaaagccacttcctataattgttttattttattaggtaatctttaaactcccttttccccatttttaacaatttgctatattggcaggtgctgttcaagtcagtagaagaaccatttcttcgaattccttctcaccagaggtatttgtgctgcctgttgatgtagaaaaggtgaatgctatcttctttctttttaaccatagagtcttaatcctttagatagtgttgttctgatttaaatctggaaacttcaatttgatgaatcattacaaataggtttcctttcagcatttgattgatggagactgccagaaacactaagctaagaagggttccgaggccgtgcctgtgctcagctggaaagttttctgtgattgatgaatgatgtctggcattaggcttcccccaacctaaggttttgtataacaagaaatccaatttgagttgtccgttgattatagtaagccgaatctatgtctctggacaatgtgtgctataagtcatagagtgacctatgataactcagttaaatgaatatttatactgatatgcattaattccacttaaatagagcatattgatttttcaaatctaatataccctccatgaaaaagttgattatgcttgtattttaattgatttctttttctgcaggaaaatgcccacttttatgttgcagatatgattatatcagcaatggagaaaatgaagtgtaacattctgagtcaacagcagacagagagctggagtaaagaagtcagtgggttacttgggagtgatcagcctgactctgaaatgacttttgataccaacataaagcaagagtctgggtcttctacttcttcatacagtggctatgaaggcaagttgggcaaatatgagaaagctgtatgttatgtgtttcacatatatctcctctataattaccccttatccacgggg

SEQ ID NO: 11318 - DNA, 2300 bp, Homo sapien
tgatctgatttaggtttataaaagatctcttgaatacctcttgattataaatgggcaagagtaatcgcttctcggccttttggctaagatcaagtgtagtatctgttcttatcagttaatatctgatatgtcctctatccgaggacaatatattaaatggatttttggagcagggacatggactaggagcttgctccgtccactccatgcatcaacttggtattgctgtacccctaggaacggcgcacccctctgggtgttaaaacacggtgttactggccgggcacggtggatcccacctgtaatcccagcactttgggagtctgaggcaggtggatcacaaggtcaggagttcaagatcagcctggccaacatggtgaaaccccgtctctgttaaaaatacaaaaattagctgggtgtggtggcatgcacctgtaatcccagctacttgggaggctgaggcagagaactgcttgaacctgggaggcagaggttggagtgagccgagattgtgccactgcactccagcctgggcaagagtaacagcagagaaatctattgggaagctatggctgcacgtccaggtgtgagaagacggtaactcagactaagacagcagctatagctataaacttgctgatggaatgaagttggagagctaaggaaagataggatcagaaatgactcctaagtttcaggcttgggcaattggaagagggaaaagcagggaaggagcaggtttcaggagaagtgagtgactgttttggatgtatcaggttgcagtgcccactggacagatgtcaaataggcaataagatttgctagccgggaaatcagaaatagagatacatgtgggagttgcctgcatgcacagcaatggtatttacagccctgtaattgactccaaagtctcctgttcaccactgtgcagggtgaatgtggcataggccacccttctatctctaggccttcccctgtctcttcttgctttttgctgttgaaagttgcttttagcttcacaatgcagagggcagtggaagaacagaaaagcaaaacatttcccgagcctgtaattacagtgacaagagtgcttcttgtttgtgtagctctcaacattttaatcattacgtcttcactaaagctaaaatctgagcttagaagtgagtgggttttaaagatgggttctagattcatactgtgttctttaaatgttatgaactgagaatacattgatactgatattataagtatgaaaggtaatataagttacatgaagcaaagtcttcagtgctatggatcatccctctgttttatgtaccactttgcctactttgttgaaacacaagaacaaactaaatgaaaataagaacatatggaaatggctgggcgcagtggctcatgcatgtaatcccagcactttgagaggctgaggcgagtggatcacctgaggtcaggagtttgaaaccagcctggccaacatggtgaaaccccgtccctactaaaaatacagaaatcagccaggcgtggtggcacgtgcctgtaatcccagctgctcgggaggctgaggcaccagaatagcttgaacctgggaggcggaggttgcagtgagccgagatggccccactgcactccaggctgggtgacagagtgagactctgtgtttaaaaaaaaaaaaagaaagaaagaaaatgtggaaatgtgtctttacttccagatagtattcctgtcttggatttgacatttaattttattaaaataattttgatgcatggatgttttacatttttatgggatttatcagttgatcctttgtgatttcttaattttatgctttgaagaatgtttcctctcccaatgtcaagcctctgtaggtttactgctagttttatggctgatttatttattttttcacttataaatccaagcgggctttactatgttggatagagccaagtacagacttctaaattttttgggttttgccatctcaaaataatttgtagccaaaatacaattgaattcttacttattttgaatgattccttgctcattgcagaatagctctccagacccccagctggccatgtggtgagttcagggcccaaatcaagtagtaccagcaatcagggaactcctatctgttttgaatggattcacaccagccacaagcctggaaagatggtgtcacaatctacagtcaggcaggattctcctgtggagccctgggaagggatcagcgatcactctggcattattgatggttcgcccagactcctgaacactgaccatcctccttgcca

SEQ ID NO: 11319 - DNA, 2300 bp, Homo sapien
tcattattcttccatcttgctggtagtatggtggaaattggacatagggtttggtgtcagatacacctgccttcaaagcctaactgtgctacctattagctctgtgaccttgggcaagttatttgaacctaagtcatagatttcccccttgcgaaatgggaacaaatgatttgttattctcagggatgttcacagacttgcttaaaataataagaaaaagtacctggcacatagccgatactcaaaaaatgttagcacacacccacacctttttctttctgattcatttaaggtaagcccttcccaatcggccttcagctgacctgaattcctgggatactgtatttggaattttaaatattccaaatatccagagttcttgcaggtcaaagctggtctatgctccaaacaggctgcccccaagggaagcagggtaattggcagctagtattcatctgacttttgtcatattgattcaatattttatctgaagatggcagcaactagtacatggtgccaccgtttagccactccatgccagaggtaccaggcaagtaaaagccaaattaccagtgcctctgctccatcctggaaatgacaaaggacaaagccaaggaacccaggaaagtgcaacgggatttggttttatgcagcagggaatcttctaagaaagccaggaccggttcacctacgtgtcattaccagtgcaggcagctcagaggtccttccccgggagaagtcagggcaccgcgagagagagcttagcttccttccttcctccatccctccctcccttccttctgggacttaggttccttccttccttccttcctttctacttttctttccttccttccttccttggctttggttccttccttccttctaccttccttccttccttctttccttccttcctgggcttaggttccttccttccttggcttagattccttccttccttcgcccttccttccttcctttctttgctttccttccttccttccttccttggcttaggttccttccttccttccttccttcttccctccctccctcccttgggttccttcctgcctgcctgcctgccttcctccctccctccctccttcccttcttctcctttctgtttttttttttttttttttttgacagtcttgctctgtcgcccaggctggagtgcaatggcgcgatctcggcttactgcaacctccgcctcccgggttgctcctgcttcagcctccctagtagccggcataacaggcacccgccaccacgctcggctaatttttatatttttagtagagacaggctttcaccatgttggccaggctggtctcgaactcctaacctcaagtgatccatccgacttggcctcccaaagtaggtgctgggatcacaggcttgaaccaccgcacccggccagagcttaggtttctattcgtgacaactttctgtattggttggcaggttctcctagcaccaccatgatctcaggactaaccactgcacacccgtgatgggattccaaaccttcgctgcaagaggacaaggtgacgagttgctgacagtgaaggctaaactaacgcggacagtgaagtgctacatgagtcggactcagactccaggtgaagcagccagcagaggtcagagagagacagctcacgttccgggtaagttgcaggtcgatttcagggccgactcatccagattactcattcttcatttcaggcaattgtatgactgctaaatactgctgctgggggcatctggggttgggaagtcatttctgccaggtctttgacccctgaaagcgtcgttgcgtctcgcgccgcgggtaggcagggcgggatttctaggaggaccggcagaggcgcgcataggtgcgtggtgctgggcccgggcgccgcggcaccggtgtaggagcgcgcatctccagagtttcttccatctgggcgacgtctcggtgcctgcggcgggaacggcgctttgcttccctgaggagcttctagagagctacggtggcccccgtgtgggaggcggggggcgtggcggcgtcggggcgtcgctgtcccctcctcggtagctctcctccctcccctttctgctgttaccgggagcgcggtggccacggaacgctgcccggagccgcgcgagggaggacccgacgcgcggcgtttacccagcgcagcgttccaccgctcgggtttggctgggtgaggctggcggggccgggggcgagatgggagcggcgcggggtggagagggtggttggagaaagggaagggagggccgcggga

SEQ ID NO: 11320 - DNA, 2300 bp, Homo sapien
ctccccagaccgcttagataggaatttaggcaagaaaaaaaaatgagtttagtcctcaaaggtaaagagtcccttttagggccacatctctgactatgccaccacaaacccccagctacttaacaccagctggatcagagagtaaaatggcagaactactcttccttctgaataaggagctgcaacaacccaaaagctgggccctgggcacccctaaatggaaagaaaaataaattaagatttatttatttatttgattattttgagacagagtcttgctctgttgctcaggctggagtgtagtggcactatcctggctcactgcaacctctgcctcccgggttcaagcgattctcctgcctcagcctaccaagtagctgggattacaggcatctgccaccatgcccagctaatttttgtattttagtagaggtggagtttcaccatgttggccaggctggtctggaactcctgacctcaagagatccacccacctccacctcccaaagtgcttggattacaggtgtgagccaccatgcctggcaaagatttattaacattcatagagccaggcgtagtggttcatgcctgtaatcccagcactctgggaggccaaggtgggaggattgtttgagcccaggagttcaagaccagcctgagaaacatagggaaaccctcatctctacaaataacttaaaaaatttagctgggtgtggtgctgtttgcctgtagtcccaattattagggaggctgaggtgggaggatcacctgagcctgggaggttgaggctgcagtgagtcatgatcatgccactgcactcaggctgggcaacagagcaagaacctgtctcaaaaaaaaaaaattaaaagcaaaaaggctgggtgtggtggctcacacctgtaatcccagcactttgggagaccaaggcaggcagatcacctgtggtcaggagttcgagaccagcctggccaacatggtgaaaccccatctctactacaaatacaaaaattagctgggtgtggtggtgcatgcctgtaatcctagctagttgggaggctgaggcacaggaattgcttgaacctgggaggtagaggttgcactgagccgagatcatgccactgcactccagcctgggtgacagagtgagactccatctcaaaaataaataaataaaaattaaaaagagaaatgaacaaaaattcaagtgaagaatttccagatgtaggggccctgtcagctgattgctttcacctgggcttttactccaaagaagtattacatcatgataatacatttatattttttacatatatatgtatatataaaatatataaataatatatacatatatacatacaccatacacataaatatttgtggtaaaatataacaaaatgtattatcataaccatttttcagtgtacaattcagtggcattaagtacatttacagcattgtgcaactatcactacaatctctctccagaactttttcatcaaccagacagaaaatctgtgtccatcaagcaataactctgtattccccatcctgccaggccctgccaacttctgttctactttctgtctctatgaatttgtctcttctaggctcctcatgcaagtgggttcacacagatgtgtccttttgcagacagtggctgttaagtcaggcaaggaggaagagaaacagccaagccaaatgcagctttcctcggttctttccttccctggtgcttgtctgggcttctctcccatgcaaaatcatcagtctttcttcctgggacttctatgtggtgaagatgccattaggcaccctctggtagcttataatgcagttcatttcatctcatttccttcctgttttgtacagagactggtttcccctttgctgactgtcagctgagttcaaaactggggtcaaagctctgctcacagcacaaatcacttcttgtgaagcctggctgggttttggcaggcagctgctaggctttcggtcttttatgaggctatcctggccacaatggagctttgtgtgtgatcaatgggtgctgggcatgagcccggctgggctagctgacacagtgagttgtccctgacactcatgactttcaagccctgtgtcttggagggcactgtgatctggaagttcaccttccccatgaaaaaacccaaaccagcctctccttttcctgcatggtgatccgtctgtaatgatcagtgacattctcagaattaaccaatcaggaaattcttggaaagtccacgcctcagcatttagtgcttgggaaattctacttccag

SEQ ID NO: 11321 - DNA, 2300 bp, Homo sapien
gtacctcctgtggcaatccaagggcaatcctgggtaggggcgtcaccagcctcagaagtcaccagctggcaaagcagcaccgaaaattcctgtgtcactagtctactttcttagtttaagatactgggagaagacatagttctttgctccgctgatactaataaaaaaataccttttgaatattaagcctccttcttacttgtgcctcccccaacaatttgctctataaattcagacaaatgtcttagcatcatcaatgcatttttcattagctcaacctatttctcagttccttcacgatctgccatattttttcaaggtgacctactaccgtataaattctatttaagcaacacttgagcaggacacaatgcttttctaagtaagtattcattgacaaagtgtattttctaacataagtaattctctaaaggtcaccatatattgaactagaattcttagtatctgatgtacttaacctaaattttatattaacttaaacatttgtgtcaaacacaaaaaatatcccaggcatgaaaaaagtacattgcacagagaatgaattgaatcaataaggacaaatttgaaaagtgttagggaaatgaatagaaggtcaaaagtcaaatattctttcgaatatatgcaaacagtcttagtgccaagactgaaaattagtttttatgattacagaagctgtagatacgccctgacatttgcaaaaaatatgctatagtagtgggccaggagaggtagtctagaaactgattgatttggagaacatataaaataatcagcttaaaatgtattattattgttttcttaccatagccagttctgtgaatcaggaatgaatctaggaatgctgtattctgaaagcatgtggtgattttatggttcaagtaaaacaataacaaaaatattaaaataaataccacacacttgttacaaaaggaatgaacactgaaaagaagtcaaatatgattcggttttaaatctcttagatatattagtgtatcttgacatcacaaatgtatttaataaatatacttccaatttgatgtcaatttgaattaagtgattacataataacataattattaacttgtaaagagcttctcttttgccagacactattctattttgtttactccttacaactcactgagaaagttattttttttgtcattttacaacggaggaatgtgagattataaatgaatttcccaagatcacactattcctgacttgataccagttatatcttagtccaaaataaaaataaaagctgtaatttgttttaaaaatttgtgtaaagaatattatgttatttatcatctatttatctctatcagctgtatttcttataacatcccaattgctagatatcatgacactgcaagtcattcaatcccttctcagaattaacgagatttaatagtgctgagtatattaagtatattttgactgtaaatgaaatgtttaatgactgatattcaagtataaaggcatcaatcatctggcaggcaccatttttaagagaaaaataatgcattttaaattcatgatgaaagaaggaattcctaatttggactcaaaataagatcaaaagtccaacgactagcactggttctgctaatagccagctcaatggctccttgtataaagatacctgatattttaggtctcactcatctccatatttcttcaaacagtattttaaaaggacttatgatgtgccaaaaacaaaagccgagctcggaataaagtgatataacagagtcatcaaacatacagactacttttccaggcattggactgcacgaaataacttagcaactgggtgcagaaactataatagagaagtggttggaagtctcagttcgtagacacagaagaaattccagatccataaaatgagaaaggataagcaaaggggaatgagaaccagctgccaatgtgatagaatttaaaccaaggtaagatatcgcgagagggcgggcccgctaggcttggcgtcgctcccgagctggagctcttgccggcgtctcccctcggccagcggctgaagtgctggcggttaagggcccgtgagcagccgccactccttcggcgttggctcttgcgccggggtcgttgtttcgtgacaaccactcaggtagccgtttctgagacggcagatgcggccgctttagccctgagcgggctccgcggctccctggacggtctctgccagtgcccgactcttctcttccggactccacgccaagcagcgaccctgagccaacagccagagcgcccag

SEQ ID NO: 11322 - DNA, 2300 bp, Homo sapien
cactcattatatacaaagtactcccctcgattctgaggcatggggagagagttgcaaagatgaataggtccctatttcatggaatttacagtttagtaatctgtagatgggtaaacaaaccacaatgagtaggtcaatctaacagagggactgatcatttgttaaaaagcaaatcgtgggctcatatgcaatccattattttctttaaagaagaattagtggtcttttaaaaaaatatgtatgcttcctatgatgcatcacaacgactcttagtctgaactaaatttgcagtcagccagaagatgtcccaaatcatgtcctgactgctgatcacacagactaccacctggtttcagctgaagattcttttaattggatttttttctgtgtttctgtttttcactggattttgtttttctctgttcctctccctggaggaaagtggaaatttggttacttttttgtgatggaagtatactttcatttattattattgtcgttattattatgaattttgaagccggacttttaaaagcctggaaggctgcggcgaatggcatgtgagaggggaggtttgcgggaggataccagcaggtggcgcgtgtctcctccgggcagattagaatgctttgctcagggccaagaatcccgcaggaattaagggcaactatctgtgcagtcaattcaagtgacacagatcatgccatacttaagtgccgagtccatgaagtcaccagttccagcctgttgtctaggccatcaaacttatgtattaccacttaaaaaaccagctcccctactccaagggttgcattactttcgtgcttgacaccccgacaaccccgcacccaccccccgactcattttccccaagccaagtcgctcataggggacaatcaagccttaagaatagagcaaaaataaaggccctggaaagttggacatgaagctttaacttcaggaaaggaatggtattctattaatcgtccagctggtctgcccttagggtgtcagatgttctctgtcgcccctggtgtgccagcattggcctgggtgccactgggtggctgatggcagaatgtgaattcacttgcaagcggacatgttcgtttccatgccccaaagcgggaagaagaagggcacaaggagacttcgatggttctttcagctcagactcgagctgtgactgatttgctgtttggggtcactggctttctagcctctcctggcaccacccaatttcggggagcagccagctcatctttctcctacgacaatgtcttctgtcccccataaacactgccctcattttgagtttttctttcctatgtctgtagctttcttctgccgctcagcaaacactctgtcccactcgtattcgtcccttggcgctggcgtctggcccaggggtacactgtgaaggagggcaaccctagattctgagggccctagctcgaatctagcgcccctctaactgcaggggtgaccttagatacatttattaacttcctctgtagactcaggggaacaactttggcactcctggggtccctggattaatgaggtaacttacgtagactccctaaacaagcgtctggttcattgtaagcgcccaaatgccagggggcatctgcagggatgaccccatagtgaatgaaaactgcctcttggggatctctgggttaaacggccagaataaatcgcagaattgagagaaccctctcctgccccaaacctcactgtactgtaaatcccattcattgcctcccgccgttttatccgtgttctcagaccacccccctatccccgcaacctccagtcccctaaagcctcctgggcggcaaaaggacgcccagagagaggttcggcgcctcagttgccccggagcagacgtccagccccgccgtgtacccgattgcggggcggatcgcggcaaggcggcggcggccggcagaataggcgcggaggaaggctcaggcggggcagactgcgtgggggaaggaggaggagagagcagacggcggaggagggcagagcagccggggggagggcgcaggggcgggaggagacacatgcgcgctgccgccgccgccgccgccgccgcagtccttagcttcccggggacaggaaaccttcaagaccgagctgccacggccgcctccccgcccgccccccattctacgcgcctgcccacaccctcctcccctccttccagcgcctttcggtggagcactgcggcactcagcccgagctgccgttttcccctcgcggggaacgctgtgacccccccgcaggagcgg

SEQ ID NO: 11323 - DNA, 2300 bp, Homo sapien
taaaatttaaaagtcaaagatggatactctaatcatctccattttataggtgagaaaaccaagactcagagagtttaagtaacttgccattggtcacatagctgatgtgtgtgtagtactacttcctacggtacatagtagaactaatctcattctgaagacttagataaaattctttttttttttttttttttgacatggagtctcgctctgtctcccaggctggatggagtgcagtggcgtgatcttggctcaccgcaacctccgcctcctgggttcaaggggttctcctgcctcagcctcccgagtagctgggattacaggcacctgccaccatgcccggctaattctttaaatccattcttggaaagaaaatattgatatgatagatatattagttaggaaaactctagctgccgtaacatagattcccaaatctctgtggctcaacacaatccaaattaagttcaaatggagttagtgattggcagacaactcccctctgagtattgatttaaggacccaagctcctttcataccatgactccatcatctttaacacaggccttccaaaactttcatgtccatctgttttaagccagaagaagagcgtggaggtttgctcgtgggaggtttttatggactgggtctggaaggagtgcccatcactgataagctagacttcatcccatggccacatcgcactgcacatgagggtgggaaatgtagttgaggtgtgtgttcaagaagctacttgactttggcccagtcaggtgaccttgattccctcacctgtacatgagatgattagattaggtaataccaaaggtccagtgtagcttgaaaattctgtggctctttaataatcatcaaatgaccactaaacactgtcttgtgtgccttcaagatccttgtaatacgtttcatatcttggttggaagccctcattgggtaacattaaggcgattttttgattgcccctgtttccccatgacttttaaggaaaatacaagcatttagttttactcatttgtggcagagactgtttcacagtgtataaatagtgcagaactggattaatatacagatcttctcataaatagttggaatttgctcttattcatgataggagagctgtttaagttcactcaaaccttagtgttggctttcacttcttacacttcggtttttaagtttagcatttctgtttacctgagattatcatgggaaccatatgttgtctaaaaacatagctgtatgctttatatacaaatataactgccactttattaattcatataaagttagtaatattatacactgtaggaggtagtattttaggcaaatttttcaaataaaagaattatgtaatttgttactagtgggtgttccccctctcgtctagatgtgggtattgcattggctcagagtgtttaaagggtggcccagtatggttctttttcatcttcagaacagttggaagagttctgcagggtgttccttttgctcccccacctcccctggaacacattctaggtggaagtgccacatctgggcatgctgtcacctctgtgtggcccttcttgtagacacttcttttgctgttatgatttggggctcttgcctagttcccctcccacattcttccttgagattatttgctgtttaaggacaggagtcagatttggctgattttttaatccctaaaatgtttagcataatacctgccatttagtagctgctcaatatttgttggattttaaatatgaaatacatagtaacatattactgagggcaaaaaagcctcttttatactttcttttctccattccttaaaaaagtaagagaaaatctaatttttctcatagggaactgagcccagagaggccttgactttttaagctcagtttggggctttctggggttattttatttttatcttttcctccctgcagggaagagaaaacttgggtttttcatataccttcttcatagggaacacagaagacttgaagtgattagatcatatttgaagatcagctgtgttttgctcttctgttcatgaaatcatgctttccatctctctatattttcctaataggggaatttcatcaggaatttcaaccggagccttcccttttgggtgacagcaccaactcaggagaagaaagagaccagtttactgatagagcagatggtctccattcggaatttatgaactataaggcaagattttcaggatcaactacgtttttttacttatttccttctgtttggcaccgtacaatttaagttgaagg

SEQ ID NO: 11324 - DNA, 2300 bp, Homo sapien
aagtagtatatttcctttcacaggccatattatacaaaaacaatgcatatctggttagaaatataacaacagatttaattcaaaataatatcaaaaatataaaatacgaaaatagatatataaaagggaaactaaaattttgttatcataaacgaagactttaataaatgggaaaatgctgtgtttctagatggataaaatgaatcttacgacaaggtcatgtctccaaattactctacgtgttactgtaattctattcaaaatcccaatggttggctttttaaccacatgcaagtatataaaataaaatgtaacaagttaaaaagaaacataagaaaattccagtggaggttggatagataggaaaaatgtgatggaaagcatattagaaaacattttcagttcaagatagtaagttgagcacaagcatctgcctccccactcctgtgtaaagagaatttaaaaagtgctgatagtgagagagggtcatcagggaagggatcacaacacatttctgaaagataaaaagaggatataagtcctttttgacaggtaaaccagagtaaggaaacatatgttcagagtacataagaaacttcatcaacaaagaaagttagtgtatcttaccttggcagctgaatactccagcttggaaggtcattttttacctcattggccagaacgagtcgcagggccccattcaagggcaagaggagcaggaagtataatcctatcatgtgctccaaaaggcagagagctcacaacatttggtgaacagttcccatgcaaatggacttgcagattcatctgaaagtgtgttattaaacatgggccattactacagagcagatgaaaccacaagattgtttcttgataggtggctgcaatattaaaggtgaagatgagagctgggactttggcactggtgctggattttatgttgatgccactgaagatccttggaaaaccaactacagaatgtactcttatgtcacagaggaggtaatttaatttgtattgtaattattaattgatgactgccaagagtttgattttgaacacaaagtccttacaatcctgaggattttaaactagggtataaaagttactagtaaaaattccaaagtttgctagtactatagttctatttactgcaatttaaattaacactaagtacaattaaagaatataatcattatattgagacctgtttatactacccagaataaccaagaaaatggtatatgaaaaaaacctttaatttgcctggcagctggttcatttggatgtattttatagtgataagccaaggcttagttagaaaacataagtggtaaagcattacctctattaataatatttgtatgctgcttatgcattttctgaattttatatgattttcattgttactatgtatatcataaaaacttagaaacaatagtgtaagtttttaattacccataattctgttacccccccaaaacacttatgttttggtatgttccagactgtttctatgactagttttcacgtaattctaaacttttttattttcttcttctttttaagttacatataaaaatattttctagtgttattctgattttaataattgtgtaatattctgtcatatgccataattgactttttcctcttatagaatacttatggttttgtatatgtttttaccctaataaatattactgcattgattatatttgtgcataatgttttctccctaaggacttttccttagaatatattccaaaaagtgaaattactaggtcaaaacttaaaagcattttaaaggttctttctgcatcaccttcctaaagtgttttctaagaagtctgtaccatatattttccagggatatattaataatcatggtctgcctgaggatttagttttgttttgttttcattgttactagttcaaaccattgtaagactatgatttggcagtattgattgtgtaattattttctgtaactttgaaatgtctgaacttattttctttgatatcttttgtcacactattaaattttttctagcttccccaactcataaatgccaattttccagtggatccccaaaggatgtctatttttggccactccatgggaggtcatggagctctgatctgtgctttgaaaaatcctggaaaatacaaagtaagattatctaaacttctagtgataaatatttctcttgaataacataatattaggaaccttcaaagagtaaaattacaatattgttagtattggaactaaacttttctagtgttgagaactttgg

SEQ ID NO: 11325 - DNA, 2300 bp, Homo sapien
atatttgatacccaagagattatattattttctatgtatggtgtcttttctagtctctctaaaactatctttgctatggattgaatgtttgtgttccccagaattcaaacattgaaccctaaatccttaacgtgatggtatttggagatggagactttggaagataattacaccatgatggtggagtccatgtgaatgggactagtgcccttacaataagatgaaggaaccagagctctcctcaccccacccaccaagtgagactacagcaagaaggtattcctctgcaaacgaggaaaagggctctcagcaggaacagatttcatcagcaccttgatcttggacttcccagacttttagaatggtgaggaataaatttctgttaagctggaactgactaaaacaatctcttttcttacaggcttcaagtatatttgactttttctcatttttattgcatccctttattgcctccttaagattatattcctactcattttagttcaaaccaagagtcctatatcctctcagccacacatttacacataatttttggactatttctttgtgtacttaatattcatccatttttattggtagtgccattttttaaaatgtcaaccttaatttctgatttcagccttctttgcttccatgtccaaataataatgataattatatatattcttaatatttttaagcaatcgacttttgtggatctattaacattttatttatgctgggtaaaagaaattttagttctgcttattctcacattgtattcacacaagaaccctttagtaaagaacttcacacttacagttctttggctagtctgcacctcacagcagtccacttattaggcaaatatatcatttaatcaattatttctctttgttcaaacatcagttataaagaacttgcaatttaggtatttattctgtttcagttttgaaactgaagaaaatccccttttcaatgatttatacttaaagatagtaaaaagaaagtttaaaacaatttacttcaatgctttctcaaaataaaaacattattttgatgaaacattattttcagtctaagttccaattgatccacaggttcagtccacaggttaatttagtccaaagatcactatggcaaaatgggcctgagccacacaatagattctggcaggtaatctcttgtgtggcagctcatccatacttaagtcagctcccatagctacacaatttgcagggcccaattccagacacaaacgtggggccctggttcaacacttactgagagaaaatgtagcgtccttctgttctgggggccgggtaatagcacaggttgcaggcccatgaggccagccccaactatcagattgtgtatttacaatgtcagtctaaccgttgctgaaaaatacttagctctgttgtaatcagatttaatttctcaagaggcaaagtacactcaacagtttgcttaaatcagagagaccaaaaggaaagatttgctgtaaattatcaactagcaaatcttagtcagttcaacttaatttttattgagggaagaagggagaaaacagaaaactgatggagttcccactgcgtgtcggccactggagatttcaaaggtttcttgtttaactcaagctaccaagtaggtgacgtggatagtcttgggacagaggagttgagggagttgaaattaggccctagtttctacataagtgacacggaaaccctctgcacgagttaagcgaagctacatctcaagtttattaatgcctcgggttcttgctgctggctctgggaagagtctgagcacgcacagcagactgatccccgacaaggtgacagggactaacctaacgccctcctcgttggtcctagtaaccacacagagcagaaacgcgggcgaaggcaggagttggagggggcgcccacgcggaggctgccgggaagtgcaatgtgcaaaggcggcggggccatggagactgaactggagaagagcgggttctcggagttaaaagcgagagtgagtgggaccggaggggcggggcatcatatgggcggggctgaggcgaggccccggcggccatcttgagccccgccttttacttcggcccgcttcttctggtcactccgccaccgtaggtaagactgggttcgggtagaggcctggacgttgtcagccttcctgcggctgcggcacggctaggcgtgatcggggcggacgccgagtcctgcggtgcaggtatccgcaggcacgagcgcagagacggcgaccctgggccttgggcgccaccatcc

SEQ ID NO: 11326 - DNA, 2300 bp, Homo sapien
tctggccccaaatgtcaacagtgccgaggttgagaaaccctgttctagtctgtggaaaagccacaaggacacttctcaagtagcatatttgatacccaagagattatattattttctatgtatggtgtcttttctagtctctctaaaactatctttgctatggattgaatgtttgtgttccccagaattcaaacattgaaccctaaatccttaacgtgatggtatttggagatggagactttggaagataattacaccatgatggtggagtccatgtgaatgggactagtgcccttacaataagatgaaggaaccagagctctcctcaccccacccaccaagtgagactacagcaagaaggtattcctctgcaaacgaggaaaagggctctcagcaggaacagatttcatcagcaccttgatcttggacttcccagacttttagaatggtgaggaataaatttctgttaagctggaactgactaaaacaatctcttttcttacaggcttcaagtatatttgactttttctcatttttattgcatccctttattgcctccttaagattatattcctactcattttagttcaaaccaagagtcctatatcctctcagccacacatttacacataatttttggactatttctttgtgtacttaatattcatccatttttattggtagtgccattttttaaaatgtcaaccttaatttctgatttcagccttctttgcttccatgtccaaataataatgataattatatatattcttaatatttttaagcaatcgacttttgtggatctattaacattttatttatgctgggtaaaagaaattttagttctgcttattctcacattgtattcacacaagaaccctttagtaaagaacttcacacttacagttctttggctagtctgcacctcacagcagtccacttattaggcaaatatatcatttaatcaattatttctctttgttcaaacatcagttataaagaacttgcaatttaggtatttattctgtttcagttttgaaactgaagaaaatccccttttcaatgatttatacttaaagatagtaaaaagaaagtttaaaacaatttacttcaatgctttctcaaaataaaaacattattttgatgaaacattattttcagtctaagttccaattgatccacaggttcagtccacaggttaatttagtccaaagatcactatggcaaaatgggcctgagccacacaatagattctggcaggtaatctcttgtgtggcagctcatccatacttaagtcagctcccatagctacacaatttgcagggcccaattccagacacaaacgtggggccctggttcaacacttactgagagaaaatgtagcgtccttctgttctgggggccgggtaatagcacaggttgcaggcccatgaggccagccccaactatcagattgtgtatttacaatgtcagtctaaccgttgctgaaaaatacttagctctgttgtaatcagatttaatttctcaagaggcaaagtacactcaacagtttgcttaaatcagagagaccaaaaggaaagatttgctgtaaattatcaactagcaaatcttagtcagttcaacttaatttttattgagggaagaagggagaaaacagaaaactgatggagttcccactgcgtgtcggccactggagatttcaaaggtttcttgtttaactcaagctaccaagtaggtgacgtggatagtcttgggacagaggagttgagggagttgaaattaggccctagtttctacataagtgacacggaaaccctctgcacgagttaagcgaagctacatctcaagtttattaatgcctcgggttcttgctgctggctctgggaagagtctgagcacgcacagcagactgatccccgacaaggtgacagggactaacctaacgccctcctcgttggtcctagtaaccacacagagcagaaacgcgggcgaaggcaggagttggagggggcgcccacgcggaggctgccgggaagtgcaatgtgcaaaggcggcggggccatggagactgaactggagaagagcgggttctcggagttaaaagcgagagtgagtgggaccggaggggcggggcatcatatgggcggggctgaggcgaggccccggcggccatcttgagccccgccttttacttcggcccgcttcttctggtcactccgccaccgtaggtaagactgggttcgggtagaggcctggacgttgtcagccttcctgcggctgcggcacggctaggcgtgatc

SEQ ID NO: 11327 - DNA, 2300 bp, Homo sapien
cccaggaaataggtggctagatctcgaccacagggtgccagctgcaggctgcaggagaggacatgtgagaaacacgcatacagaggtagcaccggagacgaagtgggatctggcagcgagaatgaaggaagagtcgcggataacagcagctgtctgaagaggtggtgattccatcatgcaagccaatgggtaggaacaagcactgagagccgggcagggggatgcggagtgagggaagatgctgaggtcaaggtctcccaggctaccatggaaggagccaatgggcagctagagatttaggtctggaactgagagaaataatcagctatgaaggtacagacttggccacaaacatattgaaggcatgagagtggttgaatttgtccagggagaatgtgaagaacagaaggtgatagaactgtagcaaaacccaactattgaggaaaatattttcatgcctgcaaaaagagagagatcgaactgcctcctttagaaacctacttgggaaagggctttctttacaagtaaggcaagttgtcattactggtgggggaaaaaaattggtactgcgaaaccaacttatttcctaccacatgtgaggttttgaataatatctgggtggcatatttctgctgaagaaaataagccagttcaatggtgtatctattaaataaaaatagtgctaatagtttatcagagttatcaccacagacgtgcctagccaccctgagcctatgtggccaatgtcagtaattccactctggacacaaacactgttggctttggatggaagtgccggacactcacagcactccgaggacatactgttttctagccttatttatgttctctcttcacccttcagcctaaaaaattaccacagtgccacttacctaccttaatgggaatctgcacaaaaggccatttctccagtttctctcaaaagcaaaggaaaacttcccaatattaatatgtagcaaaaagagggagaagaaaaagcctgtttggtccgccctcctggctgttgctaccttgcagcttatgacatacacatagagggaggtctgatgaaatgaacgagacagtcagagagctactccattcccgtggaaaccaggagtcccttggtgcagacagctcttcctactttcccatgcagttcttttgtgcgactttgaggggctcgtgaatgatttctaaatgtgtgcctgctgaggcgagccgcacagggagggaggaacccagccgagccgtgccagaggaagccaacaggatcctagcagtgcgggagctggctcagctcttgcatgcagtttttgaagtcagcaaaacagaaaccaaattactatcatattatgctggtggaagatcaagaagaggggactctacaccagtttaattactgtgagagatgcagcgagtcacagaataacaaatgtatctcatgtgtggaccctgaagacaaatgtaagttctcatgccgctatattttattgctgtgtaattttctttccggtttgaaatcatgcttggccaacatgtaatcatttcaatgagaatttccagggaggaaagttgtctgctaatctttacttaagacttttttgttttccttttattagctaagcaacattataggagctgaaattcctgacagcagctgtggcaattcagcttaagaatggctgagaactgtaacccaaagtacatccaattactatgggattaacactggatgtatttttaattgactttcttaatgtagaatgtgtacatccccactgtttctgattgcatgctattttaataatactgttgctaaactagtaccatcggcataaccaacaaaatgagatatagttaaacaagagtcccagtagttataaaacttttcttctttgtccaggacatttatcttcccgagcgctcaaaaaaaaccctgcaacctctatgctaaaagttcattctgcttttttgtcctcggtttggtgagaaaataataaaaccaaacagtggactctcctaaaattgtgaatgaagaaaacttacagccaccacagttcagttctttaactatcattgtaataatggaagacaaaaatccagccccgggagaacagcatgtacaccagcctcagtgttacagagtgtgggtacatcaaggtgaatggtgagcagaaactataacctgttagtccttctacacctcatctgctacaagttctggcttagacatggatattctttgtgaagaaaatacttctttgagctcaactacgaactccctaatgcaattaaat

SEQ ID NO: 11328 - DNA, 2300 bp, Homo sapien
tagtaagaataatagcaactaacctttattgagtgcttaaaatgtgccaggcaaatatgtaaatttatttggctttcacgtcaatcctgaggtctttttattattaatgttccctacttgcggatgaggagactaaaacacagagattaggtagcttaatcacgcttacagatgtggtgagtggtaggcctgggatccagagctgctctggaactaagcacgaatttgccagatggacacacacaaaaaaggaatggtaagagcactccgggcacagggaagtacaagtacagagacataaaaatggtcagaaacatgtaagttcagtctgcatacaggctgactgggagagtaaccagagtccaggcctgcaaagtggggcaagcagggtacaggtagatgaagaaaagtgttatgtgccccacaaggaagggactgcaggagtgtaggcatgggagtgatgccaattgtgtcattaatatcagtaagaatatcaataggaatgaaagtggctgacattacttgagaacctcctataagccagacatgggccaaatacttacacacattatctcagtttagcttcactacaatcttatgaggaaggtattatcccattttacaagtgagaagactgagctttaaagggagcaactagatgaggcgaggttctactgtttatgagtgatagagctaggatccaaaaccaaggaactctaaggtctgtgttctccgctgcctgctcgccagcgtgcatatttaacgtggaggggtaggagggtggcaggcatggcagtgaggggggcactaaggcacccacccaggaaataggtggctagatctcgaccacagggtgccagctgcaggctgcaggagaggacatgtgagaaacacgcatacagaggtagcaccggagacgaagtgggatctggcagcgagaatgaaggaagagtcgcggataacagcagctgtctgaagaggtggtgattccatcatgcaagccaatgggtaggaacaagcactgagagccgggcagggggatgcggagtgagggaagatgctgaggtcaaggtctcccaggctaccatggaaggagccaatgggcagctagagatttaggtctggaactgagagaaataatcagctatgaaggtacagacttggccacaaacatattgaaggcatgagagtggttgaatttgtccagggagaatgtgaagaacagaaggtgatagaactgtagcaaaacccaactattgaggaaaatattttcatgcctgcaaaaagagagagatcgaactgcctcctttagaaacctacttgggaaagggctttctttacaagtaaggcaagttgtcattactggtgggggaaaaaaattggtactgcgaaaccaacttatttcctaccacatgtgaggttttgaataatatctgggtggcatatttctgctgaagaaaataagccagttcaatggtgtatctattaaataaaaatagtgctaatagtttatcagagttatcaccacagacgtgcctagccaccctgagcctatgtggccaatgtcagtaattccactctggacacaaacactgttggctttggatggaagtgccggacactcacagcactccgaggacatactgttttctagccttatttatgttctctcttcacccttcagcctaaaaaattaccacagtgccacttacctaccttaatgggaatctgcacaaaaggccatttctccagtttctctcaaaagcaaaggaaaacttcccaatattaatatgtagcaaaaagagggagaagaaaaagcctgtttggtccgccctcctggctgttgctaccttgcagcttatgacatacacatagagggaggtctgatgaaatgaacgagacagtcagagagctactccattcccgtggaaaccaggagtcccttggtgcagacagctcttcctactttcccatgcagttcttttgtgcgactttgaggggctcgtgaatgatttctaaatgtgtgcctgctgaggcgagccgcacagggagggaggaacccagccgagccgtgccagaggaagccaacaggatcctagcagtgcgggagctggctcagctcttgcatgcagtttttgaagtcagcaaaacagaaaccaaattactatcatattatgctggtggaagatcaagaagaggggactctacaccagtttaattactgtgagagatgcagcgagtcacagaataacaaatgtatctcatgtgtggaccctgaagacaaatgtaagttctcatgc

SEQ ID NO: 11329 - DNA, 2300 bp, Homo sapien
aaaaaatacaaaaattagccaggcatggtggtgtgtgcctgtaatcccagctactccagaggctgaggtaggagaattgcttgaacccgggaggtggaagttgcactgaaccgagattgtgccattgcactccatcctggtgacagagcgagactgcatctcaaaaaaaaaaaaaaaaaaaagaaacccaaaaagcaaaaaccaaaaaaccatcagctcccacaagacttattcactgtcacgagaacagcacaggaaagacccacctccgtgattcaattacctcccaccaggttcctcccacaacacatgagaattgtgggaacacagtcaaaccatatcaccaactaaacactaacatctattaatgtcttcaataggagttgattgaccaccagttgagagcctgcagttcatcagttgagagtgacaattccagagtgaccagctgagcatgtaatatgaaggaaactggagaaaagcctcaactactttatgattattcctatgatttgttcttaaagcagagaagcatctttttatttgtttttgatatccttgtttgatgaaaccagcatcgttttagaaaaaatatctttgttttagtaaaaatgacacatactcattgaaaaaataaaccccttcaaaactggaatgatacaagaaagtgcagacaagtaaagatcacctgcagtgccagaacccagaaataactaatgttaacagttttgtaaacaatcttctggtcgtctctaaatatgagcatatgtggatagatatgaatacacttttatataaataggatcataaacataatgttctataatctgcatttcttcaaataaggatctttccatggcatcaaatataggactacataatttttaatagctgcacatacaagagaatgtgtatatcatggtttatttaacctagccttgcaattattgacatttggtttatatgtctttaacattataaataataggtgaacactctggtgcatatgtctttcagcacatgggtaatttctccttagggtaaaaacctgtaagtggaatagctgtgtaaaagcatgaaccgctttccagaaagtctcttttggttactcttccattcataatgcacaataatatttccatacttgataacattgtattgctaattccaatgggcaaaaaccatgtcctgtttaatgttgattgagctttcatctgttgactgggcatttgtggaagtgtatgtgtgtgtgtgtttgtgtgtgtcagcgtgtgacttccttttcatgttctttttttttttttttttttttttgcgacggagtctcgctctgtcgcccaggctggagtgcagtggtgcgatctcggctcactgcaagctccgcctcctgggttcacgccattctcctgcctcagcctcctgagtagctgggactacaggcacccgccccgctaattttttgtatttttagtagagacagggtttcaccgtgttagccaggatggtctcgatcacctgacctcgtgatccgcctgcctcagcctcccaaagtgctgggattacaggcgtgagccaccgcgcccagcccttttcatgttctttgactgtttttctattgactgttcattcttcctagtattaataactttttgtatatttgagattaaccatttttgcctattatgtattttatatatatgtcatatgtcattttaaatataatgaaatgtattagtctttgtggtttctagttttcatgatatgttttgaaaggcttaattgttttgttacaaagtctgaacttgagttatgaatgcaaatttcccctctcaaatgcctaatctgtttcccaaacaccatttacttatcccttaagggatttacttttccctatttgatctatttcccaccaattttaaaatgtcatctttatcatatactaacttcctgtatgttcttgcgtgtatatgaaactggcacatacagggagactctttatttaacttttacttaaagtaggaggtaggaaagagatctgttgaaaccatgacagagagtgttgcagcgcctgtcaaagttatccttgcttatttgtagaaaaattgaactttccattttcctaactttcaacttgcaattgaatgacactgattctactaggaaaaaagtaaaagctatactatttgatgccagatgtatgactgtgggctgatgaggaagaactggaaacaaatgacaggtgattcactgctttgtgtctggtgtgccatgactctcttgaaggggggcagtgttgatct

SEQ ID NO: 11330 - DNA, 2300 bp, Homo sapien
tttggccagcagaggccactttcaggcttgctcctgtggcctcttttttttttttttttaaataaatgaaaaattataaataaaattataatttaacttacaatattgaaacaaatacagactttcaggaggttgttaaattaatagtcttgcatgcccttcacccagtgatgacattttttttttgagacggggtcttgctctgtcacccaggctggagtgcagtggcacgatctcagctcactgcaagctccgcctcccaggttcatgccgttctcctgcctcagcctcccaagcagctgggactacaggtgcccgccaccacgcccggctaattttttgtatttttagtagagacggggtttcaccgtgttagccaggatggtctcgatctcctggccttgtgatccgcccgccttggcctcccaaagtgctgggattacaggcttgagccaccacgcctggcccaatgatgacatcttatttagctgtatatacccaaacagttagttgacattggttcattattgttagctagactaaatattttacttagttttcaacattttttttaacattttaaacctgcagttatttgtgtgtatatgtataattttatttaatttattccatacatagatttgagtagccactaccacaatcaagatacagactgttccatcaacacaggagacctctttgcattcacattgtctaccaattctttcctaccctgtccctgtgccctgaaaatcactagtctattcttcatcctctatagttttttttttattttgagaatgttatataaatgcaatcatataatatataaccttttaaggttgacctttttactatacataatgcctttgaggtctatccaggttgttgcatctttttctttttcattgctgagtagcattccactgtatagaagtacctgatttcattcaaccgtttacactttgaagggtatttgggttatttccggtagttttctattaccaacaagctgctacaaacatttgcaaggtttgtgtgactgtaagtcctccctttgtccttttgatatgcccatatttttatttgagcaagccttttacattttgtgcaacaagatattccaggattatcttcagttttccttgtcacagttcggcaatccaccttttctccaaaggaccctggcttctttttgtggaaaacaatatttattaataggtaccaagatagacatactacttaatgcatattgctaatcttgtgtcattgcttccaggccttttcaacaaacagaaccaagaagtatgtgtgtgtgtatgtgtatgtatatgtttgtacacgtacataaaaacacacctatatttatgtctgtttttttttttgtttgtttgttttgggacagagtctcgttctgttgcctaggctggagtgcagtggcgtgatctcagctcactgcaacctccgcctcccgggttcaggcgattctcctgtctcggccccccgagtagctgggattacaggcacgtgccaccatgcctggctacttttttgtatttttagtagagatggtgtttctccatgttagccaggctggtctcaaactcttgacctcaggtgatccgcctgcttcagcctcccaaagtgctgggattacaggcgtgagccactgcacctggccttctatctgtgtttttaaaaatctccaaatttatactgataactctaattccacttgagttcttcaaggttcattctagctttaccactttctatgtttataattttcttattcaacatttacataaatggtttttattagcttcaatatagttattcctttcgttaccaaaacaccaggggtttggtcaaggtcctgctgcgcagacagccaatcactgagaagtattgccaaagaagaagggtttaattgggtgctgcagctgaggagataggatctcagtctcaaatctatctccctgactgactaaaaccaggggtttatatggcagggaagaaacgtaacaatgtgtaagaaaacaagaactagggaggggcaaggaagcagtcatgatgaatacgtggtaagagtctcattgtctggatgtggtgatctggtgagttgcagttcttcgatacatttttttgagaggtcccaaggtcccttcctgaggaaaaactcctaagttttaagctttaagaccagaaaggtcaatttctgtgtttatccaaaagaacagtctatgggactgttgggtcagtttcagtcttccctttctatttatcagttcctcaatcat

SEQ ID NO: 11331 - DNA, 2300 bp, Homo sapien
cactgcggttatttggaagaatgtccttattcttaaagacatatgctgaaatatctattttcaacgaaggtacactaggctaaagataccaagaaattggaggagggtcagagaacttaaacaaatgtttaaaacaggccgggtgcggtggctcaagcttgtaatcccagcactttaggaggccgaggcgggaggatcacgaggtcaggagatcgagaccgtcctggctaacacggtgaaaccccgtctttactaaaaatacaaaaaattagccggacgtggtggcaggcgcctgcagtcccagctactagggaggctgaggcaggagaatggcatgaacccgggaggcggagcttgcagtgagccaagatcgcgccactgcactccagcctgggcgacagagcaagactccgtctcaaggaaaaaaaaaaaaaaatgtggaaaacaaattgctaaattaaatgtgtgaccttgaacgagtttcttaagactccgtacttctatgtcctcatctacaaaagcaaagggttggactaaggtccttccaaactctagagctgcatttcttaataccagggtagaagacagcaactgttataaagaaaataatattggaaatttccataaggagaaatgaaggcttttaaatgaacttccaaaaagataaagattttgactagaatgaaaacgtatttgtcactaaattccccattttctaaaaactaaatagcactcttctaagattcataagaaggaagttcaaggtcaaaaagtcacttctatcgggaagcaaactcacagaactcactacccctaggctgaaagtatgaacaacttcaataaaaatgaaaaaaaaaaaaaaaggtaggggcgggagggccctaaatcaattcatactatgacatgtatgaagagttacttcagaaaaaaacccaaaactctggaattgacttaggacaccaataatgcccttccacagttttttgttgtcaaagttggaaggaagatgtttgttttcgaagttgtggagccaactcaagtacacggctttagaaccagacacctctgggattaaatctcagctttgatcttacctcctatatgacctagtccaaattacttgttctcttaaccataatatgttcaacaatgatgcaggtgttgaatgacttcctcacagttgctgaaaaacctgagaaactacacgtaaagcgcttagcacattacctggcacacatcaaatattcaaaacaaggccagtaactattatgctatagcctatccagaaataaggctatacaaaagattattttcttacctctccaactggttaggtagaaaacataatcttattactgctattaacaagtagaacagtatacaactacttggaggagaggggaaacttccctaccttgccccacaaaaggcaagtcagtaagcaccgctggtcctctgacattcccacctatgacagctcccaagaaacacaaaagtacttttgaagggcattcccccctgcccaaaaaggggcggcgcaagtctcagcccaccgtgccagacgccggaatggcagcagaaaatgtcctgaccccctcacctccactcagagcccacctgctcccgcccatctcttagaaactgcaggagcagccacggccgggccgccggggatcctcgcggactaagggctgggtcagagccgcgcaaacatgggctcgctcgtagtcctggcgagcagcactcccaggcaagtcgcccgagggccttgcagggcacccagaaaaatgtcactgccggcgaagtgaccccgagccgggccacgggacccctcacacctcaccctttctcctgccgaccctcgagacgacagcggactggaaggcattacctgagcagcagcccgctgggccgtccgaggccggtggttccgaagggtggccacggccactagcctgccgtagaacatggaggccgccatttctgagtcggaccccgtcccctcggcgccgcgcgcaggcgcacaggcgacaggcggcccaaggcgcagcctctctgcagcgctcacctacgccccgcctcgcgccacccgttgggggcggggcctcgggttaacactgcagccgctagaccagctccctggcgggcgcggagcaagctttgacctttggaactgggcaccgcagccccaatatctgccctgcggtcagagcaacctgaacacttcctagtgaattgcaatgtaaaggtgaccagcgccgccacttgggtgatcttaacttctctcagcctcagttgcc

SEQ ID NO: 11332 - DNA, 2300 bp, Homo sapien
gaccacaggtgtacaccaccatgactggctaattttaaaattatttatagaaatgaagtcttgctatgtggcccaaccagtttggtctcaaactcctgggttcaagcaatcctcccacctcggcctcccaaagtgtttggattacaggcatgaaccattgtgcccagctactttttttgttttgatcgaaattatcatgtgatttttctaacttaatatagtgcattacacatattttcaaatattaaaacaaacttacatctctggaatatatcccacttggtcatattgtacaattctttttatatatttctgaattatatttgctaatattttgctatggatttttccatcaatattcatgagaagtgttggtatttttttctttttgtacggtcttttgctggctttggtagtggggtgattctaacttcatacagtacattggcaactgttccttcctcttctatcttctggaagaggctgtatggaattggtgttaattcttgtgtaaacattttatagaattcatcagtgaaagcttttgggcctggagatctcaggttttttttttttttagtttaaaaattacaattacaattttctctagttagaggactatttaaattaccttttcatattaggttatttgtagtaatttgtgccttctgaagaattcgctcatcttgtcaaagttgtcaaatttatgttatgtggtgttatttatggcattcctttttggtgtctgaaggttctgtaattatattccctggtatgttcctcacattggtaatttgtgtcttctctttttcttttttctttgcagtcttgctggaggtttgttaaatttatttatcttttcaaaaaccagatccttggctgggtgtggttgcccacacctgtcatcccagcactttgggagactgaggcaggaggatcgcttgaacccacgagttggagaccagcctgggcaacatagagagattctgtccctaaaaaaataaaataaaaaaatcaaccaagcctggtgacacacatctgtggtcccaaactactccagaggctgaggtgggaggatcccttgagcatgggaggttgaggctgcagtgagctgtgatcgcgtcactgcactccagcctgggtgacagaccaagaccctgtcaatcagtcaatcaatcaatcaatagcttccctggagactccagcctgccaccagctttggtaactagtggccgactgtcaggcctctgagcccaagcctgcacgtgtacatccagatggcctgaagcaagtgaagaatcacaaaagaagggaaattggccggttcctgccttaactgatgacattccaccattgtgatttgttcctgccccaccttaactgagtgattaaccttgtgaaattccttctcctggctcagaacctcccccactgagcaccttgtgacccccgcccctgcccgtaagagaaaaaccccctttgtaattttccgctacccatccaaatcctataaaacagccccacccctatctccctttgctgactctcttttcggactcagcccgcctgcacccagttaaaataaacagccttattgctcacaccctgtttggcggtgtcttcacacggatgcgcgtgacaccgatctctttgagcatcagaagcgcatgacaccgaccatcttctctttgagcatcacaagcgcgttacaccgaccatcttctctttgagcatcacaaatggttttattcattgctgtaggccaagggctcaaggctgtttagcacgaagtagacactgggtaatcatttcttgaatgaaacacattttacagatgaggcaactgaggctgagagaagttaagatcacccaagtggcggcgctggtcacctttacattgcaattcactaggaagtgttcaggttgctctgaccgcagggcagatattggggctgcggtgcccagttccaaaggtcaaagcttgctccgcgcccgccagggagctggtctagcggctgcagtgttaacccgaggccccgcccccaacgggtggcgcgaggcggggcgtaggtgagcgctgcagagaggctgcgccttgggccgcctgtcgcctgtgcgcctgcgcgcggcgccgaggggacggggtccgactcagaaatggcggcctccatgttctacggcaggctagtggccgtggccacccttcggaaccaccggcctcggacggcccagcgggctgctgctcaggtaatgccttccagtccgctgtcgtctcgagggtcggcaggagaaagggtgag

SEQ ID NO: 11333 - DNA, 2300 bp, Homo sapien
ggttaactttggagtgctctggccaagaggaaggagtccattcagatggctgggggtggaggtgcttagaattttatttttggttcagttttatagtcttctgtatacaagtgttccatatcttttgctaaatatatttctaagtattttatgttttttatggtattataaatggtattgttttaaaaatttacttttcaattgttcattgctaatatatagaaatataatcaattgtgtatattaaccttgaatcctacgaccttgctaaacttatttcttctaatggctttttaattaattcctcaggattgttttaaaaaaaaaagacggttacttattcctttccaatttaactacgttttattgatttttaaattttatgagttgtgctaactagaatctccagcaacatgatgactaaacgtgctcagagtggataccctagctcctcccaaatcttgtctttcaccaagataaggctaggctagtgctatggctgccataacaaagtatcaagccataacaaagtatcaaagattgtgtggcttaaataacataaattaattttctcacaatactggaggctagaattctaagatcaaggtgtcagcagacttggtttcttctgaggctgctctccttggcttgtagacggctgccttctccctgtgtcatcatacagtcttccaatagaacacagtctgggttctaatctctacttcttgcgaggacaccagtcataacattagaatagggcctaccctagtggcttcattttaacttgatcctgtctccaaatgctgaggtactgggggataggacttcgacataggaattttgaggggacacaattcagctcaaaacagtcattaaatatgatgttagctgtaggtctttgtagatgccatatatcatgttaaagtttcattttatttctagtttgctcagagattttgtggagtttttttaatcacaactgagtatcggattttattaatttttttctgcatctattgagatgattatatgtatttcctttctccctctgttaatatgctgaattacattggcttttcaaatattaagccaacctagtatttctgggattaatctcattgttcaatatattatcctttttatatactaccattttttgagaagatattgtaagtacctttgtaatgaatgtgaatgttgatagtgaggagagatgctgtgaaaagcttaatacccatttagtataacatggagagtaagcatattacttagaaataagtaggcaaatatcagaaatacagttcaaagagttaaaagtgattgtttctgaaagtaggagggtcaggttgctcttgttgcggtttttgcaccattttacttcttaaaattatagctataggtcaggcgcagtggttcacgcctgttatcccagcactctggtaggcccaagtggaaggactgcttgaggacaggagttggagatcagcctcgacaaaagaccgacagcccacctccacaaaaaaaaaaaaaagaaagaaaattagctagcttggtgaaaattaaaataaaataaaattaccagtatgtgcacattactttggtagaagtaaaaataatgagaaagagagaaaaccctcccagtaactagtcatttgtttttatgattcagctggtttgtattttgcatggtgcatggtgtgcaaacatctgaaaatgtctgttttccactgtttgtaactaactcttcccagcatgatttatcaattagcctttatttcctcccatgacttatgaatataccttaagcatagttgtttataatgggatgtttctaaacgacctatccttatcctggtaccacgctgatttgagctacagggcaaatgggtgcaccatggtgggcgaggtcattcacggaaaaaagaatgtgcagtggtgccgaggttggtaagagcaggcggcttgtacatgtaaatgcatggtttgcaggaatctgggagtggataggctgacgggtgatgaatattcaaagcacaactgtaagcgactttagttacagcgaaactctaaggcacgctgcccttcggaaggaaacacggcattccccaacctgatagccctccgcgacgcattacgcaccgcggacagctggagaggccgaggcgctctcgctttgatttcggcgcctccgccctcgcggggagagattggctgcggccgcgggacggggtagtgagcgcgtcacttcctgccgctgccaggcgcgtcctcccgcgcgctatgacggccagcgcacagcc

SEQ ID NO: 11334 - DNA, 2300 bp, Homo sapien
atatgaatttgcaataaatctgaggaggtcaggagttcacaatacacatacatgctccacacactgatcctcagtgtctgcaaagtaggactataattggtcatttttaactaattagaatccttctagaatttttatgtttacactaatataatgttctctctcctcctaccagagtcatggctcaatatgacccgtgagagttgagtaaacaaaaccaacacataccgcagaagtttggcaccctggaaacttaacataagaaatgattgactagagtactgagaggcatgtttagaatgcaagtgtaatgaacaaagcttcaatctactttagcccattgcctgagaattgactgcattaacaaaaaagggttagccaacagcagatgcagggaacggtcagaaaacaaaaggtgacaaggatctcttgcactgtctagaggaaaaggtaccctgacctatgaacacaaataatccaatctcttgaacacaaatatccctacactgtggagacacaaagcctcatgattgtgtcattaatttttaatctatccttgtttgttctgatccaagtttaacaagcaacatcctgtgataatatggcttctcatatagttttgtctatgggaaaaagatatgtttggcactattacttttcatcgtaagtgagtaaatcagcattctagattacgcagcagttgctatgagtgaatttatttaacatgaatttctaaaagacttgtcaactctgggtgcccaggagtcaggtttagcacctccaaaaagacagagtagaggatgagaccctgaaatgaaaggactacaggtactactacctcatgggagtgaggcagtcccagaccatcttttataatagcaatatggaatcctcattcccaataggcttgtaactttgcttttttctggtagagagtgatccctactacattgttatccctaggaaaagtaggctaagacgtatttttgcctttgacaaccagttctggtttggaatgtgtggtacatcaatgacttaaactatgttaattaactactacttatgtactgtattggttccttcagttcaataattaacctgagtaatgagcaaaacattttgttggaagatgtatggctataaagatggattatagcaatgtggaagtaacctaactgtccatcgtcagatgaatggatgaacaaaaggtgccatatgcatacaatggaatattagtcttaaaaaggaaagatattccagcacatgctacatcatggatgaacctggaggacataatgctgagtgacataagccagacacaaaaagacaaatactgtatgattctgcttatatgaggtacctagagtagccaaacttacagcaatggaaagtagaatggtggttgccagggcctggagaagggagggataaggagttagcatttagtgagtacagagtttgttttacaagataaaaggttttggagatggatagttgctcaacagtatgaatgtatttaatgccactgaactatccacttaaaaatggttaaggtgggccgggtgcggtggctcacgcctgtaattccaccactttgggaggctgaggcaggcggatcacgaggtcaggagattgagaccatcctggctaacaaggtgaaaccccgtctctactaaaaatacaaaaaattagccgggcgtggtggcggtcgcctgtagtcccagctactcgggaggctgaggcaggaaaaatggcgtgaacccaggaggcggaacttgcagtgagccaagacatccgcggcgatgcactccagtctgggcaacagagcgagactcgtctcaaaaaaaaaaaaagaaagaaagaaagaaaaaaaaccattaggcccaggagaatcagactgcgttgcccccactgttctcagttcagctgtcgctcccagggtttggaccagaaagccctcgccggcccaacagatggcgccggtgtccgcagtgcgcctccaggcccaaagggggcgctctcgccaggcctctttttcctctcctgggtgactcttccgccttccgagcccgccttctcgccacgcacctgcgtcagctcgctctgcgcgtgcgccggtggcgggactctggggaaaatggctgcgtcttcgagtggtgagaaggagaaggagcggctgggaggcggtttgggagtggcgggtggtaacagcacacgagagcggctgctgtctgcgcttgaggacttggaggtcctgtctaggtaatgcggcgagcctgagagccgggctggagctgggc

SEQ ID NO: 11335 - DNA, 2300 bp, Homo sapien
tgctggtgatatgcagagctggaatcagattcatcttgctctctcaaactcaacgtcaaaaaggaaaacaaaggtcctctaagactccctttacatttggtagttaatagtaacttataactatgtttttaactttcttttgttgagtcatggactctcctcctccctggctcctaagttttcagggtcaacgggcaaccttttctaaatcacaagactggatttgctatgtttggtcttgctccagcgtctttattatccctgctgttgtgcactacacagttctgtagacacatgagataaaatggagaaaaaaaaccaggagattattcccagaccggttgccaactgattttaaactgttgctcactgcaagtacacaaaataatgaatggtcttttattcatgagtctttcaaaatagaaatcctggggcggggaggatttctagttttgtcaacctcatttgttcatcctttgcctcagcttcctagtctgttcagtagtgttgttcacgaagaattttgttttattttcttctgtaattccttttttccccccggagtataatgacagccagattcttctctatcatctactgcaaaatgccttgagtatttttctaccatcttattttaacacagaacgaagtaggaaggatgtacatataattatttataatcctccagatcttgcttccagaaatacttagtcttcaactgtaatgtctcagggaacctattaaactagggagctggaagcagtcgttgactttgaggaattagataacattagatactatgaaagtccagtccatagagtcaacctcacagagccgatgcctgcacaagggcgacccaggagtttaaataagttgctgcaagtatggttagctactgttaaaactcaccagaactggaacctaactcatcctcctcttggttgagcagatttcattttgacaggaatttctgaatacccaaagcaaactcaaagtctggcctgggtttctatctcagcccaggatgcttctgaaatacatgaacagaaggatttggagatcttgggctgtttccctgggacttatgatctgacattctatggaaatacccaactccctccttgagcagggccaaatccccaaagatctcagactgaacccacttttttcagggttggcccaaggcagagctgacacagctgtaacattctagagcacacccacaactctggatgaaccaggacagaatggggtggaaggatacaagataacacatttgtccaagggggccgtctgttgacacagtaatgaacgcagtaacgacgggagccagtattctacctcgcattagttgtaaatgaaacgtcttcaaaacatgagaattttgcgttatccttaattattttttcattttgcagaaaaataaagggactcgtcatcgagtactttgagtcacaaatcagccaagtgtgcatgtggtttttttccaagtacgcacaagagtggaacatttcgttttacgagtgtgagatgtttgaaatacaaatctgccaagagcttcctccacattggtctgggactaggcagaacaggccctgacctcctgagagagggaaggaagaccaggcaggtctgagccaggtaaacgcccttgggtgaggtccgtgaaagataaagtcagatctcaaggacagagagctttaaacatgtttgtgctccactgagtcggttacctaataagtgagaaaatgaagatgtggatgcacaaaaattccatggcctttaggctcgcggtggggacagggtacagggaagcggcggtctggtgctgccaaaggttagtcccttgtacccggcgaactcaggaaagttcactcgatttcgctacaaacctgcagcactcggcctggaggtaacctggttgggagcgaattcagaactggaaattccaggcggcccagagggacacccatccctctccgaggcgcgccgggatccggcgcccagctgcggggcgagggcagggtcccgcgcagcaccccacccccggccgctggccccgcccccgcccccgccccgcctcccaggggatgtgcgagcagtctccgccctcgcgcgggagctgggaggctgcgagatccctaccgcagtagccgcctctgccgccgcggagcttcccgaacctcttcagccgcccggagccgctcccggagcccggccgtagaggctgcaatcgcagccgggagcccgcagcccgcgccccgagcccgccgccgcccttcgagggcgccccaggccgc

SEQ ID NO: 11336 - DNA, 2300 bp, Homo sapien
aagcatttactgtgtgtgtaacactgtgctaggtactaaggcaatgatgatacccaagatttggtctctatcctgaagataagcacaggagaaacattatcagtcatgatgctttctgttgcaaacaagtgaaaacctcagctcagcttaggtcagctccagggctggccaaatcagaggctcatttataacactgaggatccagattcttttgaaattcctcctgcaccaatatcagcatttctaccttctctgtaggttggcttgcctcacgttacaatggctgcagcaatcagaagtgtcacatcctcagtaatacttaatattattactattatttaataatatttagaactgtgccatccctgtttcaatttatcaggctcccagcagactactccttatctttcaaatgtcaaaactgcatcctgagctcttgcctaaactaatctggggtgaggtgaatggaagtagcactttaattgtattcattctttgtagctggacctgggcctgggccctatctcctgacatttgcccacaagaaagatttctgaagttaggtaggactggctgttgagtaggccagtgcttgccaaacctttacacatcctcacatatgtcataatatgcagataaaaagataatcccttatacaacttgctgggataaactcaggaggcttacagccatgacctgcttgaaggttcttcctgccttagaccttgctcagctgctccaggatgaggggatttacatcacagcacaactgtattttattcacagcataaaccatctctttccttctcagttgacgagttcagatgggcaataacagtgtctgccaaagagaaaaaaaaatgtattcaaactagataatctattggtacaaataccgagacacagaagtgataacagctttaagccaatgtttgatggtggtagtcccagcaagctcttttctgatgtctttgtgcctttgcacatgctccttctctgtcactgttttcttcatcaaacataatataatggacaagtggaatcaaatagaattgagttcaaattctctgctacccatcggccctggtattggacaaattaactcctctgagcctgtttcctcatctgcaacgtagactagctaatactacccattggaaagcgttgtttcttagctaatgcatgcaaggcttaaaacctagatgacgggttgataggtgcagcaaacctccatggcatacgtatgcctatgtaacaaacctacacgttctgcacttgtatcccggaacttaaagtaaaaaaaaaaaaaaaaaaagaaaagaaagaaagaaaaagaaaaaaaaggctgtttctggggattaaataagacaattatgtaaggtggccagcacagttcctggtacatagtaaatgtcaggcctgcctgacagacttctattcagcagctactgctcccctgaaaatcttcctcagacgtttccacggtgcttcccgttcttacaccactacaatcctttattacactactatccgttcattccccacagctccctcccttcctttccctaaccagtgatcccaaaaggccagcaagtgtctaacattttctatcttctaagtgactggtaaagttccgcacctatcagcgctccaagtttgtttttgttttggccgactttgcaaaacggattgggcgggatgagaggtggggggcgccgcccaaggagggagagtggcgctcccgccgagggtgcactagccagatattccctgcggggcccgagagtcttccctatcagaccccgggatagggatgaggcccacagtcacccaccagactctttgtatagccccgttaagtgcaccccggcctggagggggtggttctgggtagaagcacgtccgggccgcgccggatgcctcctggaaggcgcctggacccacgccaggtttcccagtttaattcctcatgacttagcgtcccagcccgcgcaccgaccagcgccccagttccccacagacgccggcgggcccgggagcctcgcggacgtgacgccgcgggcggaagtgacgttttcccgcggttggacgcggcgctcagttgccgggcgggggagggcgcgtccggtttttctcaggggacgttgaaattatttttgtaacgggagtcgggagaggacggggcgtgccccgacgtgcgcgcgcgtcgtcctccccggcgctcctccacagctcgctggctcccgccgcggaaaggcgtcatgccgcccaaaaccccccgaaaaacggccgccaccgcc

SEQ ID NO: 11337 - DNA, 2300 bp, Homo sapien
cccttgctggttaatttatagagttcaactgtctatgttaatgaaaccctttgtgggtatggataatcaagaacagactgtatcttgtatggttttgacttataagagaattttttatagttccattacttaaaatatataaaatgagttaaaaaatgaaagaaacagtcctcttttttccaagcagtggccacaacgtcaatattcctggttaccctacattagagtatgcttccaaagctgtgtgcataacatggaattctttagagtagccattactgcattttcccaagggaaatttgcaagaattggatacatcagaatttaatcagaaactaaagccatgtcttttcccagaacatgccccagacgtggtttttaattttttgttgttgttattttggttttttaacgaatatggtttttaactgacctataagacagtccatttaaatatataaatttttaatagccttccaggggccatttcctaaatcccacttcaatcttttctgccgtgaattgttagtgtataccgagtggaaagaaatgggtgagggtgaaaggatttggtgatagacaagaatgggagagaaaatagtgaaaaacagaaacaagtcccattccctctgcaatgaacttgtctcaaagtagaaccagtgctgacaataatgacaattacactctttcaatcatagctatttaaccataaagtagaaaaatcaagaaaagtaagatgttgtaatacaataaatacttcccttcaagatctagtgcattcgtatggacttgcttaaatttagattccacttaataagggaaaacgaaaatttccatttgcgcacagaaccactaattttgtgccaaaaacaaaggcaaaaagaggggacaccaagatccttgctggttcaaagtcaaaaggcaaaatggaagaaataatgagacaagccgaagccgactaacacgcaagaagagttcatcaaacaggaaaaaaaaaagtttagaaactttcaagcacttctggtaaatgtctcatgaaagttttgcccatgtttcagttcctctaaagagttacgctccatcaatcactacagatggctttgagtccccaaggcctcgatgcattattgttctaaggaaacgccgcaaagctcctgagccgagtatcctgtgggcaatggacactcaggaccctgcgcttcttgtccaaggctttctggtcggcctctcccacaaatggacttcagatgcagtgcacgcccggaagaaaatacttcccaactgttgcatcgcgtgaaccaaaacagaaagtcagacgaccaccggagtactccaattctccggtgaaaaactctcccacagacaccatttttgtatttttatttttcattttttgcgtctgatggacgctcgcaacgaccctctgcctccgagcctcacaagagggaactgcacctgtcacttcgctcaggaccctagccccacccgcccgacacctgtcaagttgaagccgagacccctcgcccaagaacccagaatcctgtcaccattctgcagacgctccgccgtggcggggggcagggagggcgcctcctcccgccgggacccggcccctggcgaggacggatccccgccgagccgccttggcgcccgccctacgcacacccggggcgcccttcccgcgtgaggcgacggcggctctgctcgctcacctgacgagaggcaggtcctccgggccgctgtcctgctctgggtcctcctcaggagggggcggcggcggcggtgccgggggttccgcggcggcagcggcggcggtggcggccgtttttcggggggttttgggcggcatgacgcctttccgcggcgggagccagcgagctgtggaggagcgccggggaggacgacgcgcgcgcacgtcggggcacgccccgtcctctcccgactcccgttacaaaaataatttcaacgtcccctgagaaaaaccggacgcgccctcccccgcccggcaactgagcgccgcgtccaaccgcgggaaaacgtcacttccgcccgcggcgtcacgtccgcgaggctcccgggcccgccggcgtctgtggggaactggggcgctggtcggtgcgcgggctgggacgctaagtcatgaggaattaaactgggaaacctggcgtgggtccaggcgccttccaggaggcatccggcgcggcccggacgtgcttctacccagaaccaccccctccaggccggggtgcacttaacggggctatacaaagagtctggtgggtgactgtgggcctcatccc

SEQ ID NO: 11338 - DNA, 2300 bp, Homo sapien
cagggacaatcaaacataggtttggtcttttcacatagtcccctatttcttggaggctttgttcgtttcttttcattctttttcctctaatcttgtcttcacactttatttcataaaggtgatcttcaatctctgatatcctttcttctgctttggctgttgatacttgtgtatgcttcacgaagttcttgtgctgtgtttttcagctccatcaggtcatttatgttcttctctaaactgcttattttaggtagcaattcctctaaccttttttcaaggtttttagcttccttgcattgggttagaacatggtcctttggcttggaggagtttattattctctgtccagttttgttcccttgctggcgaggagttgtgattctttggaagagaaaaggcattctggtttttggaattgtcagcctttttgcgctggtttttcctcatcttcatggatttatctacctttggtcttcgatgttggtgaccttcaaatggggtttctgtgtggaagtcctttttgttgatattgatgctattcatttctgtttgttagttctccttctaacagtcaggcccctctgctgcaggtctgctggaatttgctggaggtccactccagaccctgtttgtctggatatcaccagcagaggttgcagaacaacaaagattgctgcctgttccttcctctggaagctttgtcccagaggggcacccaccagacggcagctggagctctcctgtgtgagttgtctgtcgattcctgctgggaggtgtttcccagtcaggagacatgggggtcagagacccacttgaggaggcagtctgtcccttagcagagctcgagcaatgtcctgggagatctgctgctctcttcagagccagcaggcaggaacgtttaagtctgctgaagctgcaccaatagccacccatagcacccttcccccaggtgctctgtcccagggagatggcagttttatctataagcccctgactggggctgctgcctttttttcagagatgccctgcccagagaggaggactctagagaagcagttgggctacagtgggctccacccagttcaaacttcccggtggctttgcttacactgtgaggtgaaaaccacctactcaagcctcagtaatggcagaagcccctcctcccaccaagctccagcatcccaggtcgacttcagactcctgtgctggcagtaagagtttcaagccagtggatcttagcttgctgggctctgtgggggtgggatccactgagctagaccacttggctccctggcttcagcccctgttccaggggagttaacagttctgtctcactggtgtttcaggtgccactggagtacgaaaaagaaaaaatcctgcagctagctcggtgtctgcccaaacggctgcccagttttgtgcttgaaacccagggcctgggtggtgtaggcacccgagggaattgcctggtctaagggttgtgaagatcacggaaaaggcatagagtctgggccggaatgcatcgttcctcgtggcacattccctcatggcttcccttagctaggggaggaagttccctggccccttgcacttcccgtgtaaggcgatgccccaccctgctttggctcgccttccatgggctgcaccccctgtctgaccagtctcaatgagatgagctgggtacctcagttggaaatagagaaatcacccaccttctgcgttgatttcgctgggagctgcagactccagctgttcctgtgttcaccattttaacatctatctggctctgtttaattttcgctccccccaaaaaatccatataagaaataagttgattctcagagttaagttccagaagtgtagagatctcacattaaaataacagtttgcctgagtttatcaaatacaaaagtatctattaaatataattgattatatggattcattacctccctttgcaagtagttactctgtatttttccaattctaacctaagaatttttcaaagtttctaaattcccctttggttccttaattagaggccaaatttaatatctggaaaaaatgcagtattcaattatcttcttcctgttcaaacagtccctctgctatggctcttcctcagtagaaacaactggcaacaaaattcaagtttatgattcattcatcagcaaacatgtgagaatcatctacaaagaaccaagaattgtggtaagaattatacaaacatttactatgatactgataataatgaaaagcctaattcaacaaatagtgatctatccatttttaagccccag

SEQ ID NO: 11339 - DNA, 2300 bp, Homo sapien
tagctttatagccacaagcatgcagcttccaggagcatcctgagagaccaatcctttttaacttctacccctcagtaataggtaaaagatacaagtcaataagtgtttactttaactgaagagtacttggatttctgataataatctatgctggaaggtgttaaatttactattcacagaaaacccttgttctaattatttgaaagcagcagagatatttcctgcttttgtataaaacttggcacattactatgtacaaatgcaaactttttaaataaataaagatgaagctaaaaatgaaggatggtcatcatacgattttaatctacagaaggatgaaaatgtctaaaatctcttaatcttaaatttctatcataatgttagaatttagtgttttaaaaagtctgcagagcttactcatttaaagacaaagttctttgcttaatatttacctaagctatggaccaagtttcctattttatgtctgatatggtttcaatgtttgtcccttccaaatctcgtgttgaaatgtgatccccaatgctggaggtgaggtttggtagaagatgactcgtgttgaaatgtgctccccaatgctggaggtgaggtttggtagaagatgactcgtgttgaaatgtgctccccaatgctggaggtgaggtttggtagaagatgactcgtgttgaaatgtgctccccaatgctggaggtgaggtttggtagaagatgactcgtgttgaaatgtgctccccaatgctggaggtgaggtttggtagaagatgactcgtgttgaaatgtgctccccaatgctggaggtgaggtttggtagaagatgactcgtgttgaaatgtgctccccaatgctggaggtgaggtttggtagaagatgactcgtgttgaaatgtgctccccaatgctggaggtgaggtttggtagaagatgactcgtgttgaaatgtgctccccaatgctggaggtgaggtttggtagaagatgactcgtgttgaaatgtgctccccagtgctggaggtgaggtttggtagaagatgactcgtgttgaagtgtgctccccagtgctggaggtgaggtttggtagaagatgactcgtgttgaagtgtgctccccagtgctggaggtgaggtttggtagaagatgactcgtgttgaagtgtgctccccagtgctggaggtgaggtttggtagaagatgactcgtgttgaagtgtgctccccagtgctggaggtgaggtttggtagaagatgactcgtgttgaagtgtgctccccaatgctggaggtgaggtttggtagaagatgactcgtgttgaagtgtgctccccaatgctggaggtgaggtttggtagaagatgactcgtgttgaagtgtgctccccagtgctggaggagaggtttggtagaagatgactcgtgttgaagtgtgctccccaatgctggaggtgaggtttggtagaagatgactcgtgttgaagtgtgctccccaatgctggaggtgaggtttggtagaagatgactcgtgttgaagtgtgctccccaatgctggaggtgaggtttggtagaagatgactcgtgttgaagtgtgctccccaatgctggaggtgaggtttggtagaagatgactcgtgttgaagtgtgctccccaatgctggaggtgaggtttggtagaagatgactcgtgttgaagtgtgctccccaatgctggaggtgaggtttggtagaagatgactcgtgttgaagtgtgctccccaatgctggaggtgaggtttggtagaagatgactcgtgttgaagtgtgctccccaatgctggaggtgaggtttggtagatgactcgtgttgaagtgtgctccccaatgctggaggtgaggtttggtagaagatgactacatcaggggggtggatccctcatgaatggtttagcaccacccccttggtgataaccgagctctcgctcagttagttcacaagagatctgcttgtttaaaaagggcatgggacctcctccttcctcttgctcctattgtcaccacgtgacatgcctgtttcccctccgacttctgccattaatataaacttcctcaggactcaccagaagctgaggagaagctgatgccatgcttcctgtacagcctgaagaaccgtgagccaactaaaccctactcttttctttacaaattacccagtctcaggtatttctttacagcaatgcaagaacgaactagcacaacatcagtaagaaaaaaagggtgaaagctacctgttactacgagaacatttgactagaagtcaag

SEQ ID NO: 11340 - DNA, 2300 bp, Homo sapien
gacctcatgctctaacactcttcttactccagccatcctggtcatctttctattccatgactgtggcataattcttcctttctctgggtttttgtacttgctgtttcctctgcccaaaatactctttgaccatgcttcctatgactcaccccactccattattcacatatctcctcaaatagcacctcctaagcaaagccttgtctaaacatcttgcctaagacagccataattcccatttatttgctactcctacctctgctctatttccttcatagtattgatcaccacttgaggttatgttataaattcatttattttcttatttattatctcgctactagcaagcaagatgcaggaaggcttgggctttgtctatcttattcaatagtatccccaatgtttaaaactacctggcacacagtaagggctcaataaacatttgttgaataaatgaataaagtgagaaggttgatattaagataacttaatctcaaagttttctgagattaactccacctcaaagtgagaataagatttaaaatggggccaggcatggtggctcaggcctgtaatcccagcaccttggaaggctgaggcaggtggatcacctgagatcaggagttcaagaccagcctggccaacatggtgaaaccccatctccactaaaaatataaaaattagccgggcatggtggcacgcacctataatcccagctactcaggaggctgaggcaggagaatcgcttgaacccagagggcagaggttgcagtgagctgagatcgtgccactgtactctagtctgggtgacagagcaggattccctcccaaaaaataacaaataaagggaaccttcttagttatatatactctaaatcctctaaaaatatgtgttatctgctcctttcccccatgttttttacctcaaatgttagtcaaatagaatacgtgtacatgtataccttagccattaagtataaacagataaaccgtttcagacttgggtctttgaaataatactttgttcctacttacacggtgctcagggtctggtgagaagaggcacacaaacaaggaaataagtatgtgatgacaaattcagaaaaatcctatgaaagaacagggttctctcatgaagaataaacagggagatccaggtggatggggtgggttcaaggaaggctgatctgggaaggtaacatggacgctgagtcttgaaatgtgagaaggaggctgtgctttgaaaggagaaggggcagagatcttccaaaagatgaaagatcatatgctaagaaactgatgttctttcagaaaatgaaagaggccaccagaactaaagtacccgggtgggatagtggagaggttgctaaagaagaggttgctgtatgatcacgcagaatctgaaagaccatggtaaaacgtttaaatattctaagagaaacagtaaaccaattacaacagaaactctgttttaggataagtcactaatatagagatagctagttcaattgtgtctggcttcctatcacatcactagcacttagtacagaattggggtcctaaaaatatttggcaatgatgacctgtgttgctttcaggaaagtattccaagtgatagggtccaccataatccatattgctttagctctgttacaagtgacaaaattttctatcaatttccaacttcctagctccaatgtctcaagaatatgccaggcgggtgtaggcacagctccagacagcaaacaactttggggttgtatgcatataactcaggagttaactctattgatctgtgaaattaaaaaaaaaaaaactactatttactcaatttacttaagtctttaacttcatattatgcaaaactgaaaatatataaaaactgttgtgttgttataacgtttggtgtggtaggcctcaggggcaggcctcggaccttctcttgccctcctttaacctgttccaaggcaggactctaatttttcccccatcattgtaaattgtgtgtctttaagaccctccccagagatggtttttgccctatagtgtaggggaggaatgctgacatcataaaaatcccaatgctgacatcataaaaactggattaggagagcttctggatagctgaacacatggaggtttctggagggtgtggcccccagagggcatggaagctctgcacccctgctcccatacctcaccctacgcatctcctcatctgtatcctttgcaatatcctttgtaataaaccggtaagtgtgtttcctttgattttttctttttgttttttcagacagtct

SEQ ID NO: 11341 - DNA, 2300 bp, Homo sapien
gtataaggatatcctctcctttggtcaaagaaaacagagacattttagtagatgaaaggttataactttttttctgtttacataaataatactatgcttattaaagaaaatttgtaaaagacaaaaagtgaggaaggtaatgactcatcaaccagagaacattagcactttcatataacagcttctgagtttttgttttatgtcacattatatatttgtaaatacttgaaacctagattttttttcacttaacattaaaaaaaaagtactacctcaaaacaatgacatttaacagcacagtgaatgttttatatcaaggcaataacatattgggcacttacaacacagaatgtttcatggtcagacaaaatccatgcacttttcctagtccattcttgagcatcacagtgatgagccacggtgatggagggccatctcagatgtcaagatggtggcacgtggtgtttgcatctgaatcaggcttcatttttaatacttttttatattctctatttatgtgaattatttgtctggctaccttccagctctctgttttctagaaagtaagctctttgaggcatggcagggactttgttttgctcacaaccatatccccagcgcctaggacggtgtctgacacagagtaggtacctactaaatacccctttcatggatgttcagttttgcctatagagatgcactgttgtactacagcctgtccagctaattgctgtaccctaaattagtataatagactataagtaaaatagactgtatatgtacttaatgtaaaatacaagctttcgtaaataaagaacagtgctgtatttgatttgcctggctcaaataagcaagaaatgggctctttcagcaaattattatccctcatgctggactgtcacttagtacataattaatatgagccagggattattctaagcacagttcatgtttcatttactcctcaaaacaaccttatatgacataggcattattatattagatccagtttataaatgagaaaactgaagcttggaaagattaagtaatctgagtaaactagtaaactgcaaaactgggatacagtccaagattgggcacattttaaaaccgcatgtttaactacaattctccattgtcctcagtattttgaaatcaggagtatttatgcatggattcaacaaatattcactgagtgcctgctacatgcctggcactgccctacgcactggggtactgcaaatgaacaaaacaatccaaaatctctgctctcatgggaatttctggtgaggggagataggtgatcaataaatgaataggatatatagtatgtcagatggtgacaagtgatatggaaagaagtaagacagggaagacagcctagggaatgccatcctgagatgaaagttgaaattttaaatagaatggtcagggaggcaagacatcagtgagcaggtgactcaagcagagacctgaaggaggtgtgggtggtgtgttctgggaaaagcaagcccggtgtggagggagcacagtggggagggaagtagctgatgaggcagggagatggtgcggtggaggtgcacagtggcgtgtgtgggaggaggcagggcctgcagagtccataggcaagtttcaggaatcagagttccaaggtgagtggccatcagagggtttggagaggagcagatatgatgggcatttgaagtaatcctcctgcctcctggctgctgtgttgaggagggagggagggaggtagggagagagagagagggtgagagagagaagagaagagagagagagagagagagagagagtgtgtgtgtgtgtgtgtgtgtgtgtggagagagagagagggtgagagagagaagagtgtgtgtgtgtgtgtgtgtgtgtgtgtgtgtgtgaaggagggtacttaggaggctgtataatccagtaagtgatgatggtggattggtccaagttatcacctgtggggatggtaaaaagtggttaagattttgaatacattttgaaagtagagccaacaggatgtgcggatggattagatgtgaggaaaaaaaagacgactgaggaggttctgtccctcagcagctgtaaggatgaaagtggcatctattgagatatagaagataggagcaacattttgggggaaatatcagaaatttggttttgaatatgagaagtatgtgatgtctattagacatccaaatggaaatgtctaataagcaaattggataagcaagcctggaagtcagagagaaatgtgctgaagtcaaagctatgaggcagtgacgtga

SEQ ID NO: 11342 - DNA, 2300 bp, Homo sapien
ttcatttttgattcttaacctactttgtggaagcagtgaaataattacttatatttgcagtcctgagtggatttttttccttccaggtcgcctgtggctacgcacacacattagtattaacagatgaaggccaagtgtatgcttggggcgccaattcttatgggcagttgggcactggcaataaaagcaaccagtcctatcctactcctgtcactgtggaaaaggacaggtaacacgggcattttcacagtccccacactggtctttggtgattgtgattaaacaggacttagatatatagagaatggtggggaatgtactgctagtgttagaatattatttaacaagagtatttattcctttagaaaaattggctttggaattgttggggaggttgattgtatgttaaatatgctattttcacttacccatgtttcatctatacctccaacagctattctaagcaaactgcagtgactaaacttgcaacagctattctgttactcttctgccttacaaatcacccttttgccctcctccttttcctgttttacattcttaagggggtgtcaataacattcaaggtcgctcttccctggcttaggaaaaggtaccttgcatggggtataaagctggtcactcagctacatggaaatttgccagttgagaaggatagggttatttcattactttaactcccaagctgtcactacgaggaagagtaaaatggttaggaaattaagatttacttttgtgcacttgtttgcaaggttgtgttatgtaattagcacatccagaattagtttccacgttattctgatatttttgaaagcctttggaatttctcaagcatggtcagatcactgcctttccacttttcatttcctgatagtagtgtagagcaaaaacgtttcactatcttttcttttaaaccagggttgcagtcattgtagaaatgaatgctgctgtttttactgcatatatctttattatatttaattttaaaagaaatatgtagacaaacagattagctcacatttatatgcagttcttttctaattttctgctggaatacttaacaatgaaaatgaagaaccaaattgtcatttttcaactgcctcagttttcatttgggtattgtgaacttggctgactttctttaacctatgttttaaaagttttatttaaccaatttaacataggttaattttataggttaaataaaacttttttctccaaaaaccttaaaatttaagacccctggccccttcagaattgggaggagggacaataatggaggcaggaggtggtgcaggtagatgcctgcagctgttcattcacacatcttgtagcttagagctcctcagaagagaagggacagtcctgaggctttgaataaccacaaaagtgcctcagttggtagggacacttaacatttaaactgaaaaacagagttaaaggatcaaataaagatggcatggaaataaaaacgatggatttgtatggcctgttatttttttatttttattttttgagacacagtctccctgtcttccaggttggggtgcagtggtgcaatcacggctcactgtagtcttgacttcccaagctcaggcgatcctcccaccttagcctctggagtagctgggactacaggagcatgccaccatacctagctaatttttgtgttttttgcagggccagggttttgccacattgcccaggctggtagctcctgggctcaagtgatcctcttatctcggtctcccaaagtgctgggattacaggtatgagccactgcgcctggcctggcccattactttttatggtgctcctacacttacccagaactttagcacatccatccctggtctcacagaatctgccgtcattgcccaccagtgacttgctgcattgcactgctggtccctgatccagaatgatcacccaaggcttctgattcaggttctcactggggcagatggattgtggggcgtcaaggtgggagaaagaaaaagtagcagagaagcaggtaatgggaatggaagctgtgtgagtgccaagttgcttaactggacattgggagttatctattgcatttctgtcttcttaaactgcagttatttttgaattataatttggttataaaaatcatggatgggccaggcactcacgcctgtaatcccagcactttgggaggccaaggcgggcggatcacctgaggtcaggagtttgagaccagcctggccaacatggtgaaaccctgtctctactaaaaatataaaaattagctgggcaca

SEQ ID NO: 11343 - DNA, 2300 bp, Homo sapien
attctcttgcctcagcctcccaagtagctgggactacaggtacacactcttacgcctggctaatttttgtatttttagtagggatggggtttcaccatgttggccaggctggtctccaaacttctgacctcaattaatcctcccatctctgcctcccaaaatgttgagattacaggcatgagccaccgcgcccaggctatttttattttcttagagacagagtcttgctctgttgcttaggctaatgtgcagtggtgcgatcatagctcattaaaaaaattatttattttttattttttgagataagatctttgtcacccgggctgagtgcagtggtgtgatcatggttcaccgcagcctccacatcctgggttcaagcgatccacctatcttagcctcccaagtagctgggactacaggcgtgtactaccacgtgtagctaatttttaagttttctgtagagacggtgtcttcctatgttgcccaggctagtctcaaacttttgggggcctcaagcgatcctcaaagtgctgggattacaggtgtgagccaccatgcctggccttcctagggtattgattcaattttattttacagatggctaaagaaattatagtttatgagttttcattaccaaacgtttattgaatttccatgtccttggtaaaggcaaaattagaatgatagcattctcattttaagagtttattttctttaacattgggtaaccttaatctctccatcctgagatgattaatttaagcttaaaatcttgaaaaccatcttgtcagatggaaaagctgtagcataccaattcattgacagagttacatgggaccttttatctttggtattccctccaccaaaacttccccacgaaaaaattcccatcaaagtctagccatgcatatgttggtatccataacacattaaaatagtactgtcttctgcatgttttaaaatgttatcaaatatcaaatgttatcaaatgataccatatgtatcattttgtgacttagtgattttggtgaacattgttttgtagatatacctgttttgattctagataatttattttaatagctatatagtatgcatatgccacagtttattggttttgttgatcaatttgttctttcttgctttttgctattgggaatatttgtgtgtatgctctagagtttatctagggcagtgttgctaaaattgcaggacttgttagtgatctggaaattagtgggctgagatcagcattttcttttaaaatgaaattgaacaagataaaataggatagagtagggtagaataaaatagcataaagtagaaaaatggaaaagatatcaagcatctcatgtaggaggagtaagaattattttgtgaaatttcagttatatatacatatataactgaatatatatatatatatatatatatatatatatatatatatatatatcatgaatcctttgctcacttttgaattgtgtcgtttgttttattcttactgatttgcaggcattctttatatattttgtgtatggatcctttccaagctgtccattatgcatgttacaaatatcttcccccattctgtggcatatttttccttttgttcaagtttactgctcttttctttgtgttttatgctttcctgtcttatgtatgaaatctttaactgctctgaggtcataaatatatttctatacttctaaaagtttgaaagttttgcttttttttacatttccacatggattctcttttattttccatatggaaatactatagattaaattctccttagtgtgcattttttcatgtgtttcagtgtccaaattgttgaaaccctctcctgaagcttataaagtatgatattctaaagttacattttataactttagtatttttataatagagcatctctgctgctgactttttaatagtagatagcacagatacaatttttaagctgtatttttctcagataaagaatggattgttaaatgtgcaagacagtatattcttttccttctgtttttctctaatagaatttatttgtgtatttatatttccagtcacattaactttgctctagaagacaactttacaaggatctaaaaggaacaggattaaagatgactgaatactgggttccagaaatttaaaacaatcaggtacaaaagtttttggagggaatgctcccagccagtcagtataaaatagaactgttgagaatgtacacaagaaaaacttaaagtatctagccctgaaatacagtggagggtcccaaaacaagggctttg

SEQ ID NO: 11344 - DNA, 2300 bp, Homo sapien
gattgcgccactgcactccaacctgggcaacagagcaagattctatctcaaaaaaaaaaaaaaaaaagaggatgaataggaggaggggatgaggatacagttagtataagtgactcttttaagacattttggaagagaccagagaacacattggtagctgataggggacatataatcaaggaactttttaaaagataggcaaatgttgcgcaatgttaatatgcttatgggaatgatccaaaaattaatgatacaaaaattaataatgtaggattgagaggtgacaactacctgagtgaaaaccttgagactgtaaggaagacaggatctaatacaaaggtggaagagttgaacttaaataagagcatgcacagctcattcccagtaatgggaaggaatagagtgcacaggtacagatgtaggtaaacttgggagatgtggtgatgggaactttaactcctgaaatactaacctatactctctcagagtctaaatttttagtctactgaattcagcaatacagtgaagtttagtagaccaaattatccaaaagtgttgaaggaaacttatatgtgatggagacatttttacttcttacttttaattttgaccgccctgggaaaaactgttggacccatataaaattaaaatctttagtgaaacacattcttttataggtatattttaaagttttaacttctgagataatatcacagttttcaaaacactaagacatgtttttattgttagctaattgtcaggcttcagctgaagcacaccgtaaggcctgcatgaacttcagctgtccataatgcgtaaaagaccaagtgcgcaaggcaaacagatcttgccatggttgctgatgaaagaaacttaatctcttggggcctgagttgccttatctgtaaagtaaggataatccttgccttacaggattattgtgagctccaaataagataaacctcttggcacacaataggtgcttaaaaaaaaaatgccagctatcatcactgaagtgagctttttctgagagcaaacctgtttaactcataaatttctttcattgataagatgtaaccagtggagaaacttggggcaggcacacgatgcctctctgcactatcgctgcaacttcctgttaatgtatacttactttttcttccatttagagctctacaagaaatacctgtgtaccattttgcgtgcctccttctgaggctcagtgggctatgctcagagaatagagataaatgtctgccctatgtagcagaaaggcagttatacattttagaatgatgtttttccgaagaaatgacaaaagccagacgaaacagactgacacggtcactgtggtttggaatgttagtttttctctttggctttactacttttggctctacactgtagaggaaccagtgtcctcatgaaacagccagtataaaagcaagtagcttacttcacaggaatagctaataacatttaattgttgagcatttaaccaaaacccactcaggtcaatttaagtgtagtgcagtggaagaaattattgcacactgcaaagttgtggtgcattttacttaaatctacaaaggccaacagaagtgcagtgtaatataataaattactgcaaaatataatcataaggggagaaggtggctgttttcgaagcccttggccccaaggtaactgaggtcatccccctgaaccccccagcacacatcctcattatttcagcatttgtactacagggggctacaagacttccgccccacagcaatggggtgaaaacgtgaagtgatcggagcccccagatagaggggccagcaatagaagaaaagctggggcaggctggaggagaggggctgtggaaaaggttgctctcagcatcatacacgccttatccttctaggtcgggtatccacaaattcccaaaatttgcgagaacataaccctggagaaggtgggggtgacccacggaggaactccctggaaaagcggaggcggccccaatgggagactcccgggggtcaactccgaggggagggggcgtctgcgagaaaggggaggggcggcggtgggcagcctagggaggagaggaggggcgagacgccgtcgccagccccctcctcttgtctgcgctcccttcgtttccgtctcggccgggcacccgagcgcatcccgccgaggccgggccgtttcagggggaggcgccaactcatcgcggcgccgggcccctgaccgtgcagtaaccgctacccaggaggcggagcggacaaggctccggcctgcgaggaggtaag

SEQ ID NO: 11345 - DNA, 2300 bp, Homo sapien
aaccaccattctgctcttaacttctaggagttcaactttttaaggttccacatatgaatgagatcatgtgatattttacttaatgacctccatgttcatccatgttgtcacaaatgacagaattgtcttttttttttttaaggctgattgatttttgacaaggctgtgaacacaatgggaaaagaacagtctcttcaaaaaaatggtgtaagaaaattggatagccatatgcagaagaatgaaatgaaacctttttctcacaccaaatacaaaaatcaactaaaaatggattaaagacttaaaacttaagacctgaaactataaaactactataacgtaggggaaaactccatgacattggtctgggcaatgatttttttgaagatgaccccaaaagcacaggcaactaaagcaaaaatagacaaacagaattacatcaaactgtaaatcttctgtacagcaaagaaaacaatcaacagagtgaagagaaaagctagcaagttggagaaaatatatgcaaaccatgcatctgttagggcgttaatatccaaaatatataaggaattcaaacaattcagtagcaataaaacaacccaatttaaaaatgggcagaggacctgaataaacatttatcaaagaagagctacaaatggccaagtagatgaaaaaaagttcaacatcattaatcatcagggaaatgcaagttaaaaccacgatgagatatcaccccacacctgtaaagatggctattataaaaaagatgaaaaataacaagtgttggcaatgatgtggagaaaaaggaacctttgttgatgggaatgtaaattagtacaggcattacgaaaaccagtacagaggtcctcaaaaaattaaaaataggactatttttagcaatctcactactgagtatatgtccaacaaaaatgaatcagtatgttgaagagatatctgtgctcccatgttcactgcagcactattcacaattgttgagataaagaatcatccttagtgtccattcatgaatgaatggttactttaatttcctaccattgccctattccctccatatagcctttgtttcagccttactgagcaatttataattctcaaacacatcatatttcttattctacttagactacttcccttccctaacacttccatccctaacctttgttctcttagctaactcacactgactcagcctcccaagtggctgggattacaggcacccaccaccatgcctggctaatttttgtatttttagcagagacggggtttcaccatgttggccacgctgatcaagaactcctgacctcaagtgatccgcccatctccgcctcccaaagtgctggaattacaggcatgagccatggcacccagcccacactgaaaacttaatgctaaagtaatctgttttggaaagccttctctgatcacctcttggtattttgtcattctttcactattgccacagtaagtgtatatgtgcctattatcatctttatcacttttatattctaacaccaattataataccatgctgacatgcacaattctatacagcatggtaatagcatgcatcagtaaaggtgcagtgtgactgatacctctacaaaacacagagctgggcagtgcaccaatttaatggagtctgaaggaatttaagttctagaaaactaaggtgctacccaaggtcattcacctaatcaatggcacttagggcaccaaagtgcaggctgcttgcagtcattcattcatgcattcaatctgtaacaagcagactgatgtagaaatttactggtgctaaatttttgttctggagacgcaaagaggaaaaaaagaacattttcctcttccctgaagcgtaattagactttctgaatttccaagaaaaagtcaaaagacggccccatccaccttttcttgtgattagggccttggtgcctggatacctgaaaagaaaaaagcaagatgaattcctctgcttttggataactaaaggaggcttaaagataccccaaaagcagaagtaattagggggtttaaaaagggaagaaagggaagacttttattgcagctagatccccattgtgggctggaaaaggacaagggctcctagtttcacaagagtagtgtcatgaacttgttaggacataagaagtggcaggactaaaaccatgtcttgaaataaaattactaagggaacgagaagatagagaagtccaagaaccaaactctgggtatgccaatggctggagaagtggtggatgagccaatggagctgccagtgagatgga

SEQ ID NO: 11346 - DNA, 2300 bp, Homo sapien
catgcctggctaatttttgtatttttagtagagacagggtttcaccatattggctaggctggtctccaactcccgacctcgtgatctgcccactttggcctcccaaagtgctgggattacaggcgtgaggtcactgcgcctggccaattgggcttttattggagaagaatgaatatctatagtgactgcttgtagaatgaaatgttgtttcaagctttttgccccctaaagatgagaatggtaatataacatttgtgtactgtgagttctaattgggataaataaaatactagaaatagaatcccagacccaggaagaaccttgtcttcagaggagcaaccttggtcccagccccttctccacagctgcatgaagaagctgcacagaaaaccactcaccctcacccctagaaagtactcttcccagcccctagtaaccactattctactctccacttctataggatcaaattttttagcttccacatgtgagtgagaacatgcagtatttatctttctatgcctggcttagttcacttaacataatgtctcccaagctcatccatgttgccacaaatgacaaattttgttctttttaaatcagtaaatagtattcaattgtgaatatataccacatttttcatccatctttctgttgatgaacatttcgggtgatccatattttggctattgtgaatagtgctacagtaaacatgagagtgcagagatctcaacaagattcagtaaccttactactgagtatatatccaaagtattttattcattttgatgctattataaatggaatagtttccttagtttccatttttggattgtttattgttagtgtatataaatgcaactgatttttgtgtattgatttcctgtcctgcaactttgctcaatttgcttgcttattagttctattggggttttgtgtgtgtgtgtgtgcatggtatcttcaggtttttctacatataagattttatcatttgcaaacagacaaaattttacttatttatttccaatttggatcccttttacttatttttcttgcttaatgttactgcagctttctatgcaggaaacgaggatttgaacagtgatggagagatgagtaatggttcgatttggaacatattttatgggcagaacaaatggaacttgttggctcagaagtgggtggtggaagaaagagggaagttaaaagtgacttctaggtttatggatggatgaactggctaaattattgtggtgccatttgcttagacagggtagatggggggatgcaggactaagagaggaagagaaaagctccacctgggccacattaaatttggccatgattgtggatcagataggtaaaagcaagagaaggagggaagaagtcagaacacagacctctggggaaagctcacacgtagaaaaggggtggaagaagaggcatcagaaagagaggcaaagaagagcaatctgaggggtagaaaaagaaccaggaaagtcagagaaaaaagggaaaagtttcaggaaagtggcaatggtcaactatgcaaacaagaggggaaggaaggtgaggactgagaaaggattttttatgtaagcaacaaggaggtttttggtgacctctgacagaacattttcagcagactggataaggtctctgcctgagtgcaagtgagctgaaaatgcaagtgagtgagggaagtgctttaaaaaagtctaaagtgctatgtgtgtaaggcaatgttgctatttctgttgccatggaaacagaaaccatttaggagaactaaaagccacttaaaattcctgactctaacccatcatatccgcttgatctcttgagaaagataatgacaaaaaaccagtcattagaggggcagggcaattttaggtttcttctttttagacatagcccctaactggaaattttcacccttcttgagaagggagcttgcactaacatctacaatggcttctaaaaagcacagatgacctgctacacttcctgacttgcttgctattggttggcactgttcataaatataatttgctctttcacttttctttgaaatgagcaacctgaattactcggaggagaaaggcaggagagatagaggcagcagaagccagggcagctgaaagacagagaccttcaggtgggcattttaatctttgttttgttaattcagtgttgagcatcatgacttgatgatcacataatagtcagaggagtaattttttaaaagtaaatttgttttgttctactataaatgttattttcctatcatgtacatggta

SEQ ID NO: 11347 - DNA, 2300 bp, Homo sapien
aaggaggaaaaccaagaaaatgcagtgtcaaaggaagaagaaatgtttaagaaagaatagtggtcaaagtgttgagtattgttgagaggccaagaaagatgaggattgaaaatggctcccattttattgataaaaaaaaagtgaagcattgagaagagaacttgttcaaagccaacataatttcttgaccctctctctgttcccagagaactcatactggtgcacatgctagggtcatttatgtgtgggttttcttctctccaaaggccataaattccttggtcttcactttacttcaccttactgcattgcatattattgactacaatctctaggtcttcaataacattcttaaattatgtgttaatctccttcaaaaacagctgatcttctttactctgcctttacatgtaggcatgtcccaaacatatttttttaaatatagtttttaaaagtgccatgtcttggcctctccctggacaaaggaatcagaatcttgagggggtagattgcaggattctgtattttcaaaaagctcctgagtaggaagcagagtaggaaagtattagcttagcggtaagtttggaaaccactatcttagtctcagaccaagcatagttgggcagtaagatggggaagccaccccattcgcccacactctgataaaatcctcatactttgaaacaatatacagttatacttcaattattccaagatcaacttgccagctgtctcgaagagggccaaatccaaaagttaagaaaaggaaacatctctcacagggaaagaacttctgatagtgaagagcaatgaaaatatctcaagataccactgccctatttacaaccagaagaaaagaaacctctcattagctggctgtggacataaacatcccatcaatcttcacctggagccgcagagaaaaccagccgagaaaggagagaagaatgaaaaataaacagtaaagcagaaagaataagaggaaggatcagagtggatagaggcagatgaggagatgaaaagcagtgaaggattttagaagaggtgatgagaacattccaaagagggaaaaaaagagagcaccaaagtagggattctatacaccgcagcaatcctctgggacttaaacgtatggccaagatatcggtttgagagtcagttatcaacaaaggatttaattagccattgtattctttaagaatatagagaataatcacattttaaagagatttctgtaaaacagttttaaaaatacagctattttaaaagatcgcacaattaatacactgaaataaagcccagacatgcaacttgttacatccatcaccatttttgaaaggacagttcctgaggctggactcaccggcccaagtactaccccctccccaggtctccggcggcaactgtaagtcaaaagccctcaggcattattgcagcgtcccacattgtttgaggttccaggaagtcgctgctacgctcacttgtaagtcttcgtgctgttgtaaaaattgaggtcgtggttttccacgcgatttggctggcgaagagaccacgaagccaccccccacgttttcaactgagtaaatatctaaatatttttgcttgctatccagatcctgggttcgaagtctttgggattagaaacttccaagcccatttcagaggcttcctagtccttgggaggagtgtcttttaaagcacctgccagccttaagttcgcgtgctttcggaaaggggccgacagggtgcgtctcaggggagccttttgaaatgtggattgagaattgtgtgagtgtctctaggaacctccattaactccacttttcctgagtgtagctccgagcctggccacagcggatgctaccacaagccaggcgcagccgggcctcgggagaaagccggaagcccgagagggtgtgggcgctccgggagccaaacgcggccgctcagccgccacgcgccggtggccccgcggggactcgcgttccggtgagagagccccggcgcggcgggctcgaggcgggggttcggggtcccggccgcgggctccgtcggcggggcccgcgcagccgcactcggcgcgccgacttcgggctcctcctcccggctccgtagtaagcatggcggcggcggcgttcgtggtccctcgggtgaaacagaaagcgggagctacgcggagagggagcgaagagcggggctgaggcggcggcgtcactgccaggaaacaaccccaacagtcagcgcgccggcggccgcggcggccctgagagctgactctgcagctgaggtagagagacaac

SEQ ID NO: 11348 - DNA, 2300 bp, Homo sapien
aaaaggaaacatctctcacagggaaagaacttctgatagtgaagagcaatgaaaatatctcaagataccactgccctatttacaaccagaagaaaagaaacctctcattagctggctgtggacataaacatcccatcaatcttcacctggagccgcagagaaaaccagccgagaaaggagagaagaatgaaaaataaacagtaaagcagaaagaataagaggaaggatcagagtggatagaggcagatgaggagatgaaaagcagtgaaggattttagaagaggtgatgagaacattccaaagagggaaaaaaagagagcaccaaagtagggattctatacaccgcagcaatcctctgggacttaaacgtatggccaagatatcggtttgagagtcagttatcaacaaaggatttaattagccattgtattctttaagaatatagagaataatcacattttaaagagatttctgtaaaacagttttaaaaatacagctattttaaaagatcgcacaattaatacactgaaataaagcccagacatgcaacttgttacatccatcaccatttttgaaaggacagttcctgaggctggactcaccggcccaagtactaccccctccccaggtctccggcggcaactgtaagtcaaaagccctcaggcattattgcagcgtcccacattgtttgaggttccaggaagtcgctgctacgctcacttgtaagtcttcgtgctgttgtaaaaattgaggtcgtggttttccacgcgatttggctggcgaagagaccacgaagccaccccccacgttttcaactgagtaaatatctaaatatttttgcttgctatccagatcctgggttcgaagtctttgggattagaaacttccaagcccatttcagaggcttcctagtccttgggaggagtgtcttttaaagcacctgccagccttaagttcgcgtgctttcggaaaggggccgacagggtgcgtctcaggggagccttttgaaatgtggattgagaattgtgtgagtgtctctaggaacctccattaactccacttttcctgagtgtagctccgagcctggccacagcggatgctaccacaagccaggcgcagccgggcctcgggagaaagccggaagcccgagagggtgtgggcgctccgggagccaaacgcggccgctcagccgccacgcgccggtggccccgcggggactcgcgttccggtgagagagccccggcgcggcgggctcgaggcgggggttcggggtcccggccgcgggctccgtcggcggggcccgcgcagccgcactcggcgcgccgacttcgggctcctcctcccggctccgtagtaagcatggcggcggcggcgttcgtggtccctcgggtgaaacagaaagcgggagctacgcggagagggagcgaagagcggggctgaggcggcggcgtcactgccaggaaacaaccccaacagtcagcgcgccggcggccgcggcggccctgagagctgactctgcagctgaggtagagagacaacgatcaggaaccctaagaagaggcgccagaggagccgccttctgcctcagaacggcgtgactcggaggtgagagcgcgggcactccctccgcgaaaggcgggggacaccgagccgtcccaaccccgtcccgccccggaggaggcgccgcggaaaccgttaggctgggactgagggccggggcactctccagggctcggccccgtcgaggggcgcggaccacccccttctgtgggcgcgctgtgggcagaggtgcagaggggcagtggggccggggacaggaccggtctactagtcgggcacctgccggggccgagcctagccaggacacgcttgcgggggcgcggccgggggcgccatccagcccaagaggaggcggcatctagcccgagggaggtggcgctggtgcgcgggcggcccttctctctgtcccccgcctcctccccgcggcgagccgcgtagctccggagggctcgggggcgggggcgggggcgggggctggggcggaatcctcctgagaggatcgcccagcacccgcggcgccttcggctttggccgcccggcagccgccgaacttgaacgcttttctgaagagagttttccccgctcatcttggggttaaaacctcgaaaacccgccctctgtttgatcctgcgtggctgcttccagtacctggcagttcctctccccgggcgagttaaccacctgttcagtcgggaggtggactcgaggctgcagtcctcgcccggttttaacaacctgga

SEQ ID NO: 11349 - DNA, 2300 bp, Homo sapien
aagtcatgctgatagacaagagttgggatagagaacaaaattgatcacagcgccaaagttctcaataaatgaggactcagccttaaagcattgagaaggggtagagggttgtatgcacatatgccgtgatctcaaggaagaaggaactttagcatgaaacaggaacaacagtggtgaagggaagcagccttggagtatctgcagactaccaacactgcttcaggagaggataggaagtctctgctcctggggcatgctggggaaagttttctacaggacatccatgcttcatttcaaggcaacacaggaacaagtgttctgtaaaaaggttgaggatataggagaatttatttataatggaaaaaaactttctagtgagcataatggaaaggattgaaaggagatgataagttaaatagtcaagaaatagaaatacaggctgtgtgcaaatgtgagccaaaataagaaggtgggctgcagaggcttgctttttgtttaggggctgaagatcagagacatggtcggatttacaggggggctgggtctaacgtatatgagtacattctgttgagaccaggagactccttgccctttggtctcgtttttcagggcaaccctgccttttcataggaattttgaagttaacaattacctttccccacttgtaagaataggcccttactgtcttatctcctctggggtgtcttacatatatttattgagacctatttctctaggttatcctttgccagttgttttccacctttgtgtgagatggggcctttgaacatagtttacactttttgaaaagtatagccttattattagataatcctgcctttgcctcgctttgtgcccttggcatgttactctgcttcagttttcttacctggaaatgatgctcacttcacttgttaggattaagtgagttaacgcaagtaaaacactccaaatgatgcctagtatgtactctgcactatgtggttatttttgaaaacatggtgatcatacttttacatattataactatttactgagtatcatcaaccaatatacttgatactttaaatttatttaatttcattctcacaacaatgctatgatgttgattaaccttgtcactgaaataagctaagacttcagagaagagcagtaaattgccttgctaataaatactgaagctgttattaaaatatatcttttaataccaaaattcactttctttccactgtacaacttgttacaaaccactgtcattatcattacctgtatatttttgttagctgttaataaatttcctctgaagttacatagcaccataaagtaatgaaagatctccaaaagttcttattctttcctgttgtaactggacatctttggtctcctttctggtctctacttgttcttggatagagaactctgaacctgcacctgaggctgtcttttcagattcgtggatatgagtaagaatgccatctactgagcacctgcactttaatttaaatcttaaatttaaaaaaatcagaaagaaaataaaaccaataatgaaagtggtagtctttattctcttaagaggcaaataacagcctgaaacataaatcccacctttgagacacatgtctatcaaacctatattctatacacaattatttgtgtattgtggatattccttaaggattgagtatggagaattacgttatacaatgacatttcagactgaatcttttaaattaatattatctcaaatgttctaaatgaaaattagcggcaggctgcatgagtaaaaaattagaagatagcacctgtggtgttattgaacacaaagagaatcattgtacatcaaatatatatttctgaaaagtatactttgatgagcttttgaattggttcataaggaagtctgaaagatggtcaaattcagggcagcagcagtagaaatcatttaatcttttttttcccctatatcagaaatgctgcaagcgggaacgtttgcttttttttcccccttgccctttcctgggtcactgcaggtcacgtgatgactgtcacgtgactcggtcaaaggatcttttcctcttacagccttgcaaaaaaaaaaaaagccgttctccaattaaagctgttaacgtgtactacgctgtttccttgttggattttcttgttctctgctgctactgtaaaaacgaaatgagtggtaagatttgctgttttcgaacattctgcttttattttaagacagaaagcattgtattaatctaaagtcatgccgtgtgtttttaaaaatagatgctaaatatcat

SEQ ID NO: 11350 - DNA, 2300 bp, Homo sapien
ccctgttagtgtgggttccccacaaatatttaatatatcattctgaggtttttccctctttgaattatcagtttgttttgctgaaaaatagtgttttaaatgagtggagaaggtaaagttagagctagaattggaaggatagacaagattattatagattaaagggaagcaaagtgaagaagaataattgcataaataaaagtacagggtatagaaatgtatagtcactgtgaaaacaggttttttattataccagcctgactgcagttaatggttcaggatttgttgcaaaagaacgatacaacttagaaggtagtttggaaccaggttgaatgaatatgaagtacaagcctcttggaaatggctccgttttttaagatttgtgaattggagagtgataaaggtgaaatgagtattgtgacagatactgtgatttggctcacttaaaatccatttcaaacttcttccagtgttcgttcctgtagggtagaagctaaaaagctatcagcagttcccagattcccttcaggtagggttctagatattgtttagttcccatcaatcatatatgtttgcttgagacttaaattcagaactgagttaaatagggagaaaggggtctgaggcatccattttgctgaaaacaaggcattatggttctagacccagcatattaaaaacagttaattcatttggtcatctagtcccctgttagaagagtcatgtcacactccagtaggtaaggatagtttaataatctaattaatgtttgtaatttaggcttatctatacccagataagtgtgttttctagtatacctatacctaccaagcacatatatttataaaataatttgctatccttaagcataataaacctttgccttcctgaaaatcaggatttgcctttaaattagcacttaacattatgatcattttctgtttcctgaggaaggtattagccatttgttataccttaataattaccatataagtctaaaagaataagggccttattttagtgagggatttctaattttaagataaagtcctttaattttttagggtttcctgtgtgtctttgcagctctagtaaggttcaaagaggagtaagtcttgtcatttaaaaaaatttatccccacggtgtaattcctgttttttgttttttggttttttttttttagtttgtaatttctaagcctcaaagccacagatatttttcctagctaggagttaatatagtaatattcagtatttgtgtcccttgaaatgatcagctgttaaaattgtcctggtcatggtcataagaattttacatccaaattctaacatgtcattgattatctgattgagtctggatccagttgttttgttttctatttggtctttccacaacttgttttcccctactcctagtcataatatagaaaaggaaattgattcctgaacctcttgtgtctaaaccaaaattactccatcaggaaatgcacataacacataggataaatatctagtatcataacttattaggttactctttagcttgtctaatcagtgttttaagatttatattgaattgtataacaaaaactaattcattttgtttagtgctaatttacatgtaccaatatatttaataagttgttttcatgttgattctccaaatttttaaaatttctaatggtgtaaaaattcttactcttacatttttattttattttatttttgagacagagtcttgctctgttgcccaggctagagtgcaatggtgctatctcggctcactgcaacctccacctcccaggttcaagcaattctgcctcagcctcccaagtagctgggattacaggcatgggccaccatgcccagctaatttttgtatttttagtagagacagggtttcgccatgttgtccaggctgttctcgaactcctgaccctaggtaatccacctgcctcagcctcccaaagtgctgggactagaggcatgagctaccgtgcctaccctactcttaacatttttaaaagaattgtttatattctatggaagaaattttaatctgatgttcattttgtaggttattgaagacaatggtgttcgaagagttgtcgtggtccctcaggcaccagagtttcaccctggtagtcacacagttctccaccgttctccacatcctcctctacctggtttcattcctgtcccaactatgatgccgcctccaccacgtcatatgtactcacccgtgactggagctggagacatgacaacacagtatatgccacagtatcagtcttcacaag

SEQ ID NO: 11351 - DNA, 2300 bp, Homo sapien
ataggacccagcgtgaactccctctcttgagcaatgtcttgcacaactccaggcatctccctatgttagttgcagcccacaagggtctagggtctttcccatgactagaatacaggagtccacggtgggaatgtgtaccactgggggtcacttacttaccctttccccacactggacaacctttctaggctcccagctgattgcagccgagcaggcttacttccttctccttccttgttttacatgtttccagtttaattccagtgttctctcttaggtgatctgttcaaagtgtaacattttaaatgaagttccacattattttctaataaaatagtggcagagtccttgtaaaaaattggcaattttgctttcaacagtacatgttttatttattaactgtgcaaaatggatttttaaataattgataatagttttgtttcttcagtaagctaaatatcttccttaactccactccaaaaaaaagagtctggcttacacagctgatttgcttagcactaccttctgttttaaagtagtatgcaggtacacatgttaagtttgttacatatcctaactgccaaattccatattagtggaatctgaatacagttacagttggtaaagaaagaagtagtttcataaaatactctaaactatagtgtatataatgtacattggttgaaaatgctttatttatcagacatgatatattacccttttttccccagaggagaagaaacaaatatcactttaaatgatctcaagccagccatggattaccatgcaaagtaaggaattcctacagattgcctttataagatacagcataaggggttttttttttaaataattattttcttaaaaatctagtatataatttaaacattaattttggattaaaaacagactttgtgggctgggcgcagtgcgcccgtaatcccagcactttgggtggccaagacgaggatttcttgagcccaggagttcaagaccagtctgagtgacatagtgagaccctatctcgacaaagaaatccaaaaagtagccaagcatggtggtgcaggcctgtggtatcagctactcggaaggctgaggtaggaggattgcttgagcccaggaggttaagactgcagtgagccatgattgtgccattgtattccagcctgggctacaaagtgagaccttgtctcaaacaaaaaaaaaaactttgcagacttcagtttttctattggtaaaattatcaaaatttttccaaaaaaaaaacatttaactcatgttacagtcaaggactaatcatcctgtttgtagaattttgggtttggaatgaatctgtagaatatgtctgtagcatctggtttggcactggaaacttgtcccagcttttggaatttttataaaataattataaatattttgtttacacatatcttttactacatcctgttttagggttcgggataccaagactctagaatttcacaacatttaataggaagaacttagataatgttttactctatgcaggtcttctagtgtaatttactaaaatttcatagactctagggcttacccagctgaagcctaatataacacatttagttaattacccccatttttaaaaagagcacatgtggttgggattatttctgttaaactactaagtgttcaagtgtacttactatggatatactcaaagtattgtccaacctaacctttttcaaactgtagattgtagtcacatttaatcatgaatttaattctgtgggttatattcagcattttttaaaaaagagaaatagaatcaaataggacagaaagcatcagtgtattccccatagttgagaacattgtttcaggaatatatatgcacactcacagttatatcacaattttaaattatttctttgggttgcagcaaaaaagaaaaaaaaacttgtccttttttttttaacggtcaccttttacttctaatagtcatattttcttgatagaacttttagtggacaccttcctaatctgcaagtacttaaaggtgacactattgaaaacaggatacagtgattatgaaaggtaaaactatttattttatcaccatagagtccaggcagaatataattctataaagggaactccttcagaggctgaaatctttaccaccttgagctgtgaacctgatatacctaatccaccaaggatagccaatcggaccaaaaattcactcactttgcaatggaaggtaagaatattctttagggtgtttccaactggacatgtgtttctttgtttcccctggtagt

SEQ ID NO: 11352 - DNA, 2300 bp, Homo sapien
agtgcagtaacaagtaggtttacttctgaccattataatgatgcgccactgttaagtgaaaataccagtgtattggggcttttcttttgctaatgagctttgaaaaattgatgacaagaaatttctgtaattgttctcctatgtgtcggggaaggaatttgccaatactgaataaaattttttatattccgggtaatgtatgttaaaagtaattatgagaaagtgagctttttagcatggaacagaaaaatcaaattctgttacaaaataaacaaatttatagaacagaatgttggtaaaatttgatatggaatatgcctaagaaagattcgtgaagtattaaaaaattaaaaataataatttacacctaccatctcccgtacctttaattagtatcaatttcttcactccttatatttctcctgaattattccaccgacctcattccctaatgtcctgcccttcttacaaaaaccatttcctgaagaaataaggggcagaagaaagtataggtaaatgaaactttaaaatttctcacacctttactttcatgatttttaagtctttttagttaatgtgaatacttatagaattatgaccaaattaatcttgaaacacagggaaaagactttattaatgaatctttaaatatgcagttctgtgcaatcagtggacatttaagggtgaaaaataaaaacactagttacatttgtttttctagtttggaccattttcagaaaaatgtgatattactacagcccctgggccaccagatcagtgcaagccccctcaagtgacatgtagatctgcaacttgtgcacaagtgaattgggaggtattgtaatttccattgacttgtatctactttcttaagtgaatagaatagtttatataaaagaataaagatactgttcatttttaccgcctatattatacagagtaagccctagtttaattcacatgaaaaacagtgacttctttttcctctttgaagaatttgagtaaggtatatttgcattacaaatatttagattcctgttcattatgtgctttgtatttttatgaatggctttgtctcagtactgagatatttcagccactgtaagtttaatgttcagaatagacatacacaggaattagtaaattctatttctcttatatttatccagtacacatctccagtgtacttattgtggatagtaataatcagtgatgataattattatattttcagttccctttgaaatttaacaaaatgtgtgtatgcttttaacatttcatattaatagaattatcttgaaacatatttaccttaaaacactctttctaaagtgacttagtcatatttctacttctaattcaaaacagttatatatttgaccaatcttaaattcagataatcttaatgaataaaaaatgtaaaattgaacagttttgattgtgcttaaaagttttaaagaaactcaaaagcaatctagttttacatgtgctcaggtaaagagcatttttggccaaaagctatttaatcaacatcaagactaagacctttatccttttcttaatttaaaggttcctttgagtaatggaacagatgtcactgaatatcgactggagtggggaggagttgaaggaagtatgcagatatgttactgtgggcctggtctcagttatgaaataaaaggactttcaccagcaactacctattattgcagggtccaggtaaagatgatcagtaccttgtcacttaactctatccagagttttatatttcattggcattttcatggtcatgactttgttaactcggaggctctgttaatttgtaggctctgagtgttgtgggtgcaggccctttcagtgaagtagtagcctgtgtgactccaccatcagttcctggcattgtgacctgtcttcaagaaataagcgatgatgagatagaaaatccccattattcaccttctacatgccttgcaataagctgggaaaagccttgtgatcatggttcggaaatccttgcctacagcatagactttggagataaacaatccctaacagtgggaaaggttacaagctatattatcaacaatttgcaaccagatacaacatacaggtatactctaaaaattatgttgatttttgcctagaccagagagacgctttaaataaaacaatcataaccaaactttttttcttatgtggcacttagaatacgaattcaagccttgaatagccttggagctggtcctttcagccatatgataaaattaaaaactaagcctctccctcctgatccacctcgt

SEQ ID NO: 11353 - DNA, 2300 bp, Homo sapien
ggctgacaatggagaaaagagcaagggagtcgagggcgtctgtgtgggagtgatggcgactgcccgtggaatttacgttgggtaaaggaagaaagtgaagacctggggcaggcaagggaccgggaaaaggaaggaggagccagcgatggaggtcgcagtgggttgaaggattaccggaactgaggtgctaggggaagagagctaaaaagagagcgggcggaggtcagaaagagggctgactgaagtggaggtggaggaaggctggcaggcaaccgtgaggtgtaagttccgtcgacaggcgcggctgagatcgggtggagagcaaggtcataggtggaaaggaggtcaacaaactagaggccaaggcattccaagactcggcatgggtgtgaacggccgcagatgcagtgcttcaaagagagcgcaggcacctgtccctcagggactacgggtgaccacggaggaaagcgctagggagggcggttttaggaccgctggaaacagcagcgatgagggaggcgacaggtgtccctcctccaagctcacagtctgcatgtgagagagaactgcaggagaagcttgccctaggcaaagccaggtgtcaggtccagaatcgagactccagagaagaggttgaggatttaagccactgagggggtggagctgggcagtgagtaggacgtcaggcttgcaagctctgggattaggccgaccagagcccatatcccagtcccgcctcttactgcctgcttgatctcaagcaagaccgctttgttcatgggcgaaaggagcgccccgggccatgaggattaaatggagagcacagggccagatccatctaaattctcagtaagtgttagctattgttattaagaccacaccgaacagactgaacatccgttttagcccctttccccaattttcgttctttccggtgttgacaaatcctctagttttttaagtttataaaacatgttgtacataagaatgacatatcacatgtgaaagtactctagtgtccacgtaaatatttgtcttgttctttataataagtaaacatgctcacggatccttgaaattatctggtcactgccgggcgcggtggctcacgcctgtaatcccagcactttgggaggtcgaggcgggtggaccacctggggtcaggagttcgagaccaggctggccaacatggcgaaaccctgactacacaaaaaacacaaaatttagccggggcttgggcgctcctgtgctcccagctactcaggaggctgaggtgggaggactgcttgagcctgggaggtcgaggctgcagtgagctgtgatcgcgccacttaaactccagcctggacgacagtgagaccctgtctcaagaagaaaaaaagaaagaaagaaagaaaaaaagaaaaaaaagaaattatttggtcaattatatggtcagctccctccaccactcgcgaatttacagaagaggagaactgggctgggcgagaccaggactagcccaagattacacaagttactcggttgtagagccaggattagacaggagaggctctagattctggtctagactcccctcctattatttagcattatggcttcctgaggattaccatgagccctcctccaccgtcaagcggcagctaccagccaccagaccagatcccttcgaaggtgcccggagtaccagactgacaaaagcgcccgtacagtgctcagtcctgtaaccaaagctgtctagggtgcagacatcgctcaccggaccgggtagggctcgtgcgctaagggcgccgggtattccagttagtggagagggaagcgccctggaactgcatgggcccgggagagggcgcgggagcggagcagggccgggccggggcgggccgcggccgtgggcggagactgcgcgcagctagctcgggagcgcctcggagcccaccccgcagagccgcttctcgcgccccgcagcgcagcgcagcgctccgccgtctgacctgccgcgcccgcagcgtgcgggctgggaaaggaggcgctcaccgagagggaccacgcgccaggctcccagcccgacccgggacgcggcggccgcgcggagcacccatgggcagcccctggaacggcagcgacggccccgagggggcgcgggagccgccgtggcccgcgctgccgccttgcgacgagcgccgctgctcgccctttcccctgggggcgctggtgccggtgaccgctgtgtgcctgtgcctgttcgtcgtcggggtgagcggcaacgtggtgaccgtgatgctgatcgggcgctaccg

SEQ ID NO: 11354 - DNA, 2300 bp, Homo sapien
tacaacactttaagactggcttttaaaaactcaccacaatgcccttgagattcattcaagttgtacgtatcaatagctcattactttttatggctgagtagtgtcccatggcatggatatactccagtttgctttctattcattcactaaggactgtttggcttgtttacagtttttttgtttttttgtttttgagatggagtctcactctgtcgcccaggctggagtgcagtggtgcaatcttggctcactgcaacctctgcctcccgggttcaagtgattctcctgcctaagcctcctgagtaggtgggactacaggtacatgccaccacgcctggctaattttttgtatttttagtagagacggggtttcgccatgttgcccaggctgatctcaaactcctgacctcatgatccgcccgccttggcctcccaaagtgctgggattacaggtgtgagccaccatgcctggcctgttttcagtttttgactattaaaaataaagccaccatgacattcatgtacagagttttgtttgaacataagttttggtttgtctaggataaatacccaggagtgtgattgctgggtgatatgataagcatatgtgcaactttataagaaactgtcaaactgttttctagagtggttatgccattttatagtcctaccagcaatgtttgagagatccggttgctctgcatcctcactagcatttagtgctgtcagtacttgttattttagccatttaaataggtgtgtagtagaatctcattgtggttttaatatacatttccctaatggccaatgacactgaacactgttttacatgtttatttgccatctgtatatcttctttggtgaaatgactattcaagtctttgatccattttctaactggactgtttacttactctgagtttatatggttctttatatattctggatatgagtcctttgttggatacatgctttgcaaatattttctcctagtccatggcctgtctttaaaccttagtgttaattgccatgaaggcactgtcaacaaagtctacacttcaggaaaggtgcagaatggagttctctggatatagtcaaatcacctgaagagctttaccctcagaacaggcgaactagaaaaaattctacaagccaaagaaataaatagcaagctgaaagatagatctgaagaaattagccagaatgtggctcagagaaacaaaatgatgcaatattttaaaaataataatttagaacctcagaaggtttaacctatgcctaataggaattccaggaggagagtctagagtaatgttgtccaatacagtagtagccaatagccacatgtcactacttaaaatgtaaattaattaaaactaaatgaagttaaaaatgcagttccttggttgtactggccacatttcagatgctcaatagccacatgtggctggtggctaccatattggacagtgcagatatagaatactacaggaaatcctactggacagtgctgatctaggtcataaaacaagtctgaacaaatttcaaagaactggtatgatacagatgttttgtggaaataaactagacattagaaattaaaaacaaaataactcctactgcctcctctcacctttttccccattacaattccacctcttaatgtcttcatgttcttgatgagaagcagaacgtccctactgtgttccatggcaccaagttccccagaacccgccagtctctgatgacagaacatcctggaccgcccagctccacaccccaacccaagaagttctctaaaacactgaccatgacagcctggggtaggtttccactttaacattctgaccaaaattctcaactcgatgcagtcagagtctgcgcaacctgggacctcgagccaagaaatcctcaagtgaccttacttggcaaaaccaacaaaacaaccaaatacaggtctcaagcgatttacagctcggtgcttaactcggtcaccggccgaggggcagccctctggcgccaaagccccgcctctctatgacgtcacacgaggagccctgaagtggcggtcaagcttgaggcgtcatctggctgcgcctagtgggccgttgccttacagttgctgagaggaggcgagaggcgggggcgctagggccgagatcatgtctgactgggagaggtttccttggcagcagaggacgctaggtttgggatgaaagaagctgggcagatgcaaaatctggagagcgcgagggccgggcggtcagtcagcacccagactggcagcatgaccggtgagt

SEQ ID NO: 11355 - DNA, 2300 bp, Homo sapien
aatgcagctggtaacttgaagtaggagctaatattcatttcccattccaaaaaccctaggctcttaagaattatgctaaatctatttggcctgtgctccataaatggaacaacaaagcctgatgacagcatggtttactgaatattttaagccttctgttgagacccactgctcagaataaaatattcctttgaaaatattactgctcattgacaatgtacctcatcatccaggagctctgatggaggtttacaaggaggttaatgttgttttcatgcctgttaacatccattctgcagcccatggataaaggagtaattttgactttccagacttgttaaagaaatacatttcatatgttcatattgttctaataaaagttaaaaaaacaaacaaaagaaatacatttcataagatgcaagcagccatagatagtgattcctctaatggatctgggcaaacttaatagaaaaacctgctgtaaaagattcatcattctagatgccattaagaacatttgtgattcatgggaggaggtcaaaatatcaacattttcaggagttcagaagaagttggttctaactctcatgggtaactttgaggggttcaagacttcagtggaggaagtaactgccaatatggtggaaataacaagggaacaagaattaagaatagagcctgaagatgtgactgaattgctgcaatctcacgataaaacttgaacaggtgaggaatgttgcttctatggatgagcaaagaaagtggtttcttaagatggaatctactcctgctgaagatgaaatgacaacaaaggatttagaatattacataaatttagctgataaagcagtggcaggttttgagaggactgacttcaattttgaaagcagttctactgtgagtaaaatgctaacaaactgcatcacatgctatagagaaatcttccatgaaaggaagagtcaacgtagcaaactttattgtcttcttttaagaaatcgccacagctactccatccttcagcagccaacaacctgatcagtcagcagccatcaacattaatgcaagactctccaaccagcaaaaagattaggactcactgaagggtcaggcaataaatatttttataaatcaagttatacatattgttttcattttgtttttgcttttgtttttgttttattatactttaagttttagggtacatgtgcacaatgtgcaagttagttacatatgtatacatgtgccatgttggtgtgctgcacccatcagtttagatataatactattgcacacttaatagactgcagtatagcgtaaatataacttttatatgtactaggaaaaaccaaatacattttatgactcactttattgggaaatttgctttattgcaatggtctggaactgaacctacagtatctcctaggtatgtctatacatgaatgcatttggcttctttttaaaattctactttaatgcaaaatatttgatcattgattattatgcattcagagaataagtttatgttttttaaaataatggaaaaaggtataattgactcaaagagccagaaatgtctaggacatttaagatagaatcatatctaaactactgtgcctttctcttttgtgaaatagttcattaactatgtcatggaacttcttgtaataatagcagctaagcattatagaatacatatagctaaacattatagaatatatttattattattatcactttctttggtcaaaatatctagttttacatatcaacttggactctaaaattatttcttgtataatccttatgtttctattgcaggaaagattttaaactttgtataaaaactttcaagcaaaactttaaaaatatctttttaaaaatatatgtatttaaatttggcataaaacttgaaactcattttaatttgatcacttttaatgtttcagattactgaattcatgttattgaaaacttataagacattggtataaaaatttaagcatattaagagttaaagttataatttttgttggcttatttgtttttagcattccatattggaagaagagatttctacacatgaaaaaaatgcctttgtttagtaaatcacacaaaaatccagcagaaattgtgaaaatcctgaaagacaatttggccattttggaaaagcaagacaaaaagacagacaaggtaagagctaaaacagtaacattatgattaaagtacatgcatcgcaatgccaaaaaccaatgtaaaagcttaatgaagaattcaaaatatggtctgtgatgtgcaca

SEQ ID NO: 11356 - DNA, 2300 bp, Homo sapien
gcatgcctggtgatttttgactggatgtcagatattgtgaattttacgttattgtgtgctagattttaaaaaatttatataaatattttaaaattttactctgggttgcagttatttggaagtaattcgatcctttcggggcttacttttaatctctattaagagggaccagaacaacctttaatctaaaactaatttggttccgctactgaggcaatatccttctgaatactcaacccagtttcctgtatattatgagatttctgcactcttgctgttggaaaatggaatggtatttaataggaattaaatatacaaacaatcataaataatcttagtaattatatgttttaaagtccttgacttgactttgtgcctttgaatccactatagattgatatacagtctcccagttttaaattaaccttgcagttatcctaagaaccacttttataaattctgaatttctttaattatactacaactctcggagtataacctaaggtactagacacttcataccctcagtgatttagaattatttccatttaacatctctttaaaaaggagaaataaaactctaaaaattataaaactactaattgaaagaaaaattggcagactaatctctagtcgtctttgatacctatttaataggtgctaagaaataaccaaataactgtataatatagttaaattttaattctactttaaataaacgagatcaaaacacctatattttaaggccgacttttactgacttatttttcttaagggatataaacaactgtttatagatgtttacctttcaccttacttaagcttatattcttagagagattttaattctgcagagaataagaatgtgttacttaataataggtctaataactacttctgttccttctgtacttggaagatccgtcagtagaagggcccaagacttttgactggggacatagtgggagatggagaacctaaaagtgttctgggctaaggaactggaacagaactccaaagcaggatctgactagcattcatacagagccagcacgtattccaagctgcatacattgcctcctaattccaaagaatcctacaaatgccatctaaacctgccaaccacgagcccactcagctttctacctaattcctcatccccaaaccttacagagagtttcgtaattttaagatactttactctataattgtatgtgtataatcactttaataattttttgtagcctttagactttgtaattcttataagaggtgttatgcattctgaccggtaatgtttagggggaaaaaaaaccttctttccaacagcaataattacatttggtttgcacatacatgattaaactgctcttttgtttttggtgtcaatatttttctatgttctttataattttcccttttataactgcaaattttggtccaagtttcaaaatataccgtattaagaaatacatttttttcataaaattgcacagtttaaattataagtactctaaaaccttccttgctttttaaatgttaagattaagtttctaatacaagtacttgtgtgtttacttgctccactttcttatggttgggaatagcatcttccttcaggagctagcatattagcaggtgaatctgttattattactatcaacatgacttttttaaaaataacctttatttacatttttaaacaaggtggtccagccagtttaatcagttgacaaaaccccatgcatgaacaagtataagacttaagacagaaaaaagtgatgagaaaaaattttgtttatctctagacttttttcttttttggcccaagaatttattttgcctcagctttacacgcattcttgtgacgttacaggactgaggagggaggaagtaaaagggagctgtgactgtggtacgtatctgaaagcaagtgttagagagggagtggagaacgcataagcaagctggtttgaccagaaacagaactgcctgtgacagattaagagacaagcaaggcttggaatctgagagcaagcaaagagagtggaaatttacagctgccctatgtgagtgttcaagtgatcattttctggtaacgttttccagtggtaactgttactcttcaaaaagagggacagaaagtcaagacctaattgtggaaactcttttctctgccacgcttggtaataggaggcaacctctattaaatggacgataaaggctacttcatctaaagtgctttgagctcaagaaagagctgtcttcagcacctcaccatgtgtctacattttgttgct

SEQ ID NO: 11357 - DNA, 2300 bp, Homo sapien
ttaacacaaaatggtaaccactttcctatgtcattcaacagcctatgccactactctttgaaaacgttccttttaaaaggctgaaaaatataatgatgggatgtgtcataatttataaaaccattcttctaccattagatatttgttatttccaatttttcacaagaacaaaattacactgtgattataaagctttgattctatctctatttccttacaagtttcttagaaaaggtcaaaaggtatatgaacttttgtttctccatgcattttgacaagccaactggaagatacaagtcaagtggaagatacaagcatggaatcaagtaattaagaaaaatgattctcaggccaggtgccgtggctcacacctgtaatcccagcactttgggaggtggaggcgggcagatcatctaaagtcaggagttcaagaccagcctggccaacatggtgaaaccccatctctactaaaaatacaaaaattagctgggcgtgatggccggtgtctgtagtcccagctactcaggaggctgaggcaggagaatcgcttgaaccacggaggcagagttgcagtgagccgagattgcaccattgcactccagcataggcgacaagagactccatctcaaaaaaaaaaaaaaaaaaaaaaaaaaaaaaaacatcaattattttgctgtttgttttgttttttggtattcctgatgcgagatgtctttatcatgtattgttgattaggttgttcatcagttaatcttgaataactgaaatctaagctgaaggcaataatacatcggctttcttttcatgcaagtcaaactgctaaaatctaccacaaaatattagcctttcatcagcttggtcttcagatccaatacattttcccctcaaatgaaagacaatgcaatgccatccacaacaatgctaaaaaaaaaaaaaaaaaaggaggagggaaacaaggttaagtcctgtcttcttcctcctaccccaaaaagagctcagaaattaaggtgctttccctaacaaagcctcctcctgctccatgaagtgaccaagcatgtcatggcagacccagagatttataatcttcaacatatcgttatcggggaaatcaagatttgacaaaattcttccttcacgccccgtttctgcaagaccaccactttctagcttaaaataaagaaaaaaaaaagacagctgcaggaatgcttggctgcccgctaatgtacaattttgcccaaacgcagaacttgacgcccactattaccaaaggatggccttagtaaagtaacccccgcgaagagcaaactgtttagcagccgctccctcgaaaaggacggaagaggaggtctcttctgaacctgaggatagtagagaggcactccccttccactactagctttgctcctttctcaatcaggcagttcatcagctagcctcctttgtcaaagggggttgatggtcagaatctttgcgagacaaaaattactaaaagagctcccaggaaccaatgttaaggcatcaaaggccccgcccagcccccacaatgatcaacaaaccaaaacctgggatccctactattaccaccaccacaaccatcaccaccaccaccaccaccattcctcgctctctctagccagggatgagactcaggcccaggaaacccatcctttccgcaagtaggaaggcgctgggtctcctcccttaggcctctcctttaccccattgttctctccggacccctccactacggccaggcgctatgtatgttttcaacccccaagaagcccagtcccagccacacacaagatggcagcctcacacctaccggaggaaacagctgcgccaccactccagtgatgccggcctctcgactacgagtaactccattggctcagctacagtgcgcgagacaagccgagagcgctagcagtcaatcgggaggcggcgcgctcgggcgccactgcggtgccagcggtaagtgcgccgagtctctgaggcgtgaaccagtggggagtgcgaccaatcaatgggctcctggctgggtggtgggacggccggcgtccgactcctcccatgtagtgatcggtttaggtaggtcggcctggtccccggcggaggttacgccttccctcatccccggtagaggcagggcgggactgttgtggttgagatgaaggctagtaaatggtgaagtacttcccggccagagggcacctgcgctcgggaggtttgggcggcttggcgtcggaggagagccccacccgcggaggaacccagccttgccaacggagctggcggag

SEQ ID NO: 11358 - DNA, 2300 bp, Homo sapien
cattttaaagctttttatagcatattgtcaaactctcttccagaaaggttctaccaatttatacttccacctaagcacactcagtaatagttttatttttttttagacatgaggtctatgttgcccaggttggtcttgaactctgggctcaagtgatctgccaaagtgctgggattatagatgtgagccacccaccgcgcacggccatagattttttttttttttttgagacggagtctcgctctgtcaccagtgcagtgagaagggtgcagtggcgtgatctcggctcactgcagcctctgcctcccgggttcaagcgattctcctgcctcagcctcccgagaagctgggattacaggggcccgccaccacacgcccggctaatttttgtgtttttagtggagacggggtttcaccacgttggccaggctggtcttgaactcctgacctcaggtgatccgcccgcctcagcctcccaaagtgtggggattacaggtgtgagccaccgcgcccggcccatagctttgtttttaagcagctctcaccagcgttcacacctgaaaatttgaaaactgaacgtgcacaagtaaaacatgtttcctggagaaaatctgcaaaatacaataaagcataaaggagaaaatttaaacaccatcccatcatccagagacaactggtgttaatatttcagagagtaaatgggcttaaaaaacttttttccccttctcactttttcattttggtagaaaaataattaagccagtctgctttgcttcaatgtatggttccttttcgtttctaaaacaggctttaaaaacacgtttaccatttcctctcggctccttacgttttaattgtaacgacagaaccacgggttaagtcacgcttaagaaccacgggttagtcacgcttctaactacttcacgtgttcttatttaatccccctaacagtcatgtgggttaaattagcagctcgtttgctgatgaggaagctaaggaatgccataccgtaagtggcagacacgaaataaggaaccaggcagcatggtttcagagcctatgctttggttactccatttgacctcttcaaatttactcctctccttggcctcatgtgttagtatttacagagctcactgcaggtttccacatgccaaagagcacagttaattacatatctttccttacttaattacttattgggctgtggctgatagcgagtcagaagtgttactatctaatctgaactccatgatcttggatgaatgactgaacttgctgtatttaagggctcgtgtaatcttacctgtgaaatgggctagtggtttaaccttcaagttctgcttctgggttttatactgctgtccatttcctgccgcccctttgacaacctcaggttcccagcagcttaggaatcacctctcattaaggctgcaccctgagacagacaggctgaaatggaggttggaaactcagtgcgcccgcggccccttctgcagccaggactgcacttgggtgccaggagaagggaggctgcaagggctggggtccagcccctgctcgggcggccgagggctccgcggcgttttcagctcctccaacctcccggctagaggaactgtcgggggccagccacggcggtgccttggtttcacctggctccgctgcgttttctacgccgcccgcctgacctgaggagtgagctccgccagctccgttggcaaggctgggttcctccgcgggtggggctctcctccgacgccaagccgcccaaacctcccgagcgcaggtgccctctggccgggaagtacttcaccatttactagccttcatctcaaccacaacagtcccgccctgcctctaccggggatgagggaaggcgtaacctccgccggggaccaggccgacctacctaaaccgatcactacatgggaggagtcggacgccggccgtcccaccacccagccaggagcccattgattggtcgcactccccactggttcacgcctcagagactcggcgcacttaccgctggcaccgcagtggcgcccgagcgcgccgcctcccgattgactgctagcgctctcggcttgtctcgcgcactgtagctgagccaatggagttactcgtagtcgagaggccggcatcactggagtggtggcgcagctgtttcctccggtaggtgtgaggctgccatcttgtgtgtggctgggactgggcttcttgggggttgaaaacatacatagcgcctggccgtagtggaggggtccggagagaacaatggggtaaaggagaggcct

SEQ ID NO: 11359 - DNA, 2300 bp, Homo sapien
tgttggccaggctggtcttgaactcctgacctcaggtgatccacccacctcagcctcccaaagcgctggcatcacttttatttttaattgaggttagccccaagttttctttgttcatttttttttaagttgattaactttacatttcacagttcttaaatttatgttttcttaacaaagtgtacatttagtcagttttgataaggcccctgtaaagaagaagttagcatgcttctactttgctttctctcatcttgaaacaatcccttccatctctcctccagaaaagaacataatctctcatgatatctttaagaatttttctttcatttgttattaaattcagtttacatttaacattaatgtgttttactcatttatttgctcactattgctacgtatacctcagtgctttcttataggttcatttttcatcatcagatacttatttctttcacagtctctgagtgactctttgaatgtctgcaaatgtctttttttcatctttagtatggaaagatagcttggctggatatagagttctgggttcatactgactttgctttaacattttgcatctgacatttctgatgagaaatctcattactagtctaatacaccttccttttagataatctacatttttctggaaacatctaagactttgtgtttttgatattctgaagttagtcacggtttgtctagcgatgtgtgttaagaattttatcctggttggtactcagtggattcagtttgcttatgtgttttccagttctgagaaattcttgctcattattgcctcctctccattttctcaattttttgcctcctcttgtttccttgctctgtgttcttggtgaattactcaactcagtcttccagcttactaactggctcttcatgttagtctgttctgtcattcagtcatctattgagtttatttcaacaactgtttttatatccaagatagctaactggctttttttcaaaattgtgtgttatttcatggatgagatttccttctttagctcagtctctttcatagtgtagccttcttcagatatttgaggactctcagttgtgcattaatctcctctgagaggattcctgcccatcgttttgctgttgtgattgtggttgccatcatctctatagcttcccatctgtttcctttccccagaagggccttactgacttggcccttagagagttccctttttgttttcagcatggctatatatatatattttaaatctcctaacatttccatggtttggtgtggaagtggcagaagaatttacagtatcttgactaacatcttgagaattaaaattgttgatctatttttgacctattattctacctccagatatgttatcctagggaaattgccagagatatgtataaagtatatttattttagcattatttattatactaaaaattaatctataaaggaaaacaatctaaatatcgaatatagaggtttatattattaattaatatttttattaaaatttaattattaaaatatttaatgtactataatgtatgcgttattgaccaaagtatgttatacagccagttgtattatacaaaaatattagtgatggaggaaaatgcaggaaatgtttttaatgaaagattataaaaaattaaatatactacaatccaaatttttgttttaaaactacattctgaaagaataacaataattggtagtattccttgaatctttcgtatgtcaggcacattatatgtaattaagtcttgtcctcagaacaacctgtgagatagttagtattatcccctttttaaaaggtttataaaagacttataaaatggagatagtaatataaatacaaatatattaaatatgggtgataggattgggtgggccttctctattatttctaattttgatactttacatattttttccagataacataatgtttttttgtaatggttcatgctgttttaaaagatcaagctgttataacaatatcttatttccttatatatacatatatatatatatatatatatatatatgtggtcctttacaaatatgcactattctttattgttttccttacagaatgtttcatccatttgtggaccaaaagatggagttggtttttatttttaaaaagataatgttaatgatctgataccactacaaatatttacgtgagaagattcatggacttgtcttttggttggactgtcactcatttctgaaagtttcttcagccacaatttctatttgaaaattcaagtatcaaaggataccaggt

SEQ ID NO: 11360 - DNA, 2300 bp, Homo sapien
aaatgtgaagataaagcacagaaaagttaaataactcatccaagataatacagctagtaaatgtggaagctgtgatgggaacccaggcactctacctctaagagctttcacatttagcctgcttccctcagtagttatcagtgtcagtgaagtgtcaataaactgctttttgagatgtctgattttctcttttgcatattttgttgacagcatttatgaatgcagccttttgtgcaaatgtaatcgacaattgtgtcaaaaccgagttgtccaacatggtcctcaagtgaggttacaggtgttcaaaactgagcagaagggatggggtgtacgctgtctagatgacattgacagagggacatttgtttgcatttattcaggtaaagcaaaagtttattttcaaattattctagagtagaatccacttttctaaatatccattttcctagccagggctgttgagagcttacagcaaggtaaagagtaacagtatctaagaggaacatcagagaaaggcaggtaaactgggaacttgagcactaaagagatgagatgcttaggaggtactttcttcaagaaaagaaaggttcagagatgacacttgggtttttgtgtgagggcctgttacgtacaaggcacatttgttttgtctgcatggctacaggtactttggggtaagggaataaaacttgttaaaagtaaaaaaaaaaactaaatgactggcttgccaaggtaaagatgaccagtcaaaaactttcttattcaatgttttgagctattattagaatttaacaagttaattatgtaatatctgcatgttataattcagtcagtgactttaggcaactcactctattttggggactgcagagagttgtccatgctgcagagcaaaacttcccgagcagtgtgttacagtcatgcaattactgattctttagggccacagcccccagggccaaacacatcagtcttcagtagtcttacacatttacctccagcatgtcaggcaaaatcccttattttctgtgcacatccttctgtgagaaagtttgggaaacacggctttagagccagtctaaaggaattgtccttgacttattttagcagttaggcatcagggaaaagaacaaccaggttctgaaaattactcatctgaaaaatcaggtttaatctgtttacatgaccatgtgcttagaaaagaaatatcaggttcacatcagggagggcaagaagaagcttgcagagttcagagtagtcacacgtatggatccctgccactccccatttacagatccacattctacacatcctgcctagacgttcatctctcatacttctcaaaataactcttggatgaaagctacctgtaaaatgccaggtggtgtccaggaagtatcattggttttatcgttgttgctggaaaatgtaactaagatatgtctccgatctaacaatgggtaagaatatcctgctattaatttggacttggcaactataatattgaatcccttgaaagaaaatgcatgaactttagaccaagattttagtgttatgcagaacttaatatgacaacactaagaacatatcaccacatatttaaataggtacttttgttaaaaattttaagtttcagatgataacgcctttttaactagacataaaagctacaattttatggctagagtcatctctctaattttctagagtactttctcatccatatctttttgtatcattctagctaaatctcttctcttttgtattataccaaaacagacaaatggtttttttttagataccctgttttttcatatactggaagataagaaatatcacattggtctttgtcttgcaacagttttgtaggatgagttaatgtgtttatcttcattgtagaatgtgtgggttctttagtcatggagtagaaatagagatgtctgtttatcattagcaattatcttctgtgttgttcaaactctttaacattttccttttaggaagattactaagcagagctaacactgaaaaatcttatggtattgatgaaaacgggagagatgagaatactatgaaaaatatattttcaaaaaagaggaaattagaagttgcatgttcagattgtgaagttgaagttctcccattaggattggaaacacatcctagaactgctaaaactgagaaatgtccaccaaagttcagtaataatcccaaggagcttactgtgtaagtaacagctgaggaacccagagtaaatctaaattattatcaatcaattggttctttttcattccttcccc

SEQ ID NO: 11361 - DNA, 2300 bp, Homo sapien
ccatttttatctctcttgaagcttataggtttatctttgtctcaatgttctgtccctgttaagagtccattttcatcctttgtactaggtgcctggtgggatcattccgtctgaaactaatgatttcccatctcttcactgtttctggaattcctgttttccagatgttagacctccagaatttgatctctaattttcctatcttttctcttaactttcagctctgtcttcttgctaggaccttttcctaggagcatttctcaatttaatcttccagttcatctgttgcattttatttttctagtctcatattgtctcatatttttaatttctaagagctccccttctccgaatattctttttttttaatagcatcctattttggctcatggttgcagtattttatctccttgaagatgtttgtgtgtttatgtatgtatatgcacacacgtatacatacacatacaggcatgcatctctgtattctttcggcataatctgtgtcctccagggtttgtttctttgtttcccctgtatgtttgttttggtcgttcacattataggctttcctcagagttaatggtcttggtagtctactcatatttaagtgtggaacaccaaaaagcttactataagctgagagtgtggtaaagggctctttgttttactatgacctacctgagctatcttgctggggaacaccctaatgtcagtctctttataaagggcctttcattttggcctggcaagaaatactctttcatcctcctgcatggagggcaaaaaaaaatttaaaaattggctgctagggtctgtctgctcacttccctgttttgcagaccccacactcttctgcaattcatttcatagttgtcaagactatacaaattgtcctttttaatgttctctcttctgctatccctagttggcagtcttcctctttacaacctgctgaaagtggaagacctccagttttcctttaattcctcagcaaaccaccaactattatatgtcttttttccagaacaacttattttttaactataattatatgcatttatgttagattcactgaaaacctcatcttgtatggtgctctgtaccctatgggtgctaaataaaggcttgctactggcaactggatttaggatcggctaattctgcgtccttttaagatatgcttatttaagccaaactcggtatgataatttttttttttttttttttttttttgagagggagtctggctctgtcgcctaggcaggagtgcagtggcgcgatcttggctcactgcaacccccgcctcccgggttcaagcgattctcctgcctcagactcccgagtagctgggattacaggcgcccgccaccaagcccggctaatttttgtatttttagtagagacggggtttcaccatgttgaccaggctggtctcgaactcctgacctcgtgattcgcccacctcggcctcccaaagtcctggaactacaggcgtgagccaccgcgcccacccggccagtatgatagtttttaggaggaaccctcaggagagtgattgtttctcccgctgtgttgtggggggtggagtagggaagcctggcgtttggggtttttttgtttgtttgttttttgtgtgtgtttgtttgtttgtttgttttgagacggagtcccgctctgtagcccaggctggagtgtagtggcgcgatctcggctcactgcaagccccgcctcccgattcaagcgattctcatgcctcagtgtctggagtagctgggattacaggcacccgccaccatgcccagctaatttttgtatttttagtagagacggggtttcaccatgttggttaggctggtgttgaactcctgacctcgtgatccgccctcctcggcctcccaaagtgctgggattacaggcgtgagccactgctcccggcgtttgggttttttaagctattcaaattaagactagactggaatctggagcagtgtgtgtgacaacccctctctgcacacccaactttccccgggccggctagtgactcaaagcgacagcccagatttaagaaaacgaaacctagtgcagctggggcacttccgggatctcgctatccggccgccacccgcagctgcagcacagtcatggcccaggcgtcgccgccccggcccgagagggtgctcggcgccagcagcccggaggcccggcccgcgcaggaggcgctcctccttcccaccggtgtgtaccgcgggggcgggcgggcgggcgggcggggctgggcagcgacgggcccggtcaagggg

SEQ ID NO: 11362 - DNA, 2300 bp, Homo sapien
ggctaattctgcgtccttttaagatatgcttatttaagccaaactcggtatgataatttttttttttttttttttttttttgagagggagtctggctctgtcgcctaggcaggagtgcagtggcgcgatcttggctcactgcaacccccgcctcccgggttcaagcgattctcctgcctcagactcccgagtagctgggattacaggcgcccgccaccaagcccggctaatttttgtatttttagtagagacggggtttcaccatgttgaccaggctggtctcgaactcctgacctcgtgattcgcccacctcggcctcccaaagtcctggaactacaggcgtgagccaccgcgcccacccggccagtatgatagtttttaggaggaaccctcaggagagtgattgtttctcccgctgtgttgtggggggtggagtagggaagcctggcgtttggggtttttttgtttgtttgttttttgtgtgtgtttgtttgtttgtttgttttgagacggagtcccgctctgtagcccaggctggagtgtagtggcgcgatctcggctcactgcaagccccgcctcccgattcaagcgattctcatgcctcagtgtctggagtagctgggattacaggcacccgccaccatgcccagctaatttttgtatttttagtagagacggggtttcaccatgttggttaggctggtgttgaactcctgacctcgtgatccgccctcctcggcctcccaaagtgctgggattacaggcgtgagccactgctcccggcgtttgggttttttaagctattcaaattaagactagactggaatctggagcagtgtgtgtgacaacccctctctgcacacccaactttccccgggccggctagtgactcaaagcgacagcccagatttaagaaaacgaaacctagtgcagctggggcacttccgggatctcgctatccggccgccacccgcagctgcagcacagtcatggcccaggcgtcgccgccccggcccgagagggtgctcggcgccagcagcccggaggcccggcccgcgcaggaggcgctcctccttcccaccggtgtgtaccgcgggggcgggcgggcgggcgggcggggctgggcagcgacgggcccggtcaaggggcctgccttccggtcgtggccgcatgggggcccgacctgcccctactccgggccggggccctagacgccggggcggcgctggacgaacttggctcaccactcgcgtgcctgttggtgggggagggggccagaggacagggcgcggcccaggccagttccacaggtggctctgactgcccatggtttcgcgcgagtggtgggcacgcttcggtttacctcccccgcgggtgacagcccagtgcttccaccacaaccgatgtcaactctcctagcgcccctccgctcaccggtaaaccaggacagtggaggggcgccctgatgcggtgaggcagggggcggccctgagggaagagctgggtctcacgttcacggaggacgtgactggaacccgtctccccttctccagtcgttccagtcctccccggccctctacttgagtgggtgggtcttctgatgggttcctgcccttgcgtgtgtgtatagctccaaacggtgtgccaggctcagggcaaggtcctgagcatacaaagatgagttaggcagaccctgccctagagactctactaggcaactttaatgaggaggtcagaaccacagaggtacagatgagagactcctgactcccagtcttcagggaaagctttttgaggagaggatggctgggcttaccctttttttttttttttttttttgagaggagtttcactcttgttgcccaggctggagtgcaaaggcgctatctcggcccactgcaacctctgcctcccgggttcaagcgattctcctgcctcagcctcccgagtggatgggattacaggcatgtgccaccacgcccagctaattttgtatttttagtagagagggtttctccatgtttcatgggcttacctttaaagggcaagactcagccaaaggtggaaaagttgaaggggtgttcccagcagagaggatgacacaaaggcaccaaaccacaaaacgtcacacgtaaacatcatacgtggcaaccacaagccaatcagttggatatttcattcattggtatacatatggactgtaaggtaagtcacgggagatgcgcttccatcctgacctcttcctcaaactccagactggtataaccaacttcttccatttctgaaatgatctcaaactg

SEQ ID NO: 11363 - DNA, 2300 bp, Homo sapien
ttagtagagacggggtttcaccgtgttagccaggatggtctcaatctcctgaccttgtgatctgcctgcctcggcctcccaaagcgctgggattacaggcatgagccaccacgcccggccttctaatgcttttttaatgttccagcaaatgtcagtccacccctgatgatgatttggcattctgcagaagctggctatagcctttaagtagatgttctccctgcccttcctgttttcctgctaatggtaaccgtttcaatttacttgcagattgtctgcggttacgcacatactctagcactaacagatgagggcttgctgtatgcctggggagctaacacatatgggcagctgggaactggcaataaaaataacctgctaagcccagcacacatcatggtggagaaagaaaggtaacttggctgtgccacgtcttgggactgtgtgtgcgatgtggccttggggctgtgtgtggcagagctgtggtgtttggctttgtgattcttctgtttattaacattctcattttggacaaaagagataaccttcccttctcccttcccccttcctccttctccctccctgcttcccccttcccccttctccctccccccttcccttcccttcccttcccttttttgagacagagtctctgtcacccagactggagtgcaatggcacgatctcggctcactgcaaccttcacttcgtgggttcaagtgattcttctgcctcagcctcctgagtagctgggattacaggtgtgtaccaccatgcccagctaatttttgtattttttagtagagacagggtttcgccatgttggccaggctggtcttgaactcctggcctcaagtgatctacccacctcggcctcccaaagtgctgggattataggcatgagccccaccgtgcctggcctatgcaaaagtgttttgagtagtagccagaatgaacatgaggttgatatgattcttatgtagctctctgaaataaccacctgtgattgataggtgtgaatgcatcttggtataattactgcagtcttgctgttgcccttttagtatggaagacaagtaaggtctatggccatgttgatgtttatggtgtaatataaacttttactttgagccaagtaaaacaacttttaaataaatctgctcttgaaaggacattatctgtttaaatattgatttgatataatatgtgttactggaatagatgcttgatgttgttcagcctaattgtaaggtcttacctcctatgtcctggagtgctgacttctgattatgagaccttacccaagaagcatactactgagaaatatagtaagtttggcttgttttccttttggattggaacgttcagagtccgtgacccccagccaatgcttatcagcccaatgagtgttctgagctctggtaggagatgagagaaaaagttacatttataaagaaatgggccaggcacgatggcttacacctgtaatccccagcactttgggaggcgaaggcagaggatcacttgagcccaggagttggtgaccggccctggcaatatagcgagactctgtctctataaaaaatacaaaacttagccgggtatggtggtgcagctgtggtctgggaagctgaggtggaaggattgcttgagcctgggaggtcgaggctgcagtgagccatggtcatgccactgcgctctagcctgggtgacggagtgagatcctgtctcaaaaaagaaaaaaaaaagaaatggtatttaagccatcacatttgttagggcattttctcagtgtccactttcctcatttgcttggatttgctggtctgttttccaagttttcctcggcggtctgtgtgatctatcctaactcacagtgagctgaggatgagaagtgggcatttgggaaaggagaacagtgctcttgccctgatctgttgcttttgttgctgtgacttggcagctagtgtccctggaacttggactgttttctgaggtattgcaagcatgaacttttaaattgccttgtgtggtgtgctgtgggcttctgtgatcatgaagtaacatgcatttttcttaaaacttttcagggtggtagagattgcagcctgtcactctgcccacacgtctgcagccaagacgcagggtgggcacgtgtacatgtggggccagtgccggggtcagtccgtgatcctcccgcacctcacccacttctcctgcaccgacgacgtgtttgcctgctttgccactcccgccgtctcgtggcgcctcctgtctgtgggtaagaaagtgcagggcca

SEQ ID NO: 11364 - DNA, 2300 bp, Homo sapien
ctcttatttttaaaaataagtttaatttttaggttattattatatggttattttaacaaagtaaaggaagacaagtgaaacagataaaataaaaagtgaataccttttcccaatcttgttaatagtttcatgcatatctttttggacttttcccttaaacaattatatatgggtgagtataattatctttttttaaaaaaatgggatgattatacctactgcagcttttctctgctattcttcagcctgcttcccgctcccctgtatagcatcctgtgtttatctgtgtctgtgatcagaccatttatgcggctttccatcattatggctgctgactttggcttctgtgaatgacccacatacagagctctactgatgaacatgtcagttttctaattttttgctgttatagacagagttgtggtgattttctatgttactctgtgtatgtgtatctttgtacacttatacaagtatttctatagaataaatttccaaagaatttctgggtcaagaagtatgccatttgaaatactgatagccattgccaaatttctctccagaaagttcatgtctgttacacttctggcactgggtgaaagtgcctttaaccatctctccccaggcccttaaagtccattccccctttccgctccatcatgttaccctgaaaagccccagtctatgtctgccgccctacattgctgtggggctcgatgccaccacaaatcttgggtttgtaatttgagcaaggcctttatttgttcctggtcagtactttttcctatggctatttggaacctttaacactcctgtcaaacctatgcctagctctgttactttcagcagatgggcctcctctcactctatatccaagggactgtcacgttctgggaagtcttctatttttaatcctctttcctctgctttccctctcatgatccccctatcactccttagtttagagcctcatcagagctcacctatttgctaacgagggaagaaatgacctcctaaaggttcttcctgcctctagccttatatgctccatcatctttcatactgtggccagcattatctttcaaaaatacaaattaaattaatatttcaatgagaaatttatagatgtattgcactttccctggtaggttttttgtcactttccctctgagctcttgcctttccttctagtctttttgttgttgttgttgccaggctggagtacggtagcacgatcttggctcactgcaacctctgcctcccaggttcaagtgattctcctgtctcagcctcctgagtagctggggttacaggcacgcgccaccacgcccagctaatttttgtatttttagtagagatggggtttcactgtgttggccaggatggtctcgatctcctgacctggtgatctgcccacgctggccttccaaagtgctgggattacaggcgtgagctaccccacccagccttcttctagtctttctactaccactaccgcagttgtgtccagccaagcccacctacttatcttctaaactagcttctaacacagtcaataccttctgcttggaatgtttttgctctccttcatccttcagctctgctccaatctccactttttgaaaagtcttccttaatctttcttcctagagctaaagccttcctccttgctgttctgcagcgccttgattatacctattgtagcacttgctacccatcagcaaaaaatttgcatgtatctatttcgcctgttaaactgtgaccaaaaactagtacctttcagagtgttctgacatacagtaggtacttaataattgttagtgaggctcaacttcctcatgtattaaacaggaaagagtgacttgccccagactatctaactagtaagtcatggagtagaaactgatgccaattctgtcatccccttctccaaaatagcttctgtttggagatcagttgcaggagcatagagtagaatataggtgttggaagtatctgatttgtttagatgggctggtttttttgtctcttccttcttaccagcagtttaaaaatctcactctctcccttctgtcctctctaaggtatatggctggggttacaatggcaacggtcagctgggcctgggaaacaatggcaaccagctgacccctgtgagagtggcagctttgcacagcgtgtgtgtgaaccaggtacgtgtggtgcactctcagttagtggcttcccatctaccttccttgctctaacttggagaaatattggaggtttactcttcagtcagtcttttctggcaatactct

SEQ ID NO: 11365 - DNA, 2300 bp, Homo sapien
tactgtttcatgtgtcactacttttgaacacattgctctctcctggaatgtctttttctttcttcttatctacttcctgtccaactgaccttctcatgaagtttctccctgactccctgatttgtggtccctggtttgtgttcacttagcaccttgtatcataatacttttcaccctgtactggaataatgaaccagactacacattccttatcagcaaccatgtctcattcagcttttaatcctccaagatgctccaagtatggcatctgacacataagcagtgagggctcaggacatatttgattgctcacaccccatgccctcgtttttctctcagacatgtttacacaagttcttttgatcgggttgcaaccaaaagaaactgattttagtttctttgagcaaaacaggcctcttctagtaaattcactcaactgccactactttgggcaagccacttcattcagtgagtattaagggtctatcacatgccaggcgctgttctaaacccagaagaatcctgtttcaaagagtttataatctaagggagaagacagcaatagacaattcaccttttacaggaaatgcgcagtctatttctgggcagtgtgaggtgtatcagaatatatatagtattctggaaatcagggaagaagttgcagctgacactgtctggatgaacttcaattgctaaaaaatcagggaagaggatgctgggaagacaagagtaggcggcatttgacctggattttgaaagatgagtaggaaactgatgtgtactttggaggctgttgaagaaaaccagagccaaacagtagttgaagtggtaaaaacattttattcaggaactagtgcaacaggagcgagacctcagaatagatacagaactaagctcaattctcttattgcattagtttcttaatacctttttttttttttttaatcattggccctggttttctttaagtgggggaggtggtgattcaggacatttcagatacagacaaaagaatgaacaaagcaaaaaggagtaaagaaacttagagaaaaagtaaataatccaaagaaagttgagtagtcaaggaaaacaaattatttgtagccagagcctccagtaatgttggggaagtggcaagagatgagggacggtaggacttttttaataattcaagttaccaaaagtgaagttatctggtgatatttagaaaatgaaatgtttttctgtttattcctaggagctcaaatgggaaaggtaagtgaacaagtggctggaatgctatgccaacaagtttggattttatcctgcagcgccaactgggagttctccgagagctgtatggtattttacaaagggactgtagtctttataggtgataggctggagcagctcgtagcagtccctctcctggcctcagtttactcgctggtaacacgaatccggttggaccagatgccctcttaggtcccgtctaacctctatggcatgcttccgaggtacctctgcctctttccaataccaggacctgtgcctcatctcgtccttccttcatacctttgtccagctgccaccttccctagtccctggcctgcctcaggtactttcaatcaggaagtgaggggcggggagggagggaggcgcgtctccagtaaaaacaaactagtcccagctccgccgcctttcctcccaggcagcaccacctgggtggtgccccggggccagacgcgctctagagtgggcagggagccaagtttctcggtcgcttttccgtcctaggtctctggggtggtaggccgaccctccccacagccaagccatctcggggagcagagcaggagcccgtgcctcgcgcgttcctggttcctcagacacaaaagcctctaagtcccggcagcagccaccggatttcatggggacactccagtggcagggcctcggggcgggcctgagacggccaatcggcttctaaagaagtcgggttgtagggcccgaagagcagggtttcggccggggccggggccggggcggtgcgggatgctcggctgggtagcgtcccgggcgcgcgctgcaccgggtcacgtgaggcggccggggccacgtgacccggcgggcccggcgccctggcgctcctcctcttcgctgccggtgggcaccgccgctcgctcgcacttctgcgcccattggagcttcggagatccctgcggtcccgcgggacggcgcggcagcagctgacctcgcaggtagcgtgtgggcgcggggtcgagctcgcggaggcctcttccccctcggccctgcccctg

SEQ ID NO: 11366 - DNA, 2300 bp, Homo sapien
caatctggtgtttgccatttacaaggcactttctgtgtgagtagcatgacatggtaaaagagaaagagatgaattataaaacgcagcaagatcatgagtcaatgattcaccctgtcccagcctgcttctttttttttttttttgagacagagtcttgctctgtcaccaggctggagtgcagtggcgcgatctcagctcactgcaacctccgccttccgggttcaagcgattctcctgcctcagccacccgagtagctgggactacaagtgtgcgccaccatgcccagctaatttttgtatttttagtagagatggggtttcaccatgttggccaggatggtctcgatttcttgaccttgtgatctgcccgcctcggccttccaaccgagcctgcttcttttcttgtaaaatggaagagtcataacatccaacttgagtcttgatattttaatgaaataatgcatgggaaagcagaaaacagcacaaagattactggttataagagctaaatcactgtgactccatatccaaattcaatacctactgaatcagtggtttctgactagtcaattttttttctttttttctttttttttttgagacagagtctcggctgggtgcagtggctcacacctgtaatcccagctctttgggaggccgaggcgggcagatcactcgagattagaagctggagaccagcctggccaacatggcaaaaccctgtctctactgaaaataaaaaaattatccaggcatggtagcacgtgcctgtaatcccaggtactcgggaggctgaggtgggagaattgcttgaacctaggaggcggaggttgcagtgagccgagattgtgccattgcactccagcctgggcgccagagcgagactccatctcaattaaaaaaaaaaaataggagagagacagagtctcactctgtcttctaggctggagtgcagtgctgtgatctcagctcactgcagcctccacctcctgggctcatgcagttcttgggcctcaatctcccaagtacctggaactacaggcacacatcaccatgcctggttaatttattattttttgtagagacgtggtttcaccatattggccaggctggtcttgaactcctgagcttgagcgatcctcctgccttggcctcccaaagtgctgggattacaggcatgagcccccatgcccggcgactagccaattttttaaaaattacattttctagaggtgtcatttttactgggaaaaacacagtgacaccattcaagaaaaaattgaacggtaactttaatcactacattaacacaattttaaaggttgatctgcatcatacataccttttaaagaatgttttcatcatatgtagacagctttttttgttttttgtttttgtttttgttttgaggcagagtctcgctctgtcaccaaggctggagtgcagtggtgtgatctgggctcactgcaacctccgcctcccgggttcatgccattctcctgcctcagcctcccaaatagctgggcctacaggtaggtgccaccacgcccagctaatttttgtatttttagtagagacggggtttcaccatgttagccaggctggtctcgaactcctgacctcgtgatccacccacctcagccccccaaaatgttgggattacaggcctgagccaccacgcctggccataggcagcttttaaaagaacacatgtgcagcctggccatcatggtgaaacctgtctttatgaaaaatacaaaaatcagctgggcatggtggcacctgcctataatcccacttgcttaggaggttgaggagggaggatcgcttgagccctggaggcggaggctgctgtccagcctgggcgacagagcaagactcggtctcaaatagaaaacaaaacaaaacaacaacaacaacaacaacaaaccatgtgtgattccaagcaaatcagagaatctctagccaccagaaaaaccttgaggcatgtactgaaaggaagaggtcagaattctctgcgaggagctcagaggatcctgagggaagagagaaggcggctgcgcttggacacagctccgagctcgtgctccctccttcaggcacccaagtctgagttgctaaaaaatggagctgtcactgggccttgctctgccaggacctgcagagccggggacctctctgtggcaagcccagcaagatgactgctctgaggcgccctagggctgagggaggggccgtgacaccagccccgccccccagccacctgggaaaaggaagcacaaaaaggagaagcagcaacg

SEQ ID NO: 11367 - DNA, 2300 bp, Homo sapien
gagcataggtggctagattgaccatactcagtcgccagttatttaactgagcagctaatatatgccaaactctgtaataggtgccagggatacagcaataaaaaagctagccacaacccctggccttgaagacttacattatagtggcaggagattagcaataagtgtgtaaacaaggatcattctatctggtgttaactgctataaaaaatggtataggaagtgactaagggaaaaatttcttgtgttcagtgccagcattttttttaataactgtaaaatacacataaaatttgccatcttaaccatttttaagtgtgcagctcagtaaagtatgttcacgttgttgtgcaaccaatctccagaacatcatcttgcaaatcaaactatccgaataaataacactccacttttccccgcgccccccccccactcccgccccgccccacccctggtaaccatcattctattttgtttctgcaaattgattattttagatatttcctgtaagtggaatcataagtatgtttttgtgactggcttatttcaccgacctcatagggttgttgtgatgttaaataatgtaggtttgttcccggaccaaactgggggttgggcagcccaataatgaggtgcagatgaactggggaagaagagtttttatttctgcaaccggttacagggagaaggtctggaaattattgccagaccaactcataattacaaagtttttccagagcgtatataccttctaagctatatgtctacgtgtaagagtgcattcatctaaagacgtaagtgattaacaacttctaatcctgaagaccttcctctggagcctcagtaaatttacttaatctaaataggtctgggtgctgggatgattacccttattttgtctcttgctaaatcatggaggcttgtggaattcctccagactcccaataaacttgtttttggaggcctggggagtttcttcagacccccaataaaacttgtttaatcctaaacgggtcctgttaaaaattccttagttatcttgtcatgcttcaaggcccaagaaaggcctaggcaaaactcttggtgggcttttgttacattccagactttggtatatgggcactgactctttcagcttttaattttttttttgttttttgagacggagtctcgctctgttgcccaggctggagtgcagtggcgcgatctcggctcactgcaagctccgcctcccgggttcacgccattctcctgcctcagcctccggagtagctgggactacaggcgcccgtcaccacgcccggctaattttttgtatttttagtagagacgtggtttcgccgtgttagccaggatggtctcgatttcctgacctcgtgatccgcccgccttggcaaaaagtgctgggattacaggcgtgagccaccgcgcccggcctcagcttttaatatttaatttaaccactcagtgctgaagcagttgtgatggaggcctgcgatagtgaaacctggcctgccacaggttaaacgcatctatcgccaagccaataggacttaccgctcctctcacccacccttctacttttctggatttttaagaaatggaaagattgtcagagtaggccataaaggctttaagccggctggtggctgaaaactcccttggcccccagcctccctggtaaggcttgctgcagcctaattaaaaccttttgcccctaaaattctgccccggtctactggcaaaatttccactacctaggcttcactttgtggcttaaagtttgagccttgttaaaagcgaaacaacatcaaaaggtgtggccctattaccaatcctttgggctcggtttgggaacaggtttggtcgaggcggttgcgcaagttggtgagcacgttccttctacggaacctccatgggcggcacctggcaaaaccaccggactcagcaggctggccagggtgcgaggcgggcacggaatcctcgctctggccccgacccggccggggagccccgtccctccccggaccgccttggccaatcagctccgctcctccttggccatccggctccgccccttcccggccagccccgccccgtcgtttctctccctgctttcctctgccgcatggtcctgggccgttggcgtcggaagcctgaagcatgggcgctgagtgggagctgggggccgaggctggcggttcgctgctgctgtgcgccgcgctgctggcggcgggctgcgccctgggcctgcgcctgggccgcgggcagggggcggcggaccgcggggcgctcatctg

SEQ ID NO: 11368 - DNA, 2300 bp, Homo sapien
cctaatttttgtatttttgtagagaaagggtttcactatgtgggccatggttggccagactggtctcaaactcctgacctcaggtgatcctcccacctcagcctcccaaagtgctgggattacaggcatgagccactgtgccctgcctaatgtattccttctaaattcatagctggtgtgtgtgtgtgtgtttcccttcaaatgagtggttagactaagatcaggtgttgcaaactgaggacctgatattctgaagtgactgaaatgcttaagtccattaacaaaatgtgaattaacatttaaaaataaagagaaaaagaatctacctttttggttttccttgaaaagtggaatcttctggcaacactgggccacagtccagtatgaccagaggatctgaagcctgtgtttatcaataggccacaccccaccactcacaagacgaatgcccctggacatagcttggccaccaaaggcttctgaattcctgacttctgggcctcaggttctttaaggccctttcgcttttttttttttttttttttctgtatctcctcatatatttattctttttctgtgatcagtgtcctttgcatgtttttgttgggttgtttgaattttttatttttattttttggggatggagtctcactctgtcgcctaggctggagtgcagtgacacgatctcagctcactgcaacctccgcctcccaggttcaagcaattctcctgcctcaggctcccaagtagctgagattacaggtatgcgccatatgcccgtctaatttttgtattttttttagtagaggtggggtttcaccatgttggccaggctggtctcgacctcctgaccttgtgatccacccacctcgacctcccaaagtgctgggattacaggcatgagccaccgcgcccagccaaggccctttcgctttaaagattgtcctttttgatctcttcatggtatagtcctaccaacttttgacctcagttcaattataagtactacaacattacatacctgctcatgtctaccatagattctgaaaattaacatacaagcaaatgaagcccacctgctccagaaagtagctttttgtttttgttgttgttgtttttgttgttttgtttgagacagagtctccctctgtcgccaggctggagtgcagtggcgccatctcggctcgctgcaacctccgcctaccgggttcaagcgattctcctgcctcagcctccaggcatgcgccaccacgcccagctaatttttgtatatttagtaaagaaggggtttcaccatgcgggccatggttggccagactggtctcggtctcttgaccttgtgatctgccctcctcggcctcccaaagtgctgggattacaggcgtgagccaccacacccggccgaaagcagctctttatcagtgtaatccatccaaatttccctctttcattctttcgatgcccccagagggagtgggagtgctacacaggagagtctgcggaccagggctgggctgctgcctgaaggctaagattctgtgtggtggtagaacaagaagtgttggggggcatgtaaatacagggactgccagagtgaaggttgcagaaccgggcttggaaggatgatgaagaaactgggcgacactaaagcgccagttcaacaagtattgcgtatctacgacgtggtaggcattgttttgacactagagattcagcagtaattcaaccaaagtacctgctctcattgagctgaatttccgcgcgggcacctaggtaacgcatataaacactcgtatcacatacatacacatgtacatgtcaggtagaaatgctatttataaaactgaagcagagcatgggaagagcgaatgaaggtggctatttgagaagacccccaaaaaagcgagactgcaaagcactcgcggttgttccttttctgatcttctagctacaggcagcgaggtgcgctcccaggaaggcccgccctcttcctcctgatagggcgcaaggtgccagggacgctcccccgctcttccccgcccagaggcggccttgtgggggcggagctttgtgcccagcaacatgagcgcggcgcgcaaagagccgcgcgcggaagggtcccggcattctcctcgttctcactaggcgtggagaattactccaggcggatcgtggcatgatgggaactgtagttgacgaccgccgccccgcgcctgaggggcagtaaaagtcgccaggtccggctccatttctggcacaaaacttgcagcaccgaggggttgtggagagcccttgcaggg

SEQ ID NO: 11369 - DNA, 2300 bp, Homo sapien
aaaatttgttctgaccacgaggcatccctggagtctctctgaatctgctgtgattctgggggctgcccagtcattcactgctcagtttaactcctttaaatttagttcagctgaagtttttcttctaacaggaatcagactggtaagccttgaatcctacctgtttatctcctgctcacctgaagttgtaaagtttagtacctctaggcctatttcttcacctataaaatggggacaatactgaccttgaaatcttgaaataattcaactagatatatatatatgaacggtagaaaaattttgtctctccaatattctgttaaaattctcaccccctgccccgcccccagcacttccctggggttaaaaaaaaaaaaaaaaaaaaaaatcaaagcacttaattcccagcataacgatgaaggtttgtcataaaagaaaatttcttgtgtgaaatgattaccaagaaagtactgcatacgcaatgggggaaaagaccaaccctcaatcagtttaataatcaccttggttattaaattctatggtaacttaatttcaacgtacaaaactttcccttagtattgtaatgaaaacaccatttatagaaagagaaccaggaacctgaaaaattcccctcattgcatagatagaaatcctccttaaaaaacatttataactcgggtcactaaaagttacgtatgggaaatcattatttaagtagtgggcattttatgtccagtttcccaggacttgatgatccatccctagggaagccttcaggatgaaactgatctgggaacagaggtttgagctaggttaattctagaggtcgtcccagacatttccagatgccaagcggtatctttttttttttttttttttttttggagacagagtctctgttgcccaggctggagggcagtggcgcgatctaggctcactgtaacctccgcctcccgggtttaagcgattctcgtgccacaacctcctgagtggctgggattacaggcgtgcaccaccgcacccagctaatttttgtatttttagtagagacggggtttcaccatgttggccatcctggtcttgaactcctgacctcaggtgatccgcccacctcagcctcccaaagtgctgggattacaggcgtgagccactgcacccggcctgaagatgtaaaatctaccacggaaggatgatctaagtggggaaggagatgacaggtgacagcctcccgtgtggaagcagaaagtagcggacggtaggagccgaaggcttccctcgggacccagcagacttcccgcagcctcctgggttcccgtcacattcctcggaaccctcagtgcaccagacagggggagcttggaagaggcaggtcaagaatcgcccccgaccccgccccagcgttctgctcccagggcggcctcccacgcgccccggaccacgcagcccgatgggccaggtagggcgcgtctctgcaccgaaaatgcattagggcccgcgtgagccccggtgaacatccacagtgcagtcactaacaggcattactcctggggcccacgtgagtctatttagcatgtgagggaaaccagccacggcagggagactggggctctccgtggtggcaaagcctgctcaacctgggcccgcggagggaaaactcggaagtcatttccattagctccccttcccccaaactgattcgcttctgtcaatccatccctagaaataatgtcgaggccgggaccaaggggtgctgcgttttaaaaattctgcataggaaaacccctggaagtactgagggacagacagccccactcacctgtcagccctgggggcgtgcgcgaaaccgcccaaggagaaaaaaccagctggtgcgcaggcgcacgccgtcccacatccgcaggcccgcaacgccacgccccctgccacgcctccgcgcgccactagccccacccgtctccccggcccagcccggccgctcgccctgtccggtctctccccggccccttgattctccgcgtcttcctcgcaggccagcctaagctcagcctgcattgcgccctcccggcctagggtgtcgctgtaccggcctccgagctccacatagacaagtccggacctcgggcgggggcaggagacggagctgagcggcggggggcagtgtcgcctcggtctagggacggcggcggagtcggtggtccctgcgcgatggccacctcggtgttgtgctgcctgcggtgctgcagagacggggggactggccacatccctctgaaggagatgccggccgtgcagctggacac

SEQ ID NO: 11370 - DNA, 2300 bp, Homo sapien
agctacttgggaggctaagggaggaggataacttgggcccaggggcttgaggctgtagtgagccatgatcatgctactgcactccagcctgggggacagagatagaccctgtctcaaaatcaatcaacacacaatgacaacaaataaatgagatgtttctacagatcactttgtttttttagaaacactaaattaattaattaatttagttattgagacggagtcttgctctgttgcccaggctggagtgcagtggtaggatctcggctcactgcaacctccatctcccgggttcaagctattctcctgcctcagcctctcaagtagctgggactacaggcatacggcaccatgaccggctaatttttgtatttttagtagagaccaggtttcaccatgttggtcagtccggtctggaactcctgacctcaggtgatctgcccgcctcgacctcccaaagtgctgggattacaggcgtgagccaccgtgcctggcctaaaaacactaaatttagtaaggtactggggtgcagttttgtcactgacagttatggtgctgtagaaagagcccatatctggaagctgcctttagcctcagctctgcctcttgcttttgtaccttggaaaagtcacttcacctgttttctcatctatataggatgaagatcataatttcttttacacagtgttatgagactgaatgacagaaattaaaagaagtgttctacgaaggcaaagttaggtttcttatagcaggaagggagatgcacacagagaagtgggaatctcaggagacggatgtggccaggggctttttacgggggttgggctaagcattattagtcaacgggctgtactgctatttatggtaggttttgaataccgtttctccaaaataacctatttcctccccaaacccaaacttcctcaactgggatcgaactcaatcctacagcgtgttctgagattctatactcgcctcacttctcccaagatcgtaaattctggaggagccattccttcatcatccatgtttgcatccttcacaccgttcactggttaagtgcttagtacgtttgctattgggcaaggtcctcaaacgggaggtggacgtcagaatagtcaggttatcgactgagtaactgttagtggtggataatttaaagccaatttgaaagttcatcctttcccccaaaggcaaaaacaggcgttccttttcttaaaagagaattttaaatagaattgggtctctggtgtcctgcctaaagcccgcaaagaaagagggtacggttgggggtgggggtgatgggggatactgaacccttttctggttgcgccttgcccggagcccccggctagagccctggcgctcctggcgcgctcccaacgcgaatcggtgactccgcaggccgcgcagtgcggaggtgcccgtcccaccctcccccttgtggggtgcggggctccatttccccaagccgctggggtcggcttctggtcttgagatgcggatgaagtggtgtgaagggttgggcttttttttttgttcctaaaaatgcaacgaacaaaaaaaaaagtacaacaatccaaacccaaccatcttaattgcacggcagcttaactgggagactttcttcccgggcggccccacccgggaccgcgccgcttcagtcgagcccaccgtctgggcaaacggcgtccacttcccggagccgctgcccagcctctgcgggggggctttgggcgggcgcaggactctggaagggagaaaagcccgcagcccggccctccccgtcccaggcggcccgcgcgggtggacggcgggagcaggcggcggttggagacgccggaaggaacgcggtctcaccacccggctccctccgccaaggcgaggcgcggccggggaggcgggacacaggcgaagcgggacggggaggcggggccggaggtgcaggcggaggcgggcgacggggaagggagggggagggggaggggaaagggagggggagggggaggggaaagggagggggaggggggaagggacgggaggggagggggaagggacgggaggggagggggaagggacgggaggggaaggggaagcgggagagggaagggggcggagctagccggagccgcgagtccattttggggctgtgcttggcgcgtaccgtgcggtccctgtagttggaggacgggcggtcgcgcggcctttcccactagccggaggtcggagataagtacccgccgcccggctcctctcgggaaagcggggtggtcctcgaaccttcagcgagggtgggg

SEQ ID NO: 11371 - DNA, 2300 bp, Homo sapien
ttaaaaatgatttttatagtatttacctcataatgaaatggctccattgcctgggggatacacccgtggttgtctcgagccaagaaagaattcaggacatggacacacacaaggagtgggtttaggagcggaaaatttaatagggaaaggttcctcacgctgagaaatatcacccaagagagggtctccgggtttggggtgaaacgcaatcgattttgtacagaggcttgaggaggtggtgatttacatagggcccaggggactggtttgaccaggtgaatcatttacatagcccgtctaaagactggccctcccaccctaattttttgttatgcaaatgtagcttctacctggggccgccatgacacctgcacccgtggttttacctagtgatcgccaagacgcccacatagggtgacaaggaaaagggagcggcccagacgcccacatagggtgacaaggaaaagggagtgagaaaccccatattgaatgtacctggcttccagatacagcaggctacatttacatataaaagcttctagcctgcatatttttgcttgcagcttgacttttcaggctttctgttagaaaataaatggtttgggggctttttttttttttttggtagagtctcgctctgttgcccagtctggagtgcagtggcgcgatcttggctcactgcaacctctgcgtcccggttcaagtggttcttctgcctcagcctcccgagtagctgggattacaggtgcacgcacccccacgcccagctaatttttgtattgttagtaaagatgggatttcaccatattggtcaggctggtcttgaactcctgacctcaagtgatccacccacctcagcctcccaaagtcaccggccaggagctgctttttattaaaggaaaattccaccgagaactcttttaccctttctagctgcctaaaagtaatttctcaactcctgtgtgatgtgtgagaattccataaactacgaaactatacaaacataaataaggtttaattacatatggcaaactctacacatttaaggtgttattttggagcatcagtgtatcaagcaagaaaaggttctaaacttgaactgtgatttcaaggcaaggcaaaacaaatattacataaggtatcaggtacaaagcagtgtcatgaaaatgagcatatctgaacaaaagctgtgacagaattaaggccagataacctatcataaatgtatagaatgaacagaacagcccggttttaggaaaggacttcccagggaggtttagtaagccagctgggagaaaggaaaaaaaacgtatttttagggagggatagggacgctcccattgtgcaagaaggaagtatagccggttaacagctccatcaagttctactagaaggagtgcctatgtaaatgaaattctgcttttaaagtgcctattatataaaggtctctagaaaactcaagccctgttctacaagccctagcagcctgacaattcactaagcataggagaagggaaaaaaaagtaggaaaaaagtgtggaagcccctttcttcctttgtaatatgaatgtttggctatatttaagataaataccacataaataattgctaaacgtgaattctgtttttctaagttttaacaaaatatgcaaagaacaaagaccaccaatgaaagtggatgggaacatacgtattctacacacagttccattttggaaggttctagggcctattgaaattgggtgtttaaaaaaaaaagataacacaggaaaattattgtagtttacctctgtctcctacaagctgatgtatttggcagggttactatttcccagggcaaagcaggtcttttttttcacgttttgactaacgaactagaggctactgcaaagaaagaagaaaaagaacagtattaacgcatttatttgcacagcaccccaatcttgaccctcaattttttcaatcgcccccacaaataaagcccggctgtttagacctggtgaaccgccaggagcctggagctctttgtattaagcagcttctcggttagggcgccctcccccggcgccatgcaaccaaacgctggcggcgcgctgtaacctaaggcccacacccgtcttttcttttctaggggatgtggagacgctggtagcggggccaggaaggctccggacggagcaggttttctggaccacagacacactgccccggcgccctccgcaggccgctcctccccaggcccatgacagtgccccgctggtttctgccgcgctgccggactggagctcagacggccttcg

SEQ ID NO: 11372 - DNA, 2300 bp, Homo sapien
aactattataaaatctgtttcaagtatgcagttttcttttgttagaaattgttagagaatagagagtggtaattcagatttggtcaacgattctagtcacatattttcctccaaaagtattccttccaaaaataatctatacatgttcaaattaggtagcataaagataaaagtgaaatttagtagtataggcctgaacctttttttgtttaaaagagtgcttttgaaataagcatccaccccaaatgttggttgtatttatgctgtgataaaaataggtgagagatcatatgatctaatattgtattgatggaagtataggtagtatagtagtgattgttcttcaagcatgcagtaaagatcacttttttttttttttttttttttgagatggagtcttgctctgtcgcccaggctggagtgcagtgatgcaatcttggctcactgcagcctctacctcccaggttcaagtgattatcctgccttagcctcctgagtagctgggattacaggcgcgtgccaccacgcccagctaattttttgtatttttagttgagacagggtttcactgtcccttaagaccatcctgttagccaagatggtcttgatctcctgacctcgtgatccgcctgcctcggcctcccaaagtgctgggattacaggtgtgagccaccgtgcccagccaaagactgctcttaaagcacctttttgacagtgaacatggtctaaaaaagggaagatattgtagaagatttcacacacacacgcgtgtgtgggagacaactaaaggtattgaaggtactaattaattagatttccaaaattttctacagagagttaattatcaccaaaatgtgaatggtacatacaaaacctggcattttcttgtgataagtttacatttttaggagagtggagctttcaatctgcccttttctcctttgtttttgtagttttcaccaaagatgatcaactagaaatgttaagtggctatgcaagcaaaagcatagataggttaaaaaaaaggatcagctggctgggcagggtggctcatgtctataatctcagcattctaggacagtgatgtgggaggattatttgaggctaggagttccagttcgaaaccagcttcgtaaacatagcaagacccagtctctaccaaaaaaaaaaaaaaaaaaaaaaaaaaaaaaaatatatatatatatatacacacacacacacacatatgtacacatacatatatatacatatatatgtatatatagaacacatggcaagagcaggaaatgggaagactaccttttttctggcagctatgtgttgttttgttcgaaagatggcaagtgtacaaccaaaccaatccacttgcttacagaaagaatgtttagtgtagttaagactaatttgacaacagataaaacagtctgtcagctattacaaagtaatcagctgaacactaatgctgttctgtctgctcacaagagataaagataccctctcatggaataaacaccttgcttagaattcatataacaaagaagtaaccttataactgctctctagtctgccttatttgtgtcatagagtaagatattccttgaaagcccattaagtggaatagactttctgaaaataagagttctttacctcagtcctcctctaatttggttgagaggaggtaatgaaaatggggacaggataaaaggtggcaactaaatttaaagcacagaagaaatgatttccttctagctatgagaatagtcaaattgagcttgccaggctgtctcattcctaacatgtaattcatgatttagccactaaatttctaaggagatcataagaaattaagaaaaacgtttaagtctagcctctgcgtggtagacaggtatggggagggagaatgcttttcccctcccagtaataaaaaaaaaaaaaaaaaaaatatatatatatatatatatatatatatatatatatatatatatatatatatatatagttttactaggttttcatggataagtttttaaatgtaagacaggaaagggatctatttgatgtctatcttcagatatattggcagttttccttaagctatttagttcctcatctgttgctttttcattttgtatactgcaagttcccaggcaactcgaatttgcaaacacagccatggatacactatttaccttacagtagtttcctgggaatctaagtctggtttttgttattcttccctcccctccactgcataatcatgtataactagcaacatttatggttataggttgatttcctaa

SEQ ID NO: 11373 - DNA, 2300 bp, Homo sapien
aggaaaaaaaactattaaaaaccaactttttttctaaactctcgtcctaacgtttcgtagctatttccgtggttctctggctaaaagtatattttttcgtaaagtcgagaattatagtttagcgttcaacattcaaaccccccaggcccgcttccttccagccaatcagggggtaacaagtccagagtttagggagctccgttagacacaatttgaaaaacatcacattgcactcttctattctcctccgggaaacattctaagcgagggcgggtcccccagtcttcatagaatataagaaataaatcaatcgttacatcaattccacggggaaaaactctgtaggcaggcagtcctaaagaagcgtgtcaccgcggttcccaggaagcgttattcctctttgcgaacaactgaacagaatagctgctgcagaaagcatctccggaatatttgcaacccagagccgtgcgccccacacgcaatacaccggcaaagggttaatctagtggtgcctccagcgcggaaaagaactcaagatctaatacatccttaacgcgggatttttacaaaggccatagaagtattacctaaagttaatgccgtcactggctcacatcactcaagagctgtggagtaagaattgatagaaaccaccagctaagggggaaaaaaaaaatcaccgaagggaaagacaaataacaactctcgtccctcctcctcagcgtcaagaaaaggtggggatcgcaaaattaccgttaagttgtccgggtaaagacttttgggggaggaaaacattaatagtttcacagattgcttttttccttgcgacatgtttcaaacaccggagaagaaaaaagtcttctaagaaagtgcgactcggaggaaatagccacgagaaggaaatcgttagctcgaagccccatctttcatctcacccgtgaacactcctcccctttgagaaaggacaacgctgcgagagcaaatgacaaaaatccccagaaagaagctaaagtccagcatctttcctaagagcccgctacaacctcaaaagcctgcccctgccccatcttggaagcgcgagccgcggccagtcctacctacctagagacctcaccgggacccagcgcgccgggggagggcagccagggcttgggaaactctttcctggggcacctcacgcttcagcgtcaaaagacaatatagatagatgggtgccgggcggtggcgggggggactgttgccacgacccaccggagggacccatgactccgggtcctgaattttctgtcgaccttaagtttcttgtcacgagatgacggccatcaccgggtcgagaaaacggcgagaaaaggcggcccggttcggaaatgggggaggggcgcgcgtccagtcctcctgtcaaggagcggccgcctgcagagaccccgcagtgcgccgtccccggctccggtcccgggcggggggtcttgctgacagatccgctgggcggcggctgctccgccgcagccggtccgcgtcccgctcaaactgcagctcccctccccccacagccccgtctctccgcgctcccgccacattccgcccgccgccgcccactcgcagacgcccaagttgcccctaaccctacttcctcggatttttcgcgattaagtgagagtagaccccgcgcccactccctgcacccaccactgcctgcgggtcccaccactgccacctcccgagtcccgctctgctacttcttcaggctcttaccgactgcgccagccttggcgaagctccgccgactgccctttgctccaagtaatttttggcgatttttaaagtaatttttccggcggagtcatagtggcgctatactctcggacaggttatcctgtctctcccgctagattgatgagatcaggcatcactcgaaaatggcgccgaaagcgctgaggctcctcattcaaattcgttagagccaaccccgccgccccagggaatgccgggaacgcgggctgcctccacagctgtcaataccgcctcttaaccccccttctcttgctttcccgacatttttacgcatgcgcaaactccaaccctcccccctcctcccgccaggcacatgcgcagaatcatcgtggtgcacggctctccctttgcttcttcggttgcagtcctcttgcttcttgcgcgtgcgtgtagcgcttttgcaaagccgcggaggtgaagtgaacttagaggttgtggggccgaggggtcgtcttatagctaccagcccacaggcatttagtctacgttggaggtaaacaaatacgggt

SEQ ID NO: 11374 - DNA, 2300 bp, Homo sapien
caacagagtgaggctccctctcagaaaaaaaaagaaaaaaaatgctgacccctaaaggcactaactgtagtttgatttttgaacaaccattaaagaagccagtttaaaagatcaatgactgactgacaataacaaacatttactaatatgccaagcactgttgaaattcctttaatatgttagctcatttacatccttacaacagtccaatgaggtattaatagtacttgttttacaaaaggtccaacagataatttacccaacaaggcacagctagtaagtagtggagctgggattcacccaggcagctcggttccagagtcgacccacttaagtagtgcaaaaaagtaccagagattaagtagtgtatttatactactctgccacgttacttcttgctgatctcaaattgctaaaatccatttcttttccaagacacttaaataatgcaaaccatgctacccttctcccacttccttattagtacttcaggcactttcatatctactctcttatttaacattcacaatgaaggttttaaaatatttacaactttatagggctccacgcggtggctcacgcctgtaatcccaacactttgggaggccgaggcgggcggatcgcgaggtcaagagatcgagacccttctggccaacatggtgaaaccccgtctctattaaaagtacaaaaattagctgggcgtggtggcacttgcctgtagtcccagctactcgggaggctgaggcaggagaattgcttgaacccgggaggcggaggctgcagtgagccgagatcgcgccactgcactccagcctggcgacagagcgaggctccgtctcaaaaaaaaaaaaaaattacaactttattatcgttaattgtcctatcagagtgcccattttttttgaaggtagacaggtttgcctagatatggtgcttctacttaccagttctaagactttggggcagatttcttaatctgaacctcaggtgtcctcatctgtaaagtgaagataatacctacttcataaggctgttgtgagcaataaacacgattaattcgtaaatcatttatttagcacagtgcccagcacacagtacacagtcaatacgtggtagctgtcagtataccaacgtgttgcacaacagaaactcgtctttgctggattcagttcacttatcacgccattaaaaaaaaaaatcatcctaagtgacacagaaaaactgcccattcctatctcaaaaagtttatgaacaagttaagacggtaagagaaactgaattcaatgaaagcgccttcgcaacaggcagcttaggaccgggaagaagggcttcagcaaacttaatcattaactctaggcaggcgcgcgcgcacacacacacacaccgttgaagaaggagaccacgcctcctgtgtgggctcaggttgaatcgtacagcgtggtagagaactccagggctgctgaatctgacagatgtggattcatccacttctgtgccacctgtgctgtcttgggcaaattacttaacgtctctgagcctaggtttcctggtcttcaaaacgagaacagtaatagttcctacctggtaaagttgttccgaggcttaagtgcgataacccctgtaaagcgctggagaacggcaaaagctctacaagccggcagggcggttttaaatgcacgtgtatccatatacaaggtctcattgatacattccgttgtttggagtttagacactggctgtaagacgtttttcttttctcctaagcaggacccgtatttgtttacctccaacgtagactaaatgcctgtgggctggtagctataagacgacccctcggccccacaacctctaagttcacttcacctccgcggctttgcaaaagcgctacacgcacgcgcaagaagcaagaggactgcaaccgaagaagcaaagggagagccgtgcaccacgatgattctgcgcatgtgcctggcgggaggaggggggagggttggagtttgcgcatgcgtaaaaatgtcgggaaagcaagagaaggggggttaagaggcggtattgacagctgtggaggcagcccgcgttcccggcattccctggggcggcggggttggctctaacgaatttgaatgaggagcctcagcgctttcggcgccattttcgagtgatgcctgatctcatcaatctagcgggagagacaggataacctgtccgagagtatagcgccactatgactccgccggaaaaattactttaaaaatcgccaaaaattacttggagcaaagggcagtcggcggagcttcgcc

SEQ ID NO: 11375 - DNA, 2300 bp, Homo sapien
gatttggggtggagagttctgtagatgtctattaggtctgcttggtgcagagctgagttcaattcctgggtatccttgttgactttctgtcttgttgatctgtctaatgttgacagtggggtgttaaagtctcccattattaatgtgtgggagtctaagtctctttgaaggtcactcaggacttgctttatgaatctgggtgctcctgtattgggtgcatatatatttaggatagttagctcttcttgttgaattgatccctttaccattatgtaatggccttctttgtctcttttgatctttgttggtttaaagtctattttatcagagactaggattgcaacccctgccttttttttgttttccatttgcttggtagatcttcctccatccttttattttgagcctatgtgtgtctctgcacatgagatgggtttcctgaatacagcacactgatgggtcttgactctttatccaatttgccagtctgtgtcttttaattggagcatttagtccatttacatttaaagttaatatggttatgtgtgaatttgatcctgtcattatgatgttagctggttattttgctcgtcagttgatgcagtttcttcctcgtctcgatggtctttacattttggcatgattttgcagcggctggtaccagttgttcctttccatgtttagcgcttccttcaggagctcttttagggcaggcctggtggtgacaaaatctctcagcatttgcttgtctgtaaagtattttatttctccttcacttatgaagcttagtttggctggatatgaaattctgggttgaaaattcttttctttaagaatgttgaatattggcccccactctcttctggcttgtagggtttctgccgagagatctactgttagtctgatgggcttccctttgagggtaacccgacctttctctctggctgcccttaacattttttccttcatttcaactttggtgaatctgacaattatgtgtcttggagttgctcttctcgaggagtatctttgtggcgttctctgtatttcctgaatctgaacgttggcctgccttgctagattggggaagttctcctgggtaatatcctgcagagtgttttccaacttggttccattctccccatcaatttcaggtacaccaatcagatgtagatttggtcttttcacatagtcccatatttcttggaggctttgctcatttctttttattcttttttctctaaacttcccttctcgcttcatttcattaatttgatcttccatcgctgataccctttcttccaattgatcgcatcggctcctgaggcttctgcattcttcacgtagttctcgagccttggttttcatctccatcatctcctttaagcacttctctgtattggttattctagttatacattcttctaaatttttttcaaagttttcaacttctttgcctttggtttgaatgtcctccagtagctcagagtaatttgatcgtctgaagccttcttctctcagctcgtcaaagtcattctccatccagctttgttccgttgctggtgaggaactgcgttcctttggaggaggagaagcgctctgcgttttagagtttcccgtttttctgttctgtttttttccccatctttgtggttttatctacttttggtctttgatgatggtgatgtacagatgggtttttggtgtggatgtcccttctgtttgttagttttccttctaacagacaggaccctcagctgcaggtctgttggaataccctgccgtgtgaggtgtcagtgtgcccctgctggggggtgcctcccagttaggctgctcgggggtcaggggtcagggacccacttgaggaggcagtctgcccgttctcagatctccagctgcgtgctgggagaaccactgctctcttcaaagctgtcagacagggacatttaagtctgcagaggttactgctgcctttttgtttgtctgtgccctgcccccagaggtggagcctacagaggcaggcaggcctccttgagctgtggtgggctccacccagttcgagcttcctggctgctttgtttacctaagcaagcctgggcaatggcgggcgcccctcccccagcctcgctgccgccttgcagtttgatctcggactgctgtgctagcaatcagcgagactccgtgggcgtagcaccctccgagccaggtgcgggatataatctggtggtgcaccgttttttaagctggtccgaaaagcgcagtattcgggtgggagtgacccgattttccaggtgagtccg

SEQ ID NO: 11376 - DNA, 2300 bp, Homo sapien
tataattctcatagaaaaaaataggtttaaatttttgtgactttggattaggtaatggtttcagatatgacagccaaagtataagcagagaaaatatagataaactgaacttaatcaaaagttaaaacttttgaatttcaaaggacactatcaagaaggtgaaaataaactcacacaattggaaaaacgtttgcaaatgttttcacatctgataaagctgtagccagaatatgaaaaactgttacaacttaacaatgaaaagacaacccaattttaaaaatggacaatacatttgaatagacattcttcaaagaagtatatgaatgaccaataagcacatgaaaagatgctggacatcattagatactgggaaaatgcgattcaagactgcaatgtgatattgcctaatacctaccagaataggtaaaatagaaaagacaaacattagcaagtattgataaggatgtgtagaagttggaactctcatacattgctggtgggaatgaaaatgttgcatttactttggagaacagtttggtagttcctcaaaaacttaaacacagagttgctatacaactcaacaattccacttctacatatatacccaagagaactgaaaatatatgtccacacaaaagcttgtacaccaatgtcgatagcagcactatttattatagccaaaaagtaaaaacaaccgtatgtccatcaagtgatgactaaagtgttgtatatccatatgatggaatattatgcagccataaaaaggaattaagtcctcatatctgctacaacatgggtgaaccttgaatacattatgctaagtgaaaaaagtcagacacatgtcatatgatgccatttatctgaaaagttcagaataggcacatctataaagatagaaagcagattaatggttgataggggctgggcaatagggatatagtgagtgactgctaatgggtatcgggttttatttggatatgatgagagtattttggaattagatagtggtgacagttgtacaactatataaatgtattaaaaactactgcattgtatactttaaagggtcagttttatgacatgtgagttatatctcaatttttaaacaaccaattgagagacagtatacaaaatacctgatcattaatactcaaaactgttaaggtcatcaaaaccaaagaaaacctgagaacctgtcacaaccaagaacagccaaaggaaatgacaaaaaaatgaaatgtggtatcctggatgggatcccgggttagaaaaaggacattagtgataactgaggaattttgggtaaagtctctactttcgttgataataatgcatcaatattggctcattaatggtgacaaataaaccatactaaggggaagctcatgtaagagaactgtgtactaccatcacaatcatctaagtgttctaaaataaaaagattgcttagaaaaaaggctggccaggcgcggtggtttgcacctgtaatcccagcactttgggaggacgaggcggaggaccacttgaggtcaggagtttgagatcagcctgaccaatgtggtgaaacaccatctctactaaaaatacaaaaaaattagccaggcaaagtagcaggttcctgtaatcccagctacttgggaggctgaggcagcagaatggcttgaggtgggaggtgaaggttgcagtgaattgagatcacaccactacactccagcctgggcaacagagttatccccgtttaaaaaaaataaatgacagaggaaaaatataactaagagcctattgtattattcgacatgaactcctcgagataaatacaatcttgaagctccttctaactttagaaacctgtgatttcttgcatagtttggctagttgagttttgtactgtaagttccaccggtcagcttctcagccagacttgggtaatttatgtccagggtgacaggaagcactgaggaaagagcgttctcatcagtggtgatgtaataatatgtacaccaaaccctcatgacacatgtttatctatgtcacaaaccttcacatgtacccctaaacctaaaattaaaattagaaaaaaaagagtctctttctcagacccttccaaaccaacatgtgtgaaacatagtgagttgtccttttaaacttttatcatatcatgtaaaggtgatgtactccacaagtggcaggtatttactgagtgcctgtcatgtcaggcatctgggagagactagggtgaagccaggcacaaaaccacacattcaacagtgaattgcatgcatgatgtattaccattatta

SEQ ID NO: 11377 - DNA, 2300 bp, Homo sapien
cagttacaaggctaactgaatagccttttaaccagttaaaaggctaacaaataccaaaggcaaaaagtgatggggtggtggtgggggacagaagttgagttgagaacaaaattaagaggtggaattaacaaaaaagtttatggaggataaagaatataatttatagatgctgataaatacagaggtagctgtactaaaaaaaaaacctaaagtatttgttaaaaaacaaaagacaaaaccaccaactaaaacaaccaactaatcaacctaagattaaattaaaaccaagacccaggtctggaaaaaaaaaaaaagatcagctttaacaagtgaatacatggtatttttaaaaacacgattattccttcaaaatagtgcctacagtgtctttcaaaaagttgcctttctctttttcaaatcgtgtaagatgtgtcatataagatttgggtgttttccctttgccgatggttggagagtggtgatgtgtcttgcgaaattaaaccacagagaacgtcgatttgaaactttcggagtttcggagaaactggccctagctcagctgccagtgaccagtgagatggattcagaatgttgtcctagtgagggtgctcagtgacaacgcaggtcagaggcagggccggctgcgactccacagacagactcacagccacagcgtctacaatacacacagctgctgcctggctgcgtgacaaaggtgtcttggcagaagcattttggctgtctgaaatacagcctttgcacaatcctgagactatattttacaagttcattttctaacatccaggcacgcttttatggcatctggagcattttgctgaatgacttggtagtgcactgctgaccagacagcacatttccagatttagattataagagaaaaacagcaagtggtaagttcagctgcaggtcaatggatacttatactacagttccctcactgagcactgggctactttatcccatggggaccaatcctgtaaagtgtattcaacagagatggccctaggtgtttgcttttatggttgttagccacattcacactgggaatgtgctgttatcacattgtaaacattattcttaatatcagaaagaaaactggggagagtgtcaagaattggcatgcacaaactgatagaattgccagtggacgttcttattttctgagcatttatgagctgcaggaggtaggtgcagtctgtaaaacaaaggtggtgagaaacattaaccattttttattgattttatttcaaactgtgtacatcttacacgttttaggttctttgtaatgttgggataatttggaggggacataatgatgttcactgacaaatagctttctgaaaaagtcaggagttcatacattatcctgcattgatgaaagactttcagcctttcaaagcattattagacttactacttaaaatttttgcccagcttgttcaattttactcttaagaagaagggagggttaaaaaaatagtagtattaaatatatgaaatcttaattttaaatgatggctgtcatcaagtgtgccctcaatgagaacaaacatttttatacatttgtactagagatgcccagtattgcttgctcaccctcagtccctgttgtctttaataatcgtgttatatacaacacaatttcaccctgtctgttccttcagcctacccctgttccataccttccccagctattagacttgggtggtcccttgacttcacatccagaaatgtctacagctcagactgaccagttaccaggttctgtgtgcactggcctacacagatattatgagtccttcagaatcagaagatgggaaactgaagcctatgccagccaaccaaaaaggtcataggtagactgatagctaaggcagccattttggtcatgtgcaaggtatcagttggtaaagggaaaaaaatgaaactcacatgtagagagagatgtgattaaagaaagaaaagaagtaagtaactgcctgggatcctgatagtttctgagccagacctaggccatttatctttaaaataaatcgactttttccttgaggtaacctgaatgaggctcaatctttacagccaaagaaaaattatccttatcagtgatgtctgcctggtggctggtgaatggtaaaaactggcaggagagaccaatccgatgggaaatcaagttcaggtaggaaatttggttttaaaccatagagaatatttaagattgctacttccttattcagacctggtcactgtggagcaatcatcattactcccatttatccaag

SEQ ID NO: 11378 - DNA, 2300 bp, Homo sapien
ttattacttgagagatacacatttgggtagataccatcattcaaaacatggcttctgtgttaggctgtttttgtgttgctataaagaaatatccatctgggtaatttataaagaaaagaggtttaattggctcatggttctgcaggctttacaggaagcatgtctccagcatctacttctggtgaggtctcaggaagcttgcaatcatggtataaggtgatgggaagccagtgtgtcacatggggagagcgagagcaagaggtagggggaaggtcccagacttttaaacaaccagatctcatgtgtactaactgaaggcttccttgcaattccttaaaaaagaatagaattgattgccatttgagagcatgtggactgtttgaagggagggctagaatttgctgttcaatgtttagcacattctgggagcctagtaagcactgattcgaggaatccaagtcttccagactcataagccattcgtgagtcatgttatcaccaaggaaatggagctaaaccattcctgagggatctgcccccatgatccagtcacctcacaacaggccccatctccaacactggggattacattttaacatgagatttgggggggacaaacatccaaaccatatcagcttccaagaggaaaaatatgaaaaagaagaaaagggaccttggcagtgaaagggctgtagaggcacatatggtagtgctgaagggagccttagcagccaccagagaaataggggtacttgtcctgggtcacttagcagttcataaatgaacaaccaggaccagaatgcagttgtttttgcctccagccacatattacatagcacagttggaagcatttggaatcagagagaaccaagttaaaaatcccagctccactgtgcgtttcctctgtgacttcaggcaagcctcttactgtctctgaatgtcagtgttctcatcttgaaattgaaactaaacttcccagtgttcatgaaactgtaaggagtcacttgtaagtgtacttggtggagtgtttggccagagtagccactaaatatgttacatttccttcctcccattcaggacttttctataacactatccaggaacaattaaaatttccaagaaggtagtttctttcttttttaaactttcttaaaatctctgccttccccttttgctgactttcaacaaagcaaaataaaggagctgaccaaatgctttaataatgtaacttggctgggcacggtggctcacgcctgtaattccagcactttgggaggctgaggcaggtggatcactgaggtcaggtgttcgagaccagcctgaccaacatggtgaaaccccgtctctactaaaaatacaaaaattagccaggtgtggtggcaggtgcctgtaatcccagctacttgggaggctgaggcaggagaattgcttgaacccaggagatggaggttgctgtgagccaagatcgagccattgcacttcagcctgggcgacagagtgactccatctcaaaaaaacaaaaaacacaaacaaacaaaaccctcaatgctttaaaaaaaatcttgcaattccttaaaaaagaatagaattcattgccatttgagagcaagtggactgtttgaagggagggctagaatttgctgttcaatgtttggcacattctgggagcctggtaaacactgattcaaggagtccaagtcttccagactcataagccatttgtgagttaaaacaagcctcctttgaagtgcttggacatccttctctacactatctttagttgccattttgccccttacattacagtaagaagtacatttgtatggagttatacatgccacaggcctgctctaggacacttggcaatcagcaatcgttcagacctgctttccttcattttccttattggttccaggttgaacataggtcttgttaccgttcaagggcctgctcctatgggcccatgccccaggagccctaagccttttggcccagttgaaaagctgagttacatgagaaggtgacagcctcataatggcccgtgttccagccccagcattgttaccccctacaatgctgttgtaggagtgtaaagaagcagtcgcttagactcctaaatgcagttcttctctctcgagaccaccttggattggagaacacccaaatgagcaggattgcttttgctttcaaaagagtgatacctggagcacaggtatccacctccccccatatcccatgctttgaaaactatgttgtattagtgttttattaactgtgcttgaatattgggcatcctccta

SEQ ID NO: 11379 - DNA, 2300 bp, Homo sapien
aatgttcacagcagctttatttttaacggttccaaattgaaaacaactcaaaggtccatcaacaggtgactgtataaataaatagtgatttatacaatggactactactcatcaatacaaaggaatgaactatggatgcatataacaacatggatgaatctcaaaatcattttggtgaataaaagaagccaggcacaaaaggatacatactgtttgattctattcatataaaattctggaaaacacaattttattctagatcctttattctttgaatagttgaattttaattccttttatattttccatgtaaagtttaagccctttaaaacatccatgtgcagaagttgagagagggaagaagtgtaggccaaagatgtagcattggaagtcaagaagaaaatagtctttataatctcaggagtgacatatttaaataaggaaagtgtagcaaaaagaaagtttaggactgagttctgaggaacacaaacaattcaaggtgggtaaatgaggtaaagccagtacaggaagctgaggaggaacagctaatggggttgaaggaaacccaggacaatgtatgatcagagaaaccaacagagaaacatgcttcaaaaaggaatgaagggttaactatgcccaactccaccaaaagctgagtaagttgagggtataattagtgcccaagaactatgggagtttgaatttgcaaacagaaaaaaaaaataagtagagctttgcaactatgcaagtagttacttgctagtatataacaaattttgcttaacttattcttgaattaacaggttttttatttcaaggagtacaaaattagaaataattaaaataaaaataaaaaataggttcaaaatacacaaaatcctagttactatagaccgtttcgatgtttcaccgggtacagaggttattaaattacattattaacttttaactctttgatagtcaccatctttactgctcttgaaattttaattataaaccattatttatcttattactataatttttactgtcataatcaaagaatttctgagattttcaaccaacccatatgatgaaggtatgaaacatctttttatcaccaagatgggaaaacaatggcaaactcttgcatcaatcaagttaaatgaattggttatagatggttcttagtgttggattttcacctgaagtatctgccatcagcctttcatgggaaatattttaatttaattttgaaattaaaacagtggtgtagtttcattttgatttgtatagaaaagggcttagatagtaatgcagtataaacaaccctgacagaaatcttgatttatcggttcttgggggattcagcaaaggctttagggcatgaaaggcataaagaaaacttggcaggaaccagagcagaggaaggcaagatactagccagctagcatggtgttttttccctgttctctgacagaaggaggacagccatgtgaggaagataatcatggcagcaaaagttgctaaagaaagttgcttaagctaaaatcatcaaggaatttgaggcaatgacagttcatcatctagagagatggactctaactggatgaatatacaaagctctgctttctgagaagcaggatacgtctgctgagagacagctgggagtgaactaagcttcattctgcaatctttttgctgacatttgccataatattttcagtgatgtgtaagaaatgcaattctgtaattacatggtctcctggctgtggtctccatccaaagcatgatagtgtctggacccccaccctaagagtttaacacctcctgagtgtacaggctcattttggccctaatggagagaaaaccagcagtgcagaaattcctcaggtgcagcacggtccatgataggagcccactgagtaataaatgccagaggaagttagggtgaaagagacaaccctgccagtaatggtttttaaaggctccatggaaactcttaacctttcaccaccttaaggcaaagagggactgctctgtcctccttcatatgcagactctactttcctttgtggtttccttttctctgtgcagttgccttcagtcgagtttgatagagtggaagggtggggaaatagaggaaatggaagagaagaaagagagtgattttcttcatcctgtcctggatctggatcccttttaataggatctctcctggacagttctgagcacttcgaagtgcatccaattcaggtcacagtaggtgggcaaaggacttcagaccctggagacacaaaggtaacagctcctctttacac

SEQ ID NO: 11380 - DNA, 2300 bp, Homo sapien
taatagtacaataggcctgcatgttcttatctgaaacttttgtggccagatatatttaataattcaaaatatctgagatattagaaagataatatggtgcctatattacataatattataggtggggtctggagtgtgatcacgcataacatgtctgatacggaatatctgaatatccacactgcatagcatagcctcacgttagttcaccaaatgaactttggtgccacacttaacaaaaataccttagtttccgaagcattttggattttggaattgctgagaagtaattgtatacctgtccttgtcttgcttcactgagagagttgctgtatcaagggtgtttaatcagaaaaatgttatttcatcataaaatgttattttatagcctagcctaacagcattggagaatctttgtcccccttttttttttcggcacatgtctgtttgcaaaatcttttttggttataattaaagtaattcctctattggaagttcaatatactattctatgatctgagtcattattttactttcagtccaccagctgctgtttgccaagctgattggctttccaatatatatttcatttactataggttgcaggggtatctctttccagatgatctattggacatagtcctttatgcctctattacttgttttgagaaacttttcctaagttagttgtttagttgactgtgttggtccggtgggcatctcagatttatttgtctagaaactatgctacctggaggcatagaaagagtaaagtacttggaatacccagaactcctggatttgcatttcatttctgcttctttctagctatggtggtgatggcttacaatccattgaacttgtctgagctttaatttctcaacttcaaaatggggattaataataacagcttttgctacttctcaggcataatgtgaagtaaaatgagaagaggttggtgcaaacaagaagatacagtgcaattcacattcaacgaaagggaacggtctaaatgcaaggtctatatgcacttaaggtgtttttattgataaatattgggttacatggctttacttctgctcagatctggatagggaccatttattgagtggctgctgtatcaggaaccacaggaggcaacctcgattaatcccagtaaaacccctttgaggtggctgccatcattctctatttgagagaggatagagacctgaccaaggtcacatcaccacttagcgcctgagccagattgaaaaccagatttgtttgatggtaaagtcagcactccattttaattgcaaagactattgtgcaatggtgaatgttttgtggtgtttttttgtgtgttttgaaaattgagaacaagatgggattcataacaaattagatagttcacttttcttatatgtaaattccagacagtagcaataaatcacacactttggatgctcaggggaaattagttataatttaatgctttggaaaatcattatttatccccctttgtggtagaatttattctcaacatccttataaataaacaaaatgttttactagctaaaaaaattaccaatccattctttcttcacaaggcatggagacagtagaacaacggcatttttctttactatcctcttggcctaattgttcgcttgtcctgaatcagttactgaactgagaaacccaggtaagcttcccatagcattctcctttcttatttctagtatttggttcagtccgcgatactcttttagccatcggtgactgctcttactgagactgtggctgtcctcgcccagagttgaggtaggggtaggttggggatgggagactcactactaagcactgtggagtctatttgagtccctggcagtatctgtccgatatggtctggctctgtatccccatccaaatctcatctcaaattttaatacccgtgtgtcaagggagggacctgtaatccccacgtgtcaagggagggaggtgattgggtcatggggacagttaaccccatggtgttctcgtgatagtgagtgagttctcacgagatctgatggttttgtaaggcagttttccctgctcttgtttactctctctcagcagcatcatgtaagatgtgcctgctcccccttccgccatgattgtaagtttcccgaggcctcctcagccatgtggaactgtgagtcaattaaatctcttttccttatgaattacccagtcttgggtatgtctttatagcagtgtgaaaataaatgaatacactgtctatctgtctgtctctctctctgttatttaagatc

SEQ ID NO: 11381 - DNA, 2300 bp, Homo sapien
agataaaaatgacatactgtatgattttatttatacacaaatctagaaaattcagatatttatagtgacagaaagcagataagtagttgcctggggatagggggagtggagagtagtcgaagaaaaggatttcaaaggggctagaaaaacgtcttgggatgatggatatgttcataatcttgattgtggtgacagttttataggtatatgtatatgtatgacgtcaaacttatcagattgtacttatataaaataagtacattattttatatcatttacacctcaataaaggtgctaatagcaagtaaataggggatattcattgaaaggcaggtgatgatagggtaaaacaatttagctttgaagccaggatgcctgggttactaattttttcttctcctcactggttgtatcactttggactggttaactcttctgggcctttttttctatgtctaaaatggagaaaactattccaacttctgtgggttcttgtgagcattaagttggtttattaatataaagcacttatggtactccctggtatgtaagaagtatttaacaaatgttaagaaattattatgcactgggcaccatgtgaagtgttttatgagaattatctcatttaaacttcacagtctctgaaacaagtaacaatccttatcctttgtaccaacatctaagtgaaaaggagaaaaccaagctgcaaagaggaggtttaacttatcccagattggttacacaggaggcaagaagcagaagccagatttgagtaaaggcagtcaaacttcagaacccacacttttaatcctgtgattaagtgctaacaggtggggcactgactcaagtgctaataagaaagttgtctagacagtgcccatgttttcagagcatttcattctctgagccttgtgaaactattgaagaccaacatgtttgggcagctttctgagagtgcctcttatgattactcctggcaatcatcttagtgctcatcaaacctatttcttcttcctgggcacagggtcaaactatttcccagccttcttgtatctggtgaggtcatgttgagaggtgacagcatgctggcagtcctcacaacccttgctcactctcggcgcctcctctgcctgggctcccactttgacggcacttgaggagcccttcagcccaccgctgtactgtgggagcccctttctggactggccaaggccagagctggctccctcagcttgcagggaggtgtggagggagaggcgcgagcgggaactggggctgcgcgcggcgcttgcgggccagctggagttccgggtgggcgtgggcttggcgggccccgcattcggagcagccggctggccctgccgaccccgggcaatgaggggcttagctcccgggccagcggctgcggagggggtactgggtcccccagcagtgccagcccaccggcgctgctctcgatttctcaccgggccttagctgccttcccgcggggcagggctggggacctgcagcccgccatgcctgagcctcccacccactccatgggctcctgtgcggcctccccgatgagcaccgccccctgctccagggcgcccagtcccatcgaccacccaagggctgaggagtgcgggtgcacagcgcgggactggcaggcaccttcacctgcagccccagtgcaggatccactgggtgaagccagctgggctcctgagtctggtggggacgtggagaacctttatgtctagctcagggattgtaaatacaccaatcggcactctgtatctagctcagggtttgtaaacacaccagtcagcactctgtgtctagctcagggtttgtgaatgcaccaatcgacactctgtatctagctactctggtggggccttggagaacctttgtgttgacactctgtatctagctaatctggtggggactggagaacctttgtgtctagctcagggattgtaaacgcaccaatcagcaccctgtcaaaacagaccactgagctctaccaatcagcaggatgtgggtggggccagataagagaataaaagcaggctgccggagctagcagtggcaacccgctggggtccccttccacactgtggaagctttgttctttcgctctttgcaataaatcttgctactgctcactctttgggtccacactgcttttatgagctgtaacttaccgtgaaggtctgcagcttcactcctgaagccagcgagaccacaagcccaccgggaggaaagaacaactctagatgcgcggccttaagagctgtaatactcacctggaa

SEQ ID NO: 11382 - DNA, 2300 bp, Homo sapien
aaacccacagcctagctaatgagacttcacgctatttgttaattaataagcatttaatagcatgaagatcagaataactccagtttgcaaaatgtacttaccattttggaaacatcagcaactgaaaagtgggttacatgatacaatgagtgtagttgcctttctccagacctgttctgtttccttgccctctctggcctctttctggctccatttaccttttccactagtttaccagatgattcatcaactttctggcattttccacttaccatctgtgtccagcatcctggtaaaatccaataaactttctaatatccagcatcccattaactatatccttgtatatagcaaattcactgggagtggatagtcatatgatggcctcaaggcaaagggctctaccactttttgaatacccactgtgtgccaagttctgtgctggttgcatcaactaaatcatctcacttaaagctaaagtattaaagatcctaaaaagccattttacagaaagattagattattttcaatttattattcagaataaatatatcttttttctttaacttctcaaatagttattgaattgtattggtttaaattaaatgcgtcatgtgtatatatagtattaattcaagagatacaaaaggaaattgagtgaaaaataagtctgcctccttcccatcactctcatgtctctacctagaggcaattattgtcaacagtttttgatgtgtctttcaaaaaatagtccattaagcctggtgtactagatctcttttaaaagtttacaacctgttacagaatatatataaatgttcaattactagtaacaccttattacatatacagattacaacttagaaatatattttcatgaccattatgtcatttgattctccctacaatcctatgaacaaggcaggggagacattgttgttaccaccttacacatgaagaaaccaatgctcaaaaatgtaaaatgatctgcccacgtgtatatagttagtgagagtcccagttctagaacaataactagtctaatgctctttccgtgacatcacggaaaaggtagcccaaggattagagatcaaaaaacattagccttcctcgatcagtcaaagtactctttctgtatagtgtcaattaacagagaatttactatgttcaatatggtaccaagagggcattattccatgtaaataatatagcatataaaaactcaatattctggctttgcaactgtggtcattaagctgtaaccaaacatttcaatgaaacaagggcttgagttcctgttaatggagatgtttggcccttctcttgagatagcccttggtgatcagaacctacacattgctagagaagggttggggcatttgtgaatctggtctattaaacaaaaaagaccaagcaggaagcaattctattctttcttagaactgcccagtgaacttgtttccttatttggtgataaaatcctaggttgatctaacatttatgccacctttcagttactaacaaatactttgtgttttgagatcttgaaggtccagttcagtctaacatcaaagcttcctgtgtccccagcccagacctgcctcagcagggtgtggaggggaagcagtgcatggccaggtggcagggagctgcagggtagcagcaaggtgtgccagggcatgacagccaaacttacctttctgctactcttctttggctcttctgctgcctttgggtcctcccacatcagaacagcagtagggaggaaaggcaaggttgtgatttggtagcattatctggcatagacgttgtctgaaggccgatgattttctcaagtggaatcttcggagtttttccgaaacacctccactagggagctgccattgtagcttcctaacacacgtctcctccagctatgacttcccctcctccatctccgacttcttcctgctggggttccttgtgtctcctgttggttcctccttttgagtggagccccattctcggctgatagcccagttccgttccctgagtcctccagggcaacatcccctttgctgcgccatcggcggaagtgcgacttctccagctctcgccccctttctcctttagctgccaccggctgctctgtctagcttctcacctgctggcttttcaggtactaatctctatgtggtaggctgaataaggcccccaccaaagatgtccttttcctaatccccagaacctgtgaatagcttacattacacggcaacagggactttgcagatgtggttaaggtaacagatttttagatgagg

SEQ ID NO: 11383 - DNA, 2300 bp, Homo sapien
aagcactcagtcaagctgacacacccttattgctagagaacaaatatcagcaaactatagcccattggctagctttcttttttgggaagtaaagttttattggaatatagatatgcccatttgtttattgtacatggttgcttcagcactacagtggcagaatttgatagttatggcagagaccatatggcccagaaattctaaaatatttactatttggttgtataagaagtggtttgctgccctctattgtaaaaacctccatttacatttcagtatgtatcacttagaattgtgcttttatgactttcttgaagctcagaatccacaggcatcttcactctggtacttcctatgtcctatgccactaagtcttctctctctctcatttaaaaatctctgttgtttcctagttttacaaaggataagctttgcattactgtttttcttgattcccttgatgttttggttggtttttctgagatatgaataagaaaatactcacttagctctgcatgttaaaattggaagtcctcagataatattccaagaaattattttttattttcatctttggttggttgttttttgaccattggatagagatcttagcatactaaatgtctttatcctgaatatatagagattttctctccttaatttaatgattttatgacttctgcaattcttttagtgattatttagttctcaatgaagaacataaacacaactttttaaaaaacatgtattagtaaggaaaaatttgttttatattttctattgccctaaattctgactcatattagacagctcggagtaatatttaatacttgaaacttcacaagtaattacaaataaataaatgctataaatattaaaaaataggagcaatctcaactttatcctcacatttttctgctaagacttatttagttacatattgggcttattttaaaatttaaccaaaattatttgatctttaattatgtttttacctagaaatgtatatttaaaaataaagtgtaattccagttgtatttatactattcagaatttcagaagtctgtaatcccagctactcgggaggctgaggcaggagaattgcttgagcctgggaagtggaggttgcaatgagcagagatcgcaccattgcactccagcctgggtgacagagctagactcactgcactctagcctgggtgacagagctagactccctctcaaaaaaaaaaaaaaaaaaaaaagtcggtctgctcctctgcctttttttttcctacttttaagagtagtctgcctccgcaaactttagtaaagaagtactaaaattaagtgtgttaaatggtgttaagatatatataaaaattaatttttaaagagagtttagattgttatctttaaatttttttatacatttcataaaacataagtatttcctaatcattaataggttttaatgagctttagtagatgagcagaaatatcagagatataaaatgatactataccggcttccttaagaagctttctattatttcttagaatcctgctttattctctttcttgaattcatacatggcatttaaaaatctcttaaagatggtcatcaaaaacaaacaaattttttaaaagatggtatttgacatctcccctccctcctcctgcttctctcaagcaccagtttccaggtaccactgcctataaagccttttccaaacacaaatttaatctttgagtgttgaggtttttttggtgtttttttttttaaggtaatgtattatcctatgcaatgatattgagcttttgactgagaaattgtgaaatcaaaagtaaagtataggaattccttaatggacatttcaagaactttgaaaggctattgtaaggggaagaaagagggaaaatctgtttcagtaggagaccttctcacctctttactcataagccagcccgggcatcatatgacttcatcagactgcaacttactgttctcccctttgtggggagtgtcaaatgctataatagagttctccagtctgaggtcagcgaaagcttctcaaaggagatgatgcctggctaaagggactttctttctgagaaagggatcagcatgtgcaaagatgaagaggcataaggactgaccagtgggtcacggcaatgagacatttactgctgacctccaagagaagacttccattgaatgagaggaagatctacactactaatgatcaaactgtgagtgttttagctttgtagacttatcaggaacttgggagatcaagaagacaggatcaaacagcaaa

SEQ ID NO: 11384 - DNA, 2300 bp, Homo sapien
gtgatgtgtgatgggacttaggctagatgatccagtactcttctgcagtgagatgggctcatcccatctgacttcacgggcagagtgtggaggaaaaggcatatctactgagaaatgagggtatgatttctataaaatagtgaaatatatgttgtgaaacaaacatatcagatatctaatactttgtccttttgaatgtgccctttattacagaatggcctcaaatcgtgagtacagtgggtaagaagtaggctatctgttacttcgtctggtagcccagcaaacgtaactacggaggtgttttagaccaaaggtagatctgctatgctattgactcatctaaatagactatgaaaatttttcctgagttaggctctcatatctctagctttggaacacaagccattttgagatcatagcaaaacacagtgcgacccacagccaaaacagacaaaacactcagttgccagatgatccagggcttcctaagaatactagaaaaagcaggcagcaatttaagcagcatgtgccatccctcaggccccaaggttttctggcacccttctgtcatgccccctgaggttcagttggtctcatggctctgactcagtgtggtatgtagaagagtggggcctcaggtcagcctgtgtctagtgatttcaattctgctcttggctgcaattccaactgtcaagaaagttttgcagtcagccatttgatagtggaagggttagcccatgaaactgaatttcctgtgtatctggaaagagaggcagccctagagatctgacatgctctgtgaaaattaggggttcatttttgctattgctggttagtctctgctgaacctaatatatttcaacatttgaagactttttttaaaaagaaaatttttttctttctattttttattatgaacttaagtaacttcatggcaaaaaaatctaatcaacattaaactatttacttccctccaaagtaatttcctctctgtcaatgcacagacgtgcatttttacttagttataattagtgtgaacatactcgtttttgtttaagaaaggttttctttaccttggcattcagattcgttttcataggcgaagaaagcactgggaaggagaaggaacctttgctggcaagttgggaggattatatggggtcatactatcccagggttaaggaaaccttaaaggacccaacatccctctccatatctcttctgatgatccttttgtgctcacagactaaccagtgtggccttttcactcaaaagcctctccagatctgcacagcaccaagggtgcagtctggctcccaaaggagtaatgcaattccatcctcaggtctgccagggcccacctgtctgtcgtgggcatgcaccattgccctggctttactgggctgttgggttgtctagtggttttccttgcagaaagcaagcaggaacaatgctgctccggactggttttccataccactcctctcaaatatcttctattttcttaagtgtgatcacacacccatggtttccaatctatcaaagcataacattgctagtcgcttttttctaagttaaggaagtagccatgttgggtttaattaaaaacagcaactatttgtacagctgtccctaagttcatggctcataaaaggattaacttcaaccttgctgcctaagtcttttgggagtgtcacaaaaaaacatttaggcttttctgggcagtgccaggcctgggccttgaggcttgctgatgctagttcagccaccaggctctcggtgctcaagtggcacccagcaaagcagagaagagcagaacttccagatacacaactcctccttcttttgtttgggggatgcaaggccttgaaggctgcttcaacaagtttctgaaaattcccctcgggttgggaaaggcacagtcttccttttgcaagtttttctagagcccttcgtacttttgccctagagtgggtcttttgcacccccacctcccagacctcagtggtcattggcaggcatccttcgaaggaggtgggggcggggtatccccgccgatggatgcgcccgcacaaagcagcacgttttctcatcaaagccctggagagagggaagaagcaacgctcagcatttcgctgattttcaagtgcacaccgagcagcgcttcaggcagctttgggtcagaacacgcctgattcggacttcaggcgaaggcagaggccagcacgggtcaccgattcagagccgggggcggggccgaccacacacgctgtgagacccagaggccgaggagccgcggg

SEQ ID NO: 11385 - DNA, 2300 bp, Homo sapien
gtacaccaatcactgtgtcaaactgctgtatacatagcccatatacaatacacatggtagcattatttataataacagtttgaaataacctaaatactgcacactagggaatggataactaaccctagtacaccagctgtgttaaatatcatgccttcattaacaatgatacttctcgatatgaaggggcacatgcttatgacaatgttaagtgagaaaagcagacaaaacagtctaaattgtgacaacaaccacaaaaatatacattaatacagccaagggctagaaaggatcagagaaaaatgaaacaggtatgtatgtctgagcaagggaatcatgggtaacatttctcatgtacagtagctccccctattcgaagtttcgctttccaaggtgtcagttacccccagtcgaacttggtccaaaaatattacacgaaaaattccagaaacaattcgtaagttttaaattgtacagtgttctgagtggtgtgaagaaatcttgcaccatccagcttcgtcctgcaaaggacctgaattctacctttgtccagcggatccacactgcagaaggtcccctccttatgagtcacttagtagctgcaagagtagtgatgctggcatactgtgagaattgttctattttattattattgttgttcatctcttactgggcctaattttcaaattaaactttatcacagatatacatgcaaaggaaaaaacagtatattagggtttggtactatttgcggttttaggccttcactgggggttttggatcccatcctacaggaataatggggtgctcctgtagctgttagtaagacgatggtgtgcctggggatttgtgctatacaccacagcatcttctacagtcgttttgggggagagggaagatcagagcagtaccaatctgctgctccttgccccaaaactggcaagaggcgcctttcctcagccagaaaggcctcttctccaccagctgtgtcctgcaatcaactgcagctgtattggtctcaccccatgggaaacaggtttgaagttaaaaaccttttcagagggccgagataaatttagtgctgctaaatttaactatcttcaagattaaacatgaaaagcaaagtgcatgagttatgtatattattctttcaattgtgcaaaaataagacattaacttgtttttgcatggaaaaattctgcaagaatagagaagaaatgttaacagttacccctgggatctgggataaaagagatacatcatgcttttctttaaaaaaaaaaaaaataggtttttgtggatttttttgtttttgttttttttgacagagtccagctctgtagcccaggccagagtgcagtggtgggatctcggttcactgcaacctccatctcctgggttcaagtgattcttgtgcctcagcctccgtagtagctgggattacagatgtgcaccaccacacccagctaatttttgtattttcagtagagacggagtttcaccttgttggtcaggctggtctccagctcctgacctcaggcgatccgcccgcctcggcctcccaaagtgctgggattacaggcctgagccactgcgcctggcccgtgcttttctctaaagtatgaaaggaatatgtactttcttcttaaaaaccatgtaccaaacaacacttttcaattaaaatgttatttttaaaagtttaaatccccaaatttcatggctctaactttttaaacatcactttttaaataaatgtctaagtttttaactcagtatacagcgttctccaaaacaacaaattcatattctgagcccaaaactgtgcacctcttttagtgatgaggacggagtccaaattgaggacatcccttgtagctcacaatgcacacatattctcacatcaatagcaacacagaatgcaactgatgaccaatatatattcacaaataattgaggaccatggctaagagttgcattcggattccgatgtgactgctattgtccttaacacggactagctccaggtgagtcccccggccccgggggtgtggcgggcgtcacccgttgtccgggcacacaccccgcagacccaatcctagcccgctggctagaccatggagggccgctgggtgcagccacagagcgcggggccccggcgaccccgccccgctccgcgtcactcggcgccctgcggcgcgcgatgagcacctaccactagcggagccgcgagggagaggccgcggccccttcccgttgcctgcggccaccggccggcattcagagcccctcgcctggcgcta

SEQ ID NO: 11386 - DNA, 2300 bp, Homo sapien
ccagtaatgctcacttgcctgacactcattcctgctgtgtggcccagttcctcacaggccatggattggtaccagtacatggcttagggactggggagccctgatgtaaaggacctataatattcaaaacaattttgaaaaagaagaatttggagaacttacacaaactgaattaaagacttactataatcaagaaaatgtggagatcaggcacaatgactcatgcctgtaatcctagcggtttgggaggccgaagcaggaggattgcttgaggctgagagttcgagaacagcctgagcaaagtagcaaaaccccatttctacagaaagtttaaaaattaggcagctgtgggccaggcacggtggctcacgcctgtaatcccagcactttgggaggccagcgcaggtggatcatgacgtcaggagatcgaaaccatcctggctaacacggtgaaaccctgtctctactaaaaaatacaaagaacattagccaggtgtggtggtgggcacctgtagtcccagctactcgggaggctgaagcaggagaatggcatgaacccaggaggcagagcttgcagtgagccaagatcgcgccactgccctccagcctgggtgacagagcgagactctgtttcaaaagaaaaaaaaattagccagctgtggtggtatgtgcctatagttccaactatttgggaggctgaggaggaaagatcacttgagcccaggaggtcggggttacagtgaactgtgatcacacaattgcactccaatttgggtaacagagtgagaccctgtccctaaatttaaaaaataaataaaaataaaataaatttggtgttggtataaggataaatatatagataaatggaatagaatagagaatctagaaataaacccacacttatatggtcaattgattttttttttccaaaagtgtgaagataattcagtgggaaaaaggatagtctttacaacaaatgttgatggaagaatttggtatacatatgaaaaataacgttgattcttacctcatacagaaaaattaattcaaaatggatcactatgttaaattcaaaaatgaaaattattgagcttctagaagaaagcataggataaaatccttgttgtcttgggaggcaaagatttcttaggacacaaaacccactaactgtaaaaaaattataaattgtattttatcaaaagtattctcttttgtttttgaaaaatgccattaagaaaaaaggagattgtgagttgtgggacagttggaacttacctacctggctgtccacggcttaaaatgatatagccacttgacaatttcttacaactcaggaattctactactccctggtacaaagtaaggaactactgctagctgcaacaaaatggatgaatctcacagaaataatgttgagcaaaagaaattggacacaaaaagtatatactatatcatttcatttctatggtgttccagaataaagcaagaattgccctataatgatggatgagtggtgacctgtgatctgggtagccatgggagaattgactacataagggttccagggaactttgggggatgatgcttacatgactgcatacatttttccaaactcctcgatttgtacatttaaaatgggtgtgtccattgtgtgaacatgaacattgcgtgaacacctaaataaaattcatttttaaaacaatatttactgatccagcactagaagctaagcctcctgatttctaacacagtatttatttttacttgcccctttcccccaaaataatattggctccttttctctctatacttcctacctcccatgggatggagagatggaatgtgggaggcaaggccagtgtgagcactggctctgaggtttaggcctcgatattcaggagagtggtgtaggaggaagatgaaccactgggttttagacacatggaggcttagttcagggctttgggcctcccggttagtttgtttagtcttgttgatctaggaggagatcacaccagatgaaaggatacagttgactttggaggagggtgaagcagagctgggaaaagaatcagataagtcattagagacataaaaaaatagaaagcaattttatatatgccatggaggagaggttgttaggaggtactgaggaaagtgcagacctagtgatcttggtaaagtgaacatcagatccacagctttgatgtcagcatggttgggagttgggtgctcttgcctacttcctcagtgacttaggagagtttacttcatgtcactcagagccagtcttcgaagat

SEQ ID NO: 11387 - DNA, 2300 bp, Homo sapien
tttaagtattttattagtttgggagtgtgtgtgtgtgtgtgtgtgtgtgtgtgtgtgtgtgtatgtagaactatgtatatagaacaatatgtatgtatagaactatatatatatatttcagggttcttataaagcaaatacctagtagtagagacatggtattttatttctcttaaatgagtacactcattactgttgaataattagatttattctttattgaagcaggcttagaaaagattacccttttaaaaaagacatgactatttcatattgttgtagatgatttttaaactttatttgtattcagtggtttcaaataagaaagcaaccctgagtttttgtttttaatgtcatttagggagcatctactgtattatacttgttttatcttatatctttggtatcatcacatgtcatatctcatccctcatatcttcccactagtctgaccgatagatattactatccccattttacaaatgagaaaactgaggctagagcttaagtgagttccctttatccagatagggtcagaatttgaattcaggtcaatttgactataaaaccaccataattactattttttttttttgctttcactcctccttctgtttctttcagaggattatattcgttatgcccatggtctgatatctgactacatccctaaagaattaagtgatgacttatctaaatacttaaagtgagtattgattatcttcagtcataatgaagtaccatttgcttcttggtttccccagcagtggggtttccttatggcttatcatatcactgtttatgatacaagattattcttcagctatgtcatatactttgtgctttggggatgatttttaatggatgattggaatgaactgatttgatggatacggattgcaggaactagtgaatgtcaagattggaattatggcttggtctgattttagaggattaactatgttaaaattttatcctcaattatacttaactaatttggttctttgtgatcgttttaagaggaagaaaggagggatggaaagagtagatggaatatagacttttttttaatttacaaaatattgatatcattttcactattatcactagatgttcactaaagggactttatgccaaagacttggaagtcaaagtaatatgaaacacaatctgtgtctttgaggggcagaagaagggttttaagaatggtttaatgtatgttcctttctttataaagagcttatacatttagactttaagttgaaaaagaagtgttagaagtgtttattttctagatttttgcaaaatcgttacttaattttgttgttaagattttatgtgtgtgatgatttaatagcttttcctgatccttataaatcctttttatcctctgagtcatgaagataaaatgactttttaatagatacagttgttggttttagcaaattccagaggtcctactttaaaaaacaatgattggaaactggtttctataatagttaaagtgtgctgaaagcctgcttcaaattgataatcatatccttctgcttaatatatccccagatttctatgctgcttgtcttgttagagacctcatgtctttgtactccattgtttgtatagattcctttctttccactaacatttttaagttttggttgaagagttcagaagaaaggtatgccaattaaactgctttctaatggaagaaaagttgaaatttatgtggctttttgtgaacagttaaaatgattttcacctttaaatatatgttagcatcttcactatgaagaaaaaatactccaacaccgaaacacaaatttatagaggctaaagaaaaggaactctgttccaacagatgggttctaattttattttttagttcagacaacaccaaaacaaggacttacatatcaaaataaagactcatttattgagaaaactttcattctttacactgagttgattgaacaggaagatatatggaggtaaagctgtaagttgaaaagtaggacttactaagtcttaagttggccctgtctttctgtttgtttgtctatgaaaaacgatgactttgattgttatttttaactttcttaggcttccagaaccttcagcctcattgccaaatcctccatcaaaggtaagaagctgtgactaagatatctttgggggacttagaaaaatattacactcttaccacatgagtttagttggttctaatatattttaaggtgtactaaatccattttgcatggagtgatgccatgtggaataaagattgtactgggctctccatc

SEQ ID NO: 11388 - DNA, 2300 bp, Homo sapien
ggaggttgcagtgagccgagatcacaccactgcactccagtctgggcagtaagaggaaactccatctcaaaataaaaaaaagagtccctcaatattcctttgtctttcaatgaccttgacacttttgagagtagtagccagtttttttataaatgccccttaatttttgagatactttgaaactatgttaatatcctatttcttttacgatcatttcactatactactaactaataatactgacaaacactgtatagcatttatgtgcttggcattgatctaagcactttacatataataactcatttaatccctacaaaaattataatcatagagtgccatacgagccagaatagtgacacccacccaaagctcaaaagatgagaggaggagctgcttaaacacttgcattattatccctgttgaaagttagcttcttcacaataggaactctgtaccattcaagcttgtgtcttgcacggtgccgagcacacagtatgcaattggtaaaggatgagtacatgatagtcagacaggttgaataatctcagcaatattctcactaattgagacttgattgttttttccagcaaagtcgagatctttatctacctttaaagtgcctaagctgttttctgggtttcttttgggtccttgaatatgccaagctgtttccacactggtgcctttgtatgactggtttgtctctatgtgcctttttctgaatcttcacaggactggctccatcttgttattatcacttatcttaatcacttttccagagacccaatccttgaccttcctcccctacccccacccagctcctactcagtactctccataccattttcctgccttactccctgcataggaccttgcctgactgcttcacatatagtcatgccccgcacagcaatggtttgattgatggcagactgcatatgcgatggtggtcccatgagactataacacagagctgaaaaattcctatcacctagtgagttgtagccatcataacgtaaggttgtagcacattgcattaccttttatatgtttaaataagtttagatatacaagtacttactattgttttacagttgcctacagtattcagtacactaacatgctatacaggtttgtaccccaggagcagtaggctgtaccatatagccaaggtgtgtagcagactacaccataggtctgtataagttgtataagtacactctgtgatgttcacacaacaacgaaattgcttagcaacacttttcccataacatatcccatcattaagcaacacatgactgtacatacacagcacctaacttggggttgcatacagtagaccttcaacagatgtttgttgcatgagagaattaaccaaccaaccaatccatcaatccatcctggacaccccagacaggtgttcagcaatacagtgttggagtccttgacagccttgtggctaaaccttgaacttcaagagtcgttctgagaatgagttttctgtgatgcattagtatttgaagtccaaggacttattcataaactcactcataaacttgtatgggccttaaatttgtgtgttaatgttgctggtaataaatgaaatagatacagtctttaatctctctggataaagggctgtgaattttcttctgtcagttgattgaactgcacttactggagtcattttacgtagcatttagagattatttatattaagcccgcaacctaaattattgcagtttgagaatatatgtggtttttataaactctttgtattcacagaggcttgaataggagctcatattatgatttagctacaaattatttgggaatttggtaaactggcaattttgttttcttgcctgtttcactttacctttgatgccaagttgaagatctcactggcaatgtacaacataactgagctgaataataattgaaaagtgaaaaacaaaaggtattacacataccaggtgccattttggggaataatattaggaataaatccatgtgggtttatagttatacataaaatgttcatatacacacataacacacataaacacacatatatacacataagtacacacaaacataaatgcatacccacatatggcacagatacagacttaaatctacatagcctgtcctttagaattctttaaggaatttcagactagagcctttttagactcttgtactaaacattaggatacgctagcctacttgaatcctttggccctttgcttctcttacttacatcatttttctctttgattaatgtgccaagtttg

SEQ ID NO: 11389 - DNA, 2300 bp, Homo sapien
tgaactcttcaatgcaccaaaagtgagttaacaagttaagccaggcacaacagagaacagactgtattcacgtgaagttcaagagcaagcaaaactagtctgtggcgataatatgatagtaatcggaataggggcagctgagggtggtaggactgattgagaaggggtaccggggaaatttccatgaccacagagatgttccatatctttattagggtgtgagctacacaatagtgtacatttgtcaaagatcatgaaactgcgcacttaatatagaaaaaggtaacagcgaaaaatatccctcaaaacaacagtcacagtatcggcagggaggtccattatgtcatggaggagagaaggggaatttccatatagtgaaatttcctccctggctgtctatgcaattgaaaaacatataaaacgtcagccaattttccagacagtttcaaaatctagggactttttttttttttttttggtacaagcactgtctatgtcttttcaaatgtttacagagtatttacaaaaagtagtccgttgggtggcagttgtaattagggaaactggcagtgaaaattaacacataccataaaagagggataattactccactgtcatatacaatattattatcaaatggtattcacccaggaatccaattggttcattcccactcagcctcgttgttacaggaaagaccctcccttccttgttaccctggttatgaagctgccacgttccacgggtgatatgccatatggtacttaacatcagaatcaaaatgagcttgtgctttttgtgtgagatgttgaaatttatcagaaaatcagaaagcctaatttccaccaagttcctgagaactgccatctgccgcatgaaaaagaaaatggagattttttttttttaaaccatttacttattgtgaaatgtgagggtgctggtgtatgtgtttgaaaaagcgggttgggggtggggagggggtttgtgagagagcgccagagcaagcccgcttggcagggcagaaagaaagagtgtcagctgaatggaggcaagggtttgcgaagcgtaattatggaaatcatctattcctgagccttttttttttctcctcctgaccacatgttccttccacagaggagcagcacatagagtccagcttttgagaataagtaaagtccccatttcagaaagaagagggggctgaaaccagtctctccaggtgtcaagtccttctatggaggagctggcgtgagttaagcagggagagtaaaagcaaaggagccagaaaggctgagtggaaggaggaccaggaagtctttctaaggagagtgacagaaagaagggcaggcaggataggagagggaggccaacagcggagagtgaaggagtgcctactgagaagggaagaatctttcagcaaacttcggatgccaagggaaagatgctgaagtcttccaggagggcgtgcgatgcctggacgttcgtttcagtggacggccccagtctgtggcgttgtggtcctcgacagactgtcttaaccatgagtcacatccctctagtgccccacacctccacactgcctggagggcttaccccagcctttgattttactaaatgtatttatttgttctctgtttttacaccaaagctagcatgtgtgttggaacagctacaggcgacatttgttggacctggttagtggctggatttctcacctctgaccacaagtaatactcaggaaatagacctctggcaaacagcccaccagagcctgaaacggaacagtgatggggatggaggataaggctcaaggcaccaggggacttcccattatgacactgtagggccaagtgttggtcaaggcaggccgttcttggatggcatccaacgtggtttaattaaagatacactaaaaagatcactcaatagacagcctcatctacaaggcagtcttcctacaggagcttaggggtgtatgcttttctgtgcttgcagaaaggcgttctgtgccgttggcacctcggggagaagcttcaggtttcaggctgaactcctgagagcttagcatctggggtgtgcacgacttggggtgccaggcagcaggtcccacttgctcaccagagggggcggccttatgctttaccccgcaggtgactgaggacccaacagtgtgctccttgcttggaggctagtgatgagctcctaatttcactgtggactgcccagatttctacaagacaggcttctggagacgctgtggattctctcctgagtgactaggggctggcaggaagggcggg

SEQ ID NO: 11390 - DNA, 2300 bp, Homo sapien
ggaatatctttagggcagcagtcaagacaccctaagcagaccagtgacacttttctgtccccatcttaaaggggtggaggagagcatcgtacccccatgattaaagagactgacattaaacagctggactatggagtgtgggaaccatgtaagtttaggggctagataccctgcagtgatcacttgaaggttcttgtgctggttacctgccagcaactcttataccccgccctcccaaaaaatgggccaggtgcaatgcctcatgcctatagtcccagcactttgagaggccgaggcaggaggatcacttgaggccaggagttcgagaccagcctaggcaacatatttttctctacaaaaaaattaaaactcagctgggcatggtggcacgcctgtagtcccagctactcaggaggctgggaggatcacttgaatcagggaggtggaggctgtagtgagctgtgattgtgccactgtactctagcctgggcaacagagtaagaccctgtctcaaacaaacaagcaaaaaatgaagtgaggcttttaaaacctgggaactgaagcagaaagccatgcatcactagaatacagtgataccgttcaagcttctcttccatataataaatgcatcactgagttgccattagactgctatgccaatgatgaatgataacactgtgtcccctgtgggcgaggggaacctgaatccatgcatcattttgagatgtggcttgaggttttggtctggcatgccctttctctggatatttgagaaaggcagaaatcatttaaatagcatctcattttccaaagcccatcttctaaaagtcatgctgatttcaccctttcttccctggccttttccttagtaccatcttcctgaggatacaactggcccactcatcagccttctaggtaagtggcacaggctccagctaccttaagtggactacctggcttccctgctcactgatagggtgtcctgggaccaggcactcgaactcggtagggtttagtttccttgacggtaaaatagaaaagtaagcctgtttcacagcacttccctgaggatcaaatgaggcacagtttgaattgttcccacacagagtaaataaaggcaggttccctcctggctgcaagataaaaaatgggcaggggaatctcccttgaagaactggcacgctcctttctttcagctaatgcccaccaatatgtccattgctgtttggggtgcaagaaattttaggctcagtaaggacaattcctcccaatggtttggatagggctgtcagaactaaattcaagttgttcgaagtctccttccgcccgccctgccaacttgcctccctcttcaccctcctaataggaggtgagcccctccaatagcgatcattaactcaccctaaggttatccccttgctgcaacaacccgtgaattgcaggttcattcaatgctctttaaattatttttaaaggcttttttttttttaagtagcaaaagaatgcatgacacctattgtaaactggcaagttgagggggtgggatgccgctcagacgtgtactgagaaaggtgataatgaatttggcgtcagcaattcttcagaaactataagaaaacacccaggtgttcgaattggtcccaaaagggaaacaaatccttcccagctttcacgatgcgctgaggttggttttctcagtgctcctcccagatcaggaggtggggaacctcgtggcaagccctggggctcgggattcccggactgtgggcctgggggagagaggcggctctcgtgtgcacacttaccccgcccccacaacacacacgcggtcacgcaccacagacgggcacacgcgctcagcacagccacagtcgcgtgcaaccaggagtgcacaccgcacccacatcacaccgcatgcacagacgcacgggtgtgagaccacacacctcggccactcacgctcacacgccccccacgcgctcgcacacgcgctcgcacgcgcactccccgcgcaccgccgcgcgcacacgcgggtcccgccggacggcgaggggcggggcgggcgcgggcgcaggcgcgggtgcccagccgggcgcggtcgggagagggcgcggcgcggggttcgcggctggcgcttgagttgtttgccggctcccgggccgccagacgctcggagggagcccggccggctcggactgggcggccgggagggagggcgccccgggtcacgacggcgcccgcaagccgagcgcggccgggacgtgcaccatggacccaaaggcgggcggcggcggcgagga

SEQ ID NO: 11391 - DNA, 2300 bp, Homo sapien
atctattttgaacttaatacaaggcctaagtccttaataaaaatgtatgtaattctgaattgatcacaaggacagacttttgacagaacctgctcatatttttcaaaaatatgtgtctactcgttgacaacatggtctctttctcaaattagtcattggacttacgaactgttgtatctgagaagaaccagattattaataactcaagttacatatataaattagtgcattcactttgataaataataaatgaggcaagtcaccctgctccgaactgatcgtgccatatcttgcgttgttttctcttttgcagaatttcttttcatttgctgaaagttttaagtcatgcccaatgactgatttattgttttcttcacaggaggaggggggaagcattaggtacctggtacccagcaaaagcccaacaagcaaagttatcagtggaattcctcaatgtgacaaagggctggatgaggggttccttgctggtacaaccaggtcacaagcctaagaaggcttgacgggtgtggctggctctccccccacggccctgctctgttcccgatctgggctttgctgccctgggctgggctgcttctcctggctctctgcaggacctccaggctccaggaatttggaccgagtggtagagacatcgccggcagagacggcaatcgccagcttcctctctgtgctgtcttgtgattcaaagcagattctgctccacttttttaaaaggggagcacatgaatgctggagacccacaagaacagagtcgagcaaggaaacgtgcaacagtgatacaaaagtctgtgagtacgtggctcattcgaggtgagccatgacagggatttgttcatggggagcccaggggcatcaaggtctgattgctgagagtgttcttgtgggagatgggaggttataagagctgtgagaaccctggggcttaagagttttgcaaatgaccctgggctgggacacacacacacacacatagaaagaaagagagagagagagagccctatgtaccaaggtcatccaagcactgcatttgtacttggctgtagggaggaagggttggaaaaaagagaagatgttttctatcttggacctttacctaaaataggcaccatcgtgctcagtggccttgcttgtaaacttctacaggagggtgagttggagagagtgagtgtgagcgtgagtagcagggtgagctgctcactggtgagtccaggaagtgactctggacctcttcttacatcagtttggtatgataccacagtcagacaacttaacaaaaactgctgctggctggatgtgtggcatggtcgttgaaaacatttttttactttgcctttctcttcttgcattattttctagttaatgatctctcttccttggaagagtacatttctggggtaggaactatctttgtgaaaatattcttttttagagactaatttgcatcacaagaattctgatattcgaggtacaattagttcatgtatcaatattttaattcacataggtattctcaaaattttatataccactcatagaagaccaggatttgagtcacagcactgtttctttccccatacaaatgagtcactgggcctcaaaggttcaatcatcctctttatagatgaaatataataacagatactagtgagattgttgggatgattaactgcaaatgtacaaagtcctttttaacatagtagataattatttattattattcctgatagacacagcacagctataagctgactatataccaagaacaatgagtaggattacctcttacatttcttttcccaacataatgctttgcttctgatctgaccagggctttgctaaagtcacacatccagtaagtggccgaagcagatcttcagacccacagtttggctgccaaaggaccacagtgagtatttctaatgctgaaacaagagggtgcagctctgcagcccagacggctgggcctcagggtaggtaaccaagacagctcaatgcatctctccctcagccgtccctagcccctaaaaacagagctgggggtcccagtcctctgtgggacatggccctctttcatcaccagcttccagcctaccctgcatctcttccctctgaattgcaggaaccctcccagcctccatgccgcctttcctgatcaccctcttcctctttcactcttgctgcctccgagcaaatggccacctccgtgaaggaatgacattgctgaagactgagtttgcacttcacctctaccagagtgtggccgcgtgtagaaatga

SEQ ID NO: 11392 - DNA, 2300 bp, Homo sapien
agtgtactctttttttccatattttttttctaagtatctgagggcattaagggatattttgtgggagagcatggcagtggttctccttgattttacctttagaaaataagaattgtatttcagagatcattaagcagtctaataatgtttgatacaacaaaacctttttgaaaccttttgtacttcaaacctgtatcagcttttcaggataatttttattttgagtttataaagtgatatttcctttattcattagggatttaataaagtagtgcatgaagttaaggttttctaaatttcattgaagtatcttcattataccttttctttttttctgatagaaccatcatagttttttagtctggctttatggagaaacttccaatttctttggtcattttactttcttttctggagctctttcaactcttacagaacagataccgtatttgtatgaaatattgtcatgttggttatttattctatttatttaacatgtacaggagaacatacagtacctgagttgtaatggaaagaaatccaaaaccagtatcagaacccttatctattaatgctgctctagcagtctatcacaaattcttagaagccatagagggtaggtaggacttcaattggagaaggaaatagtatgagaaaaaaaatatggaagtgaaaaagaacaaggtatgtttagaggagtaacaagtagctgagtacgggtggatcataacatgtatataggacattgagagtactattaaactaaccaaattgcttatgactttaaatgcagggttaaggaatattagcttttaaacagtggagttcaaagagcagtcgaagatgtttttaacagacatctttagaaaaattgatttggtggtggttatatgcagtaaaattagaaggggagatgagttgaaaggcaggtaggttacctatgagggctattgatatggttcacgtaagagattttaagtggttgaattatgatgatggaagagagaataataaataatattggaaagaactggcaaactttagtaactgaaggatattaggggaagtgaaatttttataaattacaatattgaagaaatattgctactgaagttaagtgtaatttacaagatgtgaatttgaatcacggcactattagttattaattagtacctttggttatcttttgtaagcttcaatttcccatctgttaagtggcttatagctccatctcatagggttgttttgggaattaaacaaaatcatatatgcaaaattttcttggccaagttctagaggatctttccctccactttccctcttggatctccgtatttttattcacagaataagtgtgttttgtggactgattcaataaactgtgtgtcaggtgcatgctaggcacaggagcacaagatgagtaaaacagtgcttcccctctgaacattacccatctatgggcatgtcagacacgtacacatcatagagtacagtgtgccaactgtaatggaggggtggggcagagccagaggaggtgggcctgacagcctggtgtgtttttggagtacagagtgggaaggggtatgagggaagaggtcttttagaggttgttacatgccaactcatttttctaaactttgtttgcaatatgcaagggagaaaataagtacttggcatggctgaagtatggagtctgtatggcgtggtggtgggaaggcagatagggaccagatcactgaagatctttatatgtgatattaagtgtctagaccctatttttaggtgattggctgttacttttaccgaacagttttagatagggaaattatatgatcctatttatatttcactgccatggattgatcagacagggactgattagaaactaaacaaagcaaaaagcatttgtactagtctaatctgagaaatgatgaaggcccaaattaaagtggtaagaaatagaagataacatttctagagagatgagagtttagtattgacagaaggcagcaactagtaatgactacctaccatgtttatgtgttctggtaagtgccttagaatttgtgatatcagtttatccaggtctttgtgacagttaaatatggaggatgaggggaagatatcaagaataacggctaggtttttagaacaggttttgtagcttgggggagaagaaacaaattgtacatattgtgtctgaggaacctgtggaagattcaggttatgtctagtgggtagttagatacagcagagaaataggagccatctggccccaacagtagatttgtgaaccacca

SEQ ID NO: 11393 - DNA, 2300 bp, Homo sapien
tatctgtcatgtgtttcttatccctggcttaggaatttttatccaaaggatggtatagtattctggtatccttactaagccataattcctgatttggatgtccatgtaattagcattatacacacacacatgcacacacacacacaccccctaccttaccagatgagagcagtttataaagaattggtgatagttacacttaattttctagacagttgctgcaaaaatacccttccagaatgaattcgttagattttgaattgtgaaagtatattttaaattaattcagcaacagttttccttgtgatacatagttactttggctgtgtataagaatagcggcagctccatacgtttatatttagttctatatttatgttctaggtactggggacacacagatggaattaagcaaggctagaaaacgtattatctttgaagacaggcaagtaaataaacatttgtaatacattaagataaatctcatggcagaaataaacagaaggttctgagacagcgtaaagaaaggagtaaagttttgagggaagagtaaggaattgagccatgacatatcaggaagagaaaacagtatgcaaaagcatgaagacttgaaaacagtgtatcaggagattataaattgtacacctggagtatggaaagtataggtaggaagagtagaagcttgaaatgtaggtagagggcaggtaatagcaccctaaggagacaggacttcattctgttagcatttgcagggaaggtattgaagattttaagcaggtgagtcacatgatcagatttgcattttagtaagattactgtgccagcaaggtgaaaggtagactggagggtggtaagatgggaagagttagcaaactacatgtaacaacctagaagatatggggaatgccaaaacttagctagtgctggacaggaaggcagaattctgagaggttcggtaggtaagctaggcaggttttcaaagatgatttgtaagataggagaaaaaaggcaaagtatttgacaggagccctgaacctagggtccatgcttggtctgaggagagttctgtgaattccctgacatcctgtctacacattgtccatctgtgtgcatgaacttttttctgggtaaagagatccatagctttaatcatattctcaaataagtaaaaatatactggtttagtattattttccactttccaacttgggcatctatgtggatatttggtagtgttaactgagatgtgggtgataaaaaataaaggaggagaaaggaaggtaaagtaattgacagacaaagtatcattacctttcgtgtaaggatgttttaaaggatttataatttaacatttaaaacaattacctcaaagactttttcttgccttttaacattatgttttaggaaaatattttgtatttaaaaattgaaatgagcagattctgatagttaaattttttttttactttgaagcagatttaaataaataagcgttaaatcagcttttaaagtttgtttgaaatttaaggacatatgatatgaacatttaaaattgcttatttcaagcaaacattgaaaattctacagaatgctaggttaagagcagtgtgtgtgtgtgttttactctgtgtactggtgtcaagtaagtcagaggatactagcctaattttttatttaatagattggcacttttctgttaaacttagcctatttgggtgtttcatgcttctccatgtcagatttcaattttgagagaatgaaaatgttgagtatgtggttttctgatggtgcactctcttgtaaataacccttaggctgctagtcatttataaataccttgataatacttatttagctgtatttccatagtgattttatttaacttccactttcacttgttcttttcagatgtaatactgtagatattaaactttttagacttttatattaggaataaccttagtgcagtgactagaaagacattgaaactatgggctttacatcaaggcaaggctgcattttgatctagacaaggctgttttggtatatttttccccacgctctgtcttttcagattgaattactgatttttccccctttgttttgtttgttgtggttttgatgttttttttcctttcagctaaaggagcagcccagtggttttcaagaagtgctaaagtgcactgactgtctcatgatgactggtgcctcagggagggtcatgattcctggatacaggatcgacctgatcctggatgtcacttcaagcagtcagatcgtggggaaaagccttgtctaat

SEQ ID NO: 11394 - DNA, 2300 bp, Homo sapien
gcgcgtgctcaataactgtccccggagccggcctacaagcttcccccgcccctgagctgtttaaatatgctaatgaaaggatagggcctgaccagtagaacggcgaggcggtgtatcacgtggctcggggacgtgtcaggggcggagcctccgcagcccctgcccgagttaaaaccggagtgtgagagagaaaagcgcttcagtagcgagaggggctgagaaagtggtgacaccgccggggtgcggagggagtccctgaaacttctcccaacagccccagggccaatcttccctcagcccactcccctcttcgccagctcccaggtccccactcctgtaccgggggtggggtggggagccaggcccgtctcccgctgggacacacacaggggccgggagcggggacgggacccccgaggcgggggggacgaaccgacagacagacggctgggcgcccgccccagcgggcaggcaggcaggaggaggcggaggcgggggtacgacggggagcactgggtctggggagtttcctctcaactatcgggggagaaactccccgcagccggaggaaagacccagacagtgttttcctcccgggggccgtgctcccccgccccgcgtagcggcggtcgccgccaccggcgcctccacctctaccatctcctctttctccaccacctcgggccccggtgtccccggccagcactatgcccatcttactgttcctgatagacacgtctgcctctatgaaccagcgcagccatctgggcaccacctacctggacacggccaaaggcgcggtagagaccttcatgaaggtaccgactgaccgagcccgggcggcgaccccggcccggcggcccgcgggcggcagggtgggggagggcggccggggcgggggtgtcggggacctgactgcgggagctgccgggctcggggaccccctcccccaccgcgcgggcgggcgggcgctgcgagccgggttcggccggggcccgggctccggccccgggcggtgtgtggggagcgatctgtgtgtgggggacggcgtggaggggtggccgctgcgtgtgcggtactgtgggggcggcggggccgctgggcgccccttctccgcctcgtaacctcgcctctgtgcttccctgtcgcccgccctgttcctcctcccgtcccgcagctccgtgcccgggaccctgccagcagaggagacaggtatatgctggtcactttcgaagagccgccctatgctatcaaggtaacagccctcgccctccccctttcctcccttcccttccctgttccttcctcgctcgccctccccgcccccccattcacccttcattatgctcccctcccccacccgctgcgctcccagccgctgaggtctcttccctgcgggctcccaccccctcccccgctcggcagcgtcctagcgcggcgcggagtcgcggggccaccgccgtcccctcccggcccggcccggcagcggcggcggcggcggcggcggcggcgctgctatcaacatggccgacatttcccctccgcggcgtgagcggcagcaatgaactgtgggggatatttattcaagttagccggagtgacagccgggcccggccgcgcacagccccggtttgcattaaaggggaatcggcccggccggcccggaagccagatgcggggctgccaggattggtcttgtcagattcgtcctaagagggccggtgggacagctgcaggttaacttcctaagtccggctcccatctgcttccactagtaccttcacatacccaaattttgggtattagattaggtagtaaatttgtcagtgaagttataaagtattaaggcagttaactaccaaaacctagagaggaagctgggttattcctgggccacctttggaagagagtttcctcagcagcggtacagtattaacacgttaaccaagccaaaccaaccaaaagtgaagctgctacttggtgaacgtcagattataacggctctgtgtacatggctttaaaaaatgaaaaaaaaaaatcttacatttttcttttcaggctggatggaaagaaaaccatgcaacgtttatgaatgaattgaaaaaccttcaggctgaaggacttacgactcttggccaatccctaaggacagcttttgatttattaaatttaaatagattagtaactggcatagacaactatgggcaggtaggttgaataataaggtggcaaaatagttgatttttcattttgtggaaaaacacagtccagtccaaaaactacataacatgaaatgcaag

SEQ ID NO: 11395 - DNA, 2300 bp, Homo sapien
gacgttcaccaagtagcagcttcacttttggttggtttggcttggttaacgtgttaatactgtaccgctgctgaggaaactctcttccaaaggtggcccaggaataacccagcttcctctctaggttttggtagttaactgccttaatactttataacttcactgacaaatttactacctaatctaatacccaaaatttgggtatgtgaaggtactagtggaagcagatgggagccggacttaggaagttaacctgcagctgtcccaccggccctcttaggacgaatctgacaagaccaatcctggcagccccgcatctggcttccgggccggccgggccgattcccctttaatgcaaaccggggctgtgcgcggccgggcccggctgtcactccggctaacttgaataaatatcccccacagttcattgctgccgctcacgccgcggaggggaaatgtcggccatgttgatagcagcgccgccgccgccgccgccgccgccgctgccgggccgggccgggaggggacggcggtggccccgcgactccgcgccgcgctaggacgctgccgagcgggggagggggtgggagcccgcagggaagagacctcagcggctgggagcgcagcgggtgggggaggggagcataatgaagggtgaatgggggggcggggagggcgagcgaggaaggaacagggaagggaagggaggaaagggggagggcgagggctgttaccttgatagcatagggcggctcttcgaaagtgaccagcatatacctgtctcctctgctggcagggtcccgggcacggagctgcgggacgggaggaggaacagggcgggcgacagggaagcacagaggcgaggttacgaggcggagaaggggcgcccagcggccccgccgcccccacagtaccgcacacgcagcggccacccctccacgccgtcccccacacacagatcgctccccacacaccgcccggggccggagcccgggccccggccgaacccggctcgcagcgcccgcccgcccgcgcggtgggggagggggtccccgagcccggcagctcccgcagtcaggtccccgacacccccgccccggccgccctcccccaccctgccgcccgcgggccgccgggccggggtcgccgcccgggctcggtcagtcggtaccttcatgaaggtctctaccgcgcctttggccgtgtccaggtaggtggtgcccagatggctgcgctggttcatagaggcagacgtgtctatcaggaacagtaagatgggcatagtgctggccggggacaccggggcccgaggtggtggagaaagaggagatggtagaggtggaggcgccggtggcggcgaccgccgctacgcggggcgggggagcacggcccccgggaggaaaacactgtctgggtctttcctccggctgcggggagtttctcccccgatagttgagaggaaactccccagacccagtgctccccgtcgtacccccgcctccgcctcctcctgcctgcctgcccgctggggcgggcgcccagccgtctgtctgtcggttcgtcccccccgcctcgggggtcccgtccccgctcccggcccctgtgtgtgtcccagcgggagacgggcctggctccccaccccacccccggtacaggagtggggacctgggagctggcgaagaggggagtgggctgagggaagattggccctggggctgttgggagaagtttcagggactccctccgcaccccggcggtgtcaccactttctcagcccctctcgctactgaagcgcttttctctctcacactccggttttaactcgggcaggggctgcggaggctccgcccctgacacgtccccgagccacgtgatacaccgcctcgccgttctactggtcaggccctatcctttcattagcatatttaaacagctcaggggcgggggaagcttgtaggccggctccggggacagttattgagcacgcgcagaggcggggcgtcgggtgcgcgcgagcgggcgggcgggccgacccggaggcgggcttcgggaaggggcggggccggactgcggaaggaccgcgaggtgggggcgggggccgcgtccgcgcgcgcggggcggccgcggcggtgagcctgcgcgtcagggccgccggcctctccttggctgttggaggtgataggggtcgaggggagggaaaaaggggctggcgtcagccgcccctgtgaggtggccgtagcgtggacgagtaagaagggttgagtaaagtggacaaacacctggttaggagaagagggcag

SEQ ID NO: 11396 - DNA, 2300 bp, Homo sapien
acctgtgtttctagatcttgtactattctacatgcacctgttgctccaacctagctgaacttcactgttcctcaggaagccctcagcaatgctgtcttaacttcctttcttcacattttcaatgtcgggaagatcttttcactagcagcttccccttcctttacccatatccaaatcctaccagtcctttaagacagtgtttcttaaaactgaataatgaacagactcctaaaataaattcttatgatcctagagaatgttttcagtaggctggggtccacagaccagtttgaaaagcacaaatataaagaactaaagagcaattgtataaaattatgcaaatgatcaagttgaaagacaaatttcatctttataactggtaaaataactcgtattttgccatagaactctgattcttatcttcagatctatgatccgtttaagaaacactaaggcaaagctgaaaccttggaaaatgttcctgcatcaccccaaggtaatacatttttattttttctgatttggtgtctaacaactttctgccttggagtagctagtaatatgtagcattttcctagaaaacataagctctttgaagacagggaccacattttatttattttttatatgcaccacacctaatacacagtacatcctcagcaagtactggctgtaaagcctatattccatgctcttattttgtagtccaaatcactttaaaaatcacacttcttctattgttcatactcatagaagagcatattactcaaatagctctgctataaattaacagtaagtttcagaagttataccaagtcacgagactcagatttttaaaaagtgccacaaagtgtctcttctgtgtcaatgttaatagaaccctttctttaaatgatcagtaggcaaattaagaatttccggataaagaacaaactctggaaaaacaaagctagtgggagaggccctgtaaatacctacctagtcttacaagggctgtctctaactcagcttgtattttaggcagcgtcttcagtttttcaactaatgtgtttgagaaaactgttttcctcggacatgcaggcgtggactccttacttcaggtaaggtgacagcagcttgacagagagtgccttccctcccacggcatttgggacgaggctgaaggaaagacacaggcggggttacgggaaacccattctctgcgccatctgggcaagctgaagtcagtttttccgctttctcacgaggtaatggattatcatgggctcaggtccccttcagctctgaaacaggtattctatggctctaagtaaacacggcaagagacaggttatttctttggtaagatcagttgtatttcccagagaataaaacgggcaacaaaccatttatcgatatgtgagtcttccccctaggccctagctatttggggttggataaagaaaaagagggtttgcttcctttttggcgggtcctccaatgacagggctcctggcccgctgcgggtccaactcccacctctcgtggctcccccgaggccgagcgaggctccgtgcgaggacagcccctcaaccgcactccccagagggagcgctgggactcgcggaggagattagtccccggtcataaacaacctctcacttcccctcccccgcccgcgcccgctcgcgccggggcggcgcgccggggcggccctccgaggcccaggaacctcctccggcgcccgcgaggccccgagtcctcctccggagggcggctgcgggcctgccctcttctcctaaccaggtgtttgtccactttactcaacccttcttactcgtccacgctacggccacctcacaggggcggctgacgccagcccctttttccctcccctcgacccctatcacctccaacagccaaggagaggccggcggccctgacgcgcaggctcaccgccgcggccgccccgcgcgcgcggacgcggcccccgcccccacctcgcggtccttccgcagtccggccccgccccttcccgaagcccgcctccgggtcggcccgcccgcccgctcgcgcgcacccgacgccccgcctctgcgcgtgctcaataactgtccccggagccggcctacaagcttcccccgcccctgagctgtttaaatatgctaatgaaaggatagggcctgaccagtagaacggcgaggcggtgtatcacgtggctcggggacgtgtcaggggcggagcctccgcagcccctgcccgagttaaaaccggagtgtgagagagaaaagcgcttcagtagcgagaggggctgagaaagt

SEQ ID NO: 11397 - DNA, 2300 bp, Homo sapien
gcagtgggagcaggcacttccaagcctgcgggagcagggagcttcctggtcccctgagagtgggtcttctctctgtggagagctgagaagatgacgggatgacttgcctgctgagaggaactacccactgtgggtctcctctctgctaagagctggacacttattgggatgacttgcctgcagaaagaagctacccattgccctcaggtctcctctgagctgttctgtcgctcagcaaagcacctctttgccttgcttaccctccacttgtccggagatgaatgggtccacaaccatgactgggtggctgcagctgcactcaggagggcaggactcccactcttccaacttggaagcgggcagggcttctgcctgttcccagctcttgctggctccatagagcaccgccgcggctgtagccgtgcctccccgattatagccagcgtcagggcagcagccacttcagacgggctgctgccatcatcaccatcatggctcgctcttccctgactcgatggtgttagcaggttgtcatactagggtcataagtgaaagtatgtagtagagatagggttagatgcaaaggtaaggaaaaccaagtccagtgagccagccataatcagaacctatgcttatgatgatgacttctgagatcagagattacatgtccagttcagaagtccagacatagtggaaggtgaggcgatgaggcagaccaggaaagaaatgaggacatacataggcggtagtcagaaactaggaagcattgacaagcagtccctagacaaagttgtgaaataagccaagtttattattagtgactctggttgacagtttagctattggtggatgatagcctaaagcagtggttattagccaagaaatgcacatcggcatctcccataaggcttaaaaaaataatgtgccaagtgcccatccccagaggaaaggaattcagtagatttgagataggccttggtcatttcattttttttttaaagttcttcaggtgaatcttatacataattctgattaggaaccacatgcttaatgtataagaataatgtatgtacctggcatctagtagtactcagtaaataacttaaaaaattcacaaaactttagagttaactgcatttttaagtagaactcctaaaataaatctgcacactagaggaaaaaaaaaaaaccctgggtgatcaccaatatatttaacaatggatttgtatcatatgcatatttatgaattcaactatgttttgcaaaaaagaaaaagagaaaaccaaatactgctggagattcccgctcttcccttagtgagcttaggccctggagtgagcaaaagatgaaaaacatgaatctcttcttcactcaacttctatctgtgattctagaaagattctggttatattcagccttatttttctaaaatgtggcccccaaatgcaagacaagtatttcaccagactcacctgaagaaacagtgagctcttgcagtgctagagagaaaactagttagagtagtctgtgctgagccttgtaatgttacagtctaaagaattagggaagatttttctgggagggcaatggtcagaataggtatattggagaaaacttcatctttgctgctgcttttaaaggaatgttttcttaatgctcttgctccaatttaaaagggcataaataaattatatgaaaacttttgaaagaatggtgaccctggcttaaataataacctaaattgttgaaatggagctattctaacagaattaaaactgatgaattagattcatttgtaagagccaaccagagcccttttaaattattttaaaccaattaagcagggtaacacagtttaaaaataattatgtgccaatgacttggtttatgatatctagatgtgccatctgagcagaataatcagatacacttagtgttcctcatatgtaacctaacaaagtttcttttagctgtcttaccatttcctcagcgctctgctatactactctctttgagatcacattagtcaacgatatggagaggttgagaacatcaaataacatataaaagttataagcataaaaaaattagatgcgaaactgtccagccaatgtaatcagttaatacatatctaaggaaatttaattttggtcatactaatgttacatcagccctcaaaagaaaatgctggtagagatgactattaagaagaaattagatctttccaatgaatggtgtttcacagtaatagttgaagtctcagacaattcaagatcagccctgaaaaggggtacatccag

SEQ ID NO: 11398 - DNA, 2300 bp, Homo sapien
tccttggctaccaaacacctaccttagaaatacatttccacaaggcctgtccctttcttttcccagctttggcattatttctctcactttcagagccctgcaactcaatcacaccacctagaccattactactcttcggctaacttaattctgggattgttcagtggaggttatcacataacgactattgatgaaaagaattaaactttgtaaaatattttaagagatttattctgagccaaatatgagtgaccgtggcccgtgacatagcccttaggaggtcctgagaacatgtgcccaaggtggtcggggtacagctgagttttatatatcttaagaaggcatgagacatcaatcaaatacatttaagaaatacattggtttggttcagaaaagtgggaccacttaaagcgggggcttcaaggctataggtaaatttaaacgttttttggttgacaattggttgagtttatctgaagacctgggatcaacggaaaggaatgttcaggttaaggtaaaggattgtggagaccaggttttattgtgcagaggaatcttttagatagcagcctttagagacagcaggttgtaaaatgttccttaccagacctaaaacggtgcctggctcttagttggttatctcctgggtgtaggaaggaaggaaggaaaacaaaggggaaaggggatatagaatgtggatttttcccacaagagactttgcagggcaattttaaggcatggcaaggaaatataatttggggtaaaacattttgattttcttccttgttacgccagagtcagactggaaagtaagtcatgacctacatggtcaaaacccatctgatgagaatttatggtttttgtaggccatgactccccagaccccttagataggaatttgggcaagataaaaaagcagagcttagtcttcacgatcaaccccacatgccaggccttctggtaggcacctaacattcagtcagtaactacagtaactctgtccgttgtgtctggagcaagctaaaaaggctggattgctggggaaatggaaagaagccagcactaggggcctgggttcaagtctggagggaaggaggggttgtttagccctaactttgcactaaagtaaccttggctgtgtaatttagccatctaagaaaacgaggggatagacaccccatatgttctctgagctcccttgaagatgtctgtatgaaagattctctccttttcatgtcccttccgtgccactattccgagcatcagtctgaccctaggagtggtgacgtcctactcagctgggggctgcccctcagttcccatagaggcaagtctgggtcctgacttggccaatggccctggaggccgctgagctcctcaggcccatagcgcagaaagtgggcgataggtcattccaggacaagggggcggaggctccaagaaactacgactcccaggaggccactgggttccctccggcagcctgggcctggtgcatgttgggagcagtaagcggcctcccgccgcgcttcattgttaagaccgctaggccaggtagcccgcgcgcatgccaagtcacgtcccaacgagttgggcggctttccttcctgcaggcctcttctctttccggtcttgctgaggcgctcctttccccgccccacctccgccctcttttcagggaatttcgaaggggcgtggcgtctggcaagcgcgtccccaggggtgtgtatacgcgcgttcacgggaggttaaagagggaggagcctaacccttgggtgtgtaaggcagagagaagaccgcgaggaacggaaagcgcatgcgtcctagtggtgctgcagcgcccggggagtcgcggaggggaggggtgaaaatgggcttgcgggactgacgcacgcgcattgggataccagatccccgcctcctgctccaggtttcccctcctccttcaccaccctcccggaagtggagccgccctcgcgcccaccagcggctaccccctgcggcaggccccgcccacacaggctccgccccccggcgctccgccccctcctcttgtagtggcgccggcttgcatcccaggtcgtggcggttttggtgcctgaagcagggagcgcggagtcgttcccgagagaggcggccaggctatgctcgccggtttccggcgttccgctccggccagccagagtctctgtctcaacctgtgtccgtgctccagcagtctcctcagcccggccccgcggcgcggttggcggcggcgccccaggcgcgccccctcctccgatggcggcggagatccagcc

SEQ ID NO: 11399 - DNA, 2300 bp, Homo sapien
aagtctctttataggtcactcaggacttgctttatgaatctgggtactcctgtattgggtgcatatatatttaggatagttagctcttcttgttgaattgatccctttaccattatgtaatggccttctttgtctcttttgatctttgttggtttaaagtctgttttatcagagactaggattgcaacccctgcctttttttgttttccatttgcttgatagatcttcctccatccttttattttgagcctatgtgtgtctctgcacgtgagatgggtttcctgaatacagcacactgatgggtcttgactctttatccaatttgccagtctgtgtctcttaattggagcatttagtccatttacatttaaagttaatatttttatgtgtgaatttgatcctgtcattatgatgttagctggttattttgcccgttacttgatgcagtttcttcctagccttgatggtctttacaatttggcatgatttttcagtggctggtactggttgttcctttccatgtttagtgcttccttcaggagctcttttagggcaggcctggtggtgacaaaatctctcagcatttgcttgtctgtaaagtattttatttctccttcacttatgaagtttagtttggctggatatgaaattctgggttgaaaattcttttctttaagaatgttgaatattggcccccagcctcttctggcttatagtttctgcccagagatccgctgttagtctgatgggcttccctttgtgggtaacccgacctttctctctggctgcccttaacattttttccttcatttcaactttggtgaatgtgacaattatgtgtcttggagttgctcttcttgaggagtatctttgtggcgttctctgtatttcctgagtctgaatgttggcctgccttgctagattggggaagttctcctggataatatcctgcagagtgttttccaacttggttccattttccccgtcactttcaggtacaccaatcagacgtagatttggtcttttcacatagtcccatatttcttggaggctttgttcgtttctttttgttcttttttctctaaacttcccttctcacttcatttcattcatttgatcttccatcactgataccctttcttccagttgatcgcatcggctcctgaggcttctgcattcttcacgtagttctcaagccttggctttcagctccatcagctcctttaagcacttctctatattggttattctagttatacattcgtctaaatttttttcaaagttttcaacttctttgcctttggcttgaatttcctcctgtagcttggagtagtttgatcgtctgaagccttcttctctcagctcgtcaaaggcattctccgtccagctttgttccgttgctggtgaggagctgcgttcctttggaggaggagaggcgctctgctttttagagtttccagtttttctgctctgttttttccccatctttgtggttttatctacttttggtctttgatgatggtgatgtacagatgggtttttggtgtggatgtcctttctgtttgttagttttccttgtaacagacaggaccctcagctgtatgtctgttggagtttgctagaggtccactccagaccctgtttgcctgggtaccagcagcgatggctggagaacagcggattttcatgaaccgggaatgctgctgtctgatcattcctctggatgttttgtctcagaggagtacccagctgtgtgaggtgtcagtctgcccctactggggggtgcctcccagttaggctgctcgggggtcaggggtcagggacccacctgaggaggcagtctgcctgttctcagatctctagctgtgtgctgggagaaccactgctctcttcaaagctgtcagacagggacatttaagtctgcagaggttactgctgtctttttgtttgtctgcccccagaggtggagcctacagaggcaggcaggcctccttgagctgtggtgggctccacccagttggagcttccgggctgctttgtttacctaagcaagcctggacaatggtgggtgcccctcccccagccttgctgccgccttgcagtttgatctcagactgctgtgctagcaatcagcaagactgtgggcgtaggaccctccgagccaggtgcgggatataatctcctggtgggccgtttttaaagcccatcggaaaagtgcagtattggggtgggagtgacccgattttccaggtgctgtctgtcacccctttctttgactgggaaagggaactccctgaccc

SEQ ID NO: 11400 - DNA, 2300 bp, Homo sapien
tagcattttttaaaagtatatattgtatataacattcttggtagaaaagttacaaaatgctcattagtaaatagaaaagatgtcaattactcatactaccaccatccagaaatatcactctgaacatgttggcacacatccttcctaacatttttctctacacataacacgtgtgtaagacttttttttgaacaaaaaatagaatcacaaacatgctgatttattttttcccctttattggtctttagctcccaaatgcctcctcacagatacccactgtgatgtgtttgatgtgtgtcctgaacacgcatgcttccttataaaaggtgtgtgtgtgtgtgtatgtgtgtctgtgtgtgtgttttaaagtttacataactcagccgggcacggtggctcacgcctgtaatgccagctgttgggaggccaaggcaggtggatcacttgaggtcaagagtttgagaccagcctggtcaacatggcgaaaccctgtctctactaacaatacaaaaaaaaaaaaattagccaggcatggttgcagacgcctgtaatctcagcttctcaggaggctgaggcaggagaattgcatgaacctaggaggcggaggttgcagtgagccaagatcgcaccactgcactccagcctgggcaacacagcaaggctgtctcaaaaaaaaaaaaaaaaaaaagtttacttaattgatgtactgttagtctggttctatttccaacttttgccattgaacccttttgagctctcccatcctgctgtttcttgtgttgcttctgcataggaccccatcatgtgtaccattcacattttacttctctgtttcccaaacaaagggcgtgtagactggcacaaactccctggtaccacacacagtgcccagatgaccttcttatatgtgtcccgtcacagacctgccctgtatgagactcagggccataaacccaagagtgggatcaattgaaggtatattcttgattttgctaaataaccaaacagctgtactcatttatacttctcatggagaacagggagttttctgacatcccacatcctcaccaatagtgattgttccctccctttctggttttgcccttttggagacagaggtaaaatagtatctcatttttatttgcattctctgcttaacagtaaatttgagcctctcttcatatatgttagccattcagacttccctgactgtgaattgcatgctcatatcttttgtatcatctgccattttctcaactgcttcttgttatttccgtattgattttccaggggttctttgtatacagtaatttgcaggagttgtttgttacaaactttataaatatcttctcctagtctctcttaactctgtgctatgatactatttaataacctgggggttttgtgttagtttattatatattgaacatgttccatgtctttaaatatttatttgtttttactacataattttaatggtaataagctggtatttgagaaattgtttcacaaacaaacattaatactgccccctccagcctcatctctcatttccccatctgtgctccagccatccccaggtctcagttgtcttatttgtctgagaacctcagcctgggtcagaggctcctgtgatctctctgccaaagcactctgtgcttctccctcttgggccttcacacacttatgcttatgtaaataattattaatcatattttcatgatggtggagattcttattcaccactacatcccatccccagggcctgccacagaataggcattcagtaaatattttttgaatgattgactgagaaatcacacctctgtttcttttaaacacatcctgatagctccataagtttcatcagggtcagtggtttccattgtcctgactgctggccacagtgacctgttctgtgctttatttgacaagacccctgaatggttggacagtgattcctgccaaaagtgtgatcagcctttcttctggaacttcaagcaaatgtgggacagtaagaaaattggtctaagacaggtgagtgatatggatgcttcatcaaaatgtaattatatggaaatagctcaaccatgtgatcttagaagaaataacacccctgggtgggagttgtggtgagggtaaattattatcctggagtcacctcgtgattgcacagtaatttactctgtctaccatagcccattcctactggattcagtttctgtagtggttggttcccagtaagcagttagggatgtgattttagaattctgttggcctctattgcagtgcaccttaca

SEQ ID NO: 11401 - DNA, 2300 bp, Homo sapien
agtgagaacttcccaaatacaatagagccagaaaaaaagcagtccacagggaacaggcctgaagagcccttctccaggggcaggaagctgacaggcttttctctgtgatacccagtcagaggggacattagcctctgggctccacactgatccgtattagagacgaatgtttgctgaggctggctcctctgggttgaacctcttcctcaaactccagactgggagtgctgccaagcgggcagtaccagcctggcctgcaggacatgtccccgccctctgtcctctgccttggatcttgccttccatacaagaattccatcctggtccgatctgttgttaataagacttgtcttttatgtactctgccccttattggggaagcattttattttcactctagaaatcagtctctagatatcagtctctatttttcacacacacacacacacacacacacacacacacacacacacacacacacgactttcccaaggtcaccagaaggtaggtgatcttcttcaacacccagcctcggtgccaaagggcagtccccagacaagctgcatcagcatcatctggaaacctgttggaaatgccctgcctactgactcagaagtgattgcttggcaacctgtggtttcatgtgccttgccagtgattttgactcaagctgagaggacatttgtacttactgtttcctgaagctgaggtgacagggatggggaggaggaagctggcaggtatctgtgtctccccacaccctcaatttacccaaatatgaaatttgcttaggacccatccacacttgcccagggtttaggagtctgtttaaaactgccccagggaattattaggttcagcaaagtttaggaaacagtgattagatcctcctgccttaggagcccaatatagggaggctttataaaaatccttgtgccaagagaaacgttgtaaactctaactccgcgctctcacactgaagtcaaaacaaggttgttgtttttctctcctattcactaaatccacaacagcaggaaaacccatctaactttgccaactgccttcccctcccctcccttcccccaccaatctgtggtggattgggccccttggcctcacttctaccttccctcaaggtggggaaatcagagcgaaagagtcctgggagaaatttttacagtctgctttccttggggcccacccctggttggaaactgacttaagctttcatgctgtgtaatgtggaaagatccagcaattaatggtcattgccagaggacacccctttgaaagaaagaggctgccactgtattcccctaaaaactgtgggacagggctcacgactacactccccaccattctctgcagcaggggctcctgagacagagctgaaccttctccaaaacgatgtggggtgaagagcagggagttgcaactcctacctcccctaggagtgctggccaggttgccgtgggaactgataaagccccagtgcagggagaagcctctcagaggtgagaatcacctggggcatttggatgaaatgccagtccaggcccctgtgcagatccactaaatcagaatctgtagggatggggcctgaaaactgggtacttttaattctcgcccagtgattctgatgtgcagacagggttgagaaccagcggttagcctaatcaattctaagagaaaacctccatctctcctccgtcacaggaacctgtcacctcttaaaaccacaatgaggtggagagccaactagggcacactgagcgtggtcacggggcgacgaaaccaccacgcaccgttccccagaagcacacactggctggaaagttccagctggagccaaaggtcgcagtccaggtgctgcatctttttaaaggaaacacacccaaaggcactaggacagagccttagctagcgatttagatccagccctatctgacgccgccagcagcaccacgaagacacttccacgagcacacccagcggggcgccgaggtgccgcccaagaggctccttggcgccggggccgcctgacgtcagtgggacggccctgggcttgggcgcgccacagccccgcccctcgggcgccagtctcggtcgcgggcattgagcggctggagtctggcgactgccccacgcccagccgtgggtcgctagacggcgggcgcacccgtcgttctggacacgcttagtcggcccagcgagagggcgaaggagccgcgggcgcgtccccgccaaccctgctcgcccgcgccgaggcgggccacgtgacagcccggggccccgcgccc

SEQ ID NO: 11402 - DNA, 2300 bp, Homo sapien
ctaagtgacttgcccccatttagtatgatgcagcagggaaggtgtgggctctggaatcatactacctggtctcaaagcctggctccaccatgtatttactgtgacctgagtcaagttatgtaacctctctcagtttgctcatctgtaaaatggggataatagcaggagtaaccatatggatcagtgtgagaattaagtgctataatccacaatgcttggcacactttaagccttctatacattttatcacatgggtcacacagggaataactggcagaaattggactagaatccagctcagctgactccagttaaacgggaacattcccttgtgaactccatactgccctttgtttgtgtgtgtgtgttacttggcatccaggtgagagtggaagctcattttgagacagggtttggcttttcctaagacctcctctttaaatgtatataatgtatacactaactacctcgtggatgcttgatttgaggctaacactggacacctcatgccctcatggaaatttcttgaatgtacactgcatggctgtaagcgcaggggaaaaaggaatgagaagaaaacttaaggagggaaaccaacacttctgatcactttgtatgaaactaagctctttataatgaatgcctttaatcacaaccaccccacgaggtgcgcatattcattcccattttacatattaagaaaccaagactgagggtgtatgcagcatgctcaggttcacctggctaatgcagagagctgggtttgcagccacacttttacttcaaggggctgctgacaccctccaagagacttggtggttcaaaactatttctcatcccctctctgcgagccaaaagcctatttcctgaggtgttcagagagattcagagcagattgacaccttttccatcactgacacaaagaggagggtataaaaaacagtatgtagccctggggatctaaaatattttcccagccaaatcggacaggcattgaaagtcacacaggctggggtggttttacaaaatgccacttgtttaaatttcctttcatcactctgtcaggaataacagcaacgtagtggagcctcagagtcctgttgagaggggcgagctgttccggggaaatttatttcaaaagttattctgaagtaaaaacttgcccactgtggagtgaggttggacagtgatcctatatcctaggtaatgaggctattaaagcagctggtctcttcagcttatgtaagtggggcccagtctctgggcgacttgggtaaaccggtatagaatttaacagggtgactaggagtgacagcagcagtaagacccccatttctaatgtggcgttagggctggaggttagatgtggacaggggtgtctgagtcctacataatggggctggatgactagtctgagatctgggttcacgcagcaaccacactcttttttactcacactgttcatctgggcttgggtggaaagaggctgatgaggatttgggggaaatcaaggggctctccctggcattgcatgaagtcgcagaaccagtggcaaaagtccaactttggagacaattacttctcgggtgggagccccagccctgcctcttgcctgcgatgtcgccaatctgactgcgcttgctggagacgggaaatgtggcacggcactgcatcccccaacacgtgtagaaacttagagaatgccagttattaaaataacccttatgataacaccaattcgatgcagaagtcttttaaatatcataagcctcgtcgttttattccacatggttttctaggtaaccaaattctaggaggtgcgttgcagggccatcttcgcatcccggccatgcccagcaggacggtgttctctaaacggcgctgatgcccgatttcgaccccgaggagactgcggacctcgactgcggcccccaccagggccggtccgccctcactccaccctctgaggctggggcggagtcgaccggccggccccgagaccccttgccttaccggtggagcaaggaaccggaagccgcggctcttacataaccgggatgatgtcagggcgggcgactcccggggggcgggaccagggcggaggccgcgccgggagcgcggtggggctaggcgtggggcgctcccggcatgtccctgtaccgcagcgtcgtgtggttcgccaaggggctgcgcgagtacaccaagtaaggcggcgcggcggggcgcggggccccgggctgtcacgtggcccgcctcggcgcgggcgagcagggttggcggggacgcgcccgcggctcctt

SEQ ID NO: 11403 - DNA, 2300 bp, Homo sapien
tgctgtggggcccggttcctaaaaggctagggaccagtactgttcccaaaaggccagagaccatggcatgttactgtattgaataatgtaggcagttgtaacactgtggtaagtatttgtgtatctaaacgtagaaaatactacacatagtatttgtgtatctaaacattgtgtacagtaaaaataggatatgaaggattaaaaaatggtgcacctgtatagggcatttaccatgaatggagcttgcaggactggaagttgctctggatgagtcagtgagtgagtgattagtgaatgtgaaagcctaagacattactacacactactatagccttcataaacactgtacacttaggctacactacatttattaaaaatatttttctttaataataaagtaaccttagcttactgtaacttttttactttataattttttttaattttgactcatacattagcccatacattatacatacattacattagcctaggcctacacagggtcaggatcatcaatatcactatcttccatctccacatcttgtcccactggaagttcttcaggggcaataacaggcaggagctgtcatctcctatgataacaatgccttcttctggatacctcctgaaagacctgcctgaggcatttttacagttaacctttttttaatatatataagtaaaggagtacactctaaaataatgataaaaagtatagtataaatacataaagcagtgacttcgttgttttttattactgtaaagtatcatgtgctgtacataattgtatgtactttacttttatgtgattggcagtgcagtaggtttgtttacaccaacatcaccacaaacacatcagtaatgtgttgcactacaacattatgactgctatgacatcactaggtgataggaattttttagttccattataatcttaaggaaccaccatctgtgtggtccatcattgactgaaacattgttatgtggctcatgactgtgactgtatgtcctttcctctagcaggctctcctccccttgctcctctgcttcaccctgtcctgtggtgtgaagtggtcaccttggattcaggactgggagagtggcagggccagccctagagtgagcccggagaggtgccctcctcccaggggtgtgcaatgcaggggtagcttcagagggagcagctccttgcattttacataataggctcttctcttgcctcacaccagtccctcccccagtccctccccagtagactggccttttccaccgaaatgacaacaaaaaacctggaatgtcagggttggagaatgcctttaagtcatgtgacgccagtttctctaagtgtggtccatggagcacctacaggagacttagcagagtctaaactgcagattcctgggcccaggcccagacctacagattgagaatctttgggaggtggtacaggaatctgcatttcaataaagaatctctggcacttcttataaatcagcagctgagaacttctactgctaggtgcttgcttacaatacagacacacaacagcctcacaaagcagcctgcttcaggtctaagaaggccactgttacaaagtttatgacatggggcacaattcagccttcttgtaacttcattctatctcagatctggccgtctgcaatgactcggaatcaatttaatcccttttctacgtggcagtcctgaagtccatagggcacctctcattacctcagcccactttgagtaccttcacactctttcctaagcagccgctgttcggtccaccctttctcgtgtgccaccaacatgcagggagggcaaggggtgagaaggggctcgcaccagaactaagtccctaggtttagtgcctaagggactgaaatgaaatgtttcccgcgggaattcctaactccaaggggtcggccatgtttccacagctcccagggtcgctctgctgcccccctgcgggcctggggaacactgcaggggtatgagccggcggtggggctgctctccccacacgtgggagtgggaaatggagagaacccgccccttagaggaaaagccacgagttgctgttgtgctgcaggagagaaagggagaaagaaagcgtgcgacagggagtgggagccccaagtcaagaggagccccacagaggcagccctggacttcgggaccacagaggtgctgagtgctgcccgattctggatcccactctgcttagctcaggtgagtccggcaaccctgggcagcctgtgaagttggagagacagtcctagcagagggtttcttga

SEQ ID NO: 11404 - DNA, 2300 bp, Homo sapien
aaactgttattctatttttttttttgttttgagacagggtctcactctgtcacccaggctggagtgcagtggcacgatcatagctcactgcagctcgacctcctgcactgaaatgatccttccttcctcagccttccaagcagctgggactacaggcatgcaccaccacaactgactaatttattttagttttgtagagacagggtcttgttatgttgctctggctggtctcaaactcctaccaggaggacgctcaaaccatcctccctcctcggcctcccaaagtgctaggattacaggcatgagccaccatgcctggcctgaaactgttattctctgagtaattgtctttttggttataaactgtctctgaggaattgcagatattgggcgattaaaccaagatttttagtcagctattacaaatgtagttaaagaactaaaagaaaccattccaaaagaattaaaggaaaacaaggccaggtgtgatggctcacacctataatcccaacagtttgggaagccgaatgggtagatcacttgagcctagaagtttgaggccagcctgggcaacatggagaaaccttatctctaaaaaaacacaaaaaattagctaggtctggtggcgcacgcctgtagtcccagctacttgagaggctgaggtgggatgatcacttgagtccaggaaattgaggctgcagttagccaagatcataccatgccattgcactccagcctgagtgacagaaacatgtctcaaaaaaaaaaaaaaaaagcattaaaggaaagaattaaaaactatgccttaccaaaaagagacagaaaagtatgtgtgcatacatatatatatgtgtgtgtgtatatatatatatacacacacacacactttgtatacatatacttttatatagatatatagaaaaaatatatatatagaagtgtgtgtgtgtgtgtgtgtgtatatatatgtatatagaaaagcacatatatccttttctatatataaccaaacaaattctggagacacagtgaaaatttctggagaaattctggatggactaggggtccactgacagatgaatggataaagaaattgcagcatgtatataaagtggaatattattcagtcataaacagagaatcctgccgtttgtcacaagatagatgaaactggagaatattatgctaagtgaaataagccagacacagaaagaaaaatgctgcacaacttcacttatatgtagaatattaaaaaaattaaaaagaagaagtaagaaaaaagtcaaatacacagacaaagaataaaatggcagctgctacgtgtggggagtggacgggaagagggaaatcaaagggtacaaagttgcagatatataggataaataatttagagatctaaggtacaacatgaggactgtagttaataacactgtattaaagatttttgctaagagagtagattgtgggtgctcttgctacagtgcacaaaaaagggtaactatatgagatgatggatatgttaatttacttgactatttaaaaattttactacatgacaaaaattctggagttgaaaatgaaaaattaaagagggattcaacagcatatttgaactgacagaagaaaaaaatccatgaacttgtaaacaggttaattgagattatctaatctaagcaacagaaagaaaaaagaatgaagaaaaatgaacgtaactttagagacctgggggacacactcacgctactagtattcacataatatgagccctagaaggagaggagacagagaaaatggatgaaagaatatttgaagaaataatggccaaaaacttctgaaatttgatgaaaaacggcatcaaatctgcatatccaagaagctcaacaatctccaagtagaataaacctcaagaccaagacacatcatagtcaaactatcaaaagccaaagacgaagaatctggaaagcagcaagagaagtgattcatcccacacaaagcccccaccagaacatgacttcctagaaccatgctcccggaaccaatgctgacagaatctaaggtaacaatcacttgtgagtcatcaacagcactgccctatcagtgaagtcaaagattgaagaggaactctttcaaacctttcaagtgccccctcctttccttaaagtcttttataggggtccccttcttggccatctccatcctgtgagtcaggactgaaagggcacagacaggtcactgccagcattgttggggcaagcctgcaagcacgcatcactggggatctgacatgacaatggccgcct

SEQ ID NO: 11405 - DNA, 2300 bp, Homo sapien
gaattagtttcagaaatctgtggaaaagaaacagcctactgttctgtccagcaatccaggcctaagtatctatcctaaagaaatagtgtcagcattaaaaatcatgtacaaagatgttcacttgcaagagagagagaaaaaaagtagcaaacagaacgtccaccactaggaaaccatgaataaactatgatgcgtccaaactgtgcagaggttgcactgaattagacagttagtgaaacaatctctaagatatatcgttaaactgaaaaaagagaatgcacatacagtgatctcatttaggtaaaacaaaaattttaacacctcatacaaatgaaacctaaagatttctctgaatgtgtgcatattacatatagatacatgtcttgttaaccactgtatcaactcaacactgtgtgcctgaaacatagaaagttctcaataaatatttgccgaatgaagacatatgtacgtgaatagaaaaagactgaaaaatagatctgctttttgtgcaaaatatttctgtgctgtttccatttttaaaagactgtcttaatgtattacttgtacaattaaaatgaatttaaaacagttataaaagttccaggacctcgatataccatatctggtccaagcaccaggctctgagtaacttctccaggtaactaacttcatcgttttgagccattagggctctagcacagcaactcgacgctcactttatctctccagcatcagaccccttaaaagcataaagatgaattttgaggtgcggggttttccattgctcccaaacatcagttgacggcacactttttctaaagggtccttttctcccacgccaagacatccctggagctggggtctggctcggccttccctgcgcaccccctgggggcgagtaagcgccgaacgcggggaggaaaatcctcctggtgggagtgagcacgctgcgcggacgcgggggaacaaaactcactttccgactggccccttctctggctgtgatctgtctctcctgctcaggcatcgtcccgcacggacaccgaattcttctctgatctggctcagagcaaaaggtcacctggtcggtggaggagagcggggtgttaaagtcccgggagaggaggcgcagagtgtgagggcatcggcgcggctcggctctaaagcaaacaggggtccgggaaccgccccttcatttgggaccggggaagccgcagccctcttcacacggatgattcaaagttgcgcgccgccgtcctcccgacctgggggcacggggatgagagcgtgaggggagagtgggcctcggaccctcgcccactccccaggtggctgggagtgcccaccctggaactgccggccccgccggtgccacagtgttctctgccgtgccagtgccacaatgtcctctgccgtgccggcgccgcagggcggaggcctgtcctcctccgcggtctcggccacctcgcgctggtgcgctccgacactgtactgggatctcacgcgtgtgcgggagcgggagggcaggtgagctgcgcagagccgggccgcagactcagctcccagggctcacccaccgcctgcggggaaggtgcccggcggcgccgcgtcgggtccgctctgcgctgccccctcctcggactctgcgcctggctgccggacgccgtgggtcccaaaggaagcaaccgcggcaagagtgaactccgcacctggaaaatcgatccgctgtgcgcaaaggccagccaatggcctccaacgggcggcgggctttgggccgggaacgggggcgcaggcgcccaggcgggggcttctagtgggggaggtggccgagggagggagcgacggctgtcaatcacaggccacgccctcctcagcccaaccccccactgctgtcccgcccacgggggcgggagccgtgtgcgccacgccgaacactagtctacgcctcggcatattctattggctggaaggccgtgggaagcggctaccagtaaccaatagtaacgcacaattggcccgtgggggcggggcgagcacggcttgctttctcaggagccaatagggaaaaggaaagtgaagcgtttcctgagttcgggggtcggcggaagatggcggccggcgaaaggagctggtgcctgtgcaagttgttgaggtgagcagccggtcgtgtgggctcacagacgttttctcttctgtaggggtacttgcccgtccagtgtagctaaattttgcgggcaaatggccttccttgtcatgaatctaaggtaatttctcaggccaatgagcagtctttctttttc

SEQ ID NO: 11406 - DNA, 2300 bp, Homo sapien
taggtgggaaaattcatgtgacaagcttttcaaactgaactattaaacatttaacttaaaagctgcataataactaaagttaaacctgtcctttaagtctggttagtgagtttatttaaacattataatgtaaagcactgaggaatattacgtatgacagggaagaaccaaaaggctctgataacagactttctcattcaaaatgtttaaagtaatgattacagaatttgaagtagagtggacaaaaacgaagaagaaatgcctgaacttttgaaagaattaggtatatactgctattcaggaagctatggtgttaattataaattttcagcctgaacaaaaatatgtaggtggtaaaaaaactaggtaggtagaatatactaggccttctgttttattagtggagggcaaggcatttaaaatacagtagtactacaacaacaaaggtggaaaaaagcctgggagttttttcaccaaaatgttaacagtggctatctccggatggtagcattcctggggttttttccttttacttatctattttctaatttttctagaagaaacagcatatacacgtaatacaaataaaataatattttatgtaacttcttacatcataaaaattaaagtaacagattatcaaaaagcagaggattcaacataagctttatatttaagtgacgtgttaacaatggcagttttggtgagtttaagagtagaaactaagatgagaaggaagatccggtttcttctttaccgaaaagagacatgatagattggaaaatgtctcgtggctcaatcgtaaagaaaaataaggaatgaatatgaataatttatgacagactaactggagtgtgaaagggaaaaaaaaagctgaagcagggaagggaactcgacccctcggccaacagtgaagcagaagaaaacgcggtaaattgagtctttaagacctagtctattccagtctatatagaagacccccaagaaaaagaaagactgctcattggcctgagaaattaccttagattcatgacaaggaaggccatttgcccgcaaaatttagctacactggacgggcaagtacccctacagaagagaaaacgtctgtgagcccacacgaccggctgctcacctcaacaacttgcacaggcaccagctcctttcgccggccgccatcttccgccgacccccgaactcaggaaacgcttcactttccttttccctattggctcctgagaaagcaagccgtgctcgccccgcccccacgggccaattgtgcgttactattggttactggtagccgcttcccacggccttccagccaatagaatatgccgaggcgtagactagtgttcggcgtggcgcacacggctcccgcccccgtgggcgggacagcagtggggggttgggctgaggagggcgtggcctgtgattgacagccgtcgctccctccctcggccacctcccccactagaagcccccgcctgggcgcctgcgcccccgttcccggcccaaagcccgccgcccgttggaggccattggctggcctttgcgcacagcggatcgattttccaggtgcggagttcactcttgccgcggttgcttcctttgggacccacggcgtccggcagccaggcgcagagtccgaggagggggcagcgcagagcggacccgacgcggcgccgccgggcaccttccccgcaggcggtgggtgagccctgggagctgagtctgcggcccggctctgcgcagctcacctgccctcccgctcccgcacacgcgtgagatcccagtacagtgtcggagcgcaccagcgcgaggtggccgagaccgcggaggaggacaggcctccgccctgcggcgccggcacggcagaggacattgtggcactggcacggcagagaacactgtggcaccggcggggccggcagttccagggtgggcactcccagccacctggggagtgggcgagggtccgaggcccactctcccctcacgctctcatccccgtgcccccaggtcgggaggacggcggcgcgcaactttgaatcatccgtgtgaagagggctgcggcttccccggtcccaaatgaaggggcggttcccggacccctgtttgctttagagccgagccgcgccgatgccctcacactctgcgcctcctctcccgggactttaacaccccgctctcctccaccgaccaggtgaccttttgctctgagccagatcagagaagaattcggtgtccgtgcgggacgatgcctgagcaggagagacagatcacagccagagaaggggcca

SEQ ID NO: 11407 - DNA, 2300 bp, Homo sapien
aagatttactatcttaccagactttagtggaatattgatcgttcaaaagacatattttttttggcatctgaccctcaaaatgacagtatataacacattcttaatcatgtcttgtttagattaatagttaaatttgttttaatcccataacatatatactaagtcaggagaaagggggttcaatgttgatttttactgctgattaaagtatgttcaattggtaacatgctacaggaattggaactaaaggggacttatcctttcaatgttggatatttagcagcattagaattttcatacttgagtattttgttagcagactcgttaaagacaattctctctttgttactaatatataaagtagatatgtaaaagcagactttaatttgtaatttttttaatgtatatatcacattgattctcaactttgtcctcttatttcaggtttttttattcattattcttccctgggctcattgtatgtggaactttatgtgtgtgtttggtcattgtcctttggggaatcagactgctgctacagagaaagaaaaaattagtgtcaactagcaaaaatgggaaaaatcaaatggtgattgcattttttcatccatactgcaatgctggtggaggaggagaaagagttttatggtgtgctttaagagccctgcagaaaaagtaggtatccatctttcttagctaatttgctatattgttccatttcttaaaaattattatccagaaattcatctttttttttttttttttttttttgagacagagtcttactctgtcacccaggctggagtgcagtggcacgatgtcggctcactgcaagctccgcctcccaggttcatgccattctcctgcctcggcctcccgagtagctgggactacaggtgcccgccaccacgtccggctaattttttgtatttttagtagagacagggtttcaccatgttagccaggatggtctcgatctgctgaccttgtgatccgcccacctcggccttccaaagtgttggtattacaggtgtgagccaccgtgcccggcctcatctttctaaagtacctaaagtaaaaaatgaattcctttttaaactgttcttcaataagaaaatatttctttcatgtgcccacataccttatatgatcttatttgactttagttactatgataaagaaatagacaaacccaggcatggtggctcacaccagtaatcccagtactttgtgaagccgtggcaggtgaatcacttgagcccaagagtttgagaccagcctgggcaccatggcgaaaccctgtctctacaaaaaattatctgggcatggtgatgcgcaccagcttctccagaggctgaggtggaaagattgactgagcctgggaagtcaaagctacagtgagccatgattgtgcactgactgcactccagcctgggtgacagagtgagaacccgtctcaagggaaaacaaaaaagaaagaaagaaatggacagtggatggggaaaacatctgcccttttatggcataaattaatgggaataactggtccccttgggagagcatatacagaagagattaagtaattgacagaaatataccaagtatgtcagagcactttaagcctgaatactttcaggcagttgtggcacacaggaataatctttatgaaagtatctatttgactcaaatttttatatcattaccagctggatagtctcaacttaccatgttagaaggaatatggtgttatacatcttttaatatttgaggcttcgtcatcaccaccccccatacccccaaaatatttatgattctcttttagaaaggaaaaagcatagtaggttccattattttatcatatgaggaaaactgttactcttcatggttaccctacttcctggtacacacccttcattcagtgccaaggccttcacacagaattacctcagctatacttttctgtaatcctggcccatcctagcttccaggccctacccctgtatttgctctgccatcttctgtaactgcctaaatacaaagaattctcataattcccaactccgtgatgcttttcctactctcgttgataatacttttttcttctctaaccagattatctacctcttgatggcggtggtaaagtttcatgatatctgtacacatagtccccagcagcctctattactcctaacccatctacaaggagaaaaaaaccaaatcattaatatgacttggaagatactttttcatcttgctctggccacattgcgtttctcatccctccccattccttcacaggt

SEQ ID NO: 11408 - DNA, 2300 bp, Homo sapien
gttattccaggggaggggacttagatgccacctctcagtgagaaaagtatcaaagaatttgtggcccgtccgggcacagtggctcacacctgtaatcccagcacttcaggaggccaagtctggcagatcacttgaggccaggagtttgagaccagcctggttaacatggcaaaaccccttctctacttaaaaaatacaaaaattagctgggcatggtggcacacatctgtaatcccagcttctcaggaggctgaggcacgaaaatcacttgaacccgagaggtggaggctacaataagccaagatcacgccactgtactcccgcctgggcgacagacagagcgagaccctgtcttaaaaaaagaaagaaaaaacaaatggaatttgtgggcatttttaggctaccagagatcacaatcttttttcacattttaaaaggctcattcttgctgctgggtaaagagtgactgggaaggggccagagaggagcagttagattgtcatcctttaggcttccccagcatcctgtgggtgtctttatcaatgcgtagcacacagttttgcagttatttgttttgcatgtctgttttctccactggactgaacttctgaagataaagactctctctcatctccatacccccaaaacctggcatctcattactagatgcttaataaatttgtttttttttttttttttcagatggagtttcattgttgttgcccaggctggagtgcagtggtgcgatcttggctcaccacaacctccgcctactgggttcaagcaattctcctgcctcagcctcccaagtagctgggattacaggcatgtgccaccacaccacacatattggtcaggctggtcttgaactcctgacctcaggtgatccacccgcctcggcctcccaaagtgctgggattacaggcgtgagccactgcacccagccaataaatgttttatgactcaaagaataattataaacagagggagaccaaagtattacaagtcattaaagaatatacttttagatattttcatactaattatatctaattgtgatataggcacaagatctagcttttaaagacttgcatttttcagataaaaaccctgagtattgctttagtattgtgatcctatctgaagacaggtttgttgaatcttaattcttgtttatagtattttattaccattttttttactaagaacactgtcaaaactttttagtatttctttagaccatctcattcataaatcaacacttactgttgatgcctgttctgtgtgaaaccctcagtggaggaaatagcaaagaactagaagtcatggtctcatttgaaggactgtacttctaattcaataaaaaatgtagaaaacatcatttttagtatgaccaacatggagaaaccctgactctactaaaaatacaaaattagccgggcgtggtggtgcatgtctgtaattccagctactcgggaggctgaggcgggagaagcacttgaacccgggaggcagagattgtcagccaagatggcgccattgcactccagcctgggcaacaagagtgaaactgtctccaaaaaaaaaaaaaaaatcaaatcttctttataactgtaagaaaatagttatctacaactttttgcttgattttaacctaatatattcttttttttgtttttgtttttgtttttttgagacggagtttcacacttgttgcccaggcaggagtgcagtgatgcagtctcggctctcagtctctcagggtaggtagcaggcttttttttttttttttttttgagatggagtctcactctgtcacccaggctggagttcggtggcatgatcacggctcactgcaacctccgcctcctgggttcaagcgattctcctgcctcagcctcctgagtagctgggattacaggtgcgtgccaccgtgtctggctaatttttgtaacttaatatattcttaaccattacattctattttaggtatcctgaagcagtttatgttgtttataccggcgatgttaatgtcaacggtcaacagatactagaaggtgctttcagaagatttaacatcagattaattcacccagtgcagtttgtttttttaaggaaacgctatcttgtggaagattcactgtatcctcacttcacactgctgggccaaagtctaggatccatttttcttggctgggaagctctaatgcagtgtgttcctgatgtttacattgattcaatgggatacgcttttacgcttcctctgtttaagtatatagggggttgccaagttggaagct

SEQ ID NO: 11409 - DNA, 2300 bp, Homo sapien
ttgcatgtctgttttctccactggactgaacttctgaagataaagactctctctcatctccatacccccaaaacctggcatctcattactagatgcttaataaatttgtttttttttttttttttcagatggagtttcattgttgttgcccaggctggagtgcagtggtgcgatcttggctcaccacaacctccgcctactgggttcaagcaattctcctgcctcagcctcccaagtagctgggattacaggcatgtgccaccacaccacacatattggtcaggctggtcttgaactcctgacctcaggtgatccacccgcctcggcctcccaaagtgctgggattacaggcgtgagccactgcacccagccaataaatgttttatgactcaaagaataattataaacagagggagaccaaagtattacaagtcattaaagaatatacttttagatattttcatactaattatatctaattgtgatataggcacaagatctagcttttaaagacttgcatttttcagataaaaaccctgagtattgctttagtattgtgatcctatctgaagacaggtttgttgaatcttaattcttgtttatagtattttattaccattttttttactaagaacactgtcaaaactttttagtatttctttagaccatctcattcataaatcaacacttactgttgatgcctgttctgtgtgaaaccctcagtggaggaaatagcaaagaactagaagtcatggtctcatttgaaggactgtacttctaattcaataaaaaatgtagaaaacatcatttttagtatgaccaacatggagaaaccctgactctactaaaaatacaaaattagccgggcgtggtggtgcatgtctgtaattccagctactcgggaggctgaggcgggagaagcacttgaacccgggaggcagagattgtcagccaagatggcgccattgcactccagcctgggcaacaagagtgaaactgtctccaaaaaaaaaaaaaaaatcaaatcttctttataactgtaagaaaatagttatctacaactttttgcttgattttaacctaatatattcttttttttgtttttgtttttgtttttttgagacggagtttcacacttgttgcccaggcaggagtgcagtgatgcagtctcggctctcagtctctcagggtaggtagcaggcttttttttttttttttttttgagatggagtctcactctgtcacccaggctggagttcggtggcatgatcacggctcactgcaacctccgcctcctgggttcaagcgattctcctgcctcagcctcctgagtagctgggattacaggtgcgtgccaccgtgtctggctaatttttgtaacttaatatattcttaaccattacattctattttaggtatcctgaagcagtttatgttgtttataccggcgatgttaatgtcaacggtcaacagatactagaaggtgctttcagaagatttaacatcagattaattcacccagtgcagtttgtttttttaaggaaacgctatcttgtggaagattcactgtatcctcacttcacactgctgggccaaagtctaggatccatttttcttggctgggaagctctaatgcagtgtgttcctgatgtttacattgattcaatgggatacgcttttacgcttcctctgtttaagtatatagggggttgccaagttggaagctatgttcattatcctactatcagcaccgacatgctctctgtagtgaagaatcaaaatattggatttaataatgcagccttcattaccaggaatccttttctcagcaaagtaaagctcatctactactatttatttgcttttatttatggacttgttggttcttgcagtgatgtagtcatggtcaattcttcttggacactaaaccatattctctcactatggaaagttgggaattgcactaacattgtttatccaccttgtgatgtgcagacatttctggacattcccttacatgagaaaaagatgaccccaggacatttgctggtttctgttggccagtttaggccggaaaagaatcatccattgcagatcagagcctttgctaaattgctgaataagaagatggttgagtcacctccttcgcttaaacttgtcctcattggaggttgtcgtaacaaagatgatgaacttagggtaaaccaactgagaaggctgtctgaggatttaggagttcaagaatatgtggaatttaaaataaacattccatttgatgaattaaagaattatttgtctga

SEQ ID NO: 11410 - DNA, 2300 bp, Homo sapien
cagcactttgggaggctgaggcgggtggatcacttgaggtcaggagttggagaccaacctggccaacatgatggtgacaccccgtctctactaaaaatacaaaaattagccaggcatggtggcatgtgcctgcagtcccagctagttgggaggctgaggcacgagaattgctagaacccaggaggcagaggctgcagtcagctgagattgcgccactgcactccagcctgggtgacagcgagactccatctaaaaaaaataattaattaattaattactgtatgaatagatacgttcagcaaaagaaaaatgtacatgggcaaagttcataggaaaccaggcacaagcttttaagagtcttttcccagaggtcacatgggatgtgccaaatcctccagcattgttacccacgtcacctgtgaaatgtgatctataagaaagctcatcggatatacccagtgcccaggatttttactggggactggtcacataggcaccctctacctggcatatgccaaacttccagactcctggaaagaaagcccgtgttcagcataaaccattttgttcacataaatagctgaggcaaagatagccactcttgacattcagggaatggtgggaattcttctgaaatcttagttcccagacaccagccacgggccaacattgtaagcaggcctttctgaggagagcttgctacatcaactcttttctccacagctgtcatcattgttattaattattgtcaagggttgcacagccagtgtctgaccaaaatgtgtactccattgtttttttgagatggagtcccgctctgttgcccagactggagtgcggtggcacgatctcagctcactgcaacctctgactcctgggtacaagcaattctcttgcctcagcctcccgaggagctgggattacaggcacccaccaccacacccggctaatttttttgtatttttagtagagtcagggttttgccatgttggccaggttggtcttgaactcctgaccttgggtgatctgcccaccttggcctcccagagtgctgggattacaggcgtgagccaccatgcccggccaatgtgtacctttattgctacaccatggagttgaatattattatgtataaataactattggtttcatacaatagaagatttctggtctatgaagcattttagaggaaattaaacgatgtttatgttaattttaaaaagcaagagataaaatttcatatcaatatgacctcaactttgtaaaataaacatcatttttaaaagagatcagaaggagctatacctctgagtggtaaaattatacatattttcccctgtctttataacttcctataccttccagtttttttattatgagtaaacattattttgataataagacagaattaaaacaaaataaaaacttgttttaaataacatggcatcttgttgaataactgcagtatctgctcatgaaagattagttgatgaaaacaatttaaggtggaccacagtgcttcttttttattttttgattgagacagggtctcactctgtcacccaggctggagtgcagtgacgcaatcacggcttactgcagctttgaccgcctgggcttagacaatcctcttgcctcagcctcccaagtagctgggaccacaggctcatgccaccaagcccagcaaatgtttaaaaaccatgatttggagagatgaggtctaactatgtttcccaggctggtcttgaactcctgggctcaagtgatcctcctgccttggcctcccaaattgctgggattacaggtgaccctagtgcttctaactacaatttaaaaacattgttttgcttcttggtatatttgttactttaacacttttattatttgttactttagtaacttttctctgatttagtgtcatttctccttgtcctttcagtttgagggtaacaacttacagcagctggttctgaagatttgtcaagcacattttgccccaatatctccggggttttctcgtgagctccattccttgatatctcagctctttcaagtatctcctcgagaccgaccatccataaattccattttgaaaaggccctttttagagaatcttattcccaaatatttgactcctgaggtaagttttgaggtgactgtttggattttggcagagattttgggttgcaggtccttgacacgtgtgttcggttttaggtcattcaggaagaattcagtcacatgcttatatgcagagcaggagcgccagcttctcgacatgctgggaaggtggtccagag

SEQ ID NO: 11411 - DNA, 2300 bp, Homo sapien
aaaagaaaacaaaaaagaaaccaggaaccaaggtggtgtgataaggtgataaggtgtgattgtggctgggggtctactctagctaggatgtttgcagaaaacccctcgtagaggacctgaataaggagagaggaagtgcaccacagagaaaagtcagggcaacagaggaggctggcatctcacagggccttgcagggcaccctaaggagggccataggagccacagggatgtgatcttatttcttttctattttcattaaaaaaatttttttttagcagggacagggtcttgctatgttgcccaggctatctcgaactcctggcttcacacaatcctcccaccttggccatccaaagtgctgggattacaggggtgagccagtgcgtccagcctctttttaaaaatgagatcattggttgctgtttggacaatggacttaggaggttgaattaacaaaaatcaattatggcttaaaattcgaaattataaaaaataaaaatttcctttttatattggattaaaagccagctgaatatcccactgaaaattaacagaaatttgaacttaactttaccttttcaaaattgatctcttttatgacacagtgcttgctatctgatttccctttagctaagtatgctttcccgaaggcaccttgcccgatggccttaatcacatcgtacttatccatggtctccaatgggctgagtttcctggaattagagtaatgtaaatttatcacacacgtctcataaagactaacaaagtcagaaaactgatgactaaagtgtaaaagaactcacttagctaaaactttcctcccagccttgccaagacagagacaaataactttctttgtggccacagataactgaaatgagacagagtttcttggtcagacacgggtcatagctcagctttgatacacttttgccctgtattctcgggtaagtcacttaacctggcaaaacctcactttcctaatttctaaaatggaataacaatacctgttttgcaagtttgttctgagaatgaaagatactatatccggtgtttcgcacctttataaagcaggaatgtccttaggcttgtgcacttttatagttcagcctttcttagtggggacgtactgccccctagggggaattctggaaatatatgggggtggggaagctgtttccccaagattcagaggcatgaggtttacaggtggttggggcctgagatggtaggattctgcgattcgagagacagtcccgcacaataaaggattaccccgcggccctacaatcttggagagtcttcctatacattcctgtgcgtggaaaaatccgtttgtggctagaaccaaactctattttacatcgaaatgctaagtatttttgcagttttaatgaacacttcttttttttttcgaggaatgcaactacatgtaaatcaaggcttgattgcacttcggtttggaggtttaccaagaattgttcaccatttgggaaaaccacgcgcttcactggccacgctgctcctggtcccggagacccaacaatctgcatttgctgccgtcacgttcaggcgactccccaggcgcggctactggctacttctctacattttccaagggtagtagtgccaagcattttcagattgaaatatgtactttcttacttattgctttccttctatttcctctttatgctacagttagggcataatacagttttgttgttgttgttaatggggtgagcagggggcttgttttcgaataattttacgtcagggtgggaagtcggtactgggttgcagggggctgggaaccagctccgcagccaggagaggctgcagacaccggaggatcgggttctgagagagacgcatacggacttggggccgggggtgactcgccgggaactgagggcccgcgaccctcccgcccaagtggcaccaaagggtggaagcccccaaattaggaaaattccttctcccctagggccgcccctggaagcggccgcgggtgagtggcaagacgcttacccgtacccgacctccgcgtgtggagcgttgccatagagaccgacgcgccctggacgctacacccacacagcccaggacgctaggccttttctgggccgcccccgccgccccaggccgaaactccatccctttcccccaccctgccgagctcccgaagccctgtggcggctccgggcaagaactaagggcggcccctgcaagcgtacctgctccgccggctccgcggggccaacgaagcgtcccggaaggatccgggttcccggggccg

SEQ ID NO: 11412 - DNA, 2300 bp, Homo sapien
gacaatgagaaaactggcttgtaccatccgccatctgcttagctgttcaatcctagtctatttgtaaagcagtttccaaatcattaacccatacccctgggagaaacaaatttaccaactaaggtacagagtttatgtatctttcctattgtctcatagtttccagtcaaataccatttcccaaaattacttgggttagctctttgaaattagcttactactctcttgaagatttttcaagttaaagcaggcatggatagttttaaggacatttccaggtactcagcttccatatatactgtattccatacctcttagtcatcttcaatcttggcattgcccaagggcataaacatttcaaaaccatcaaacaaaaaaaacttgaaattatgtacagttactgagagactggataagtattggataataaatccttttcaaaatcagaatggcttatggggttttgcttttaataaaatttcagaagactaatggaattatcagttcatgattataaaccagttttggtgacagattactatatgattcttgagatacaactagacaaaaattgagggacacttttaacaaaacttttcattcctatgtacttatttctcagcacttacagccttaagaaaatggaagagaatcagtgttaaacttcattgtagcaagaagttagcattcatctatggatacaggaactaacggtgcatgggaagcccatccaggtcttaaagagatgaattttcaatacaattttattttttatatttaataattatcagtattgtgatacattttattgtgatcaattgtgtagtactagtaattttaacaatttaatccagaaaaactaaaattctatgagcaggaaatataaatttccatttctgtacttctttcagcagtatgataggatgatcaataagactttcaagtatgaaaaagataacgggtaaaattctatcaggaaagtagaatgaagatatgatttaatgaagcatgtctaagaattctagggaagaaatttgggtgtggtcactgacacgtgtaattaaacaaaaacaagtagatcatatacctactaatattttgagggaatttcactgccaaagaaactaacattggatattccaactgctaaacaacttttggactcctgctacgggctgcattcacccccgccgcggccacccccaattcacacactgaaatctaacaccaataactaataatgagactatattcggagacagagactttaaagatgcaattagatcaaaatgaggcctttagttcagccctaatccaacttgactagagtgcttacaagaagaagaaattttttgtggcagggacggggagggggcggcggagagatgattttaagaaggaagagtaatgatgtaaacttaggatttttaagagttttttgtgggttttttttgtgtgtgtgtgtgaggtggacgatggagggtaccatattactgtagtgtttcgattcagttggatatatttaacttgcgtcactatttacaattgctgaaaattacatttttttcaactacttaaacattttagacagcagcttgatgtgcaaatccagaatggggcagggtgggatgagcactgggcgtgagtgcagacgcttgggcagcgccggtttcgttagaaagtcccttggcaggccgccgctgtggcccaaagagtaggaagccgttccagtctcacgtccaccttttggcaatatttgagaccttgtacaagaaacactcttcctgtatcagtttagctcatttgtaaaactgggagactactgccttgacgggttgtaaagaaaagagagaacgtttgcgaagcgtctggtgcaccttaagcaagagcggggagcgctactgtagactgcaaagcaaaggaatcccgacccaaggcaacgggacggttgcggggtgactctgccgggtctccaaactccctggcgcctgaccctgcctcgaggtggactggtccccaggccattccagacccgcgccccgcccgcgtttccttgcgcggctccgccccggccgcagggaggcgcagcggccccgggaacccggatccttccgggacgcttcgttggccccgcggagccggcggagcaggtacgcttgcaggggccgcccttagttcttgcccggagccgccacagggcttcgggagctcggcagggtgggggaaagggatggagtttcggcctggggcggcgggggcggcccagaaaaggcctagcgtcctgggctgtgtgggtgtag

SEQ ID NO: 11413 - DNA, 2300 bp, Homo sapien
ggttgccaggccaaggagtggactagggtcgccggggaagcgggtgagtggtccccgccctggcgggctgcctctagaacgaggagggcggcgcgtggtcgcggcgcggagccgagtgggagcgaggggtagacgcgccccggacgcgcggccgcgcccctcacttccgccccgcggtctggaccactcgccgcaaacccgcaagtccctcgccgccttggggtctgggcgcgcggtgccgtgggggtcagcagggcggagcggcttttccaggagaaagggccctcacgggtgagcggggcgactgggctcccccgcggtgcagttgccccgcgggcgccggccccggctcaacggattcttctcgctcgctgcccggaaagaaccagtgagaaccgctgttgcagcaaaaaaagaagttaataagcgcagggctggccaaaccagaacagggtctcagacctgtctccccgagaattcgggggcgagggttttaaagggcattttggcttcggggggctggggaactgaaacagttgaccggctggggatgaaatcacaagagcttctgaaactcggggcggcttcgttggttcccaggaaggggtggggtcagtttcccttgtcttgaagtttacacgaaatccctctcccagttatcctagcctctgtgctagaataagaaaacgacaacacggtgaaaacttagcccgtgaggttagaagcaagatggagtcagtcatgttagatttctcgcattacttatacatctgtaaaggtggtttcagggacctttctgaacttagcccgtatctcactggtgatcccacttctgggtatttgcaaatcactttattaggtttttaaaagtattgttgcaggcatgcgaaggggccgatatacttttgccatgtccagagtgtattcaggtcttgtaatgatcatatgggtgtaatattgagtaacaggcaaatgtgggcagaaaatatcaaatgtggttttcagctaagaagtctggttgctcttaattttcagttactctccattgcatagaataaagccccgaagaaacgaagaataagatcatggggaaacttggcttccatgttaaaccgtgtaataccaggtgttagaatagtagtaaaggacttgtttctttcacatctatatacactcaaaagacctcatcgatcttggaaaaacattgtttcgaagacaatgtgtatgactgatttggttatatgaagaaattatttctaggatttcctggtaattctgtgataaacagtaatacaaactggaatttttacaggtcactatagtagaggttttagtttgatttttgctttgcctgtcatgctctctctgccttataattctttgtggtgtaattaaaaaacgaacactagggccggacggggtggctcacgcctgtaatcccagcactttgggaggccgaggcgggcggatcatctgaggtcgggagttcgagcccagcctgaccaacatggagaaaccgcgtctctactaaaaatacaaaattagccgggcgtggtggcgcatgcctgtaatcccagctactcgggaggctgaggcaggagaatcacttgaacctgggaggtggaggttgcggtgagccgagatcgcaccattgcactccagcctgggcaacaggagcgagactccgtctcaaaataaaaaacaaacactgtaagctttttgaaaaatcaagtaaattcattacagtgtttttcctgcaatgaaaaagaatgcatcacttccctaaggttttaataatcataatagctgccagttattcaggaccttgtatgtaccaggcaaagtgttaggaacgttttatccattttctcttatgtgctaagcagtcccgctagctgcttcatcctggaaatatagatgggagactgaagtcaaggactccaactgtgtgtttaacatctctcttgactcccaggaacctccagtttggcatgtccaaaatgaaacacatgtctgtcttctatcaatatgttttgcccaacccctgcaacactcccacttccagaaaaatcacacaaacaaaaaaccacacacacaaccattgtgcctttcctctctcagggagtgccaagaaaccatctggttcatgccagaaacttgggagtcaaccttgcccccttctctgcttgccccccataaatctgccaccacaaatcctgtcaactgttcttacatctttccttcccattttttctgaccccattgcctccactctattccatttcattattttcctgcct

SEQ ID NO: 11414 - DNA, 2300 bp, Homo sapien
caaagaaagcagtgcagatgttgtaaatgttgatttgtagcatttcccttctcttatcaccacactacagaatagttgtacattaactttgacattgtggaaggaaggcaattggagctggccagagcaaagccattttgttcctgaatgccattttacaactgcctgactgcagaatgtacttgctgatgttgcagacaaaattgctgccattatgaaaaggacttcatgctgaggactgaacttttctcaaacccctgaatcaaggacttttgcctagaaaccaatgaactgtcatgataacgctttatcttcaatcaaaatagtgggttacgaaggttatggatgaactagtgagaactgacttcttacttcctttaaaaaccctacccaaaaatagctggtcaggacacaattcaaatgcttctggaatctgtgttccttgaactgcaattctcagactgccaataaacttctttacttggatttcggtctctctgactctggttgacacgttataatgaacacgttcagcgcttacaagtaaagggtaaccagatgttgttcacagtaatcctatgaggtaggttctatacttttatacagagggatttagttactctgctgtattagtttcctaaggcttctgtaacaaactgtgacaacctaagtggctaaaacgacacgaatttattaccttacagttctgaagttcagaaatacagctcactgggttaaaatcaaggcgtcagtgtgcatggtggttttcctgtagtcccagccactcaggaggctgaggtgggcggatcgcttgagcccgggagctcaaaaccagtcttggcaacatagcaagaccctgtttcaaaaaacaaaaaaatcaaggggtcagctggactgttacttctggaagctctggggaacaatttggtttttgttttttgtttttccctccttttctagcttctcctccttttccacctcccacctcctcctttatatatatatatatatatatatatatatttttttttttttttggagacaggttcttgctctgtcaccaaagctggactgcagtggtgggatcatgagccctctccagctctagtgatcctcctgccccaatcccccgagcagctgggaccacagtgcccgtcgctatgtctagttaatttttcgtagagacgagtgtctcactatgttgcccaggctgatctcgaactcctgggctaaagtgttcctctcctgcctctgccttccaaagcactgggattgcaaacatgagacactgtgcctgctcctcttccagcttcttgaggccagctgcattccttggctgttgccccttcctccaccttcaaatagctttctcatactgaccttctttttgggccccttccactttagagaacccttgtaattactttgtaattacccaagcacacactccaagatcgtcaccttattttaaagtccgctgataagcaaccttaattccatctgcaatcttaaccccctctgccaagcaagagaacaaacgcacaggttccagggagtaggatgtggacatcctgaggcggaagcattatcccgccttccacaattgcccaaggtcacatagctagtaagttctagctagcactgagtgctgtgcccgtgaaatttatctacataggctttcacttaacctgcagacagaactcagttagtcggggacaatttccctcaatgttaacagcactgttccaccgcaacgtggaacaacagctttaaaacgtgctcttcgtaggcccggctactccaagaacagtgcctcccgccagacccaggcggcttccttcacccgcaacccgagagacgacccgccgggcccgccccgcggaagccgccggttgccaggccaaggagtggactagggtcgccggggaagcgggtgagtggtccccgccctggcgggctgcctctagaacgaggagggcggcgcgtggtcgcggcgcggagccgagtgggagcgaggggtagacgcgccccggacgcgcggccgcgcccctcacttccgccccgcggtctggaccactcgccgcaaacccgcaagtccctcgccgccttggggtctgggcgcgcggtgccgtgggggtcagcagggcggagcggcttttccaggagaaagggccctcacgggtgagcggggcgactgggctcccccgcggtgcagttgccccgcgggcgccggccccggctcaacggattcttctcgctcgctgcccggaaagaaccagtgagaaccgctgttgcagcaa

SEQ ID NO: 11415 - DNA, 2300 bp, Homo sapien
tgctgtcacaaatttaatctgatagaaatctgtcttttgctcagttctcaagagcagcattctgagtacaggcatgggcagtatttttttttttttttttttagacagagtttcgctctatcacccaggctggagtgcagtggcacgatcttggttcactgcaacctccgcctcccaggttcaaatgattcttatgcctcagcctcccgagtagttggggttacaggcgccacccaccatgcccagctaatttttgtatttttagtagagacagggtttcaccatgtaggccaggctggtcacgaactcctgacctcaggtgatctgcctacctcggcctcccaaagtgctgggattacaggcctgagccatcgtgcctggccttctttgtttttaattgaaactagtctttgtatagagtacaaagaaagcagtgcagatgttgtaaatgttgatttgtagcatttcccttctcttatcaccacactacagaatagttgtacattaactttgacattgtggaaggaaggcaattggagctggccagagcaaagccattttgttcctgaatgccattttacaactgcctgactgcagaatgtacttgctgatgttgcagacaaaattgctgccattatgaaaaggacttcatgctgaggactgaacttttctcaaacccctgaatcaaggacttttgcctagaaaccaatgaactgtcatgataacgctttatcttcaatcaaaatagtgggttacgaaggttatggatgaactagtgagaactgacttcttacttcctttaaaaaccctacccaaaaatagctggtcaggacacaattcaaatgcttctggaatctgtgttccttgaactgcaattctcagactgccaataaacttctttacttggatttcggtctctctgactctggttgacacgttataatgaacacgttcagcgcttacaagtaaagggtaaccagatgttgttcacagtaatcctatgaggtaggttctatacttttatacagagggatttagttactctgctgtattagtttcctaaggcttctgtaacaaactgtgacaacctaagtggctaaaacgacacgaatttattaccttacagttctgaagttcagaaatacagctcactgggttaaaatcaaggcgtcagtgtgcatggtggttttcctgtagtcccagccactcaggaggctgaggtgggcggatcgcttgagcccgggagctcaaaaccagtcttggcaacatagcaagaccctgtttcaaaaaacaaaaaaatcaaggggtcagctggactgttacttctggaagctctggggaacaatttggtttttgttttttgtttttccctccttttctagcttctcctccttttccacctcccacctcctcctttatatatatatatatatatatatatatatttttttttttttttggagacaggttcttgctctgtcaccaaagctggactgcagtggtgggatcatgagccctctccagctctagtgatcctcctgccccaatcccccgagcagctgggaccacagtgcccgtcgctatgtctagttaatttttcgtagagacgagtgtctcactatgttgcccaggctgatctcgaactcctgggctaaagtgttcctctcctgcctctgccttccaaagcactgggattgcaaacatgagacactgtgcctgctcctcttccagcttcttgaggccagctgcattccttggctgttgccccttcctccaccttcaaatagctttctcatactgaccttctttttgggccccttccactttagagaacccttgtaattactttgtaattacccaagcacacactccaagatcgtcaccttattttaaagtccgctgataagcaaccttaattccatctgcaatcttaaccccctctgccaagcaagagaacaaacgcacaggttccagggagtaggatgtggacatcctgaggcggaagcattatcccgccttccacaattgcccaaggtcacatagctagtaagttctagctagcactgagtgctgtgcccgtgaaatttatctacataggctttcacttaacctgcagacagaactcagttagtcggggacaatttccctcaatgttaacagcactgttccaccgcaacgtggaacaacagctttaaaacgtgctcttcgtaggcccggctactccaagaacagtgcctcccgccagacccaggcggcttccttcacccgcaacccgagagacgacccgccgggcccgcccc

SEQ ID NO: 11416 - DNA, 2300 bp, Homo sapien
cctgagtagctgggactacaggcgcccgtcaccacgcccggctaatttttttgtatttttagtagagacaggatttcaccgtgttagccaggatggtctcaatctcctgacctcgtgatccgcccacctcggcctcccaaagtgctgggattacaggcgtcagccaccgcgcccggccctctttatgactatttttaaactatgatgaaaattagaatatataaataatcctttaatatccataagactttgctttgtgtatgttcatgatcaaattaaaacgtaacttttgagtcctcacaggtcgaaagcacaagctccattatcaagagtaatacaacaccctcctaatctccacatagcacagaggcaactcctcactattttttttttttttttttgagacggagtcttcctctgtcgcccaggctggagtgcagtggcgcgatctcggctcactgccagccccgcctcccgagttcacgccattctcctgcctcagcctccctagtagctgggactacaagcgcccgccaccacgcccggctaattttttgtatttttagtagagacggggtttcactgtgttagccaggacggtctcaatctcctgacttcgtgatccgcccgcctcggcctctcagagtgctgggattacaggcgtgagccaccgcgcgcggccacaactcctcactattaaaaagaaccatggtaagatctgaatcctgcacttagcgggaacctgcgacacgaaagcctggccagcccttggagccatgcagggtgcagttaagccgggagcaccatgtaccactggcctgcctcgcggcttctgccttcccgacggcagcaggagacagaggggcgggaaaggctgaccggtgtcacctcccactcaccctctgattgggtctaagcgggcagcggcagccgcggggctcactacatcctgggctagtcgggcagcacaggcacacgcgcccccgaacggcagggaggacaaattaaaactctcctttaagttccctaagtgggaactcgcgagagcgcgtcagcttttacccacgctcccgcagagccggttccctgcacctggctctggccgaactcccccggcctgggctggcggcctcccgcgcgcccgcggggaatctgagtagctggatttacaggcgtgcgccaccacgcccggctaatttttgcatttttagtagagacggggtttcaccgtgttgaccaagctggtctggaactcttgacctcaggtgatccactcgcctcggccttccaaagtgctgaaattacaggcgtgagccaccgcgcccggcctaaaatcacttgtgaaaaatgaaacttaagtgttattttgactctacatcaagaataaagactgaaaagaaacgctatttcatcgggcagcaggtcctatggtaatttttttaaacctctttggtttgagaacgtgatgaacgctatagaccctttccctccaaacaacgcacagtaagtgtctgttaaagaacagactgatcggctggacgcggtggctcactcctgtaatcccagcactttgggaggcttaggcaggcagatcacgaagtcagaagttcgagaccagcctggccaacatggtgaaaccccgtctctactaaaagtacaaaaaaattaaaaaaaaaaaattagccgcgcgtggtggcgcacgccagtaatcctagctactcaggaggctgaggcaggagaattgcttgaacccgggaggcggaggttgcagtgagctgagatcgcaccactgcgctccagcctgggcgacagagggagactccgtctcagaaaaaaacaacttaaaaacggactgcgtctgtagtttttgcacaactgatcacgccctccactatctcgttcggcggtctcggcggtttaggatcctcctaggccagcgaaccttgctgaacactggcgaggactcagtctccaggaatagaatcgcggggtgggtagggtcgcctggaggtagctggctccgcccggcccgcgggcgagtccggaacacagttacccacccctgttgcccaccggaaagcaaagggaggggaacaagccagaccggaaacggaggagagcgcgggggatgtgtttggcatggggacgcactgttacagttgcgctcctggttggctttgtgtttccgcggtgttggtagagtctcggtgtttctacctcttagcaccctttcctgccaccctttgtcctgtggaagcccggagacatcagcggctgcaattttgctactcgctgctcgg

SEQ ID NO: 11417 - DNA, 2300 bp, Homo sapien
attattaatgtgtgggagtctaagtctctttgtaggtcactcaggacttgctttatgaatctggatgcacctgtattgggttcatatatatttaggatagttagctcttcttgttgaattgatccctttaccattatgtaatggccttctttgtctcttttgatctttgttggtttgaagtctgttgtatcagagactaggattgcaacccctgccttgttttgttttccatttgcttggtagatcttcctccatccttttattttgagcctatgtgtgtctctgcatgtgagatgggtttcctgaatacaacacactgatgggtcttgactctttatccaatttgccagtctgtgtcattaattggagcatttagtccatttacatttaaagttaatattgttatgtgtgaatttgaacctgtcattatgatgttagctggttattttgctcgttagttgatgcagtttcttcctagtctcgatggtctttacattttggcatgattttgcagcggctggtactggttgttcctttccatgtttagtgcttccttcaggagctcttgtagggcaggcctggtggtgacaaaatctctcagcatttgcttgtctgtaaaggattttatttctccttcacttatgaagcttagtttggctggatatgaaattctgggttgaaaattcttttctttaagaatgttgaatattggctcccactctgttctggcttgtagagtttctgccgagagatccgctgttagtctgatgggcttccatttgtgggtaacccgacctttctctctggctgcccttaacattttttccttcatttcaactttggtgaatctgacaattatgtgtcttggagttgctcttctcgaggagtgtctttgtggcgttctctgtatttcctgaatctgaatgttggcctgccttgctagattggggaagttctcctggataatatcctgcagagtgttttccaacttggttccattctgcccatcactttcaggtacaccaatcagacgtagatttggtcttttcacatagtcccatatttcttggaggctttattcgtttctttttattcttttttctctaaacttcccttctcgcttcatttcattcatttcatcttccatcgctgataccctttcttccagttgatcgcatcggctcctgaggcttctgcattcttcacgtagttcttgagccttggctttcagctccatcacctcctttaggcacttctctgtattggttattctagttatacgtttcgtctaaatttttttcaaagtttttaacttctttgcctttggtttgaatttcctcctgtagctcgtagtttgatcatctgaagacttcttctctcaattcgtcaaagtcattctccatccagctttgttctattgctggtgaggaactgcgatcctttggaggaggagaggcgctctgctttttagagtttccagtttttctgctctgttttttccccatctttgtggttttatctacttttggtctttgatgatgatgatgtacagatgggtttttggtgtggatgtcctttctgtttgttagttttccttgtaacagacaggaccctcagctgcagggctgttggagtttgctagaggtccactccagaccctgggtatcagcagcggtgtctgccgaacagtggtttttcgtgaaccgcgaatgctgctgtctgatagttcctctggaagttttgtctcagaggagtacccggctgtgtgaggtgtcagtctccccctactggggagtgcctcccggttaggctgctcaggggtcaggggtcagggacccacttgaggaggcagtctgcccgttctcagatctccagctgcatgctgggagaaccactgctctcttcaaagctgtcagacagggacatttaagtctgcagaggttactgctgtctttttgtttgtctgtgccctgcccctagaggtggagcctacagaggcaggcgggcctccttgagctgtggtgggctccacccagttggagcttccaggctgctttgtttacctaagcaagcctgggcaatggcgggcgcccctcccccagccttgctgctgccttgcagtttgatctcagactgctgtgctagcaatcagcgagactccgtgggcgtaggaccctccaagccaggtgcaggatataatctcctggtgcgccattttttaagcccgtcggaaaagcgaagtattggggtgggagtgacccaattttccaggtgccgtgtgtcacccctttctttgacta

SEQ ID NO: 11418 - DNA, 2300 bp, Homo sapien
gaggggaagattagaaggattggggatttcctttatctcaggttaacctaacatcattcatcagaggccaattttgctttttttaacttttattttaggtttcgaggtacacgtgaaggtttgttacataggtaaacatgtgtcagggtggtttgttttacatattatttcatcacccaggtattaagctcagtacccaaatagtgatcctttttgcttgtctctctcctcctactctccccacttaggtagaccccagtgtttgcttccctctttgtgtttttacatccttatcacttagctataccacttacagatgagaacattcagtatttgatttttgctttctgcactagtttgctaaggatgatagcctccagctccatccacgttcccacaaaagacaggatctcattctttttttctttttttgagacggagtctctctctgctgcccaggctggagtgcagtggcacagtctcggttcactgcaagttcttcctcctgggttcacgccattcttcctgcctcagcctcccgagtagctgggactacaggcgcccgccaccacgcccagctaattttttttgtatttttagtagagacgaggtttcatcgtgttagctggggtggtcttgatctcctgacctcatgatctgcccgcctcagcctccgaaagtgctgggattacaggcgtgagccaccgtgcgcagccgatctcattcttttttatggctgcatagtattccatggtgtatatgtaccacattttctttatccaatctgtcattgatgggtatttgtgttgattccatgtctttgctattgtaaatagtgctgcagtgaacattcacatgcatatgctttacagtagaatgatttatattcctctgggtatatactaggtaatgggattgctcagtcaaatagtagttctacttttagctcttctaggtgtcgccatactgctttttacaatggttgaactaattcacactcccatcaacagtgtataagtgttcccttttctctgcaaccttgccagcacctgttattttttgacactttaataatagccattctgactattgtctggtgtgaaatggcatctcattgtggttttgattggcatttctctaatctgtgatattgagctttttttcgtatgcttctttgccacatgtatgtcttcttttgagaaatgtctgttcatgtcgaaggccaattttggcagtgccccagttctcctcagtgtctgtcctcttttattctccagtcttaggcacaggctgtgagcattgtcttaggattcgtgcctcttggggtgaaatttgagtcctgtgttggaggcttcagtatgatagaaacttcctgaaggcttcagtaggacaaaaaattgttcctcatcagctaccttgtcttcagccataaggtaaaatgaggcattactgggggctccatcaaacaggttctcctttcttggattaatggaaggagcccagtctttcaggtgtttctcctttgaagtgtatcttactaaaatgtcttaccgctgcagttcctatgccacctcaaaggcaactgtcactaatgtgtatctgttcactaggtgtctagttggaaagagatgacaagagcatcatttactccctatgctcatccctgaaataccttattttattgctgtggaaactgagatctggccaaagtttgatgacttgcccaggctggcattaaaatacagttctcttctacccctcttttcttttttcatgctatattccttgagttgatgaccacaagtttaagcttagtattgccataaagttggagttggggctttgcatgcaatggaaatattactaaacatccaaagtttactgtcttattcacatatattctggataggaaagtaaaatactcatggagcagaaaagataaaattttaattattagtaaaaagcattttgttatacaacttctgaataattttcttttaaaattgtatttataaaggcctttgttttttggttaaatttataagttagaagaaatctgattgattttatttttgcttgtttttgcagcagcaggattaagaaaattgttcattcaattgtgtcatcctttgcagttgggtatgtgagacatagaaaacaccatgtattaaatatacctgagacttaatgcataaaaaacaccacgtattaaatatatctgagacttggccaggtgcggtagctcacgcctgtactcccagcactctgggaggccaaggcaggtggatcacctgaggtca

SEQ ID NO: 11419 - DNA, 2300 bp, Homo sapien
acctcctctgcctgggctcccactttggcggcacttaaggagctcttcagcccgctgctgcactgtgggagccccttcctgggctgggctggctgaggctggagctggctccctcagcttgcggggaggtgtggagggagaggcgctggcgggaaccggggctgcgcacggtgcttgcgggccagcacgagttccgggtgggtgtgggctcggcgggcccgcactcggagcggccggtgggccctgccggccccgggcaatgaggggcttagcacctgggccagcagctgcagaaggtgtgctgggtcccccagcagtgccggcccaccggcgctgcgctcaatttctcgcagggccttagctgcctccctgagcagggcagggctcgggacctgcagcccgccatgcctgagcctcccccaccttccatgggctcctgtgaggcccgagctccctgacgagcaccaccccctgctccacagcgcccagtcccatcgaccacccaagggctgaggagtgcgggcacagggcgcgggactggcaggcagctccacttgcagccccggtgcgggatccactgggtgaagccagctaggctcctcactggtgggcacttggagaacctttatggctagctaagggattgtaaatacaccagtcggcactctatctggctcaaggtttgtaaacacaccaatcagcaccctgtgtctagctcagggtttgtgaatgcaccaatggacactgtatctagctactcttgtggggacttggagaacctttgtgtggacactctgtatctagctaatgtagtggggacgtggagaacctttgtgtctagctcagggattgtaaatgcaccaatcagcgccctgtcaaaacagaccactccgctctctgtaaaatgaaccaatcagcaggatgtgggtggggccagataagagaataaaagcaggctgcacgcgccggcagtggcaacccgctggggttcccttgcaaagcgtgggagctttgttccttggctctttgcaataaatcttgctgctgctcactctttgggtccacactgcctttatgagctgtaacactcactgcgaaggtctgcagcttcacttctgaagccagcgagactacggacacactgggaggaacgaacaactccagacgcgccgccttaaaagctgtaacactcatggcgaaggtccgcagcttcactcctgaaccagcgagaccacgaacccaccagaaggaagaaactctgaacacatccgaacatcagaaggaacaaactccggacaggccgcctttaagaactgtaacactcaccgcgagggtccgcagctttattcttgaagtcagaaagaccaagaacccaccaattccggacacagtacccaataggatgtttttcagcccttgcccctttctctccctcccttgacttggagtctccagtgtttgttgttgccatctttatgtccatgagtacccgttgtttaagctcccacttataagtgagaacattcggtgtttggttttctgttcctatgttaattcacttaggataatgtcctccaactgcatccatgttgctacagaggacgtgattttgttctttttttatggctgtttagtatttcgtggtgtgtatgtaccacattttctttacccagtctactgttgatgggcacctaggttgattccatgtctttgctattgtaaatagtactgtgataaacatagtgcgggtgtctttttggcagaatgatttattttcctttgggcatacacccagtaatgggattgctgggtcgaatgatctttctgtttttagttgagaaatctccaaactgctttccacagtggctgaactaattcacattcctataaaaagaactttaacacttgcagagtagagtttttaaaatgtttagttatttttaataccaattctgaccccagggaaagaaaatggagatgcactttacctgaactatgttcttttgaaactcttcagtgacatttgggaaagcaagtttacagcccacatgctgtgccgcttcaaggacttatttttgtggtctccctgaagaaaatgacactagagtagaagtgattgaatgtgaagtgtcaggagattgctcgctcgtccttcgttaaacccctggtccggctgtgtgctgtggatgcgggtgtgtgttgaggggacctgcgtctgccggggccgcaccccctcccgcaggaccttggctggccgcgcgtttcctgcctgtttcctgtccagcagctggcgagctggg

SEQ ID NO: 11420 - DNA, 2300 bp, Homo sapien
caatatctgacttttttgtacctgggaactaatttttgtctcctaggtctgatattgcccctgttgataatgcatgccttagagcaggggtccccaaccccccaacccccagtactggtctgtggcctgttaggaactgggtcacatagcagggataagtgacaggtaagcaagcattaccaccggagctccacctcccatcagatcagcagacgcattagattctcataggagcaggaaccctattgtgaactgtgcatgcaagggatctaggtcatgccctccctttgagagtctaatgcctgatggtctgaagtggaacagtttcatcctgaaaccacaacccctgctccccaggaaatactgtcttccatgaaactggtccctgatacacaaaaggttggggactgctgccttagactgttaatattgtctaatccttttaaaagtaatatatattcagaaaataaatctttttggggaggatagagtggatgtccttaaaccatatgttgataagttaatcttagtataattttttgattatcatataaagaggtcaatttggacaaattttagacttactacattgctagtcacatataaaaattaaacataactgtttatatatgttaaaaattgggctaggcgcagtggctcatgcctgtaatcccagcacgttgggaggctgaggcgggcggatcacctgatgttgggagtttgagaccagcctgaccaacgtggagaaaccctgtctctactaaaaatacaaaattagctaggcatggtggcacatgcctgtaatcccagctactcaggaggctgaggcaggaaaattgcttgaacctgggaggcagaggttgtgatgagccaagattgcgccattgcactccagcctgggcaaaaagagtgaaactcagtctcaaaaaaataaaaattaaaaattaaacatactggctagacacagtggctcatgcctgtaaatcccagtactttgggaggccgaggcaggggggtcacttgaggtcaggagttcgagactagcctcgccaacatggtgaaagtccttctctcctaaaaatacaaaaatgagccaggcatggtggctcacatctataatcccagctacttgggaagctgaggtgggaggatcacttgaacctgggaggtggaggtcgcagtgagcctagattgtactactgcactccagcttgggcaacagagcgagactccatctcaaaaaaaaaaaaaattaaacatatgaataaagggatactacatcaatattttctgtttaaaactgttaataattgtatatgggcatatgagtgaagtatggaaaattataaagaagagaaagtcatctacataaatgccctccttaaaattatcttgatgtatctgatttgttttttgctttcagtgtaagaaaatattacgagtaaaatgttttcatagaaatattactcttagaaaatgcacccattgtggctgggtgcggtggctcacgcctgtaatcccagcactttgggaggccgagccaggtggactacgaggtcaggagatcgagaccatcctggctaacatggtgaaaccccgtctctactaaaaatacaaaaaaattagccggacgtggtggcgggcacctgtagtcccagctactcgggaggctgaagcaggagaatggtgttaacccaggaggcagagcttgcagtgatccgagatcacgccactgcactccagcctgggtgacagagtgagactccgcctcaaaaaaaaataaattaaaaaataataataataaagaaaatacacccattgtaaaaacaaaagctagttacagcttcttttaaacttcttatgttcttccatgcagccaaatgccaccacattactgttttcatttaatttttccttaagttcatttaaggagtaaaatcattattgtttttcattatttttattattaaggcatatggcactgtaatgctataaaacaaggatttctgacaagtgttatggatgttgtttagagtctttcatttaagctattgatttcctcctaggagtgttgcatggccattctcctttcccaaattgtgttcattgaagaacaggcggctggaattgggaagaggtaagtctgtgtatagcacagtctttattcacagaaaacatttcctgttatgctattggccaagaggtcctatcttagacttgatgtacgaatccattcttaaagcatgaataaagctaaggtttgctgtaatatccttgtttattatacatgggtcataata

SEQ ID NO: 11421 - DNA, 2300 bp, Homo sapien
acaggattttggaacacggtaaaagtagcaattcatttcgggggagagatggcttatactcattggaaagagcctttcctttcttttaatgcctagccacagaccactgactccacgactgggggaaatgtggagccctgggggcagagagcaagcctgccctctgtccctctgcccctgtgcccctctgcccacgtgggcacgcagccttagttaagaccccaataagtggtaggctctctaaaatgtgttcacaacctttaaagcagtcattctattttaggaagacactgtaagaaaataatcctaaagagaaaaatatgtatcaattgtagaaggacatctataagctgctccatttatttatttatttattatttattattattatttttgaagcagagtctcgttctgtcgctcagactggagtgcaatggtgcgatctcggctcactgcaacctctacctccagggttcaagcgattctcttgcctcagcttcccgagtagctgggattacaggcacccgccaccacgccgggctaattttttgtatttttagtagagacagggtttctctatgttagccaggctggtctcgaactcctgacttgtgatccgcccgccttgtcctcccaaagtgctgggattacaaacgtgagccaccgcgcccggccaggtgttccatttataaagcaaaatacaaaaatgaaatggctaggggcacgaggccgcctggtgggtgagagcagcggccatggatggctttgcgcagaccaacaaacagctaaattatagaggaactacatattgaaatgtaaattcacgcatgaggtctgtattaatattgaaaatgcctaaataaaaataatcttttttttctgagcctgggggtgggggagtggagtggcgtgggggagttggggtggagggggaaagggtctttctatgtcgcccactggtgtcaaactcctgggttcaagcaatcctcccgcctcagcttcggaagcagctgggaatacaggcgcgcgcatcaagcccggttaaataaaatctgtttcccccagttaaaaaaaaattaatttgtgtgggtacataggtgtatatatttctggggtatatgggatattttgatacaggcatacactgtataataatcacatcagggtaaatgaggtatccgttacctcaagcatttatcctttgtgttacaatataatcttaaagggaaaaaaagagcagcacaggtagtactgactgcagctgtacagaaacaatgcgtgccataaatattcatttgaaagagaggggttatgattatttacaatcattagcgaatgtagcaacattctgggcactgacaagaaaactgccacaaacatgcaggcataatgcacaataagcaagtccaagctgtggtcggggctccctcgcgtccctgtaagctctgaatttagaatggggtggaccgcctgctgatcaagggttctgaaaggccggcggctaatggaccgccagggggcgctccacgcacgtctccacgtccccgggcgcacctcgcagccgcgcccgctcgctgccaggccgctccctccgtccctcacccgccccgactcgcttccgtcccgtccgacgctagggggcgccgcaggctgcctggcgcgctgctcgcggcctcggagggccggggctgggtggcagcggccatggaccgcttcgtttggaccagcggcctcctggagatcaacgagaccctggtgatccagcagcgcggggtgcgaatctacgatggcgaggagaaggtagggcgtctgccaaccttcccaacgggctggcggaagggacccccggtgggcgcgcggcccggctcagcgcggcccgggtcggcgcggcccggtccccggcttagctcacggccctcggcggcccggcaggcctctgtgcggggtgcagcgctcttgcgctccccgccggtcggtagcacgtggcgtggggcgctcggctgcctccccagcgcgggtcccaactttggcacggttcccagcaggcgcggatcgcggccgcttccctccgcccggaatgcttccgggagcgcacagctgcagtgcccgggagaaggagcgctcgccgtctgcgggcgccgggcggcgatccggcagtcgacttccttggcgtggttccagaccccctgacgacaccaacctcggcgtcggcaccggacagccccgtttcgcctttctgtgaggagggcgcggtggccgtacagtccgtgccccagcggaagctttagcttggaccttat

SEQ ID NO: 11422 - DNA, 2300 bp, Homo sapien
ccttgctccagcctggatacaggaaacccttatacggttgtctatcccagcagctatcatatgccaggcttctatttgtgtcctacagactgtacatccctcaagggcagaaaacataccttgcaaatgtcctcactgcctaacatgttgataattgcaaagcccaggcataactgcacagttccacatctgattaggatgcttaggtcacattactttcaattaaaaaagactaaaaagttggtaaacaatcaaatgctcaaaaatcaggcaatgatggtaaattgtgatatatattgatagcatattacagcaaatcaaatgttttcaaagaacttttggttattgggtatatggtcatgatggaaattgaaagatatgaaatacagaagacactgtttagaaatagaccaaaatacacacaggattttggaacacggtaaaagtagcaattcatttcgggggagagatggcttatactcattggaaagagcctttcctttcttttaatgcctagccacagaccactgactccacgactgggggaaatgtggagccctgggggcagagagcaagcctgccctctgtccctctgcccctgtgcccctctgcccacgtgggcacgcagccttagttaagaccccaataagtggtaggctctctaaaatgtgttcacaacctttaaagcagtcattctattttaggaagacactgtaagaaaataatcctaaagagaaaaatatgtatcaattgtagaaggacatctataagctgctccatttatttatttatttattatttattattattatttttgaagcagagtctcgttctgtcgctcagactggagtgcaatggtgcgatctcggctcactgcaacctctacctccagggttcaagcgattctcttgcctcagcttcccgagtagctgggattacaggcacccgccaccacgccgggctaattttttgtatttttagtagagacagggtttctctatgttagccaggctggtctcgaactcctgacttgtgatccgcccgccttgtcctcccaaagtgctgggattacaaacgtgagccaccgcgcccggccaggtgttccatttataaagcaaaatacaaaaatgaaatggctaggggcacgaggccgcctggtgggtgagagcagcggccatggatggctttgcgcagaccaacaaacagctaaattatagaggaactacatattgaaatgtaaattcacgcatgaggtctgtattaatattgaaaatgcctaaataaaaataatcttttttttctgagcctgggggtgggggagtggagtggcgtgggggagttggggtggagggggaaagggtctttctatgtcgcccactggtgtcaaactcctgggttcaagcaatcctcccgcctcagcttcggaagcagctgggaatacaggcgcgcgcatcaagcccggttaaataaaatctgtttcccccagttaaaaaaaaattaatttgtgtgggtacataggtgtatatatttctggggtatatgggatattttgatacaggcatacactgtataataatcacatcagggtaaatgaggtatccgttacctcaagcatttatcctttgtgttacaatataatcttaaagggaaaaaaagagcagcacaggtagtactgactgcagctgtacagaaacaatgcgtgccataaatattcatttgaaagagaggggttatgattatttacaatcattagcgaatgtagcaacattctgggcactgacaagaaaactgccacaaacatgcaggcataatgcacaataagcaagtccaagctgtggtcggggctccctcgcgtccctgtaagctctgaatttagaatggggtggaccgcctgctgatcaagggttctgaaaggccggcggctaatggaccgccagggggcgctccacgcacgtctccacgtccccgggcgcacctcgcagccgcgcccgctcgctgccaggccgctccctccgtccctcacccgccccgactcgcttccgtcccgtccgacgctagggggcgccgcaggctgcctggcgcgctgctcgcggcctcggagggccggggctgggtggcagcggccatggaccgcttcgtttggaccagcggcctcctggagatcaacgagaccctggtgatccagcagcgcggggtgcgaatctacgatggcgaggagaaggtagggcgtctgccaaccttcccaacgggctggcggaagggacccccggtgggcgcgcggcccggctcagcgcggcccg

SEQ ID NO: 11423 - DNA, 2300 bp, Homo sapien
gtgcccaacactgtggtccattacctctttcttcagcttctctcttccccagactttgtgaccccattgtgtccccattgtcctcctaactttcagattgtccttccctgttctctcacaggcactttaccttcttcacatgaccacaggaggaacgactaacactaattaatcatcagtactccaggtgcctgcagtttcatggtcagctgtgttggcaaagaactgttctgaaaggaaatcttttttgttttgttttttttgtttgttttttggatcttttagaaaaaggtctgctttctctgcaataattgtgtagcagtaatattaaaaagtgtctcaaaaatagacatatcattggagtgggtgagtctggagattagaggagaattgccattttgaaaaacctagcagtttggcaggttttcctattcatctcagcctactgagatctccatggtatcctttgagtcaatttctttttttaccatgcccacttataaaaaattattgaggttcacataacataaaattaatcattttaaagtgaacaactcaatggcattaatacatttacaatgtcacccaaccactacctctaattccaaaacatttcacttacttcaaggtaatgaaacccttgtccattaaactgtctcccaattctccccctaccctcagcctctggcaactactattctgagttatttcactatggatgtatctattttagatctttcatataaatggaatcataccatatgtaacttttcatatattacttcttttacttagcataatgttttggaggtttttgagtcacttattaacgctgtattttgttctcacttaatagaaatccctggttgccccacctgtctgatgaaactttagtaaataatcaacaataatgacagacgtatttaaacagcaagttatatcttaaggatggtgatggacaatgttaaactaaaactgggacatttcatcaagtaaaaaactacacaaaatctcaaaccaaattcctcattagcaagacgctaccataagatgtctgaagaaaaaagcaggcagaagtgggaaaaactgaccacagccgagggccagctgtggaggccctcagacctgggaagggtaaacggggaaatcacatcctcccgtctgtgtgcccggagcacctaaaacctggctgaaagagtccagtccagccttactgcagtgatcaggcaagaaatgtaaacccagtgcttgaaaccaggcaggtgcagtccagactcgccctcacttccccactgccactcttaaaaccttctagccctgacttgtttcgttctgtcatgtggattgagtgtttgtgtgggttttatgaaggtggtatttttagatgagaaaaacgaagattatggcggcacacttaaccacacaaacacaaaacgtctgtaacaaatgctattttatcttcaaaggagaattatatataaccttgaggaggggatgaggtttatcttcatttttttctgtttctcctcctctcctcccttttttgcatttgataattgcttagaataaaggtatggaaagtagatcccaatttcagttccccttcacacgctgtgcaaacgtggacaaacaacctctgaacctgtcacctctcagtggaaaaagtggtgataacgtcccacctcagaattgatgctcaaaatgaagcagtatttgtgaaacgaaaatacacacgctcgtggtacgccagatcggtgtttacgtcctcgtcagtgaacgcgtcgatgtttaataagaagggcagccaatcaacacttttcttgtctttttctcgtctgccttcctccaaggactgtgagggtctcaagatgtgtcccatctcggttgtttgtcaacctagtcctgctatgtcgtggggactgagcaggccgactcctcccccatcgcacgtccaggatgaagagcgctgtttaggtttgaaacctgcagactcagtcccaaccgaactgggcagacaccagaccggccccggcaactgcagtccaggctccgcctccctacgcccattggcttattcaattcacgcaggaaccaatgggcggagacggcagccgcgccgtctgacggcttagccgcggtgcagactgcggcggcggtggtctgaggaagttctatcttggcgctaaagcggagacgcatcccccgacccgaggctacgatgagcacaccggccgtgccccaggacctgcagctgcccccgagtcagagggcgcagtccgcattcaaaggtgaaggccgcg

SEQ ID NO: 11424 - DNA, 2300 bp, Homo sapien
agtgcagtggcgcgatctcagctcactgcaacctctgcctcgtgggttcaagcgattctcctgcctcagcctccagggtagctgggattacaagcatttgccaccatgcctggccaatatttttgattttagtagagacagggtttcgccgtgttggccaggctggtctcaaactcctgacctgaggtgatctgcccaccttctctacccagagtgctaggattacaggtgtgacccactgttcctggcctcattttttttttcagagaatgagagatcacgcattttaatgtgatctctgaacttaggatctgtcttaaaatcaatggcatgtctaattgaccgtattttttcctatcgttatagtacacaaaattgttaaaatcacttgctaagagatgctcacagtctgccttagccagtttatagctgtaaaaataagttaagtcagtttcttgaggagggattttctttgcaataccgcctagaaactaacgttcttttttttgagagatgatctcattctgtgtcactcagcctctagtgcagtgacgggatcttggcccactgcctcaactcccaggctcaagcagtcctccaccccagcctcccaagtagctgggactatggcacccaccaccacacccaactaattttttatttttttgtagagatggggttttgccgtgttgcccaggctgctctcgaactcctgagctcaagtaatccccccacctcggcctcccaaagtgctgctattacaggcatgagccaccacaaccagcagtgcatattcttaatgtatcctaatataaattaagctgtgaatggcatatggtaatttttggatcacttctgggagggctctttaataaaagtattttcaatgtagtacatctgttactaagtacttaaaactaacccaaggaggtattacttactaaaggttatttgaagacttgtttgaatgacttgagaatgatttgaaataagattattaagtatttacaaattctatgggcagagagtgttaggacttttagaaaatatctttaaattcctcagccatttgtttacactatttttttttgagacagagtctctctctgtcacccaggctggagtgcagtggctcgatcttggctcactgcgaactccgcctcccgggttcatgccattctccttcctcagcctccctagtagctgggactacaggactacaagcgcccgccaccatgcccggctaattttttgtatttttagtagagacggggtttcactgtgttagtcaggatggtctcgatctcctgacctcgtgatctgcccacctcggcctcccaaagtgctgggattacaggcatgagccaccgcgcctggccgcttaggacaaatttcaactcaggtcttttttaaatttaaaattagtaagtcagttaattgttaacattgccctcttcttcctccccaaaaggaagcctccttggtacaggattgattgatcattttgtttgtttgtttttaagtagtagagatcagagagttgtgacatctgaggaccaagttcaagaagggactaaagtgctgaaacttaaaacaaaaatggtaagatgtggacatagcactcttaaactgtccccttttccattttgcctttcctaaacacttttcttaaataattctttcaggctgataaagaaaacatgaagagacctgcagagagcaaaaataatacagtggtggggaaacattgtattcctttaaaaccttcaaatgaactaaccaattcaactgtagtaattgacacacataaacctaaggatagtaatcaaactccgcatttgttactaactgaagatgatccccaaagtcaacatatgacattaagccaggcatttcaccttaaaaacaatagtaaaaagaaacaaatgactacagaaaaacaaaagcaagatgctaacatgcccaagaaacctgtgcttggatcttatcgtggccagattgttcagtctaagattaattcatttagaaaacctctacaagtcaaagatgagagttctgcagcaacaaagaaactttcagccactatacctaaagccacaaaacctcagcctgtaaacaccagcagtgtaacagtgaaaagtaatagatcctccaatatgactgccactactaaatttgtgagcactacatctcagaacacacaacttgtgcgacctcctattagaagtcatcacagtaatacccgggacactgtgaaacaaggcatcagtagaacttctgccaatgttacaatccggaaa

SEQ ID NO: 11425 - DNA, 2300 bp, Homo sapien
aaattcctgagtccagcctcttctctttccctctcccctacatccctgaatttctctttctttttttccatttcctgaaaggtttttactctcttttccctccaggtctctccaagacaatcttctactttttcttaatttctgcttatcctttagacttcaattcaaatgttagttccttggagtagccttccctgatgatttccctgatataccatcccctctcctctcaacctaggtttagtgcacctgttttgtgctccctgtttttttccctatgcaatatttgatgcatttgattgtactatgtagttgtttgtcctgtcttttgcatatgtaaactcagtagataaggacagtgtctgatgttcctgaccattgagtctcctgtgctaatgcaatgcctgacacatatttggcacttaaatatttgttgaattaatctatattcttttctctccttcagcttccacttaaaactcagtcactatcatgcaactaaaacttctcttagtaaaaatttttaataattttcctaataattaaattcagaggtttttttttccagctcaatggattcaccaggatgtctcacaagtatttccagcctaacatgttttattttgaactctttgtctgccctcactgctttcccatgcccagtatccctttcccatacccaacatccctttctcccaaaaaagaaaagaaaaaactcttctctggcatttatgactcttaagaaatgttggataagacgctcctaatacatttgcacactcattcctacacagtcatgtattcatttgttaataagttctgacttgggtgggtgtggtggctcacgcctataatcccaacaccagaagtccaaggtggaagaatcgcttgaggtctagaattcgagaccatccttggcaacatagtgagaccccatctctacaaaaagtaaaaattagctgggtatggtggtacacacctttaggcccagctacttgggaggctttggcaggaggatcacttgaacctgggaagttgaggctgcagtgagctaagattatgccactgcactccatcctaggtgacagaacggcagacaccctgtctctaaaaaaaaaaaaaaaatgttctcagaaatatttctcagattggacccttcctttcctatctgatctcttcctaacttacttaggctattacaacaaccttgtcttcttgccatcacagattgttacttttcattctctgccattctagacagtcctttacattgaccaaatttaattatgtctgtctctggtgaattttttttaccaaacttctttcatataaagctcattacaatctagctctctggtgaattttttttaccaaacttctttcatataaagctcattacaatctagctcttgtttacctatctaagctcaatacctcctgctcccactcctaaccttgttccttaccctatattctaaacacactggctctttaatgttatgttaatttaatagatcattttcttttatgtgccatatgaaggttgtcttccttggtcttgatcaagtactcatttttaagacccagcctaaatctcgcttgtgaagcattccctaaccatctccctataccacaggcaaagttagttgtttctttttgtgggttttaataatcctttgttcttatttcatatatagcatttatttcattttataatagtatttgttatatagttggcagcagtatttgctgaggaaaaggaatggttcagagatggcaatcgtgttcttttattttgaaaatgtggccaactaggaacaactttaatgtcttctgattttgttcttaaaattcagccaaaagcttaatctataaatgtattttctataggagaaaatatggagaagtcttgtgcaagcaaggaagaagtcaaagaagtcagtattgaagatacaggtgttgatgtagatccagaaaaactggaaatggagagtaaacttcatagaaatttgctatttcaagattgtgaaaaagagcaagacaacaaaacaaaagatccaacccatgatgttaaaacccccaatacagaaacgaggacaagttgcttaattaaatataatgtgtctactacgccatacttgcaaaggtaaacttttaaaatgtaccatgatttgttttcatgcttggagataataaataacggcatttaaaaatctttgagatagcttcagattacagctaccatttattaatatagaaatttcagtacgggcatggtggctcacgcctgtaatttcagc

SEQ ID NO: 11426 - DNA, 2300 bp, Homo sapien
tatgttagaacataagtaaaattacacacacacacacacacacgttattaatcttattttgagtagcaaaaaattggaccaaaaaatactaatatctatcaatagaaaattggtaaataaaatgcagccatccaaaagaataaaaaacaattattttacaaatatggaagaacttcaagtgacaaaagcaatgtgtaggagttgtataatattatatagtatctatcatttatattttttaaaaggtaaaaaatatactttatagacttagaaataaaattaacaatagaagtataaatcgaactcataaaatataagtgaatagtaaagggttgactcagcagctatgggattgcatgcctcaaagaaaagactgactcttgaccaactattagctcttgaaatatcctgcctgataagagtgtctttgtatacctcgggccttgggcaatgccagagtttgtgctaataatgtaatttatggtgaacacctgtttttgcttgcctggagccctgggtcatattgtatgagtttgacttcatagggaggaatgggttggagactgagtattaagggtcaatagtcgggggtcttcatgcctatgcagctgaccttggacacaaaagtttgtgtgagcatccctggttgacaattctttgtccatattgtcacacgtcattgctgggagaattaagttctgttcatataactccacagggagaggacaactggaagctgctcctggttctgcctggactctgccctaagtgccttttccttccgaatgtattctatagcctttcatcgtaataaaccataaccgtgaatagaacagcttgtctaagttctgtgagtccttctagctccttattgaatacggtggcagcattgggtccctcaacacactagataaagtaattagagaagcatttatttttttcagatgctggcattgaaaaggaataaggactacttattgagttaagtattcagtttaagatgttagataaagggcaacaaaataaagaaagtagaaggggctgtctactgtttaccatcacactttgctgcctctcttggacaatctatagacaaagttaataaaagagtgcaacaagttttccgaatgcagaattgatatacaaaaaaagattgcatttctatataccagcaacaacaactcagaaaacataattttaaatgcaacactactaaaaataacaacataatcattatggaatcatgaagatgtcaattctcccaaaattaatccataaacttgatgcaattccaatacaaactcaagaggatttttttacaatactgaacaagctaatgtcacaattcatgaggaagagcctatgtttaaaaacaaagcaccaaagtgggagacttgttctaccagatttaaataattattaaaaagttaagttaaacagtgtagtattggtgcagagatagatgtataagctaatgaaatgaaagagggcctagaaagagcccaaatcatatatggaaatataaatgacagacatggcatcagaactcagtggtaaaagatgagagtattcatctcccatctttttcaaaagatgttgaaattcaaagggtgttgaaatttttggctgttgatattataataaaaataacatttggtccttgtccttagttcctgacacacagctcctgaagtccttggaatctccagagtgatgactgagttaatcaccaatggtgaatggcaatgattatctgtgaggaccaaagctgagtcttcgtgcttagggcaggagcgcagacaaggagaggggctcttccttctgaggcttgtcatctagaactcattgtcactggaagccagagcctaaatgggcctatcagttgccttgggttataagaacaagtttgagtatttattcatttatttatcttgagttcggggcccctgtgtatctgctcactgcctgcccgcagttcagcttgtgcttggctcactcaccattcagcgaaatgaaggaaccagcggaatgaaggaaccagcggagggacctccgggaggaggcgctgcccagcgagcctggcgccggggggcggggcctgacgggagctctgctcaggcttcaacatggcgggccgtttcggttgacttcgcctgtggaaaccgaattccccctccatggtttccccaggatatgagttgggggcctcacctcgcctataagggtcaggcgagctttctggatgctcgagggacctttcggcctgcgcagccggagcagcttgtcccaatgccctgcca

SEQ ID NO: 11427 - DNA, 2300 bp, Homo sapien
caccaatagcacttcaaccaacctttctgaaaactgtaaaatgaacaccaaacaagccaaccacagatgtaccaaaccacagcagactgtttttacaggcctaagttgagctatcaattgaataggctcagttctaaaatcagacagcagcctgtgctgggtgcctaaggggatgtcacaagacagtaggtctggaaaggagcactcaggcagccaagggtgagagctgcaccctggaatcacacacgccttggtgtgaatgcctcctctacctgtggcccctttggcctctacagctgggagtcctcatctgtacaaggcaaataataacactattacaaaacaaaggcagtcgcaaatagccacatgagactgatgggatgctccactgtgcacaagcatcatgtgttctcagaacaaggccctgcacagagcaccaagcatcttcctgtgaccacagtccactagcccttcaactgtcaatgtgcacaggagtcgcctgggggccttgctaaataaaatgcagcttctgattcaatagcctcggatgggaccagagatttggcgtcttgatgagctcccgagtgagatggacaatgccagtccacggactcacactttgaaatacaacacctcggtcattgtgtccaaatttgcttgataacctgaagcaccccccaccccccccctttttttttgtgatggagtctggctctgtcgcccaggctggagtgcaacggccacgatctcagctcactgcaactgccacctccggagttcaagtgattctcctgcctcagcctcccaagtagctgagattacaggtgcatgccactgcaccaggctaatttttatatttatagtagagacggagtttcaccatgttggccaggctggtcttgaactcctgaccttcagtgatccacccacctcagcctcccaaagtgctgagattacaagtgtgaaccaccttgcccagcctggagcacgtattaaatattctaattatcaggcctttcttctggaaatcttgattcagtatgtttcggttggagccttgggcatttgggaaaactagaatgtattcctctccctttagacaaaagtcaactattgctgaggcatgggtttcataaatgttgactaaaatatccagttcaacaaccaatcctgtataattttcaagtaacttctttgtgaataataaggaacaatttatttgtcatcgcactgaggagccgcgtgaccccagtcgtgctggatcagagatgaacaccaagtgacttcctaacaccagtgtcatcctgaacgtcaacagaaaacagtggccaccgagaagattttttaactacttgaagcattttgccaatgaccagacttcaagaatcttccttaatttacaaaaaaaatttaaaaccaatggcaacaaaggcacagtacttaacaaagcagctaagttagaagtgcaagacactgatttatatgctgttgatagacctggagagacaggaccatttactaggctgaaaaggtgatggccatctggtatcttcctaaaaaagtatatcagggtcctaatccttttccagaaggcaaactaaggccagagcaagacaaggtctcctaggccacacaactagtcagtgacagaggagccagttcagtcctgtccttcaggtctgtgcctacaaaccaatacttgatccgagtattccaacctgggcaaaaacatcacaaaacacccaaccctgcattttaggaaaaaaaaaaaaaaaaggaaaaaggaggaaggaaaaaaacaaaggcaactgagaagacagggcatgtccagtctggcctcccagataaacctcaatgcgtttgtttcttttggcgcagccacttcctttgtaacttggaaggaatgaaagtcacatcacattgcattctgtctgcccgtgtgaattcaaccccgttaggtgagccaaacttaaacacattaaattctacaaataaccacttctggaattattaagatagaaaacaatggtgggtactaacagattcactcaggagtgggtagttaacgggttaattcaggttatgtgtagctctagctgggagaagaaacagggcttggaggaggcaagactgttcagcatgaattagaactgatttatgagcttgctgtagcacttggaatagaaaaactcttcagcgcctttgatccctctcacactacaccagggttcgattgagaaaacaacagcgctgaccacccgtccttctcgatccttggggaaaaaacttttttggacggt

SEQ ID NO: 11428 - DNA, 2300 bp, Homo sapien
ggaacagcgtggatggaactggaggtcattatgctaaatgaaataagctaggaaaagaaagacaaacgtctcatgttctcacttatttgtggcatctaaaaatcaaaactattgaactcctggtcatagagagtagaaggatagttaccagaggctgagaagggtagtggggagttggaggggaggtggggatggttagtgggtacaaaaaatatagaaagaataagacctattttaattgcgcaatagggtgactgtagtcaataacaattgtatatttttaaataacttaaagaatgtaattgaattgtttgtaattcaaaggataaatgcttgagtactccattctccatgatgtgattaatacgcattgcatgcctatatcaaaacatctcatgtattccataactatatacacctactatgtacccacaaaaaatttaaaaataatttaaaacagttttttaaagaaaatactgatgaaatgaatggaattaactaattcaaagttttctaggatgtggtagcaactctctgaaaatcgtcccccagtggccactgctgctggtactttcagggaagtgtggttccttcactttgaatctggactggccctgtgacccattttgcaccaatagaatgaaatgaaagtgatgtcatgtgactttcaatgctgtgcagctttagtctggtgtgaatgttcactctaaggcaagccagctgctctgtaagaagtccaaatataggccaggcccagtggctcacgtctgtaatcccagcactttgggaggccgaggcaggccgatcacgaggtcaagagatcaagatcatcctggccaatgtggtgaaaccccatctctactaaaaatacaaaaattagctgggcgtggtggtgcatgcctgtagttctagctactcgggaagctgaggcaggagaattgcttgaactcaggaggtggaggttggagtaagctgagattgcgccactgtactccagcctggagagagagagagactaaaaaaaaaaaataataataataataaaaagaagtccaaatatgctgagatgccatgctgtgaggaagtgcaacccagccaggtacaaaagtcatggggcaagctggcgcagtgtctcacgcctgtaatcccacactttgggaggctgaggcaggtggatcacctgaggtcaggagtttgagaccagcctggacaacatggtgaaactcccgtctctactaaaaaaatacaaaaagtagccaggtgtggtgtcgtatgctaatctggaggctgctaatctccagctaatctggaggctgaggcaggaggatagcttgaacctgggaggcagaggttgtagtgagtcaagatcacgacactgtgcttcagcctgggcaacagagtgagacttcatctcaaaaaaaaaaaaaaaaaaaaaaaaaaaaaagcacggggcaaaggtgtggagagagattcagctagcccctgtttcttccagttactccagctgaggcatcagatgtgtgggtgaagaaaccaccagacgcggtggctcacgcctctaataccagcactttgggaggccgaggcgggcggatcacgaggtcaggagtttgagaccagcctggccaacatgctgaaaccccgtctctactaaaagtacaaaaaagaaaaaaaaaatagccgggcgtggtggcgcacgcctgtaatcctagctactcaggagactgaggcaggagaactggttgaacacgggaggcggaggttgcagtgagctaagatcgcgccactgcgctccagcctgggcgacagagggagagtcagtctcagaaaaacaacaacataaaaacagactgatcatctgtagtttttgcacaactgatcacgccctccactatcttgttcggcggtctcggcggtctggaatcctcctaggccagcgaaccttactgaacactggcgaggactccgcctctaggaatagaatcgcggggtaggtggggtcgtctggaggtagctggctccgcccggcccgcgggcgagtccggaatacagttacccacctcagttgcccaccggaaagcaaagggagaggaacccgccagaccagaaacggaagagagcgcgggggatgtgtttggcgtggggcgcactgttcagttgctctcctggatggctttatgtctccgcggtgtttcctagagtctcggcgtttctacctcttcgcaccctttcctgccaccctttgtcccctggaagcccggagacatcagcggctgcaattttgctactcgctgctcggc

SEQ ID NO: 11429 - DNA, 2300 bp, Homo sapien
aaaaaaaaaaaaaaagaataataattattttcttagattgtaccatatattgaatattatgagagtcctgtgtacttattatgaggatactagtttggcaattgttttttcattctaattttaaagtgcctgatttgatagcctctgacgttttcataagcagatcagatagtttcagcattttttgaaattgccgttttctctttcatgcaagtgtccttagcctgtggctactattttctggctttgagaacttgatatagtatttaacctaaggtctgatacaggctcttgagctcacctgcatcagaagcacctgggtcttatttaacatgctgattcctgaaccccattccaaacttacaaactaagaatcttaggaatctgtgttttaagtcagctgcctatgtgatttgtataacctctagagattcataaccactgacctaacgtctgtgggcagcagtttgttctgtaaaacgagaataataaaacctatcctttaagattgtaaggattaagtaacataggtaacatagctactgtaatgtggtcccctgatcagcagaattagcaacacctgggagcttgttagaaatgcaaattctcaagtgtctcctggaaacagctactgaatcagagtagtttggtgggaccaaagaatctgtattttagcaaggagcatagatactttctgtgggccaggcacagtggcccaggcatgtaatcccagcacttagggaagcctaggtgggtggtgggagttctaagtgggcagatcccaggagttcctgtgcaacatgggaaacccatttctacaaaaaattagtcccaactactcaggaggctgaggtgggaggatcgccggagcctggggaagtcgaggctgcagtgagccaagatcacgccactgcactccagcctgtgtgacagagcgagaccctgtctcaaaaaaaaaaaaataatttctatatatattaaagtgtgagaagcagtgctgtagcacatcagcttcatataagtagggactatgaaattcttatttactaatatattgtcagtacctagtatagtgcccagcacagagtagatattcactatatttaatgaatgatttttaaatatattataccctcttactgaaactaacacattcaaagagtttttaaagttctttagtaatcaagtgccaaaagaggtttttaactccacagaataaaactggatatttgagttacttagaattaggacatcttttgcatgagtctagtatagatgtaatcatttgtggtgttctctttcataaatgtatctaatgaggaaagcaaaaatgacatttatagccatcgattattttcttttctgttccattttagcttagcttacaagtggttatgggttaagtggcatgtagcttgatgagaatgttgatcagattaaaacaagacccactcagttttttttaaagtaatctttttgatagaaatttatttttgtattatttaattataactttttaaagaggtgttatgttaagatcaaggacttgcagtcagtcagatctgggtttgagaataataaattgtcatttattaaccatgtcagagtttttctaccgaactctggggtaaatggtgggaaggaacagatttgggagcaccagcacccccaggcctcccctggccaccccaaggagcaggtgatcaatatctcagcatacctctacttatttgtggcaccccagtgtgtcttaggccttaatgggctgtgaggtgcatgaccttaggtaagttacttctctgattttcagtttccttatctgcaaaatggagaccttagggagttaatgtgggtatgagaaatgtgcataaaacatattgcacgaggttgaggcatatagtatgtgctaataaatggtaagttgctgctgctatggttgttaataattataaaaagcaaatggaaagggcttgaattgaaaaaaaatttagatacacggttttttgctttattagcctgcattgtatttttcattttttttctttaatgcatctttccaggacaaaaaataatatccaaagatattttggcactaacggcgctatctgtagcaagaaagttgagcagtgtgaactgttgagacttccaaggagacttcagacaaccaagacagtgtaaaggaaaacagagaaaaagacttgttagacattattaagggcacgaaagttgaattgagcacagtaaatgtacaaacaacaaagccacccaacagaagttcacttaaaagctacaactggcgg

SEQ ID NO: 11430 - DNA, 2300 bp, Homo sapien
gccatacatatatgtgtattggtgcatggcagaggctggtgtacacacattagtgtatggctgagccataaccggagcatacctgagactaaccctatggtctaagaagaacttacgtttggagtcctgggctaaggaatccaggagcagccaacccagagattcactccttatctatgaaggacatccacatccctggcccgtatcttacgctgtacagatcaaggccctttggggttaaatggaggttgctagaaggagagtgctaagtgaaaatgctatatagactacgtgctttttacaaatggtagcagttctccaggtcagccctccaccaccggaccacccttgtatgtaaatcctgaataaaccttgtctccttcactgactctgcctctcttcttacagtgccatcccaactggagtcagtggggtccagaaggacaattggccatttagataacatttgaaaactaaccaaggtaattcacagtaacattaaaaaatacaaatgaacatttcaataaaggcagaaaaagcagttgatattcaatgctttcctcctgatgttatgaccaagacaaggaagtccattatcactgtttttattcaatagtggaaacactagccagcaacaaaaggcaaaaataaataaaaataaaaggtataaaggttacagagaagttaaaccatctttattcgtggattgcaagattttgatcacagaaattccgaaagaatctacagagtattacaaataacaagggaacttagcaagatgcttgcatataaggtcagtatgttaaaatcaatattgtttattcttacgagtagaatataaaaaagtcaaaatgccatttaacattgtatacaaaacactaaatactcaagaataaatctaatgaaagatatatatgatctctatactgcaatctatccaagcacagctgcattaaaatatagatatatgtgcaatctacaaaatattgccaggagaaattaaagaccgcttaaataaatggtgggggaagaatgatattcatggattgaaggacttgttgttaagatactagttttcccaaacagatctatagattcaatgcgagcccaataaaaaatcccccccctttttaacaagctaattccaaaattcacctagaaatacaaaggccgtagaataagccaaaacaatcttgggagaataagttacaggacttaaagatttattataaaactacattaaattaacatagtttggtactggtataaagttagacaaagactactccctcccgctcctcaatctgcccccatccctagaacgtgctggcagctttctccatccgatctgcaagggttaaagggcgctgaggaagggctgaccgactggggtgggaaacaaagcggcactgagataacttcaggccaccttcctcccctcagtaccttcggatgaaaggtttcccttcttggtctgggaagcccactaagaagaaagcctgggctgtggcgttctggggaagtgaatagtacggccgccgggcgcgtcgccccaggaaccagaaggctttttgccgctattagtgcagaatgacttccggcaagtcccagtcgtttagaatccccagcccaaagatcgcggggatccacgcgtcatccgggcctctgctcccggaagagaccacgcagccgctaaagacgtaatggaggcgaaagggcttggctagctgtggcagccatgataaaaactagggaaaatgggagctcgaagtagcttccgttattaacagacatacaaacgcccctaaccgccacacgttccttagggatgacagtacgttacaaaagtgcttctaaagtactactgaaagctccgtgggagtgcccgctggcgtgggcgcggtggaagggaggaagaacgtgtacgccccaggcctccgtaaccatggctgcgaggggcggggactgggagcgcgggtcctgggccggggtgcggctgggaggaatcggtcctccactgtcccagccggccccgcgccggcgtgtcgcctcccgtccccctagcagcacgctgcgtggctgctcgctggctatttaggacggaagctcggttggtgtttctccagaagtttcccccttgggcggtggtggaggtggtaaccgtgatagtagcagctccggcggcagcaacagcgactacgagggatggcggcggctgcagcaggaactgcaacatcccagaggtgcatgtttttctttccctttggtatttattttatccccctttccttggctagtga

SEQ ID NO: 11431 - DNA, 2300 bp, Homo sapien
ggggaggaaggactttattgacattctgaaaagcaggtcttcacacctttctcaatctgttttcagtaagtggtcactgggcatgaagaagcataatgatttttacctttgtagtacaaatcaggctgcggctgtagtccaattaccaataagttactctcctagttacagggctgacagtgttgcttggcagatacagctgaggaggaatagcttatttatgtataatgacataaagtctctcaggaacaaggactgtctttagaaattgaaatattagatcaagaggatgagcaggtattttatatttttgacatttcagttttgcatcccaccgtttgatagataaacaactttcctaaggaaaatagaagttttccaaaacacagattctgagacgacagaaaggtcttgatgccatgatctcactacactctcatattcagaatataccttattattgtgtattccacagtaaatccctaatactggtgttttccaattaaagtctataaaaatgatacagaattttaaaaacctggttttcaggtgaacactcagatccctccatttaatgaaatacacagcaagcctaggtctctggagaaaagagacgaaggaaaggcaccgtaatgacatgtaatggtcacactgttctcaggaagcagctacttcctgcagttatgaattccacgtttagtctttaaaactgctgttactctattaacgaaagaaatatgcgtcaatggttctgcatatcatctcccacccccatggctcagcaacctgtactgggttctaaaaataaagagaatgatttagtgatcccagcccagaagagcatatggtcttatgagagatacagataatcaaggcacaccagacaaagccttgataaagatggaagcaatgggcttcttggagaatgtctactctctagattttcaaggatgagcaggaattagccaagtgaaggtgacagaagatttgcattccaggcagagggagtttgagtaagaccagaggtgtgaagtgaagctgcatggtacaagcaggaaaacagcattcaggtcggggtaggaaatatcaagatgaaaatgtaggcagaagctttaagtggcatgttaatctggggagtgtgtgtgtgtgtgtgtgtgtgtctgtgtgtgtgtaggaaataggaaatgaaaagttgcaggcaaggagggagctggttaagttttcaccttagatgaatcccccttggtagcttcccatgtgaaaactgagcaggtgccatacaggccaaagaggcatcttaataaggacagcaggtcataagggaaggctgacttttgaaaagatgctccctttcaaagcttcataattagatgaaaatataggaggtgcgtaatttacttctaacaggccaagggattatgttgtgttatgaaacgtcactaaatacccaaggacatcaatttaacagaaaaaatcaggatgatttaataacagaggaaaaattcaaggttggattaaggataggaatgacaaaggagacttaaattgtattcaaggatgaaaataagggtctactttgaaagagaagtggacagatgagcattcaataaaggaagagagggcaacagggaagaattacaaatttcttcacaacttggtactactaatttctcaaattacttttaaccaggccagtctaaaagttgcaaatacagcccagtttgctgtgctgaatcttgactgaaatgttagtatgtgtgtatagacttatgtgtattattggtacttcattagatactcatttaattctcagtagtggtacaaaccaatcctgatggaacatctcaagttagatttcaaggtcctagtttgactcggaatggaaggaaatatgtgacagctgccatttagtcagcacatggaaaatgttttcattttctggctgcaaaaacttgtgtgtttttacacctccccttccaccagcacctcaaataactgtgacactaaaaaagtagatataatactaagaataaccacttaacccactcaacagtttcttacatcagattttattatactgaaatacaagctacatttttacaaaatagaaattctttgtgagtggattgacttaattttatttctgtataagctaaatatgttgatctgttttatgaacatgtattttataaaaatggtcacaatatattttttaagttaactgatttattgagggaggaggagagagttgaccaaagtctacatgcatagacagtcctaaaagcgtatctcaaacatga

SEQ ID NO: 11432 - DNA, 2300 bp, Homo sapien
tgtcaggagttcgagaccagcctggcgaacgtggtgaaaccctgcctctattaaaaatagaaaaattagtcaggcatggtggctggcgcctgtaataccagccacttgggaggctgaggcaggagaaccacttgaacctgggaggtggaggttgcagtgagccaaaatcgcaccactgcactccagcctgggcgatagagcaagactctgtctcaaaaaaaaaaaaaaaaaaaaaaaaaaaaaggcaaaataatgctgttgttcattcttcttacatttaagagaaatttctacttcttgcttcaccaactctctgtttccattctttgccattttttctactacatttttggtcttttggttttcctaggaaaacactatataagaaaactagttccttgtctgtggtataagttgcaaatatttttaatcactctgtaaccctttgcaatgtgtcttctgtgcccagggaagcaaatggaactactctctcgctggttcccatggcctcttggttgtgcccttccaaggcctttctctgtgctcattttttttcagcatttgacactgctgacccacccttcttgaatgtgcctttaaaattacatgtactactttatattgtaccatctcccacctctctgacagttacttctcttattccttcaccaaaattcctgtgaagaatgcccttgtgaaaagaggtctttgaactctgcctcagcagtgccccagggatgagccctggctggagatcttgctggagttttttccaagcaccttaagtctagtgtgatgtgcagacagctgtttccatagctgattccaatgcaggctcaggacatttccttggctcttttacttttcatccccacatcaagctcaacatgtctaaaactgtttcttccaattttttcacttccctagggttcctatcactctcccaatcctcctaggtctgaaaactcagttcccacagcccaggaattgccaagtcctatcgattcttctgtgaaagtggtctcctccacttctcccctccttcccagccccaggtcatcatgcttgtcacctcattcttcatcacatgtcttggatgattcttcaacactttctccttctgcagtcctgcacatgcaatctcccgctgccctttggggaagcctcaatccctctcatgcactagtgctcctcacttacacctcaccagagagctctgcacaaagctagaatcgaacgcaatttaaggaagcctggatccaaatgaagtaccatgtatcctggaactggaagatggcatttccaaaagtgaaaattttatatacatacatacatacacacacacacacacacacacacacacatttgtgttattcctttggatacatcagtactctgtgtgtgtgtgtgtgtgtgtgtgtgtgctttgccattgttgcttttgtttgcacttatttaatttattcaaccaaccagcatgcacttttattctggtctccccaactccttccctccagccctgctctgcttagctctcacttttgctgcagttgtacccagaccctagaaaaactggtggcaaggagccatccctaagaccctgctctgttttccagtcccaggggccatccagcaatgccaggccagtgagaaggtggcctaacccttacactcttaggccagtgtcccctgtccacctgcaccactctgttgtcttctccttcaccttccatgagccatcttccccccacccccaccccaacacacacctacaaagaccctgcaggaaatggcctccagccagttgtcacagcagagcccgctgacattctaagacatcctccggtgcatggctaattgctctggcacttgagtatttctttgggtcccaggattcagcatcccgctctgagggatgcaaccacccccacacattcagagtcaccgggatgctgtttggggggccagtagacaggatagagtgaggaggaaagggggcatccgggagtgcaggacgagcttcccgcggcgggagagagaagggaggagagaggtgaggcgctggaaggggtggggaccgctgggctggcccaggcgggaccgtgcaccgtgtgtgcgcgcggcgttgaaatgccctgcacgtcggggcagcgggacagatcccagggtgcccagggagtctccaagtgcctcactcctcccgccgcaaacatgacagagaactccgacaaagttcccattgccctggtgggacctgatgacgtggaattctgcagccccccggtgagtaccgccaggga

SEQ ID NO: 11433 - DNA, 2300 bp, Homo sapien
atgacgttagcctaggggcgctaaaggtcaccagccagccccaggttggggtgggagtgttgcggggctcggaaggaaaatagaaagttccttcgactgcgtgtaccccccaaggaatatctcttgggcggggacggtgggagggctacatactaaatcgcacttgggagatggaagacagcggaagaaagggctgcgatttgggctcctgtagggggcgctcctccttccacgtccccacgcggctgcagatgcctggccttattgcttttagcattcccaagactacaaggtggaagaggtggagaagggaacccagagacacacccctctgaggaagtctccagccactcatcatccccctccccagtcttataagagcttgtatttatggatggctggagctgcatgttccgctctctgacaattccaagcacctctcatccctgccacccagctccctgcttggtctccctactccaaggaaactcctgaccctcttctgaaaaaaaacccaaaacacactccctcgagtttgagggaaaggaaaacatggataggacgctgacagcaggaccaaaatcgggattctgaagaatgtttactgaattcaatctacttaccaaacctatcgcctaaaaagaaaaatttcttccagtgagtggcttttgttttttacctttcctccttcgtgtgtatttgcatagcctgctcaataaagcccttcagtaagaatcattaagaatccgtcttgttgcagatccgagctccatctccctggccgtcagggatgggagggggctatctgtggggcagcgcagcgcccggccagccccaggatccgcccagcccagattttggcagtgccgaagctccacactttcctaagcagatggttaagttccccccacgttcctgccaggtttcaacgtcacgctgtgattttgttcttctggaaccggacgagtgttgcttcccagagtggccctattagaacagaaagaaaatcctctaaataggcggaacaaggcatcaggaggaaaaagttctctaaatgcactttaatacgagccgggtattgtgtggaattcagcgcccatcaccgtttagccggagagttatggcagtgattggggatgaatagaggaacataatggatacatgtggcgtttgctcattatattcaagttagtccaactccgctgtggaaactgttcaactttctctccccttagcttgtcacagtgaaataatacagacattggggcctccaatgggatcgcctgccacaccattctatttccactgctaacgagggcttcataagcctttgatacagtctgatctttgaaacctttccaaatctcctcaagcttatgctaaatcctatttggaacttttttttccttgcctgctagctcccagggcttaagaaggccacttggacagtgacgtgcatactaacatatcgcggggctcttttctgaaagggaagtggcagctctgatcactggggctcacacgagcaaaacacaattgagtacacaaatttgaataaaatcaattttcccttatccttcaggcttcttaatcgagaggctattccaggcaccgtagctaggagagaaggaaagcagagcctcattcagcagagcaagtctgtgggtagggggctgcaagggtttggaagcgtcagaggtgcaaaatgcagagtgtgtgtgttggcaggggctgggggaaggcggaatcaggagccactggggtgaaaccccagcgtgttcgcacttagttctagccgcggcacggagggaggcaggcgacaattaacaaaaccatccgctccttttactcctggagccctgtgccaactcctctacatgcagggtgctgacaagaaaagggggaaaaagcaaaaggagttaaacaaaagaaagattccctaattttcctttcttgttttcccctctaagcctttccacattaaagggattgtcagaggcaggcggaggggcgacgcgagggggaggcggccattggctacccggctcgggtgattagcatatcggcggctataaaggcaaaggcggcgcgaggcggcgcagcttctgtaagagacggagaggcgcagagtgagggcgggtccgcgcgtcctcagagcccgctggaggctcggagctgctacccgcagacttctcccgcacagggctcgcaaagagcgtgattccgagagcctgagactgacgcccgacctggaaaccagagaagacttccttagcctttcggatcgcacttgaggctgg

SEQ ID NO: 11434 - DNA, 2300 bp, Homo sapien
tgagcacagtgggtggtggttcttccctggctaaggcacatttgtgcttgggagaactgctgtcccatttctgcagtattgccacccctctggtaaggggtcttctaatgaattggccataggagaccttaaaggtagtcatgactacaggctataccactgttaatgagattttctttctgacagggcaccaacatgctccttgaaaaaaggtacaaggaaggctcattacagccacatgcagaggctactagcaaatgagaacagatttgccatttgttttggtgggaatcgggaggaagaggggaattgtgctgggaggtagagacacattcttctccttatgtccatattcattgcattcaatcttagaataatggattcagtctcccagttttcattctcacacattctgtatgcattccctgccttggactggggatctaagtggttagaacatttgaccaaagaggccaaggctgaactgcttcccacagagaacaatgaactttacagcccacatttctccctatctgttcttcttcactctctatccatccatttgtggttttcctgtctccccttccccctccccaccaccccagtttctgaatagtgtaccaggggtttaagaccctgtttctcacattagcactgtgcttattctgagagtttgtgtggagcttctggggtggggtggagtggggcatgaaccttctctccttgttttgaacccagcaatcttacatattgatctagtctttaggaaattaaacaaacaatgaaaaagctgacatttttatggcacgtcaaaagtcataagcaacttcccatacaatatttcatttaattcaaacaatttaggaattgttacaaccctagaggggctaagtgacatgctcaaggccaccgactcattgtgacacagcttttttgtttgtttttgttcttttgagacagccttactctgtcacccatgctgcagtgcagtggtgtgaacatggctcactacagccgcaacctcccaggctcaggtgatcctcccacctcagcttcccaagtagctgggaccacaggtgcataccgccacacttggctatttttttcattttttgtagagacagggtctcaccacattgcccaggatggtctccaactcttgagctcaagccatcctcccaccttggcctcccaaagtgctgggattacaggtgcgagccagcatccccggcccagagctgggtcttaataccgagactaacacctttttctttctccagggaagaaggcagaggtcacaaaggtgtgtgaaatgttgagcagggcaaatggatcctggagcccagggtcagagctgctgagcaagagaaaatgcatcttatttctcagttttatgaagaataagcttgagatcttgaatgcctggctggctcacaagaagctcaggggcaatagaggtcaaagttttctggagagagaaactgctcctggggtcctccttgactgggtttgaggcagtgccctggcctgggagagcgggcactgggtcatcgggatccctttgtttatttgggtgttttctcttccctatatgaagcatacagtggtgagtacttgatagggcagagtcctacctggttggccagggaacaaaacgttgctggtctttccttcagagtggggttgttagacaactttgtctagaaacagtcactgtaaggaacaggtcaacgacaacttgggcaataggaactgaagagggaagctcagtcgctcctggaggagagccacagtccctaaggcaagttccctaactgtctgtgaaaagtagtattcagtaaaatgggggagagcactagaagtgctgtgaggcaaaggactgagggttgcttttcctccatggagcctccaaactctgtgtcatccacaaagactactttggtctcatctctttcaaggaagtaccaagtgggaaaccaaatattgggctttacaaagcacatttgagttaatgtttggcaggggatatctggatccaagggcagctcacagagtgggcctcactgacaaggtgtgggccatgactcagattcctgggtgtcctgaacctcctggggcagttcacacgttccctggccactccctcttttcctacatgctggccatggggaaatcaccactgggcactataagaagcccctgggctctctgcagagccagcggctccagctaagaggacaagatgaggcccggcctctcatttctcctagcccttctgttcttccttggccaagctgcag

SEQ ID NO: 11435 - DNA, 2300 bp, Homo sapien
ctccccttgttaaaatgcaatgcaagattttttttttgctagactgttattataataagctatttcttcaaaagtccttgatatgtcggtcttttctgtaaaagccttggcatgcttgagttggagtctttctatctttggagaaatgagtaaagctggtttcaagggaagctggcctctctgataggttcctggtgtatcttaccgagtctttattcatctctggcaaagacccttcccctattcaaaccctgctgtccacccctatgttcgacataaatctgcttgtttctcctccctactcctgaactgtttcccacgtagggatgtgattggaaaagaaaattgagaccaaggtaataaattttgactaaacacataaaaaatatgattggatacacacacatattttttttttctgctcatcttgaaacttaaattaaattaaaaacaacttagatgcaaaagccttgattggccccgaggccagtgataaaataagtcttcattatagaagcatctagacccagcttgatcaggcattatggaggttggtggccattaaatgcacaggacccattacaccacctgcagctggctgacctgaactttgagagacatggccagagtcacttctggctctgaagaccattgctgtctccttagaggtttcataaaaagtcccttcaggctgatgttccacaggtgagctttgggttggctttcagatgagatcattaaaaggcacagcaaattggctgccaagggttactctgtaaggcaatagtagtaataaaaaaatgttaattgtgctgggatcctcttggggaagttcaaaggggacaaaagaaaaacaggatctttcaaaagtgtcatttaaaaatatgcggtggcactgaagtgtgagtctgaatatcttaaatgaacataaaatattttaaaatgactttttctgcaaatggtaagctggaaaaaaacttttattaaaaaaaattgcacaaaaccttcaagctcatacgctattcactttctaacaaatggctggttcccattttgaaggatgttaatttgcaatttcccaggcgatgagaggatatgaatttgcatcatatattttcactgtagcccacatctttggtgattccctcattctgatgaaaaggaattggattgggttggggtgaaggtgaggaagagaaaatgagcagtagaaggaaagagaatgtgacattttcagatcacctactctgtgccagggacttggctcacattacttcgttaatactgaggacaaccctgtgaagtaggttatctctattttacagatgaaggaactaagaattaaggagatttcacatctagcaagtgctagaattgaaattcaaacttagcactctcatagcttctttatttccctttccttgcatagagataggaataatctcctttaagactccagaatggccgggcgcggtggctcacgcctgtaatcccagcactttgggaggccgaggtgggtggatcacgaggtcaggagatcgagaccaccctggctaacacggtgaaactccgtctctactgaaaatacaaaaaattagccaggcgtggtggcgggctgtagtcccagctacttgggaggctgaggcaggagcatagagtaaacccgggagccggagcttgcagtgagccgagatcgcgccactgcactccagcctgggcgacagagtgagactccgtctcaaaaaaaaaaaaaaaaaaaaaaaaagcctcgagaatggggaatcttcctttaggtaaagtctgctggcgtagtggttttcgtacaaccagtggcgatgtggctaaacgctgggtggtccccacctgtgaaaacaaagctgttttagcttgtttctatgattctattcatttatgtattggactccacttacttgcctgtaagtactctcgacaagccaatttctgtcactccagttgccaaaagctcagattccagcttgttattgatgttcaacttgttattatttgcagttgttttccaatttcaccggctccgtggatgaccgtgggacctgccagtgctctgtttccctgccagacaccacctttcccgtggacagagtggaacgcttggaattcacagctcatgttctttctcagaagtttgagaaagaactttccaaagtaagcattttcttttcaaacaatatcttgataaagagaaacaaaacaaaatgtgttttaatttaggattttataagcaatcattcttcactatcaaagacatcacgtttttattc

SEQ ID NO: 11436 - DNA, 2300 bp, Homo sapien
tgtccatgttgtgctaattgaagcaaggaatccctccctcaccaatggagtgaataggaggcaatcagaacaatggatggcaaaagcaggatggcccaaccaccaccaagaacttgtagctttagttatctgctctttgctaaccagctggttctggatagggccagaatgtctgcactataagtgactggatggagacagaaactgaaattcgtggcttaatgcagccagaaaccaaaatacagtgaggaaatttgtacagaaagaaaataagtaggtgaggggagcccaccctgcaggaaaaggcagtgttgtagcagaggctggtttctattccccagcctctgggctgtgggccagcactgttttgctgcatcactgggctgcctgtggctttgtcacaacagaggctaatcctcagggttagaacaataccccaaacaacaaaacactcatggtatccctgtggcatagcaaaggtgtttatgcaaacctgacttaaacctagggcccttaaaccataacaattgccacctgggaggcacctaagcctgacaatactgaggctctctggaagaagactttttataaatataggcagagtagaggcgaccctccctattgaagtatatccagtgacaaacagaaaaaaggagggagagaaagaaacctggatacaggaggagagaaaatttaaacatatgtgcatatacatgtttaaatttatgtaatttatatatatgtaattaaattaaatcataggtccacaatttggcccaatttgaaattcaaaatttactagaaataatttaaacagcaaaaagataaagaagtgttaattggctttagtgtctctatgatataggttctgaattcactttaacatctgttgaaattaacaattcatggaccttcatatacttcaacactggggctcaaattattgttatatctggaggtggggtgccactaactttacacaaggtaccgctataatcttgggagagttactgaatataaaataaagaacaaataggtatgcctcaccttaaccatcaaagctattgctttgggaaataaattcccatggtcatagcacccattgctctaaaatgtctcacagtaagcatggataatctgactcaatcagtaaataataaaaataaaaattagattaagtctttggcacctaaaaattggcttgacaaaatggaactacataacccccctagttaatatcattaatatggcccaatataaatttggattttaaagtatcaaacctcattatataagacctaattagtaacaggatgattatctccactgcttctccatttgacagcccaattttgtgctttcttatacctagaaagaataatagaagattgtagatcactacagtcttaatcctgtggttgcatctgctaaggtccccatactcaacaccaaatattattgaaattactttttaaaaatctaatcagcaatcagtaaatattttgctattataggtttagttaatgcagtctatttagtgcctattttggcagcctctgagatgcagtttgcctttccctctgaagggacccaacacacctttaccaggctgcccatggagtacaccagcagctttgccattgcacacagtctttgcaaggaatgtcttcaatgcatctacatttcccagaagcactgctatgaaactatattgatgacatcctcctgaggtcatttgacacattaattaaggacatgaaaatataaaatagcttataaaaagggaataggcaattgccccacatagtataaagccctgccaccttggctacatttttgaaaattattggtaaatcaagagatgtttcattcctgacagtatcaagaaacaaacagctattgaccttttcaaatgttaatacaagtccattgtttttagtaattttgggattctgaaggcagcatagtccacattttaaatttttacttgacatatttaggctgtcacttgaaatcagcccaccttaaatgagcccctcttaacaaaagattctagaatctgtccagttgaaataatcaggaattccccttagtgcccttagagagtcctttgttttagagcgtttagtaacattccttatgccactggagttgctgacttacttatgatggccacagttagttgtccacggacttctaatgcaagaagttgcctttcctcagacctgtgctatatatcattagagcggtaatagctggccacttactgggttctcctggaaagaggctttaacagactg

SEQ ID NO: 11437 - DNA, 2300 bp, Homo sapien
cagagtctcactctgtcacccaggctggagtgcagtggggagatcttggctcactgcaacctctgcctcccgggttcgagcgattctcccgcctcagcctcccaagtagctgggattacaggcatgcaccaccatgccctgctaattttggtatttttagtagagacagtgttttgccatgttggtcagtctggtctcaagctcctgacctcatgatctgcccgcctcagcctcccaaagtgctgggattacaggcgtgagccactgcacccggcctaaagttgaattttaatttcatcctgcagactatgtgccatggttacctgttgaatatgtgcacttgtgttgaggatgaggggcacaaggacatttttattatttatacttgtaatcaaagctatgatcacctcacacattctccaaaatgagaaaagaatagaataagaaagagtataaggaaatggtattttagagtgagaggtgagtaaaaagagaggttatcagtttgatgaccaaattttcatttcaggtcacttactaggctactgggctttgtggtaatttgttcatccttgtttcattaaattgtaattacttccgatatctctagctttatttctttggctggctcctctattaattaagccttaggatcctttaggagatgagtaattctccactggacagtgttaagtttaagttaagaggtgataaaataaaattaaaagagtaaagtcagaaattattatttaaaatagtttaagacgtaaaaatgagaaaggacaatgcacttctttttccattattcattttccccatcatagttgatgtttctattctcattcgtctatgaaaacatctatagtctagcttctaacaagtgttttttgcttgtgtgtatgtatatacacatgtgcttgcaagtgttttatgtagatttttacaggagccggatgaattgcctcagtgcattatcttggaacatatctgctatctaattactaacacttttctagagatgaaatttcagcagtcaaataagtaccatggtagatggcctatctggatctgatgccaaacattatggattacatgctgttattctgtgtgaacaaatattgattcacttgggaaaatgtagtcatgatttttcatgattgtccattttatttaagatattataaaacttagagagctggaagtaatcttaaagggatccttccatccattctcatgcttgagatgatgagaatgcttgagcattctcatgctcattctcattctgtttgcagaatttcagaccttgaaaggctcttcatgtgtatctccttcaactcttattttagaagagactaaatcaaaacatggggtttaggtgacctaccctagttattagcactatgaaaggtcatgattaattaaaaagataataacatgccatttaagacttacatctcttagataaatgaacttcccatctcgcattttggaaggaaattatgatgggacaaccgtcatacaataacttccaagagttttggtgcaaatttggtgcaaataaatacaaggaggtcctttacaaagagaagtcctgcctcataatgcagtctgaaaattcttgaatatacacaggtgtgtggggcacaaagatgagttgtgtttagagattcaattgagagtaaacaaagcgtgttcttcctgaatgattgctttattagttccctttggtcacatgtcttctcacctggatgatatgctctcctactttacagattaagactatgagaacttttcaggcttaaatacagataatgctattgggatccattccttctttattgatgccatcaacttgagtactataagcattatgtcacaaattcacattatgacatctaaagccctttgcagtcttctggcttcctacttctccagcttcaactgaaaatattttaagatagcatcctgtctccactccttacatctcagttatacttgtttggttttaatttttcaaatataaaatttattctttcccctaggacactttgcacatggtgtttcttttgagtctaacactttcccaccatttgcccaagtacgtgttattcatccttcagtactccgctaacacacactttcatctggaagaacttactctgtcccccattctaggtaagctcttcatgtaatcagtttccataattcctaggatgaatttttcgtcacactcgttacattagtgatggtgacaatgcacaggagaggatgaattaaaaattcactaggagattatctat

SEQ ID NO: 11438 - DNA, 2300 bp, Homo sapien
taggtttttggtaaggtttctggtcaacagtaggctctttgtagttaagtttttgggaagtcaaaagttaaacatgaattttcaactatgagagaggatcaatacccataattccaagggtcaaccgtgataatactatcaggtaaaatttttttagataagtatgtgcctagtactcttcaaagaactttacatttaatctttaccatgatcatgtaaaggaagtgcaattattatctttattttatagatgttataactgaggcagcccattctcccatggttttgaagagttttgcagtagacctaggacccaaatctaggacatctgacccttctttttttttttattattattatactttaattctagggtacatgtgcacaacatgcaggtttgttacacatatatacatgtgccgtgttggtttgctgcacccattaacttgtcatttacattaggtgtttctcctaatgctatccctccctgatccctccaccccatgacaggcccgggtgtgtgatgttcccctccctgtgtccaagttttctcattgttcaattcccacctgtgagtgagaacatgtggtgtctggttttcagacatctgacccttctataccgagtgagcttcactgatattgcatagagataagaaagtagagacctttcccaaagtgttctttgctgacttgttcatcacttagcaagtctcaggaggagtggccctgttaaaatttatcaatagtagttatacgctaacatatcttatgcataaatgaaaacagatgcagtacagagactgaattgccttcccaaaccatggtgagattcagtagttttattgggctcaggatagcgtaatatctgagtgtagaacgggaataaagattatctagatctgaatcttggctctgccctttaccataaatatgactgagttagctgcttaattccaagccgcttaatctctatgaggctcagttgcctcttaaaaggtatattaatgatttatatgtctcagtgtttttgcaaaagagtacacgaagtgcttagtaagttttcaataaatggaagttattatcattatcattattatgcatcttggaaggcccagaagaactcttaacgtgacaatagctgctgatgacgctaaagagagaaacaaaggagagctttttcttatttatgcatatcaaacctaaaagtgttaataaggaggcagcaggacagcaaaagaaaaaaaatgaaacagagaaagcaacatagctgtaagaaaggaatctcattatcaaacacatgtattcagggattttgagtatttatttcaaagtaaaaagcgttttttttattgaaaatattagtaaacaagtaaacatttaggagagataatgtaatgcccaatgaaaaccttcaatagtgcaactataagtagtagtcacttgttttagttatattaatgttaattttgtagtttaatatgtctttctaaagacgacatggatgggtatttttaaaaaagtatttgtcatgttattttattctttagtagaattttactatttgatggatacagcttgatgtccagtactatttgacataaaacacattgatgagtcattaggctgatcattgaaatcctgttgaaaaatatttttaaagtcacttgtaaataaaatatacaaatgtaaaactgaacaacattcatcagctaaatttagtttacaatttcttttaaacatttactggaaagtcaaaaatgtcaagcatattaaaatgctggcctgacagaagccctaagggaaaactgtcaggcctctgagcccaagctaagccatcatatcccctgtgacctgcacgtacacatccagatggccagttcctgccttaactgatgacattccaccacaaaagaagtgaaaatggtctgttcctgccttaactgatgacattatcttgtgaaattccttctcctggttcatcctggctcaaaagctcccctactgagcgccttttgacccccacacctgctccccctttgactgtaattttcctttacctacccaaatcttataagacggccctatccctgtctcccttggctgactctcttttcggactcagcccgcctgcacccaggtgaaataaacagccttgttgctcacacaaagcctgtttggtggtctcttcacacaaacgcgcatgaaatttggtgccatgactcggatcggggtacctcccttgggagatcaatccccagtcctcctgctctttgctccgtgagaaagatctacctagga

SEQ ID NO: 11439 - DNA, 2300 bp, Homo sapien
attgaaataccacgttatctgcacatacatttgctttgttcaggggacatacttgtcaccagtcaagcttggcatctacagagtggaggcagtgaaatgtgggcttgccacaactctccatctagttcttaaaaacctgattcagtgttacccaagaggctatgaaacatgagcagtaagaaagatcactaataatgaagtcctggcaggcagccaatcttcctgcagtgaagtcctgctcactttaatgtagttccactgggctggatacatgtagaggatgaatgacagcaggatgctgaaacagctgctaggtgatcagctgaagtggcccaaatgaatgtgggcagggaaggaggagtgtagatgttagaacatttgctaaaggactgtgaaacaacacctagagcatcatgataccaactagttgtagactggtacagcacaaaagcatcagagaatccatcttggcctataattttcacataaaatgatttttttgccaaataatagaaagccaaacaaaacactctgttaaaattatttcctagaatgccacatcgactcttattttgatgtgaaagctcttaaacagtcaacagatatctacaggttttgagttttcctctagaaaatcagcaggttccacatttccagacttcagaatatgttcctttagcttcatttttagatcctgtaaatcagcatgagaaaaggtataacaagagctaaggcaaggtaataaaaaaaataaaatagcaactaagaagtaaaaaacctgcactattttcctaacaattaagtcctctcctggtaggctttgcatatttttggaggcaaaattagtcttaagttgggaccaagcacggaaattgtctgaaagaatcaacattatgttggtagaaaaatatgtggaagaatgtttactatttagaggaaatatcctccatctgattgcttatttatataaagacagttatcttcaaatataataggtcacaacctattgaatggttgaatgacccatgctggactccatgtttgaagctgactacttgattctgccttatatattaatgtacagtttgcatctgcaattggatttgactcatatgtatattttggttttgtccttaaaatcaaatattttagttatatcccaagctctgtaacaaacattctttcatttctttacatttctcttgcacatctatgcactcaacatactgcaagatactgagggtacaacaataaataagatatataatttctaaactcctagaacttgagtacttattgtttaaagcttactttacttggctttgtgataccaggtcacacaattcatgacatctactcaaagaggcacacaattttactggagaggaataaatcacatgaaaagaaaataaagaaaggcaatatttataattatttaatgagtctttcagagcaggcaaacttttctacaaagggccagtcaatgctttacaccatgtgggccaatagtctctgttacatctactcacctctgcccttgtggaacaacagaagtcagaaacaataagtaaactaatgggtgtgactctatttcaaatcaaactttattgacaaaaacatgtggtgggcttgatgtagcccatgggctgtagttggttgacccctgtttcagaaaataatttccgtagcagctggtgaagagatggaaatcatagcataagatcacagagaaggtccactggatctcaaagacaggaagaaaaaagtggttcacacccattttacagaatttcagcaaaataactagaatatactctgcaacttcttttatacagtacatgaatttattcatctcaacccaaactttgctacccatattaggtttaactcatcttttctagcccaactttttctacatgagaccttattttttccattggttttaagcttgatccctagagaagacttattctctgaatactaggtacttttttgacaatcataaactgattgctttaaggttcaggtctcagtttgtatcggcaggtaaacactgattcccatacttgatgctggctgaatataagcagaaaaagaatgatgtatgggatgagtgtacataagagtagtaggaaatgagctgtaatgggaagactaaaaactgggaaatattctcaaagttgaaagaggaataatggtaaaaagtacagtcatgcattgcttaataatagaattgtgttctttaggcaattttgtccttgtgtgaacaacatacaatgtacttacacaaacctagatgg

SEQ ID NO: 11440 - DNA, 2300 bp, Homo sapien
actgatacaaaagttgaaggattgtgggatgggtggagcaggggtgagggaatttttttctttaatttttgtttaaattatgctttaagttctgggatacatgtgcagaacgtgcagctttgttacataggtataaaggtgccatgatgttttgctgcacccattaacccatcatctacattaggtatttctcctaatagtctccctcccctagattcccagtccctcacagaccccagtgtgtgatattcccctccctgtgtctatgtattcacattgttcgacgcccacttatgagtgagcacatgtgatatttggttttcttttcctgtgttagtttgctgagatgggaggttgacaaagggacacggaagccaactaaaggagctcccggtggccaaagctggaaacattgagtaacaaagtaattacctaaataattaataattaaatagttaagtaaaatacttgacaaaataattagttcaattattaaataattcatcccctgaagtactggagtgtaaaccaaagcatacaataggtgtccataagtccatacggatataaataagtgattaaataaacaaacatgtgggggagaatgggaaaatcctccacacaggagaactccacagaacttaggtagctattcccctgcaaggagataaagcaaaacttcccttttctttacgtataggctacaggtagcgacttccagaaagcacagtagagaaagaggtgggaaaatcactttatggtggagaaacctaatcaacactgccccagcccggtgaccaggactaatagcagcagtgataagccggcttgatggtgtgtactctagacaggatgggatgggaatggcgctttcccgctgcaatcttcctgacaaaaacatataattccagtcagatcacaaggaatacatcacacgaacttcaggagaggacatcccacaatatatctgatcagtattcaaagtgtcagagtcatcaaaaacaaggcaagtgtgagaaaccgtcgcagccaaggggaaccgtgacgagttgtaaggtggtaccctggatggggtcttgggacagaaaaggtatgtgaggtgaaagcatagcaaaacctcacttcaacaggaaatacaacccaaaaaagtaattggcccggcatggtggcttgcgcctggggtcccagcgactcgggaggttgagcgggacggacggcttgagctcaggccttccaaacaagcctgggcacatagcgaaaactcgtctctccaaaaaaatccgaaaattatcccgatgtggtggcgctcacctgtagtccagctactccggaggccgagacaggagaatcacttgaactgattctcctatctcagccacccccccccaacccccccaagtagccgcagcgagccgagatggcaccgctgcactccagcctgggctacagagcgagaaccagtctctgtaaaaaacacaaggatgcaaaccaaccaaataacccactgtgggatcccctccagcgtcctgctgtgtttcccgctgtcttcctccacccgtgagtgcacccacagcaataaaagccagcggtgtgggtctcacacgcatctccagccccgtctcacacgcaccacctccgggcctggacttggcctcccgtccattcccagaatgtgccgggctcccttccagtccgggcctcagcacactctcttcactccccttcctccctccctgcctctcccaacccggttcaggatgactaatttcaaacgttatgttccagatttcagcccagatatccccgctttggatgctttccttgaccatgctcagatctaagctaatcgcatcttcctgtcagccgctttcagggcaccacacctcattgtgctgacactcagaggtcattatgcaattttttttcctcgatgattagattaatcaatcaaccacggacgtctagaaatggcggcatctcagaagggcccccatttgactggcaggggactggcccaatgcgcctcgcaagcccagccaggcccgccccagccggcccccctctgacgacgcctgtcccttacgcgactgccttgctgccatataagagggacggcgctcggcctccagcagtcggctttctgctgggctcggagccagaacctgctgcgtgctccctccagactccctggctgcgggtggactacctcagagctacagcggtgaacctgtggacacctccgactcctcgggcctctcttcgtcgaagagtctcctaattttcagatctccggagccagc

SEQ ID NO: 11441 - DNA, 2300 bp, Homo sapien
gacaaaataattagttcaattattaaataattcatcccccgaagtactggagtgtaaaccaaagcatacaataggtgtccataagtccatacggatataaataagtgattaaataaacaaacatgtgggggagaatgggaaaatcctccacacaggagaactccacagaacttaggtagctattcccctgcaaggagataaagcaaaacttcccttttctttacgtataggctacaggtagcgacttccagaaagcacagtagagaaagaggtgggaaaatcactttatggtggagaaacctaatcaacactgccccagcccggtgaccaggactaatagcagcagtgataagccggcttgatggtgtgtactctagacaggatgggatgggaatggcgctttcccgctgcaatcttcctgacaaaaacatataattccagtcagatcacaaggaatacatcacacgaacttcaggagaggacatcccacaatatatctgatcagtattcaaagtgtcagggtcatcaaaaacaaggcaagtgtgagaaaccgtcgcagccaaggggaaccgtgacgagttgtaaggtggtaccctggatggggtcttgggacagaaaaggtatgtgaggtgaaagcatagcaaaacctcacttcaacaggaaatacaacccaaaaaaataattggccgggcatggtggcttgcgcctggggtcccagcgactcgggaggttgagcgggacggacggcttgagctcaggccttccaaacaagcctgggcacatagcgaaacctcgtctctccaaaaaaatccgaaaattatcccgatgtggtggcgctcacctgtagtccagctactccggaggccgagacaggagaatcacttgaactgattctcctatctcagccccccccccccccccgccccaccccaagtagccgcagcgagccgagatggcaccgctgcactccagcctgggctacagagcgagaacccgtctctgtaaaagacacaaggatgcaaaccaaccaaataacccactgtgggatcccctccagcgtcctgctgtgtttcccgctgtcttcctccacccgtgagtgcacccacagcaataaaagccagcggtgtgggtctcacacgcatctccagccccgtcgccatcgcgctgagctcgactctttttacaaaaggccacttgacatcctcacttggcagttcaaaagccccttcaaccagatgtgcgcaagccaagctccgcaacttcccgttcagagcaggttctcggtccacctctgcctgaatgaaccggcgggctaccaaggccgcagtctcttcctcaagggctgtccacactgggtctcgctttctcttggaaatttctctcccaccagggaactttctcctcctctacctccctgagtctcagtctaacagcaccctgcgcccaaccccgagggctgcaatagccttcttgcctctcctgacttattctgcggaccctgggttggcgctccttcacagccaggctggtcgtttctgaaatgttaacccgctgccggacaccgttccacggttttccgctgccttggaacaagaccagctcctgcgcggaccctgcctccacctcgcaccacctccgggcctggacttggcctcccgtccattcccagaatgtgccgggctcccttccagtccgggcctcagcacactctcttcactccccttcctccctccctgcctctcccaacccggttcaggatgactaatttcaaacgttatgttccagatttcagcccagatatccccgctttggatgctttccttgaccatgctcagatctaagctaatcgcatcttcctgtcagccgctttcagggcaccacacctcattgtgctgacactcagaggtcattatgcaattttttttcctcgatgattagattaatcaatcaaccacggacgtctagaaatggcggcatctcagaagggcccccatttgactggcaggggactggcccaatgcgcctcgcaagcccagccaggcccgccccagccggcccccctctgacgacgcctgtcccttacgcgactgccttgctgccatataagagggacggcgctcggcctccagcagtcggctttctgctgggctcggagccagaacctgctgcgtgctccctccagactccctggctgcgggtggactacctcagagctacagcggtgaacctgtggacacctccgactcctcgggcctctcttcgtcgaagagtctcctaattttcagatctccggagccagc

SEQ ID NO: 11442 - DNA, 2300 bp, Homo sapien
aaaataattagttcaattattaaataattcatcccccgaagtactggagtgtaaaccaaagcatacaataggtgtccataagtccatacggatataaataagtgattaaataaacaaacatgtgggggagaatgggaaaatcctccacacaggagaactccacagaacttaggtagctattcccctgcaaggagataaagcaaaacttcccttttctttacgtataggctacaggtagcgacttccagaaagcacagtagagaaagaggtgggaaaatcactttatggtggagaaacctaatcaacactgccccagcccggtgaccaggactaatagcagcagtgataagccggcttgatggtgtgtactctagacaggatgggatgggaatggcgctttcccgctgcaatcttcctgacaaaaacatataattccagtcagatcacaaggaatacatcacacgaacttcaggagaggacatcccacaatatatctgatcagtattcaaagtgtcagggtcatcaaaaacaaggcaagtgtgagaaaccgtcgcagccaaggggaaccgtgacgagttgtaaggtggtaccctggatggggtcttgggacagaaaaggtatgtgaggtgaaagcatagcaaaacctcacttcaacaggaaatacaacccaaaaaaataattggcccggcatggtggcttgcgcctggggtcccagcgactcgggaggttgagcgggacggacggcttgagctcaggccttccaaacaagcctgggcacatagcgaaacctcgtctctccaaaaaaatccgaaaattatcccgatgtggtggcgctcacctgtagtccagctactccggaggccgagacaggagaatcacttgaactgattctcctatctcagcccgccccgccccccccccccccccccccaagtagccgcagcgagccgagatggcaccgctgcactccagcctgggctacagagcgagaacccgtctctgtaaaagacacaaggatgcaaaccaaccaaataacccactgtgggatcccctccagcgtcctgctgtgtttcccgctgtcttcctccacccgtgagtgcacccacagcaataaaagccagcggtgtgggtctcacacgcatctccagccccgtcgccatcgcgctgagctcgactctttttacaaaaggccacttgacatcctcacttggcagttcaaaagccccttcaaccagatgtgcgcaagccaagctccgcaacttcccgttcagagcaggttctcggtccacctctgcctgaatgaaccggcgggctaccaaggccgcagtctcttcctcaagggctgtccacactgggtctcgctttctcttggaaatttctctcccaccagggaactttctcctcctctacctccctgagtctcagtctaacagcaccctgcgcccaaccccgagggctgcaatagccttcttgcctctcctgacttattctgcggaccctgggttggcgctccttcacagccaggctggtcgtttctgaaatgttaacccgctgccggacaccgttccacggttttccgctgccttggaacaagaccagctcctgcgcggaccctgcctccacctcgcaccacctccgggcctggacttggcctcccgtccattcccagaatgtgccgggctcccttccagtccgggcctcagcacactctcttcactccccttcctccctccctgcctctcccaacccggttcaggatgactaatttcaaacgttatgttccagatttcagcccagatatccccgctttggatgctttccttgaccatgctcagatctaagctaatcgcatcttcctgtcagccgctttcagggcaccacacctcattgtgctgacactcagaggtcattatgcaattttttttcctcgatgattagattaatcaatcaaccacggacgtctagaaatggcggcatctcagaagggcccccatttgactggcaggggactggcccaatgcgcctcgcaagcccagccaggcccgccccagccggcccccctctgacgacgcctgtcccttacgcgactgccttgctgccatataagagggacggcgctcggcctccagcagtcggctttctgctgggctcggagccagaacctgctgcgtgctccctccagactccctggctgcgggtggactacctcagagctacagcggtgaacctgtggacacctccgactcctcgggcctctcttcgtcgaagagtctcctaattttcagatctccggagccagc

SEQ ID NO: 11443 - DNA, 2300 bp, Homo sapien
acaaaataattagttcaattattaaataattcatcccccgaagtactggagtgtaaaccaaagcatacaataggtgtccataagtccatacggatataaataagtgattaaataaacaaacatgtgggggagaatgggaaaatcctccacacaggagaactccacagaacttaggtagctattcccctgcaaggagataaagcaaaacttcccttttctttacgtataggctacaggtagcgacttccagaaagcacagtagagaaagaggtgggaaaatcactttatggtggagaaacctaatcaacactgccccagcccggtgaccaggactaatagcagcagtgataagccggcttgatggtgtgtactctagacaggatgggatgggaatggcgctttcccgctgcaatcttcctgacaaaaacatataattccagtcagatcacaaggaatacatcacacgaacttcaggagaggacatcccacaatatatctgatcagtattcaaagtgtcagggtcatcaaaaacaaggcaagtgtgagaaaccgtcgcagccaaggggaaccgtgacgagttgtaaggtggtaccctggatggggtcttgggacagaaaaggtatgtgaggtgaaagcatagcaaaacctcacttcaacaggaaatacaacccaaaaaaataattggcccggcatggtggcttgcgcctggggtcccagcgactcgggaggttgagcgggacggacggcttgagctcaggccttccaaacaagcctgggcacatagcgaaacctcgtctctccaaaaaaatccgaaaattatcccgatgtggtggcgctcacctgtagtccagctactccggaggccgagacaggagaatcacttgaactgattctcctatctcagcccccccccccccccccccccccccccaagtagccgcagcgagccgagatggcaccgctgcactccagcctgggctacagagcgagaacccgtctctgtaaaagacacaaggatgcaaaccaaccaaataacccactgtgggatcccctccagcgtcctgctgtgtttcccgctgtcttcctccacccgtgagtgcacccacagcaataaaagccagcggtgtgggtctcacacgcatctccagccccgtcgccatcgcgctgagctcgactctttttacaaaaggccacttgacatcctcacttggcagttcaaaagccccttcaaccagatgtgcgcaagccaagctccgcaacttcccgttcagagcaggttctcggtccacctctgcctgaatgaaccggcgggctaccaaggccgcagtctcttcctcaagggctgtccacactgggtctcgctttctcttggaaatttctctcccaccagggaactttctcctcctctacctccctgagtctcagtctaacagcaccctgcgcccaaccccgagggctgcaatagccttcttgcctctcctgacttattctgcggaccctgggttggcgctccttcacagccaggctggtcgtttctgaaatgttaacccgctgccggacaccgttccacggttttccgctgccttggaacaagaccagctcctgcgcggaccctgcctccacctcgcaccacctccgggcctggacttggcctcccgtccattcccagaatgtgccgggctcccttccagtccgggcctcagcacactctcttcactccccttcctccctccctgcctctcccaacccggttcaggatgactaatttcaaacgttatgttccagatttcagcccagatatccccgctttggatgctttccttgaccatgctcagatctaagctaatcgcatcttcctgtcagccgctttcagggcaccacacctcattgtgctgacactcagaggtcattatgcaattttttttcctcgatgattagattaatcaatcaaccacggacgtctagaaatggcggcatctcagaagggcccccatttgactggcaggggactggcccaatgcgcctcgcaagcccagccaggcccgccccagccggcccccctctgacgacgcctgtcccttacgcgactgccttgctgccatataagagggacggcgctcggcctccagcagtcggctttctgctgggctcggagccagaacctgctgcgtgctccctccagactccctggctgcgggtggactacctcagagctacagcggtgaacctgtggacacctccgactcctcgggcctctcttcgtcgaagagtctcctaattttcagatctccggagccagc

SEQ ID NO: 11444 - DNA, 2300 bp, Homo sapien
tatttgacaaaataattagttcaattattaaataattcatcccccgaagtactggagtgtaaaccaaagcatacaataggtgtccataagtccatacggatataaataagtgattaaataaacaaacatgtgggggagaatgggaaaatcctccacacaggagaactccacagaacttaggtagctattcccctgcaaggagataaagcaaaacttcccttttctttacgtataggctacaggtagcgacttccagaaagcacagtagagaaagaggtgggaaaatcactttatggtggagaaacctaatcaacactgccccagcccggtgaccaggactaatagcagcagtgataagccggcttgatggtgtgtactctagacaggatgggatgggaatggcgctttcccgctgcaatcttcctgacaaaaacatataattccagtcagatcacaaggaatacatcacacgaacttcaggagaggacatcccacaatatatctgatcagtattcaaagtgtcagggtcatcaaaaacaaggcaagtgtgagaaaccgtcgcagccaaggggaaccgtgacgagttgtaaggtggtaccctggatggggtcttgggacagaaaaggtatgtgaggtgaaagcatagcaaaacctcacttcaacaggaaatacaacccaaaaaaataattggcccggcatggtggcttgcgcctggggtcccagcgactcgggaggttgagcgggacggacggcttgagctcaggccttccaaacaagcctgggcacatagcgaaacctcgtctctccaaaaaaatccgaaaattatcccgatgtggtggcgctcacctgtagtccagctactccggaggccgagacaggagaatcacttgaactgattctcctatctcagcccccccccccccccccccccaagtagccgcagcgagccgagatggcaccgctgcactccagcctgggctacagagcgagaacccgtctctgtaaaagacacaaggatgcaaaccaaccaaataacccactgtgggatcccctccagcgtcctgctgtgtttcccgctgtcttcctccacccgtgagtgcacccacagcaataaaagccagcggtgtgggtctcacacgcatctccagccccgtcgccatcgcgctgagctcgactctttttacaaaaggccacttgacatcctcacttggcagttcaaaagccccttcaaccagatgtgcgcaagccaagctccgcaacttcccgttcagagcaggttctcggtccacctctgcctgaatgaaccggcgggctaccaaggccgcagtctcttcctcaagggctgtccacactgggtctcgctttctcttggaaatttctctcccaccagggaactttctcctcctctacctccctgagtctcagtctaacagcaccctgcgcccaaccccgagggctgcaatagccttcttgcctctcctgacttattctgcggaccctgggttggcgctccttcacagccaggctggtcgtttctgaaatgttaacccgctgccggacaccgttccacggttttccgctgccttggaacaagaccagctcctgcgcggaccctgcctccacctcgcaccacctccgggcctggacttggcctcccgtccattcccagaatgtgccgggctcccttccagtccgggcctcagcacactctcttcactccccttcctccctccctgcctctcccaacccggttcaggatgactaatttcaaacgttatgttccagatttcagcccagatatccccgctttggatgctttccttgaccatgctcagatctaagctaatcgcatcttcctgtcagccgctttcagggcaccacacctcattgtgctgacactcagaggtcattatgcaattttttttcctcgatgattagattaatcaatcaaccacggacgtctagaaatggcggcatctcagaagggcccccatttgactggcaggggactggcccaatgcgcctcgcaagcccagccaggcccgccccagccggcccccctctgacgacgcctgtcccttacgcgactgccttgctgccatataagagggacggcgctcggcctccagcagtcggctttctgctgggctcggagccagaacctgctgcgtgctccctccagactccctggctgcgggtggactacctcagagctacagcggtgaacctgtggacacctccgactcctcgggcctctcttcgtcgaagagtctcctaattttcagatctccggagccagc

SEQ ID NO: 11445 - DNA, 2300 bp, Homo sapien
tacgttattctgcaagcatactgcgattcccgattccgtgtatgtaggaccacaaaaaaattaaatcgctgttaaacttttttttgtaaattctcttttccgaaggaaggcgctggaagagctactcccggtggttaaaggcccgggagacctggtggcgaatcctggggcgcgtccgctttggcggagcgctgggctccgctagccggactggttccccatctaactgatctaatcaatgactccgaagagccggggctcctggccccgcccccgccatcctcttctccgcctcccattggacgcgggccgagaaggcagggccttgctcctcgctcggattggctgacagggaatcagtatcaatgtttaagcggcggcgtgaggtgaatagagtcagtcagcaagagacgctggggagagagcagggatcgcgagcccggcggatgcggcagcggcggaaggcggctggggagacgctactccaactgttgaattgaattttcacctttcctttcatccgctgctttgcttgcggagatggatttatttgctttgaaatccgcatatctttctcagactgtggggtgatcccggcagacaccagactgaaagagaccacccgtgacagaaaaggaggaattaaaaaaaaaaaaaacctccacaacagactgcacaattaactgtacacatcgatgttggactttgtgaatagaaaaaattgagaggaaaatcttgaactatgatgcgaggctaagctgggaacaattactggaaacctgattttgtttttccttttccaagactctgaaaaatttcggggtacctctcgcctaaccaagaggaaaggtttaaaaaaaataaacaaaataaataaaccaatacacctagcaaagcagacgccttgttttccagaacctcggactccggcagaaagaggtagagtaaaagtgctgctagattcagcttcaccttcttccctccatccttttctcttgcattttctttttccccaaaaacatgaatctggtttttctttctatagactgagtcagagaaagcgttaggaagaagccgcaactaatgtctgtgaagggaggaccatgaggcgagagtgaatacgattcgttccgctgcttctgactcatccggcagatcggaacacctgcatttctggatgtgtcattcccgtatgtcgaggcgcctccagaacccgaaataatgtgtagacagacctgtgtctaacatcccctcggagggagctccccggggtaggagcccctggctggaccgccgcggccgcagctctgcaccccctgccctccctgagtcgcccagaaaaactgaaagagagactgcagaatgcatcacgccaaaccttgatgtgttgctttcatccagcccactcctcctactataagagaaaattgaaggaaaaaaaaaaacacgtactttatttgcttcaaatattcatcacttttattcctcgccaaggttttcttttctagatgaagaggactgggaggcagggctattggaaggagatgctgaatagaaagaaaagaggcacttgacagcccagccctgtgaatgcagagactgtttcccttctagcgagagacagggagagtgtgtgtgcaaggactgggagggaggctcccccttcctttttattcggcctcccccctcctcctttaaatgtgcacgtccaaccatgagttgcctgttgatttcccttcgcctgggaagaaaagcaaactggaattaaactgcttggagagaagtccttgctcgcggggagaggatgggatggtagcggaggctactggcttggcgtagagaaatcagagagtgtgttctacgaacagaggcgaagatttatctctctacttcccccctcccaatagactcacacagcaaatgctgatcaggctgtggctttcttgatttcgggggagagccttttccgaggaagagagggaggagcctggtggggagaggaaactacaaatcgggacactagttctttacgctgcatttcctcccctccctttggctgctcggaaaggagagagaggaaaaaaaaaatacgcttggctggtagatgcagtccgccgccgccgctgcctcagccagcaatgcaagattagatctctaaatgcagcaaaacactgcctgaaaacagaccggcccgcgcagcaagcagacatttcacggtgcgctggggaagcttcaaaatatatctgtgactctgtcttcgttgctcttcatccccatcaatttcatcacgggaggcgagc

SEQ ID NO: 11446 - DNA, 2300 bp, Homo sapien
atagaaaaaattgagaggaaaatcttgaactatgatgcgaggctaagctgggaacaattactggaaacctgattttgtttttccttttccaagactctgaaaaatttcggggtacctctcgcctaaccaagaggaaaggtttaaaaaaaataaacaaaataaataaaccaatacacctagcaaagcagacgccttgttttccagaacctcggactccggcagaaagaggtagagtaaaagtgctgctagattcagcttcaccttcttccctccatccttttctcttgcattttctttttccccaaaaacatgaatctggtttttctttctatagactgagtcagagaaagcgttaggaagaagccgcaactaatgtctgtgaagggaggaccatgaggcgagagtgaatacgattcgttccgctgcttctgactcatccggcagatcggaacacctgcatttctggatgtgtcattcccgtatgtcgaggcgcctccagaacccgaaataatgtgtagacagacctgtgtctaacatcccctcggagggagctccccggggtaggagcccctggctggaccgccgcggccgcagctctgcaccccctgccctccctgagtcgcccagaaaaactgaaagagagactgcagaatgcatcacgccaaaccttgatgtgttgctttcatccagcccactcctcctactataagagaaaattgaaggaaaaaaaaaaacacgtactttatttgcttcaaatattcatcacttttattcctcgccaaggttttcttttctagatgaagaggactgggaggcagggctattggaaggagatgctgaatagaaagaaaagaggcacttgacagcccagccctgtgaatgcagagactgtttcccttctagcgagagacagggagagtgtgtgtgcaaggactgggagggaggctcccccttcctttttattcggcctcccccctcctcctttaaatgtgcacgtccaaccatgagttgcctgttgatttcccttcgcctgggaagaaaagcaaactggaattaaactgcttggagagaagtccttgctcgcggggagaggatgggatggtagcggaggctactggcttggcgtagagaaatcagagagtgtgttctacgaacagaggcgaagatttatctctctacttcccccctcccaatagactcacacagcaaatgctgatcaggctgtggctttcttgatttcgggggagagccttttccgaggaagagagggaggagcctggtggggagaggaaactacaaatcgggacactagttctttacgctgcatttcctcccctccctttggctgctcggaaaggagagagaggaaaaaaaaaatacgcttggctggtagatgcagtccgccgccgccgctgcctcagccagcaatgcaagattagatctctaaatgcagcaaaacactgcctgaaaacagaccggcccgcgcagcaagcagacatttcacggtgcgctggggaagcttcaaaatatatctgtgactctgtcttcgttgctcttcatccccatcaatttcatcacgggaggcgagcagcaagtaagaatttcactttcggatctgcctagagacacacctccctgctccctcccccactcgatgtgaagagtattccggagtctccgggcgggagtagatttgcagcaccctagcgggagcgaggaaaacctactgattctttagctcattatcatctctcccagacgagatttccttcttatcgcctgcctcatcgctcaagtttgagcctcccgaagtccgggcgggagagacgaaacccctggctcacccccagccgcaggaagccaccgccttgctccaagcccctgcagctctgctgcaccgcagcttctcacccagtgcggatgctgtagatcaacaggttcagggaacttgagcagaataaggagagaccaccgggtgccgcagctcgggtgcagagggaaaaaaggacccatagacttgtggctcgcgtcgcgcgcgcacgctgcgccagggccccaggctggcgcgcactccctctctggctcctccagtccgattgctcctgcccccaccttacaggtctgggatgtacctttccatctgttgctgctttcttctatgggcccctgccctcactctcaagaacctcaactactccgtgccggaggagcaaggggccggcacggtgatcgggaacatcggcagggatgctcgactgcagcctgggcttccgcctgcagagcgcggcggcggagggcgc

SEQ ID NO: 11447 - DNA, 2300 bp, Homo sapien
aagatggagaaagattagtggttgccaagctttaggcatgagtggggagagggaggggcatgagactgtaaaggagcagcatgcagatctgtgtgatgattgaactgttctacatctttgctgtggcagtagttatacatatttacacatgtgagaagatgtcatagatcattacacacacaagttagtgtatgaaaaacgagtaaaatctgaatgaagtttatggatttttaccagtgttcatttccttatttgatgtggtactgtagctgtttaaagtgttacctttaagtacattagacttctttattatttttgcaacttcctttgaatgtaaaattactttttacttcaaaacaaaaagctttagaagatgtaaaaaatagacaaggtaatacgtagttatataagcatttcaatcagattatgaatgttttcctatttttacagtcgacatataactattttataacctgaaaaaatgtacatctctgtatataaatgtatgtgtatgcaatatatatatagatattatagatatacaaataacatatatgtactgatacatacatgtgtgtatgtgtatgtgtatgtcattgtccctttacttattataaactctttccagagttcaagtaactttttaaatcatctctgagtccctgcccatttattagcatggttcctgatccatagaaaattctgttgccattgaaaaatatctatatttgatgaattcttgagactgaaagaataaatttagaaccaaatgataaaagcttctggtaaacaggtaaatattataaggtgtttccaaaaatacgatctttagtgaagaatggacaacctaaagagtttgtatgaagtcccgaatgcaattgtcccaggaatttatggcaggcaaactgaatgggagtttggacccaaagagctaagatgtcttccaatccagtgattcttgtgaaacaaagagctttgaactcagaccaaatgcactattttcaaagctctatttctcatgaatcatgaactagtcagaactattttaagctagtttccattgaatttagctaatatgcattcagtgcctatgatgtgctcatcaataccctaaacaccatagaggaatacaataaacaaagaaaaagactgtcctcaagttgattggagaaataaagagagacatagtaaatgtgtaataatatgtaatattgtaagaatagaatctcaatgagcagtataaaaaataaaaccgcccactcccagagtgatacctcaaaaccattattgttcctaagctgagtcattgcagggtcagcatttccaatactcatccaatgagtactcactccacagaaattttaagatgttcaacatgttgacaattggaaattttcagataatttaacaaactgggtgttgcgtacttaatattctattcatatgttacttttttcttatgtaacccaaaactaaaataagataaatgtgttttagtcttattttatattttccaaacaagcacatattaatttttcttttttctaacatgtagttgcaaaactctcttattttctcatacagaatggaatataatttaaaatatataaatgtaaataatgtcacatgaaattctaattcatgtctgtgaatatgacaaaataataattgttgagcaatgtttctgatttttttatatagtaaaactggcatttattaaaaagttgcccaaggtatgtttaatttgacaggtttttatatttcatatttatttttctgaattctgatcaaaaatgagaagtggtataccatcaattaagttatcaagtataaatttaaagtttatatatgtacatttgagcatttgttttgaacttgtaattaagtaggtacatttgactacacaaaattttggaatgcatttgcatacaaataaattgacatacttcaattgcatttccataccatgattcattatgttgttttctgtgaaatttactctaatctcccaactacagtatttataagcagtgtgtcagcctctcaccagcagtgagtgtcgccaaggcagcgcttttgttgtcatggcagtgatggatcatcaatgttcggtagcagacctgtaatttgcaaattgaatgacaggcagcattgaaaatgcactgcagtggccttttctaggtaagttggaagcttgtggtatgagagttctctctctttaagtcgtgttttattttagtcttcacaccagtttgacatttagattcagagagtataaatgagatatttaggttttgaac

SEQ ID NO: 11448 - DNA, 2300 bp, Homo sapien
ctgccagagagtaaaatatttgtaattttcattagtagctacttaccactaataaagagtttacttttaaaaataatcttttataaaatgaaaatggatgtctacatgtgttcttaagagagataatttctgttcagacactttacatgtatatattcagacattttataccaaaaccagaactagctaatgtgtttcattctctcttcattccccacttacccacatccccagataattatttaagaaatttgaatgattaaattaaatattattcttacatgctaagagttttttgtttagacctttcccattatagaatttgtacttacccttgttttaaaagagactgaagctttaaaatgactacattagctgggtgcagtggctcacgtctgtaatcccagcactttggaagtccaagacatggggatgcttgagcccaggagttcgagaccagccctgcacaacatgacgaaaccccatctctaacaaaaatacaaaaattaactgggtgtgctggtgtgcacctgtagtcccagctactggaaaggctgagatgggaggattgcttgagcctaggaggtcgagattgcagtgagccatgatagtaccactgctctccagcctaggtgacagagcgagactgtgtctcaaaaaaaaaaaaaaaaaattgactacattattgcttattgtggtacaatactaataatgtagctgaagtaaagaaaaccctataggggtctacttagttttgaatcccagctttgctgtttatatgctggcagttactgaatctctttgcacctcggtttccttatttaaattatacctaccttatagagtatttgtgaaaactaaattaaacaagccatgcaaagcactatgcactcaataaaatgttaactgttattactgatgataatatttagttctatactaacaaggatattggctgggaaagagactgtactctggaaatgtttcaagttttgaaaattttagaccactgtcatctgccaggttatacctgctagccccattgtcctgtgttgcctgtgaatatatcctgcttcttggctcattaagaagtgttactggatcagatccatagaatgttttacatgactatgagtggcactggaccaatttatgaagcttgactgcagaggtattgaatggtggctgaggtaacccatttttatgtcatttgattaatttttccattttacttgtagtactgttaccacaccaatttcaagatgttttcagtttcctgctttaaaagtttacttcaaaaacagtataatagatattctcctgtttgatgtaaaattatttagaagacctgcaagattgtagctcctaatataaaatgcttagatatggttacaccttctttcatacaattacagacatccagaggttgattgaatatccaggtgtaatgaagcaacttaactttttacaggttgtatacatttatgtcatagcagttgattgaagaaaaaatggatttgtaaataacactcgtagcaatgaaagtaaaggctgcctcttaaggtgtttacaaatagaaaaatcaagttaggaggattctaatttaatgattaattgttttgctggaattttaaaggaatggatccataatgatatttgtttcaggctattaacagccagaaccttggctcccagaattaagaaatcagttcttgttaattaaacttaaagatgatggcagagatctttgtgccatgaagcgagagcctgatctatggctattttgttccatacttggtataacgcagtacactcttctcagccaaagccctatgttgtctgggcaactcccgttgccatagcaatgaaattcttttgcaggagcagggcgaatgctaattgtagccatttgttgttccttctgtcgatcccttaactagcacagttgtagagcagccagagactctgggtgaacagcacgcagtgcccccaaaagcattgctgctgaaggcaaccggctgctctgcttaaaaaatcatttgagcagccgacagtgctgacagtgccactatgtgggcagaagcacagcttgactcagaccctgacaactgttgatctgggagagggaaagagaagactgtttaaaacctgttgagaaggtactgatgacatggagattaatttgacaccagtccctcagaggtaggtgctaggcatatcgtagcaactgtttatccaggcctgaactcaatattggaatgcccagaggctataggagacagatcaacggttattccttt

SEQ ID NO: 11449 - DNA, 2300 bp, Homo sapien
aggaaaggctcctctcctcactcataattctttccaagccatactataatattttgaaaataagaggtcaaatgttagaaattagttagaaaaataataccctgaaggaaatgtagttattaaaaaaaatttataggacatttttacacttactaaagctaaaaaatatagactgtgtaacactctaaaaagttcatggctgggcacggtggttcacgcctgtaatcccagaactttgggaggcagaggcgggcagattacctgaggtcgggagtttgagaccagcctgagcaacatggagaaaccccctctctactaaaaatacaaaattagccaggcatggtggtgcatgcctgtaatctcagctactcggtaggctgaggcaggagaatcacttggacccgagaggtggacattgcagtaagccaagatcacgccattgcactccagcctgggcaacaagagcaaaactccgtctcaaaaaaaaaataaaataaaaagttcataagggtattcactttatgtcaagaaccacaaaactaaaccaaataaagataactcaaggtgatcttacaacaatacagctgacaattattaagacaggttaagtagccaaattgagaaagtgggaagcagtcagaaacatgggatttgccaacagaagcatatgaaacaaacagccagatacggaaccagacactgaggccatgaaaatctttttcctgggaaggaaggttggtaagagatatattatcataagcaaacacacagatcaacactgtccaagagaaatataatgtaaaccacatgagtaatttaaaaatttcaagcaagcaaaactattttcaataaaattaatccaatataccccaaatattaccatttcaacatataaccaatataaaacatttattgatgacatttcacttctttttcttcctaaatagttgaaatccagtgtgtattttatactgtagcacatctcaattcagactagccacacttcaaatgctcagaagccacatgtagctaccatattacaaaatacaggcctagatattagcacttagttcataaataagcaaaaactgaaggatgatttgagcagataccatgtagaaactgccacaatgggcacaggtattctaatcacaatggtatttattataaggaaaacaatgcagttgtaaactcattctataaatgagacgattgggattaggataaagtttatttactactgccaggaagtcaaatccaattagaagataagttatgttaatgatgtatctatgaaagataactgtcaaaatacagaagatgaatagaaacaataaaacagtactatttatctagcatgcatctcagaggatcctactaaagcatgagaactgactaatcagagttactaccaaacactaaaaaagggccttattcccaattacaagcctatgaactaaactcaaaatcagcactacatgtaagcattgaagttgaatctataaccagcttagacccaagtactttgattgtgataaaatcctatttataactttcctatcttgtatatggccatttatgcaaagaaaccttgtactgggctgaaatactccatttactttaaaccactatctgagaaacacaggaacaatggagaaagtatgaggaaaggccaagggcccaagaatatgaattttggagagattactctgtcttgttagtaatagggaaaagtttacaacaagacagctaaacagtcaggaaatacttacttttatgatagcctgggctattacctaactggaaaaagaatgaaaaggcaggcacaggaccagaaactacaatatgccttgctaatcattccagggaattgtcaggtttataaagtaccacttagattcaattcagaaagtcagtcaatgattaccaagtacacaagagctggctctgtcctaataaatctgggaattgagtaaagcttgcctctagcatttccccttcttttcccacctacctggttgtccttagctaacacctgcccttctagaatcagaatcctgtgactcctccagccacccaaggtgactcatgctgacttcctccaagtgatactacctgccttctctgccaaaccctctggccctaacctatcatgtatgaaaggtgaaataggagcatactctgatttcacagttttaaccatcatcctgtgaccccaaaagtccatcacaggtaacgttctctgattttggtaatgcaaaaatgtgtcacactcattttaagactggaatgaggccaat

SEQ ID NO: 11450 - DNA, 2300 bp, Homo sapien
caatacagctgacaattattaagacaggttaagtagccaaattgagaaagtgggaagcagtcagaaacatgggatttgccaacagaagcatatgaaacaaacagccagatacggaaccagacactgaggccatgaaaatctttttcctgggaaggaaggttggtaagagatatattatcataagcaaacacacagatcaacactgtccaagagaaatataatgtaaaccacatgagtaatttaaaaatttcaagcaagcaaaactattttcaataaaattaatccaatataccccaaatattaccatttcaacatataaccaatataaaacatttattgatgacatttcacttctttttcttcctaaatagttgaaatccagtgtgtattttatactgtagcacatctcaattcagactagccacacttcaaatgctcagaagccacatgtagctaccatattacaaaatacaggcctagatattagcacttagttcataaataagcaaaaactgaaggatgatttgagcagataccatgtagaaactgccacaatgggcacaggtattctaatcacaatggtatttattataaggaaaacaatgcagttgtaaactcattctataaatgagacgattgggattaggataaagtttatttactactgccaggaagtcaaatccaattagaagataagttatgttaatgatgtatctatgaaagataactgtcaaaatacagaagatgaatagaaacaataaaacagtactatttatctagcatgcatctcagaggatcctactaaagcatgagaactgactaatcagagttactaccaaacactaaaaaagggccttattcccaattacaagcctatgaactaaactcaaaatcagcactacatgtaagcattgaagttgaatctataaccagcttagacccaagtactttgattgtgataaaatcctatttataactttcctatcttgtatatggccatttatgcaaagaaaccttgtactgggctgaaatactccatttactttaaaccactatctgagaaacacaggaacaatggagaaagtatgaggaaaggccaagggcccaagaatatgaattttggagagattactctgtcttgttagtaatagggaaaagtttacaacaagacagctaaacagtcaggaaatacttacttttatgatagcctgggctattacctaactggaaaaagaatgaaaaggcaggcacaggaccagaaactacaatatgccttgctaatcattccagggaattgtcaggtttataaagtaccacttagattcaattcagaaagtcagtcaatgattaccaagtacacaagagctggctctgtcctaataaatctgggaattgagtaaagcttgcctctagcatttccccttcttttcccacctacctggttgtccttagctaacacctgcccttctagaatcagaatcctgtgactcctccagccacccaaggtgactcatgctgacttcctccaagtgatactacctgccttctctgccaaaccctctggccctaacctatcatgtatgaaaggtgaaataggagcatactctgatttcacagttttaaccatcatcctgtgaccccaaaagtccatcacaggtaacgttctctgattttggtaatgcaaaaatgtgtcacactcattttaagactggaatgaggccaattactactactcagtatctataaatacagaattgctacttgtataaattactctcaattatttaaaaaacatagcaaaacaaaacaaaaactgttgactctgtgtgagaagttgtcaacttaccagtgctcggattaaagtgcatttaatgagggctgttttaggttagagaggcatgacaaattttgaaaggtctaaggatgtatctttcctgaatgtcaaggacccactccggacaatatggtaactggcctgttctaaactgaggatcaatgccaggttccgcctgcattccacatgaggcctattattagctaatagatggaatttcaggcactgaagatgatgttttaggtagaggaaagttaatgctctaaatcctcgtgtaggacgcccaacatctggacgcacacagcatgactactagtgctgagcagccacccacagtgagttaatcccagtagcagaaataatgtggttaaagttgctggcttcagaagcaaagcacccgcaccttgggtgcactcttcaaagcaacacacacagttaactgaccaaactgaagtctctgttctaa

SEQ ID NO: 11451 - DNA, 2300 bp, Homo sapien
acattagaagggagaaacctgcttgtggctctcacctataatcttaccgctttgggatgccgaggcaggagggattgcttgaggctaggagtttgagaccagcctgggcaacatagtgagacgccatctctacaaaaagtaaaacaaatagctgggcatggcggcacatgcctgcagtcccagctactcaggaggctgagatgaaagggtggcttgagcccaggagtttgaggttatagtgaactgtgatcgaatcactgcactccagcctgggagacaaagtgaatccctgtccttaaacaaaacaaaacaaaacaaaacaaaacaaaacaaaacaaaaaaactagaaaaaaagaggaattcttaagctctttactgaagttagattttaggtttatctagcaatgtttcttttttgcttttatactgttaactgtagaaattagcattatcctatgctgtttctttaagctccagcatctaaacacatttacctcatgatgtgtgaagtgatgataggtgtttaagttgctgttagacagcagggggggaaattttacctgtggtggtacgattatttttgttttatagcaaaagcatctgtatatttctgattaattttaattataatattttgccttattctaatttaaaaacaaacttttatagggctacacacttaagtactagtacgtaaattattgatttattttatatttattttactacatgtattagcaaatatttatattttctaattatttttgtcttgttaaactgtgtatttttaagcattttctggagctaagctttctatttttaaccaatgaaatattttttcttccttgcctcctctaaacagatattattttcaaagaaaatatgtgatgtaggaatcacaactcctttctatgctgaattcacggttctttgaaaatcagatattagatatataaggtagctttttacatatctgttttaagagtaaatgaatgaaagaatcaaattgctgatagggagaggtctttgcccactaagtacatagaactggtttaggaagccctttttaaagtgagaatatagaaattggaaatttcattggtgatggaaaagccaaaagtagaaaaaatctaggaactttttttaaaccaaagggacatttggatcataatttgaatttaagaagaatatcatggttaaattaaggtggtaaatagaagataatattcttactttgtttcataatgaatctgaggaagattgaactttattttctaattaatatactatttttctcttaagagatttttgttgcttgtagtttatatacatggagctataaaatattgccattttatttggtgcttttatctgtgttattaagaataaaaagttaatttaagttattgttacttagtattatagtgtctgaactctaaacctagcaatatgtgaaatttttggtgaagttttttttcccttcaagattggttaatggttgtcttaatctttatttgatcacatctataagtacaaaatttgttaaacctcacttatacagtctttattagcattcattgaatggtgaaaatataagttttaagaggaaaaaaatgtggtaccttatttggtactagtaattaattatacaattaatgggcaaatttgataacattacatgaaagtgaatttcttataacattaaattggactaagagtattttttaaatggaagagaattttaattgcgtaggggaaagaaaagataataaggatgaaaagttagtatattcaaattgaaaggtaattagaacagagacttcagtttggtcagttaactgtgtgtgttgctttgaagagtgcacccaaggtgcgggtgctttgcttctgaagccagcaactttaaccacattatttctgctactgggattaactcactgtgggtggctgctcagcactagtagtcatgctgtgtgcgtccagatgttgggcgtcctacacgaggatttagagcattaactttcctctacctaaaacatcatcttcagtgcctgaaattccatctattagctaataataggcctcatgtggaatgcaggcggaacctggcattgatcctcagtttagaacaggccagttaccatattgtccggagtgggtccttgacattcaggaaagatacatccttagacctttcaaaatttgtcatgcctctctaacctaaaacagccctcattaaatgcactttaatccgagcactggtaagttgacaacttctcacacagagtcaacagtttttg

SEQ ID NO: 11452 - DNA, 2300 bp, Homo sapien
ctccggcagaccagaccaaagcagaatggtccctcatgcgtattgccacataatcaaaagcaactctgaaaccagccagttttccaaaaagcaggaaattcatagcacccaatcagaaggggccaagtttatctgagctggtatgctaagaaagttcccctgttttaaccctataaggaaagtaactttgaaacaactcatctgcttctcattccttatttctgttctctagcttttttctgcctataaagccaacctcctctgcttagctcattggaacagattctattttagagaatgaagttttgcctattctggaattgcaaataaaagccaattagatctttaatttgttttgtctttcaaaatcaaacattcccctctctccatgatatggatgactaatgcttgtcagttacagctttaggcttgtcttttagcctgccatcctcctagataagataatcactgaactgtctccacttcctgaaggcacttaatcttgagcaacccttcccacctctttccacggagtctttcccaaatcacctaatcaaagcccaaatcctttaagtgctttctaataccatttacctaagacacttcatggctccccatagtgcatgttctccctccctgagtaataatcccaacttcttcaactacagtattcctgtaggagcattgacaaaactctaagggctttacatatgctatgttatttaggcctgaaaatgcccctctttcataggtattagtataattaccccccttttgtagatgaagcagcaaagaaagttaaacgtcatctccggtatcaaatagctagtaaatggcaggaataaaatctgtatctgggtctgtcatcaagatataaggaactacttgtagttctcctgaccttgctgttctcctgtaagtttccctaaagattatgtgctctttgaggacagagctgtagagtctggcacagtaaaacaaatattaaaaaagaaaagctgtagtgtgaagacttactgagaactaaggctcattttttgaacctctgtgccaaactcctcagagtacctagagttgtttcttgtaccaaaatcaatactgcatgtttccgagtcttggcctacaccacctccatataatcagaagacagatatcttaaaggaatagttccaaggaaaagctcatttttaaagagggtatattgatgtgttgagaaaacggtgtttgccttgtagcttgaccttgggtttacacaacaaactcttttgcatggtttcagttcaaggccctttgttatgtgaccttaaagtttcttcacctctatgctttcttggccttgctcctgcctggaatggaatgccttttaaatgaatgccctgccactgtttcctgcctagtgaaaacctatgcagctttccttttacctttccagatccactccttcagatttaataacttccctttttgttctcaaggaacttctaaaacaactgctatagacatttacattccttggttaattgtgttagggtttggaaactacaggagactgtgagctcctgaagggctcagcctagcctagctctgtctgattttgggtggacccctctgccaccccagagcgagcacttaggcaggaaatatgtccagaaggcttccttttggagcgtcgtgggccccgtcgtttcatcctgcctagtaccccttccagcaccgtacccagtcccagaactactttttccagccccagacgtgcaaggagagggctagcagatggttttatatcccagcgctgctcaaatggtggcgcagggcctgtctcgcccaccttccagttctgctggaaccctatctgcaaatccaaagaaatccaggccgatgacttcctccacggtccccggcgcttctccaaatctgacgccactctgcgtccttaaggtgagcggcctggaccgccggaagggttgagcggctgcatagacaggccgcaaggccaatcatgtttcgcagtgcccggaaggggcggtgcctcagcgtgtcattgatccggcggcgcgggattggccagtcccgggccaacacgggtggcgggagttttcagatgtgttggctgcggccccgacttcagcggttgggctaggctgtgctgactgtttgggtggcggaccccgggagtaaaacctgttgtcgatccctcagcttccagcttgcggcttgctgagtggccaccttctttccggtccccggagctgcggggaaagatggaacggcaccagccgcggctgcaccacccggcccaa

SEQ ID NO: 11453 - DNA, 2300 bp, Homo sapien
gcccagccttctttttttttttctaaagaattatttctggccgggcgaggtggctcacgcctgtgatcccagcactttgggaggcgaggcgtgcggatcacgaggtcacaagatccagaccatcctggcaaacacggtgaaacccggtctttactaaaaatacaaaaaattagccaggcgcggtagcaggctcctgtagtcccagctactcgggaagctgaggcaggagaatcgcttgaaccgggaggccgaggttgcagtgagccgagatcgtgccactgcactccagcctgggcggcagagcgagactcccgtctcaaaaaaaaaaaagtcttaaattacattttaacagtctaggccagaggagaatatgcctcattgtggatttatgtgcctgcgtcttcatgtttaacttgctcaaatatcacctatacgtcctttacatttcttcttacatctagaccttagcattactgacattctgggccacatcattctttggagttcagcgatgtcctgtgctttgtaggatatttagcagcattcctgctgcatcccatgagatgcataacaacactcctacctcctcagattgtgacaacctagacattgctaaatggatttgggggtgtgggggttggtttaggatccactgtccacaagcttggttaaactcaggttaaaccattttggcaagaatacttcttaagtgatgtgtatgtctagttgcattacatcagtaagcagaatacattagattgtcccattattagtgattctagctttgatctcttaaggcagtgatttttttttttaaaaggtaaagctacattttcccttctgtaataagtaagttatggcttgaaactttgagaccatgtgaagatcctgtactcctagtcttttaccctgtggcttttagtatcgtctgataaattttcctctatcaattgtggttgacttggaaaactgtgatttttctaattctatcatttgttctacatttactatcttgtattgctctgaaagaaaagattttgtcctccttcatttttggtggcactccgaagaaattcaatgtgtttcatcaattattgtcaccattttttggatgctcatgttgtcccacatttctccagtaaaaaacccattctttaagagaatttagtgttttgtggagtactttattattgtaaggaccatgcagtggtaaatccttactgaatcacacgacatgtgagaacaaatgactttataaccagtgagaaattctgatgattggtacaacatattttcatagttaacaggttacactaactgaaaaatgtaaataattggtaacagaaaattctaaccgccaataaaaattattggcaatttatttttgagtcatctatttacctttaaaatggcatatctattcctggctcctgtatatgatggccgatgactataaattgaaatatacctgtagcatacgtatgacttaaacactgcatactactgcacattgcagcgaacaggatggagctacttgtgatctaaaattatctaaacaatatacttgggagcaaatctcaatagcattccatctaacgaaagcatcgcgattttataactatgacttttgggaagaccaaacggaataccccagctgaaatgagaaaaatctgtattaaggaattttagctccacccagggcaattatccccttccttccgtaactgccaatttcctccccaatcccaagagcgcctctgcccagttccgcagtctctgctccaagtctgtttttgatgatgcccttagaagcaggggcagcggcaagcggcggagatagggattaagttcctaacagtcttcttcccctgacctggcagatggggacgctgccccttagaagcctttttccccgcaatacgggacgccgcagaggtgaaagaccaagaaggtggagcaaacttttagggagcgcctcttgggcccgcgtacccttccgcctgttcctctctgattggccagcgtgagtcacggacgcccaatcgcgcggtagcgtccgccgtgccgctgggcgacggcggcgcgcatgcccactcagggacccaccctgcgccccagccctctacagcgcgggcgaagggcatcggcggggaagcggctgtggttgccagatctggcagtacagagccaaggtggcagggccgcgctaggacacggatggtcccagggggagggcaacaggaaaaacaagcactgacacaactgccccatttccccatgtcccctaaaagcaggttttc

SEQ ID NO: 11454 - DNA, 2300 bp, Homo sapien
tatttagcagcattcctgctgcatcccatgagatgcataacaacactcctacctcctcagattgtgacaacctagacattgctaaatggatttgggggtgtgggggttggtttaggatccactgtccacaagcttggttaaactcaggttaaaccattttggcaagaatacttcttaagtgatgtgtatgtctagttgcattacatcagtaagcagaatacattagattgtcccattattagtgattctagctttgatctcttaaggcagtgatttttttttttaaaaggtaaagctacattttcccttctgtaataagtaagttatggcttgaaactttgagaccatgtgaagatcctgtactcctagtcttttaccctgtggcttttagtatcgtctgataaattttcctctatcaattgtggttgacttggaaaactgtgatttttctaattctatcatttgttctacatttactatcttgtattgctctgaaagaaaagattttgtcctccttcatttttggtggcactccgaagaaattcaatgtgtttcatcaattattgtcaccattttttggatgctcatgttgtcccacatttctccagtaaaaaacccattctttaagagaatttagtgttttgtggagtactttattattgtaaggaccatgcagtggtaaatccttactgaatcacacgacatgtgagaacaaatgactttataaccagtgagaaattctgatgattggtacaacatattttcatagttaacaggttacactaactgaaaaatgtaaataattggtaacagaaaattctaaccgccaataaaaattattggcaatttatttttgagtcatctatttacctttaaaatggcatatctattcctggctcctgtatatgatggccgatgactataaattgaaatatacctgtagcatacgtatgacttaaacactgcatactactgcacattgcagcgaacaggatggagctacttgtgatctaaaattatctaaacaatatacttgggagcaaatctcaatagcattccatctaacgaaagcatcgcgattttataactatgacttttgggaagaccaaacggaataccccagctgaaatgagaaaaatctgtattaaggaattttagctccacccagggcaattatccccttccttccgtaactgccaatttcctccccaatcccaagagcgcctctgcccagttccgcagtctctgctccaagtctgtttttgatgatgcccttagaagcaggggcagcggcaagcggcggagatagggattaagttcctaacagtcttcttcccctgacctggcagatggggacgctgccccttagaagcctttttccccgcaatacgggacgccgcagaggtgaaagaccaagaaggtggagcaaacttttagggagcgcctcttgggcccgcgtacccttccgcctgttcctctctgattggccagcgtgagtcacggacgcccaatcgcgcggtagcgtccgccgtgccgctgggcgacggcggcgcgcatgcccactcagggacccaccctgcgccccagccctctacagcgcgggcgaagggcatcggcggggaagcggctgtggttgccagatctggcagtacagagccaaggtggcagggccgcgctaggacacggatggtcccagggggagggcaacaggaaaaacaagcactgacacaactgccccatttccccatgtcccctaaaagcaggttttcttgggctgaccagggcattttcactgtggtgtccgactggggcaactcgatctgcccgcggggactcaaaaaagcttgagctgcattttttctttgcgtccgggcggaccaaaaggcgaggtgaagggaacgagtgtttataagaaagtaaacttttgtgcagaatgggctggggacacctctgagttttgctgcccgcaacgtgacctttttagcgcggtcctggacgcgttccctcgcagccaacccgtcagtctcctcaggccttatcctgccctctctgaggtggccgcctgtgggcgctgcaaacgccacacttttgctctacgaagaacctcctcgcgactttccaaggtgtgcaactcagaaaagcgccccccaaaacaagtaaaagccttcggggaagaggcaaagtccctgaaccgtcctgactccagccaccagccggtgtttggtggatcaggtcccggagctccgcagcctgggagccccacaccaggccggcccctacggccgctcagaaaacgcggc

SEQ ID NO: 11455 - DNA, 2300 bp, Homo sapien
aatttttaagctagcattgattcaagtcctggtttaattgttggaatacagattgtggtattcaatgtgggataggaagtggctactttgcctagacaagaaaagaaaatgtggtaatattaatagaagaggtacttagttgttaagggaaacaaaataaaagacctcttttttcattttccaccatttttcatagtactcactcctctgaattaccttttgtagaattctgatccttctgtttattatgcttaatagagcttttgccatggaattcatggattcattcaactaactgctggtgttccattttatattctcatgtgctatctttccaatatatctgtaagctgtattgaatatattgattttatttttaacaggttatctgaagaaaatcttgtgccccaattcttactagcatttttaccttactaatcttgttattcattatggcaaaatactgtattttcccaagttatattcataaacaagaactttcaagccattttccttctgccctagaggagggaattggcaagttaattctttcagtgtctctgactaggtatagtatagtaagagtctataagaataatatataaaacaaatttttggcaggtgtattacaatcaatttacactatggagagagaaacagtttaggcagagtgaacagagagatcttcgtatgggtaatttttaaaaaatatctttacaacattgaagttttgggaatttgcagtaggtcagttacttccatatttgctaagatcaaaaatatcctttaatagaagttattttttaaattatcttttatgttttttccctctcttgtcccaccttagcttgggtaattgggaattagttatctttattttctttgtggctaagcaagaattcatttatcaaactcccattttggtatttggatatcatgtgcgggggctagtaacctcagtgtggtagcagataatcaggtgtaggttagaaccccaaaaactgcatgaagccatttgatttgggttttattcaggggcaattaagaacaccatgtaccagtcactgtccagatatcttcttattttttttgacatagtccctatccatttgtgaagaatgttttcactcttggttttctcattggcattttaaagacttttcatgtgtcatcagcccagtttatatcaatgtgcaataattctgtattttattatttcaggaagtcaagttgcagttcagatttgaatgggcattcattatttcaatgggtggcagtgggtaaaagagaataaaactttaatgtttgcttttatggctcactttctggccaattaaaacattcctcctccttaaaaatataagtagtcctcaaagtctgaagtaagcatgggttctttatatgtccagtttgtaaaatatttatgtcaatgaccagactgaatgatttgatactttttagtgtgatgtaaacaactcaccagagaacatttgttacaggcataattgtgttctttgctctcccagtgcgtacaaagtgacctaaaagatacttggttcttttcttgcttggaaaggaagttggctatgaatgttatactatctgaggtacacttacggcacaacactgtatgtcagagacaacttggaagtgaacaggagcaaataatttaaataaactaatgtgtttaataagtacaaagtacatgtaccacatgcaggctgagccctgttttgtttggcttgtacactgctttacggaaatctaaaagctaaaaatcaaatctgacgcagtaactgctttactagtcctcgtgcagacatggctgccccctttagctcagtcagctgatgtgtagtttgccttgctccgtttcattatctatacattatagccagtgagtaagttagattcaccgattttacctgctttcaaagaaatggatcaaaagaaaattggccctcttctttccttactgatggtaaagggtggtaatggagatctactatctggaacaatgagtttaaaacaatagtgtttgttttatcacagttttctgccaattgagattcttgagctatggtttggacatgtctgttttatatgccaagtgacttctgaacacgacgtgaagacagttaagtgattctaagacggaattttgacatctcataaatagaagcatttactaaaggaagcattttctaaaatccctttttaaaaagttttgagcacttaaggctgggtgtggtggctcatgcctgcaatcctagcactttgggaggccgaggtgggcggat

SEQ ID NO: 11456 - DNA, 2300 bp, Homo sapien
ccaaactttccccgaggccacattgatgttcttcaaaacaaactcaaagtaagcgaagggcatttcacttttgtgacaattgaaatcaaacttcacttttagagtggtcagcaagaaccagggttaggaagtgctctctttctctctttcttgtggatgtgatgagagtgtcttttgcagatttacttggaaatgtatgaatctcttctcatggggtcactttgatcacaaactgtaaggtcctgagctgccatagagagcactggttctactagagacttgcccaaacaccgaatctcacttccctatctacaatttgtattctattttattatgtcactttatttccaaagactgaacccttatgcttttgagcagtgtcaaaaatgagggcttttattatcttatagttcgtgttaagaggattcatttggcagtgttcaactcttcaaccaaattagtgcaatttatttcaacgcaccaatttcatggttcgtgaattcgttgttattattgctgactttcattctaattttcctttgaaattgaacagtaagtaatctctaacaaaaactgtgtagtaactaaaagcccagtaggatgaaggtagaagtgtatatactcagacaaaatagacaatgaattgataaagaaggtttttaattagaacaaaatgaaacacttttgcaaatgaaaaggtagttcaaattaattagcagcaaagagccagttacttatggtagaaaattgcctaatcttctgatgggaaattttgcatacagactaagggaaataactttgaaactatttccagtctatttgtaatattatcttcaaaaaagacattcttcacactaaacaattttccctacttcggtagcaactattttgaaccaaaatgctcatataaatgtcattaatgttaattacaactacatattattctgcaactgatattttgcagttttattattcttatgtataatttttttcatggttggcatcagttattctgcctcaacttttctgtgggtttgatgggtttccaaaatatatgttatgataaattgacaaaggaaaaataagaaaacccttttatacaaaacagaattttacaaaataaatttaattataaaagtaacttgaaaaatatttaaggaattgaaaatattcattttaactgacaattgtatttaaaatatatgtttttaaaaacatttgatattttagtggtgttcttgaaaagaacactttcatattaaatgctcctgtctggtccttattttctcctgattgagtccaaatttcctcaactattcctttaacaccattcactactcaactctcatctctccccttgttaaggcctctggcatttccctaattaaaaagtcaaagtgatgcttaggcatctcacattgagtgactggtcccaacattcattgatgccaaccaaccttattttcttaaaagtttgtcttccgttaatttccaccacatttcttcagtggctttccatttatctctgaataaacctcttcagtttcttttgtttgtttctttctctctattcattccttagtgctgacctcttaagttctaaatttcaattctcacattatgtattttacctggacaatcttgtctaccctggtgatttcaaatatagcctatacataaaaaaaaaatttaagtcagtattatgggctccagagagctattttctgattgtatacgaaaacatttcacatgcaaatgctgctttatatgtctcaaccttaacatgccgaaaagtaaaatggcttctttcactcaaatctgcttctcctccttgttccttatcattgttaacaaagctgtcatgctcttagtctgcttcccagccttccctgtctcactgcgacatcattatccaccaagctgctagagccaggagtgatggtagcatcctttctcttctttcctcggttcagttaagcaataagaactactttgagaaaataatctaaatatttctatttctccccattgtcatgactaccaattgtttaagggtctagaacttagaaccaattgaaacagaagatataggagagaatcacatggagatcaaaatacctttactatggctaaagctgattgaaaatcttggcatagatatggaataaatattaatgtctccaaaatcttctcaaaatttatactatggcacaaacaagttaaatgtaggtctcttcctcaccatctatcttaggtctctttctcatattttcctccaatctctactgctgggaaggcga

SEQ ID NO: 11457 - DNA, 2300 bp, Homo sapien
aatatttactaatatggcaaaagttcagctgtagggcagaaccagcagctaaaaagcacaaggagggagatcatgcttccctggctgcagcttgtttaccaaccttcaactcagatgtgcatgttcctttgagtgtgtgtgtggggtggggaggaggtggagtgggagaggggtaggggggtgaggggtggggtgatggtgattgggggctgaggtttaccacttcatcagtgctccattttcactgtaaagggtttgaaggaactgattttaccagccaggttcaaattgtatgccaaatttgtattatagagagacttgtgaactccatgtacagccccatttgcacaataacaagctgttaccctccaggtgttttgatgtagtgtgttgtccatatttaggactctgtgtttaggattattagaaatgaggagaaaataggaaggataggaagcaaaacagttagctcagccaagcaatttatattctagttagcatttggtggaaggggaaaattgaagtagttcctacagaaagcatatggaaatcaggtatcaaagaccttttttcactctaggctcagtcactggtcattcagcatgtgaggttttatgttcaggaccctgcagaggatatctggaagcctagcgatgaagagaaatgtcttctcaaggaaaggccgaatcatgggcttttccattacttacatggcaacctgcagatcaaaaagtgtttcagaggcttaatgcactggagtatcccactagccttgattttataaatgaggaaacagaaggccaggagttaggtgactccaggttacatagctattcagtgtcaaagccatagaagataggcaatcatttggcaccacactcttccacaattcctttatgaaggaccagttttccagtaggcaatccaggagaaagaaagagagagagaaagggagagaggcagggaaagagggagagagtgagggagcgagggagctagggagtaagggagggagggaggaaggaaggaagaaaggaaggggggaaggggaagaggggaaggggaaggaaggaaaggaaggaaggaggaaagggggagggaaagaagggggaaggaaagaaggaagcagggaagaggaaagaagggaagggggaaggggaaagaggggagggggggagagaaggaaggaaggaaacaaggaaggaaggactaatttgaaaaataaccaatgttttacctaggcttcagtgaatacctccccctccccacaccaatttaccgcttagataaatatgtttaagattacttgcaggcagaactacttgtgttacagcacaattgtttctactttccccttggctcttccccgcatccagaagccactactgcctctaaaataagaccacaaggcaaacacccagagacatttgagcctccaactaggaaactagcagaagctctaccactgcccacagcaaagattcaaaattggggtatgtcgaaaccttcactgaattcatatatttacttttccggttcaccctacgttacacagaagttgagattccttccctccgctgagaaaagtgcattttctttctctgtgccaacactgctggatccgaggctccaggaggaactgttggcaaagcaggcgttttgggaccgcgcctgtgattgctctgtggcgccgacttcctctctctgttacatccatatacaaatgcaagcttatttatttattttaattctccctctcttgctagcaacctgtggacttggcatctgactggtgcggcaaggaaggaggctggtaggtaagcgctactgtgcccaaccccgagctgcctcttcgcagtcttcaggagcaagtcccccattccagctcctctggcagagtatggagttacctgcgtccggggcaggaaaccatgaatgtgcccttctgccctcttgcctttctgccactctttgagttcccgtccttaattgaagagccagtgactattggctgaagttcccccagcgatttgcatgaaccgagagggagtgtcttctgccgccctcccttcaagagcgctctgactgcagcctcccagggaatgcgcggccgagggaatgcgcgcagctcacaggccctgggagtgagctggtgcccggcgacctggcacccgcgcctggatatggggcgtctacatcgtcccaggagcagcaccagctacaggaacctgccggtaagggttagggtcaaggaaccccgcgaccccgacaagttgcagtattgtgaagcaattcccact

SEQ ID NO: 11458 - DNA, 2300 bp, Homo sapien
acaactcccagaagaaattcaacatcttcttcaagactttatgatcttcatattatttgctattgagcagacaataacaagaagctattctgaaatctaatgtgtgctttaagttttgtttgtttgtttgtttttcctcactaggctgaaggtataaacagaaagctcaaaattctacatttatatctttttcagagcagatgtacgttttaatgtagacaacctgaaatccatctgctatttatttaagacactatacaaagagttctttaatgtttagagctactaaaatattaagtttgcttggcagtctgaggaaatagaatttttatcatctcagaatatgggtaaaatatccaaaatgctttgtcctttttttggctagtagccttataaggtaacagatgtagtatgacatttaaaaatctaaagagaatgagcaattaaaatgattcttttaaaaacagtactgtcagtgctgtttcttgtaaataccatgtctatatgtttgtgtaaatacatatataatatgatatatttgtaatacatatcatataatacatatgtatgcaatttataatatgtgtgtctatatttgcacacaaatatatatttactgagaacatgttcaatagctgcactcacttatagatgtgtattagataagggtaaaactgtttcttaagaagccatgtgtttattggattttagagcaatagatatttggaataaatgattctaaaatcagatcataagcttacaatttgaaacaagaaatggaggccataaaatgacatcagatgttttctaaatgaatattaatgataaaaaggtggtttgcaatgctggctctgcagccagtttatctggatttaaatctcagttccaccatttaccagctgttgggttttggatgagctacttaaactttcttctaaaattattctaattgttcagatctgattcggtttttcttgctgggtataagagaggtctacatgttttaatctcttacaggcagtaggaatgggagggatgtgataagttctggccagtgagctatgagtggaagcaatgtgtgcccagtttgggtaagccatttcatagctgctatgagtgctccatgtttactccttccttccacagtgacactgaaagctaagaattggacacgaggagtcacaagcaacggtcttccttaacttatgaagaaaagaggtttatatggcttattgttctgcaggctgtataaaaagcatggcaccagcatccaattcttgagggtttcaggttacttccactcccggtggaaggtgaaggggtgccagtacatacagagattacatggtgaaagagagctgcctgatccttgagtgaaaatatatggagaataacaatagacatgtaatatgagtaagaaataaaccttgattgtgttaagctgctgagagtttggaactaatttataactttgcctaacatactcacagtgtactatagtttgggtgtttgtcgcccaaattgcctgttgcaattgatccccatgttggaggtggagcctaacgggagatgtttaggtcccaagggaagattcctcatgaatgacttatcagggtaatgagtaagttcttgctcttgctcactagagctgattgtttcaaagaccttggcacctcttcgctttctcttgctgcttctctcgccatgtgatcgcggcacacactggctccccttcaccttccaccataggtggaagcagcctgaaaccctcactagaagcggatactggtgccatgcttcttgtacagcctgcagaaacatgggccaaataaacctcttttctttataaattacccagtcttgggtattcctttaaggtaataaaaataatataagttctgtgccttgatttttgcatctataaccagaataacagtacctagttatttggatggttgtcagcaaaattttattgaacttagggattaatacagctttgtaattcctataaataaaaatagtttgtatatcctttatttaattgatcttaaattctagaacatttcgcgtcataaagtccaaacaatatacactgagttcacactttctgcaatgcctaccatctcaagttaaaaaaagtctcaaattttgccttaatgtaaaatggctctaataagatatataatatttttgtcatataaaatattgcatattgacagcaatatcccagtggctgatttattgataatatctttgaccatttgaattttttttcctattatatataaggaaatacaaac

SEQ ID NO: 11459 - DNA, 2300 bp, Homo sapien
acatgaaagatttctcagagggttcatgtttcaattttgaagcctggggtgaaaggacttagactgtgatccattgtgagagctgactagcaaatagagcctgttgcaaacacccactgtgccccatgttctaaaagaatacaagcccactgtgtcagcagttgtatcaggcccacatgaatgaactttcagaatgaccattttattatgtgtatctaaaaatgagacaaacccatatgcctggggtatgggtcttcagaaatgaggaggcatcaaggcctgtggtttgattaagcattttaccttattttagaagggatgatgtctgtgagatcaaactaagacaggtccctgcttgttctctatgaatctgacatgcattcatacagaagggatactaataggctgctgagctattaatgaaattcaatttcaaaccatgtttcatggccaaccgtgctggttggatgcaagaacaacaagcacagcacttttaacagccctctctggatgaattaaataaggatgatagaaaaatcccatgtatagcaaataaaaagacattgaataatggaatcagaccaggcggcaaggtagttcattgtcaatatcttacgatcgtagaatataagcctctacagtgtttgggcattctgtgattcatgaaatgataaaaacaatgaggtgaaagacagtacacttgttttttttaattcttatagttatctcataaaaatgaggaaactgacaattttttagtaccataaaatgtcccattgaaatttcactaaatacttagctaaaattttacatctttgacctactgtttgggcattctgtgattcatgaaatgataaaaacaatgaggtgaaagacagtacacttgttttttttaattcttatagttatctcataaaaatgaggaaactgacaattttttagtaccataaaatgtcccattgaaatttcactaaatacttagctaaaattttacatctttgacctactgtttttccttcttttaatggacaaaagctttctccttttcaattaaatgtgataggtcatatgcatgtatattattattttacatgtaatatttagatttttttaatttaaattataacacggcaatcctccattattttttttatttggtaggattcaatagttgcttttactccttccatttctactacaaatttacattttactcaaatattcttatatttacattttactcaaatattcttatatttacccaattaatattattttatatacttacgtatatttatatacatatattttatatacttatgtgtatattatatgtaatcaccctttaaatccaatagtatgattgattgcaggatgcattaactgaaaaacattttcttaatgtgggacattttcttttcaatcacagtttatatttaatatgtacatagctttaattttttgtagctttcttttctttctctgttacttttgttaaaattcaagcaatagaattcgagaactttcatatcaaaaacatatcatattatttattccttaactttcatttcacaggtagataattagggttcagagatacagtcaaagactggcagtaaaggtcaacagtatattcctaaaaaataagtactggggatctaatctccttagttcttatttttataatctaagccataatattggcaatgagcaaataataatcttaaactaaattgtttcgtctgagtttagtgctctagtttttcaaactgctcattgcttctctgatgaatagccctttaaaaagaggtgacacggagttaagatataaaagaagtcagaattagtatatatatctccaagctatctgtcacttctcctttcttaacccagactgatcgatcggttgattgatataacccagcactatgcattcctgatgcgtatttgaatcaattcctgtttcggattactaattggcctgcttccttctcctaattgcactttgtgaggactactctaggcaaccagctttgtgagctcattaacagctttgttcaacctcagggaggttaaggcactcactcaaggtcacacacctagttaatagggagtctagcttcaaacccacatctgactgaatctaattccacctacagctttgaaggctcagaaaacataactgcttgaaaaactgagttaactctatgactgccaggacaaaagcttaggatttagaaatgaaacaatgaataagtagacattttgctctcattttgttattttttactttattttcc

SEQ ID NO: 11460 - DNA, 2300 bp, Homo sapien
tgcaataaaattttaaaatctctgattgaaggagtgtgtttttgtgatatttgagtgagctgtcaacaaagatgtaagtactctacagtaactaagcagacagttagaggttcacacacttaaggatgagcagctcagttatacaaaaaaaaagtctaaggactgagtaattttataatatagctagacttcaggtttagcaaggagcaaataaagccataaaaagttgatagctggagagattaaagttggaggcagcaggttgtagaaaagagagctgagaagtataaatttttgaaaaggacagatagaaagtaatgtcaatgtgttatctaagtgcttatacttacaccaacaaagcttgttaattttaggaaaaatataaaagtagagaagtaagtaatgggttaaggtaataccagtaagatgtaacaaataaagcttgaaatgtagtgtcctagttcaataaatactcatttctaactcacataaagactgacttctaaatcatttactgagttcaggtgtcacatttaatgtcacacctaaagatatcaagtcttgaattctatttttaggaaaactgacatcctaataggggatgggtaaatagcaagtgtattataaatcaattagatttagaaatagataaaaacaaaagatacaataggaaataaactaggcaatttctgaacatttaaatatatttaccttgaagaaaatatgcaaatttttgacatagtattgaggggaaagtaagtttccttgtcatgaacagatgtatctgtgaatagcctgtggtgaaatcatgtggcaaaaggggaatatgttctgactgatgggatatgcagcagcacaagacaattctttttccagtcccctctactagatgcctctactctctcatggttttgcctctgagagagatagatctgaaataataatagtagtttagagtgaaattaactaatacctaactacaactgcaactaataccccagatagagcttcctgaatggaaaaagtcaagacatcccctaacacttggagataacaatttataaaatgattttctctaccctaatagagaaaccttacaacttaccacaacattaatcagacttctgtctaataacaggggatctgagttggaataactgagactcagactttttaaatgtctctagagaaacttcaggacaagaaacaaaaggcactaaaaggaaatgttagcctttgacacttacagcaacaacaaacagtaaacacagcctaactcttagataaacataaaacctcacactaaagatctatttgcttcagttccttttaccaacacatcatgtttagctttcaaccacaaattacaagcacattatgaggcaaaagaaaacacataatgaagcgataaagcaagtatcagaaacagactcaaattagattttggagttatcagacaggtaatttaaaataactatgattaatatgttaaaagctctaacagaaaaagagaacaacacacaggaacagatgggtaatgaaataaagagaaatgaaaagtctaagaacggatcaaagggagatgctagaagtcaaaaacactgtatcagaaataaacaatgcctttgacagactcatcagggaacagaacatggctaaggaaaaaataattaaggtatgtctaataaaatttctcagactgataaacagagaataaaatgaaagaattaaacaaatgaacagaatatgtgagaacagcgggccagttagaaaaggtaccacaaatgcaaaattaaacatcagaaggagaagagagaggaaaaaaaaaacaaaaaacagaagaaatacttgaggtaataatgactgaaaatgttcaactgtgaatatgactcaaagccataggtccactaaactaataaaacactaagacggttaaacattttaaaacattttaaaaatcgaaacatgagcataacatactcaaacttgcagaatttcaaagggaaaaagaaaatctgaaaaaattcagaagaaaaacacctgtagttctgagtcttctctttcatgtggttactttggaatgttcacggcacataatacaatcggtatatttactgattgtgtattggtgaattggtgctggctctcagttcccgcctcgcggcggggggggcctgaccacccctgcgatgggtgtcctaagagccagggggggaagaggggctggctgtcagtccccgcctcccggggggtgcctcccgcccctacgatggtggttccaagagtctgggggggaagag

SEQ ID NO: 11461 - DNA, 2300 bp, Homo sapien
acatttaaatatatttaccttgaagaaaatatgcaaatttttgacatagtattgaggggaaagtaagtttccttgtcatgaacagatgtatctgtgaatagcctgtggtgaaatcatgtggcaaaaggggaatatgttctgactgatgggatatgcagcagcacaagacaattctttttccagtcccctctactagatgcctctactctctcatggttttgcctctgagagagatagatctgaaataataatagtagtttagagtgaaattaactaatacctaactacaactgcaactaataccccagatagagcttcctgaatggaaaaagtcaagacatcccctaacacttggagataacaatttataaaatgattttctctaccctaatagagaaaccttacaacttaccacaacattaatcagacttctgtctaataacaggggatctgagttggaataactgagactcagactttttaaatgtctctagagaaacttcaggacaagaaacaaaaggcactaaaaggaaatgttagcctttgacacttacagcaacaacaaacagtaaacacagcctaactcttagataaacataaaacctcacactaaagatctatttgcttcagttccttttaccaacacatcatgtttagctttcaaccacaaattacaagcacattatgaggcaaaagaaaacacataatgaagcgataaagcaagtatcagaaacagactcaaattagattttggagttatcagacaggtaatttaaaataactatgattaatatgttaaaagctctaacagaaaaagagaacaacacacaggaacagatgggtaatgaaataaagagaaatgaaaagtctaagaacggatcaaagggagatgctagaagtcaaaaacactgtatcagaaataaacaatgcctttgacagactcatcagggaacagaacatggctaaggaaaaaataattaaggtatgtctaataaaatttctcagactgataaacagagaataaaatgaaagaattaaacaaatgaacagaatatgtgagaacagcgggccagttagaaaaggtaccacaaatgcaaaattaaacatcagaaggagaagagagaggaaaaaaaaaacaaaaaacagaagaaatacttgaggtaataatgactgaaaatgttcaactgtgaatatgactcaaagccataggtccactaaactaataaaacactaagacggttaaacattttaaaacattttaaaaatcgaaacatgagcataacatactcaaacttgcagaatttcaaagggaaaaagaaaatctgaaaaaattcagaagaaaaacacctgtagttctgagtcttctctttcatgtggttactttggaatgttcacggcacataatacaatcggtatatttactgattgtgtattggtgaattggtgctggctctcagttcccgcctcgcggcggggggggcctgaccacccctgcgatgggtgtcctaagagccagggggggaagaggggctggctgtcagtccccgcctcccggggggtgcctcccgcccctacgatggtggttccaagagtctgggggggaagaggggctggctttcagtacccgcctcgcggggggtgcctcccccaggtgcgatgggggtcctaagagccagggggtgaagaggggctggctctctgtcccctcgtcgcgggggttgcatcccccccctgtgatgggggtcccaagagccagggggggaagaagggctggctctcagtccccgcctcactagcaggggagttgctgccaaggccctcaaacatgggggccatcctttagaaaccctgtctagttgtttagagacataggccaccgacctcatccagggccccacagtttgggttaaaagtccacctgccatcttttctctctctgacacatacaatggaaaaggctttgtcagatcgggtaaccccagggctgaagctgccagaagtttttcctttaactcatgaaagacttgctgttgttaggatcccccttccaaaggttcccggtccccgacccctttgtgacctcatacaaagtcttggcttatactgcaaagtttgggatccacagtctacaaaaccccacagctcctgagaattctctcgcctgccttcggcccttaggctctggtagattgcaaataacatgctttctttctgttcccgggtggcttcggacccctgtcggatcggaaatcccaagtaaggtacctgccctgggcagatttgagctttcttcttggaca

SEQ ID NO: 11462 - DNA, 2300 bp, Homo sapien
ggctgaggtagattgcaaatgacctgctttctttctgttcctgggtgccttcggacccctgtcggatagtaaatcccaagtaaggtacctgccgtcagcagatttgagctttcttcttggacacctaatacccacagtcctccaggtgggtcctaaagttcataggatccgcgatgggggtcccaagccagggagggacgaggggctggctctcagtccccgcctcgcgggggggtgcctcccccccccctgcgatgggggtcctaagagccaggggggaagaggggatggctgtcagtccctccctcgtgggtggtacctccgccttctgcgatggtggtcctaagagccagggggagacgaggggctggctctcagtccccgcttcgcgaggggtgcctcccccccccgcgatgggggtcctaagagtctggggggaaagaggggctggctctcaatccccgcctcgcgggggtgcctcccccaggtgctatgtgggtcctaagagccaggggtgaagaggggctagctctctgtcccctcgtcacgggggttgcatcacccaccctgcgatggaggttccaagagccaagggggtaagaggggctggctctcagtccctgcctcgcgggggttcctccccccctgcgatgggggtcccaagagccagggggggaagaggggctggctctcagtccccgcctcgcggagggtgcctcccccaccactgcgatgggggtcccaagagccagggggggaagagggtctggctctccaccaccacaaaatggggggcctttatgttcaggttttgcccaagagtcagcttatttgcttcttgtactagcagggcagttgctgccaaggccctcaaacagggtgccatcctttagaaaccctgtctagttgttcagagacgtaggccaccggcctcatccagggccccacagtttgggttaaaagtccacctgccatcttttctctctctgacgcatacaatggaaaaggctttgtcagatcggatagccccagggctgaagctgccagaagtttttcctttaactcatgaaagacttgctgttgttgggatcccccttccaaaggttcccagtccccgccccctttgtgacatcatacaaagtcttggcttatactgcaaagtttgggatccacagtctacaaaaccccacagctcctgagaattctcttgcctgccttcggctcttaggctatagtagattccaaataacctgctttctttctgttcccgggtggcttcggacccctgtcggatcggaaatcccaagtaaggtacctgccgtcggcagatttgagctttctccttggacacctaatacccacagtcctccaggtgggtcctaaggatcttaggatctgcgatgggggtcctaaggcaggggaggaagaggggctggctctcactcaccccaaaatgggcagcctttatgttcaggttttgcccaagagtcagcttatttgcttcttctactatcagggcagttgctgccacggccctcaaacaggggagccatccttttgaaaccctgtgtaggtgtttagagacgtaggccaccggcatcagccagggccccggagtttgggttaaaagtccagctgccatgttttctctatctgacccattgaatggaaaagactttgtcagatcgggtagccccagggctggggctgccagtagtttttcctttaactcatgaaagacttgcttttgttgggatcctgattccgtaggttcccggtccccgccccctttgtgacctcatacaaaggcttggctaatactgcaaagtttgggatgcacagcctataaaaccccgtagcccctaagaaaccctcacctgctttctgcccttaggctccagtagattgcaaatgacctgcttactttctgttcccgggctgcgttctgacacctgtcggatagtaaatcccaagtaaggtaccagccgtcggcagatttgagctttcttcttggacacctatacccacagtcctccaggtgggtcctaaggttcataggatccacgatcggggtctcaagccagggggtacaaggggcttgctctcagtccctgtctcacggggggtgcctccccccttgcgatgggggtcctaagagccaggggggaagaggggatggctgtcagtccctccctcgtggggggtgcctccccctcctgcgatggtggtcctaagagccagggggggaagaggggctggctctcagtccccgcctcgcggggtgtgcctctcccccggcg

SEQ ID NO: 11463 - DNA, 2300 bp, Homo sapien
aggtttcagaaatcgaatataatatataatattaaaatcattttatacaagagcaatgaacaatatgaaattgaattttttcaaatggtacttataatagcaaaaaatacaaaatacctccagataaatctgataaaatatgtgaaagtttcacacagctaaaattataaaacactattaaaaattaatgattacctaaataaataaagatactttttctggtaatacaatagaatgatatttttatttttgtttttgttttcaattttaccttaagttctgggatacatgtgcagatcatgcaggtttgtaacataggtatacatgtgccatggtggtttgctgtacccattaacccggcatctaggttgtaagccccacatgcattaggtatttgtcctaatgctatccctccccttgactcccatcccccaaaaggccccagtgtgtgatgtttccctccctgtgttcatgtgttctcactgttcaatgtccacttatgagtgagaaaacattgtgtttggttttctgttcctgtgttagcttgctgaaaatgatggtttccagcttcatccatgtccttgcaaaggacatgaacccaccctttttatggctgcatagtattccatgatgtatatgcaccacattttctttatccagtgtatcattgatgggcatttgggttggctcaaatgctttgctattgtgaacagtcctgcaataagcatacatgtgcatgtgtctttatagtagaataattcgtaatcctttggatatatacgaagtaatgggattactggatcaaatggtatttcttgttctagatccttgaggattcgccacactgtcttccacaatggttgaactaatttacactcccaccaacaatgtgaaagcattcctatttctccacatcctctccagcatccgctgtttactgactttttaatgattgccattctaactggtcttaggagccagcccctcctaaccagcgcgcctacgcctcgcccccctgcgatggaggtcctaagagtcagggggggaagaggggttggcacttactccccgaaacgcggggggcgtctcgcctccctgcgatggggttcctaagagccaggggggaaagaggggctggctctcagtccccgcctctcgggctgtgcctccccaccctgcgatgggggtcccgagtgtcgggggggaagagaggctggatctcagtcctcggcgcgcggcggctgcctccccccactgtgatggaggtcctatgagccaggggggatgaggggctggctcttactccctgcctcgcggggggttcctctcgcctctgcgatggtgatcctaagagccaggcggggaagaggggctgcaactcagtccccgcctcgcggggttgcctcccccaggtgcgatgttggtcctaagagccaggggtgaagaggggctggctctctgtcccctcgtcgcgggggttgcttccccccctgcgatggaggtcccaagagccaaggggggaagaggggctggctctcagtccctgcctcgcgggggtgcctcccgccctgggatggggatccaaagagccaggggggtaaaaagggctggctctcagtccccgcctcacagagggtgcctcccccccccgcgatgggagtcccaagaatcagggggcgaagagaggctggctctcagccaccacaaaatggggggcctttatgttcaggttttgcccaagagtcagctcatttgcttcttgtactagcaggggagttgctgccaaggccctcaaacaggggggccatcctttagaaaccctgtctagttgttcagagacataggccaccggcctcatccaaggccccacagtttgggttaaaagtccacctgccatcttttctctctctgacgcatacaatggaaaaggttttgtcagatcgggtaaccccagggctgaagctgccagaagtttttcctttaactcatgaaagacttgctgttgttaggatccccattccaaaggttcccggtccccgccccctttgtgacctcatacaaaggcttggcttatattgcaaagtttgggatccacagtctacaaaaccccacagctcctgagaattctctcgcctgcctttggcccttaggctctggtagattgcaaataacatgctttctttctgttcccgggtggcttcggacccctgtcggatcggaaatcccaagtaagttacctgccctaggcagatttgagctttcttcttggacacctaatacccacagtcctccaggtgtgt

SEQ ID NO: 11464 - DNA, 2300 bp, Homo sapien
aaggagccagaaaaataattctggcaatatgacagtatgtatgtaacacctccaaaagatcacattacctctcaagctatgaatctatatcattgtgaaatctttgacataccagataaagaatgcaaaaggttgattattaaactactctatgagataaaagagaaaggtgtacaccaacatgaagaaattaaaaataataattcagaatatgaatgaaaacttcctaaagagttagatattttaacaatatcagaacttatggaaatgaaagacacatttagggaattacagaatgcagtaaaaaattccaacaatagactagatcaagttaaataaagaatttcagagctcaaagacaaggctttggaattaacccatcagaagaaaataaagaaaaaagaatataaagaaatgcacagtctccaagaaataggggattagtaaaatggccacatctaagaataactcatattcctgagggaaaaaagaaggcaaaaagttggaaaaatttatttgggggaataattgaaaaaacttctgtggccttgctagagatttagatattcagatacaaaaagctccaagaacttttgggagatttaatgcaaaaagacattgccaaggcatgtagttatcaggatgtctaaagtcaacctgaaaaaaaaaatctttttttaatcaaggtttcagaaatcgaatataatatataatattaaaatcattttatacaagagcaatgaacaatatgaaattgaattttttcaaatggtacttataatagcaaaaaatacaaaatacctccagataaatctgataaaatatgtgaaagtttcacacagctaaaattataaaacactattaaaaattaatgattacctaaataaataaagatactttttctggtaatacaatagaatgatatttttatttttgtttttgttttcaattttaccttaagttctgggatacatgtgcagatcatgcaggtttgtaacataggtatacatgtgccatggtggtttgctgtacccattaacccggcatctaggttgtaagccccacatgcattaggtatttgtcctaatgctatccctccccttgactcccatcccccaaaaggccccagtgtgtgatgtttccctccctgtgttcatgtgttctcactgttcaatgtccacttatgagtgagaaaacattgtgtttggttttctgttcctgtgttagcttgctgaaaatgatggtttccagcttcatccatgtccttgcaaaggacatgaacccaccctttttatggctgcatagtattccatgatgtatatgcaccacattttctttatccagtgtatcattgatgggcatttgggttggctcaaatgctttgctattgtgaacagtcctgcaataagcatacatgtgcatgtgtctttatagtagaataattcgtaatcctttggatatatacgaagtaatgggattactggatcaaatggtatttcttgttctagatccttgaggattcgccacactgtcttccacaatggttgaactaatttacactcccaccaacaatgtgaaagcattcctatttctccacatcctctccagcatccgctgtttactgactttttaatgattgccattctaactggtcttaggagccagcccctcctaaccagcgcgcctacgcctcgcccccctgcgatggaggtcctaagagtcagggggggaagaggggttggcacttactccccgaaacgcggggggcgtctcgcctccctgcgatggggttcctaagagccaggggggaaagaggggctggctctcagtccccgcctctcgggctgtgcctccccaccctgcgatgggggtcccgagtgtcgggggggaagagaggctggatctcagtcctcggcgcgcggcggctgcctccccccactgtgatggaggtcctatgagccaggggggatgaggggctggctcttactccctgcctcgcggggggttcctctcgcctctgcgatggtgatcctaagagccaggcggggaagaggggctgcaactcagtccccgcctcgcggggttgcctcccccaggtgcgatgttggtcctaagagccaggggtgaagaggggctggctctctgtcccctcgtcgcgggggttgcttccccccctgcgatggaggtcccaagagccaaggggggaagaggggctggctctcagtccctgcctcgcgggggtgcctcccgccctgggatggggatccaaagagccaggggggtaaaaagggctggctctc

SEQ ID NO: 11465 - DNA, 2300 bp, Homo sapien
ctctcctctgctgagagctgagtagagtctggactaccagctgtggaaggcatgagaggtgacagcgtgctggcagtcctcacagccctcgctcgttctcggcacctcctctgcctgggctcccaatttggcggcacttgaggagcccttcagcccgccgctgcactgtgggagcccctttctgggctggccaaggccggagccagctccctcagcttgcgaggaggtgtggagggagaggcgcgggcgggaaccggggctgcgcgcggtgcttgcgggccagcgcgagttccgggtgggtgtgggcttggcggaccccgcacttggagcggccggccggccccaccggccccgggcagtgaggggcttagcacctgggccagcagctgctgtgctcaatttctctccgggccttagctgccttcccatggggcagggctcgggacctgcagcccgccatgcctgagcctcccctccgtccgtgggctcctgtgcggcccagcctccccaacgagtgccgtccgtcccctgatccacggcgcccagtcccatcgaccactcaagggatgaggagtgcgggcgcacggcacgggagtggaaggcagctacacctgcagccccggtgcaggatccactgggtgaagccagctgggctcctgagtctggtggggacgtggagaacctttatgtctagctaagggattgtaaatacaccaatcagtgccctgtcaaaacggaccactcagctctaccaatcagcaggatgtgggtggggccagataagagaataaacgcaggctgcccgagccagcagtagcaaccccctggggtccccttccacactgtggaagctttgttctttcgctctttgcaatacttgctgctgctcactctcttttggtccacactgcctttatgagctgtaacactcaccgggaacgtctgcagcttcactcctgaagtcagcgagaccacgaacccactggaaggaaggaacaactccagacgcgccaccttaagagctgtaacactcaccgcgaaggtctgcagcttcactcctgaagccagcgagaccacgaacccacagggaggaacgaacaactccagacgcgccgccttaagagctgtaacactcaccgcgaaggtccgcagcttcgctcctgagccagcaagaccacgaacccaccaaaaggaagaaactccaaacagatctgaacatcagaaggaacaaactccggacacgccacctttaagaactgtaacactcaccttgagggtcggcagcttcattcttgaagtcagtgagaccaagaacccaccaattccggacacagggagctagccactccgtggtttctgctctgctgagaactgagcagactttgggactaccagctccagagaggagctacccactgcagagttcctccaggctgttcatttttcctcccctgtcctctctttgcagatgggtaatcatgtctctgcaccacgggacactcccctctgaggcataaaagtttaatttttggcctggcacggtggcttatgcctgtaatcccagcactttgagaggccgaggcgggcggatcacctgaggtcagtagttcgagaccagcttagccaacatagtgaaacccagtctctactaaaaatacaaaaattagctgggcatggtggcacgggcctgtaatgccagctactcgggaggctgaggcaagagaatcgcttgaacccaggaggcggaggttacagtgagccgagatcgcgccactgcactccagcctgggtgcagtgagactgcggctcaaaaaaaaagaattcttaccagttgaacctctggcttctttctctctgtctgtgaaaacatggttgtagattctctctcctccatgactccatgacttcccttttactgggaacctatgcataggactctgagagagatctgtcattttccccaaaaccaggccccctgtcagcatgaagcagttagatatacctcttcagagatgtgattgatggcagcggcagcccatctggaccagccactgccgtgacgccatcagtgtgagacgtgtagctagggctgtgcactccacagagctggtgggagctgggaataggtgaaaaccctgcctccttgtgagttggcaggacgggagcctcctgttccctggctgctgttgtggccaccgagccgcagccctggagccaggcatccctgtgcttggggatcagagcgagcaggagcagatcctctcccttctgggtgcagctgcagctgcccagccatggct

SEQ ID NO: 11466 - DNA, 2300 bp, Homo sapien
aacatttaaggcaaagttaaaaattcaaaaatattttaagccactgcgtaaagaagtgattatccaatgcatccaatttagagaaagactccaataatatgggatgccagccattatgtggaaatgtggagtcactgagaagtacaaaatattattttcctgtgatatgagtaaatttcataaacttaggagcaaaatcaaaaggtaatatgaagtgaaatataatacagatgaaattgcttctttgaaaattcacctgttaccattatgaggaataacagaagcaagtgttgaatttgcttagagaattctgtcagcacttaggttttatttgttgtttttttggaaaatatcaatttcaaaacatttcattattgatacatttcttagaagttttccagattttttggtaacagagatataggaagaaaaataactaaaaatattttatcttccttaggtggaaaaaaaatcggcattttattttctactatggtagctgacaacattaaacttgtaggacaaaaagaatgaaatgattctaagtcataatctcttccaaagtttcctaattcagtgagcgatattcagcttctcactttcctcatagcatccttacactcagcaacatttctgtcctgcaggagctaacctgctcagcaagagatttaggtaagactgcaatggctggagcatttccaaatgtctggtcttccactttctggaacatgagaaatcattcattttgaacagtaacatctggccctaaaaatgtccataatgataactattcaaattaatcagaaagtgacattggcataagttgtagtttcctgtggccactcaggaatgttcagcattacttgtgggattacatctaattgttcattagttgtatatgaatataatttgctgttctcaaccatttccaaactgaagaacatgctataggtttgatcactgtaaaacaatgctagggtactaatccttatatagagaatcacatttctccattgaagccctcctcaagatgtcattttaaaaatttccattgagcttttttttttttaaaaaaaggaagaataaagacttcagaaatacacttctatttttcatctttccattattacaataacagataaaaataaacacaaaggctatttttctcatacttgactgttatatttgttactttatatccaagttaaaaatctaaaattgatttcccgtgtgaagtgagttttagccaaccatctgctcaggagaggggaaaggcagacaaagctcattctttcctgctgctgcttctcactgctgttaggtgactactgggaaccttaaaataggattgccaggtttaacttttcagaatgtggagtaggcatatctgtctactagggatttggggcagggaaggttgtacttagaccagcaggactagctaacgtattaggtactgatgttgttgaatgccatagatgggagcacagatgtctcaaacatgtcctgcttcccatctcaaattcatgattcagcaataaaaatgaggtgatcttgaatatatagattacccatgagcctatgtctaaacttgaatggtattacaataactggttttcttaatccagtggctttcaattttggggatgagtatgttggagaaatctagtttcggtgctggtgacaaattaagggaacacctagggataaagagatgttattaagtcggagaatttgtaataatgttcagatgtagaaaataccacacaccttatagcattcatggtgaggctaattgtggaagagaattcctggaggtatagagtttgctacctttgcaatgcaaaatgtgttttcatagggaaaaaagggggaggacaacaattagtgcaaaccaaagtaaatatgtaaatatgatatttgctgtatttcaaaatctagcatttgaaatacagcaaatacagaaatcatgtttaaatgaccatggaattcacagtaagggaacataatgttaaacatgtttttctattgacataaattttaaatcttatgccctgaatttattttctcatatttataaaattctttttggccacctggctcctttttttttcatttctcaaagtctgtatggaattcaagcattaaatctctctgcctctacccaatccagtccacacatagtcctccttattttaatctcttcctctttctccctgccatttcattctattcttgtatgtattctttccattatattacctaatccttacataggaagcatttctatactgtctgct

SEQ ID NO: 11467 - DNA, 2300 bp, Homo sapien
ataaatttcaacaaagtggcaaaatccacctggcatacagccaattgaacagaaaattggagtgaaagaaatggagaaggaacaaagagttttttcaagaaaattgattctgaaagggaggagaagatatggaagcttggagaaatgacaggtggcaggggggtttcatttaaagagaaaaaatgtgaattatttaataacaagaaatgataggtgttttcaatttaatttttaataaagtgaatccaaatcctgaaagtggtagatcaatattagaaatcttgtattatttctaagtagtcatagaaataattaaggtactttattgaatacttgccatgggctggacccagtgttccttattcacaatagatactttaattttcataacagacaaggtagcaatgcttattgcttccattgtttgaaaagaagaaattatgactaagagagatcacacatttagtaacgaaggcaactcaactgttgtactgtctttcttacccaacagcaaatccctatagcatatattcttaattattttgtaataagatcacaggcatactacctttattatattagataaatgaaagtaggatagatttttagagggagggttgataaaagtatcctcacatgacttaaaaaaagagaatgcctatgtctgtgacaaaaaatgtcccatgaaagagccagatgggtattgggatgggtacaattacataaagaggggggaaataatgtattcttacttgatgttctattatagataatatatattcattttcactttgtctaaaaatattagtactacaggaaaagtgaagctctgtaggactttagctgaagcatttctaaatatgtttctttgtcctaatagagattctttgttttttttttgtttatttttatttttgaaaaccattcaaagggtgctttaataagtgtttttatagtagaatgattttagccagaaaccttaacactgaatggaaagtatctttcagttcaagaggagataaatgaagagagtggggtaaaatgcttgtgcacagacccaggcagatcatctggttaagcatgggggattgaacctgaaaagatttatgggcccctgagcaatttgctttatgctggtaataattggaacaccacttattctctacttcccttattaactttctctgcatcaccgctctttttgagttcatctatcttaatgaaatatccatcttctgtctttctttcttgctttacattttaggccttataaaggattgaaactagttttcccagttggacacattcgctagccagaggccaactttgcttccaagttagactcaatgcaattttccccattaggcatttgtttcattgtctacatgagagtaataaaacttatcagctagctcaatcaaacacatcagctggaaacatcttcttgctgtgaatgaacagaccagttttttttttttaatggtttacttggattgtgttgttagaacagtctggatctgttatttgaatattagacacattctctatgtctgaattttggtgcatctctaaaatctaaagaatgctgcattttatagaggtaagtagatcataattctctttagaactagttaagggagatagaattggaggtatgagttttaggtgagtttagacagttacagaaataactatattctatctgtaaccaatttgaacaatgatatagttttcatttctctttctcatcctaagggaaaatgtatttatgaagcctttttcattcatctaagatactccccaaatcctgaatgggaaggactaatgtatgggtagtacagtaagcaagtgtgaggtggaaataggtgaggaaataagaagccaaatctcacccaacacaaacatccccatatgtattcatgggtatagacctgctgtctatttgaactttttccattgtatagcccctgtttgttccaggccctgcttgtagtgtttctgtaggtagttaaggtggtttatgtgtgagaatattggttgaggaagaagtttataattactttcacataagatgctttatttgttattatttttagattgtgatgggtagaaacgaagtaagtttcctttatttctgggattacaaaaattactttcctacgacagtaactacttttagtcactggaaagcttctttctctgaagattatcataagtctctcaggaataaacacatattgtccagagcttggagaggatccttaaaaacattttttatttcattttttagagacaggatc

SEQ ID NO: 11468 - DNA, 2300 bp, Homo sapien
atgtactagctttaattgtagattttgtgaatggcaaaatgatcgtttactgtggtaagataaaagaatcatcctttcattcactgacattattctgtgaggcaatatttttcttttcactttgggatacttgtaagtcctttctattcttgaattttatatattctaatcatacaaaatattactataataaaagttgctttgctatttaaaaaatatcagtctattatctgcaaggaaagtattttatattttacatataagggattaatggattttacagtgggcttttagacactgcagttgaactgtgaatattaactcagaaaagtttgaattaaaaagagcttacaatttcatgttggaaaattgtgatgtcaaattagttggttaaatcatgtcattatttattcaatatatggcttagtaagcttgattggtgtttttttttttttttacttttcatttaaacgtctaaaaacaaatgttacttaaaaaagaaaaaaagcaaacaaaactattgtactcaaaaacaaggggtaatctccaacacgccctcagtcaagagcttaagtatgtcaagagcctttaatgcctaggcagcccattatagaatggggaacacacaggtttaaaataaatgccctttattcttcctgtaagttagaccaagttattcaatcatgtactaagaccttctctgacaacctttataggtcattcagaaaataaatttttgttccaagtgaactgttcctatgttaatgcttcaaactttactcaggtatcaggcgttaagtacaagccattacacaaacctttgtggtttactgactttgaaagatcaatcaaatatattactagatagtgctttgggggtcagtatttgagaaataaagctgtattttttggggagtcattccatccagttcccgtatgaaaacgagaaacttgtgaggatttagtacagagctggagtcggagaaatgaaatgcacgggaaaagacgaaaatcacaggaaagaaagttggaatcagcagaaagtgcctaggggaaaggaagtgttccacagcttgggaaacagctgcctgggactccttccagcccctcggaagcaaagttcgcagtgaggtgggctggaagcgggttttgcagcagccgcgagtccgggctcaggtttccaggcgcggctggagcagaagtgcagggaccgccacgatccaccgccgcggccggtcccgctccgctagaggagacttcgcacgcgcagccgactggcccgggctgaccgaggggacccagacgctgccactttctctttccaaggcagtttccgtggctctgcatgtaggaagtgctccgattaattttctttccggtctccgcagagattccaaattctgcggtccccacctttcgctgtactccctctccgcccttctttccaatgtccctgccagcaaaagcctctatttgcagcaccgggcatgttgtccgtttaacgcgctccggggatctgctggctcgtgctcccaacccaggggtggctatacgtctcgcgcctctgttcctgggtagactcccccatctgtgcattttggccccttcacttagcaaagagatgtgcgaagtgtgcgcctggagacgagccgcctcggtgacccccatccgcccgcagcggtggccctggttccccggatccgcgcccgcgccctgcgggtctcccgcgccgcccttgcccgccggaccacccgggctcagagggtcgctcgctttcagcgcctgcgagcgccgcttccgcccgggcctggggagcgccagcgcgtccctcccacgccggaccctgcagagcatgctcagtgcacctcatggaacccggctctcctggggccaggatcagatttccgggttttcgctgctgccgagggggcgcggaggaggggaggctgggagacagtcagcgccttgttccgcgctccctccctcgcgccgggctgcggccgcccgcgccgcaagatgcaggccaatcagagcccgggggcggggcctgggcagtcacgccctccctctgggcttattgagagttatatcaagaaattcagttcagagagaggagagggagaaggagagaggggcagaggggaagggagagagggagagcacgcgagacggaaaggagcgcctcagagtctctgaagcacgcaagagataaccgattaggaatttttcgggcaactgtcacccggatagctgtcagagaatcatcatcaccgcaactctgacgtttcctacaagaagtt

SEQ ID NO: 11469 - DNA, 2300 bp, Homo sapien
gtgaagaaaaagggaaaatgttcatggaaataatgtgtgtgaatgcatactaaagtggtggtggtatgtatacccaagttcagatggatatgtttttatttttcaaatgtctacagaatattatttgtcactataatcaatgttttttaaaaataagagtttagattggacactgaaaattcaatacatatacaaaactgaagtatttattttttagcagctttgtagaattaggtattctcttgccttcagcgtcttgtcaacctgatttcctcagctgttctctcagaggaaagagttttccctggtatgtgttaatttcagatatttacaaagcatcacaatgctttggtgctgatcttgggatttggtaattaacaagacatagaaatttatagacaatcttgacatttgaatgttgtagggagtcattttattccacatttttcatatagacttgctataagtttatcttcttttctcacatctccatcccactttggcttcgtagagacattatttgagagcaaaaatgttattactatgaattctcctagaactaaagtaactagatattttcttagaaatacttcattcagaacaagtaaatatgcattgtagagaaaattgtggcttgaattgcaggaagaaaggcagaaacacaaaaaaataatactttgtctatagcagtgtttcaatttttaaaaattgagcttatataatgagagatagtaatgtaatgagtggggtagatggaagaaagccattctaggctataatcctaaaaggcttttggattaaataggtctacattccaacctttgctcagtaaacaattcagtcttataaatgttcactcttgttggtgtgctttacttactttcataacctgtataagaaaaataaatgaacaaacaaaaatctgtctatcagtgttgctttgaggatcaagtgagtttgcaggtgtgaattgcctagcaaattgaaacatttccttgaaggattgggacaagttatattatttttcaataaatattcagtctcccttttcttgtcaatgaaaagtctgcatttcatccttgaccatgagtactttggcaatggatgttagctgctttgacttaattaatatctgagtagaggcttcaaatgtgcttaagatgttttggattacgctttcagtaccctgtccttcaccacaaaaggaacatatctatattagttgaggttctccagagaaagagaaccaaaaaatatttattttgaataatttaatcatgcagttatggaggctaagtcccacaatctgtcatctgcaattgggactcccaggaaagtcagtgtggttcaatttagtacaagcaggaaggcctgagaaccatggtaggcaaaagtgtaaatcccagactaaaagcaggtgaaaacctatgtccttatgaggcaaacaggcagaagacaaaaatagcaaatttatccttccttcacctttttgttctattgaggctctcaatgggctggatgatccccacccctcccctggggagagtgaagttccttgagtccacgaattcaaacgctaatttcatcaggaatcaccttcacaggcacacctatacatgtcttatttgggggacaccccatggcgcatggaaattgacatataaaattaatcatcacagtgcccaaatactcactcaccgctttatagtctggagcctaaaaagagagacagatggagcagatttaagccagattgttttctttctctgtaatttgtgcttgaggtctctctcttgacagtgtgtatgaacgctcggcctgccctgacaggacttcagaggatttggttgtggatgttacagtgtgcctttcacagtgtactcctttaccctggcagaaagcctattcctcaagtgtccaacatgggattcactaggcctattgatcaccgccccttctcccgctccctgcgtggactggagaccattgttcagttacagcagtgtgggaatcatgttggatacgtggacaataggctgtctgccagtgtcacactgctgtgactgagcaatggtcttcagtccatgcagggggtggggtggggggagcgcggtggtgatcaatgggcctagtccagaagactctgtctgtatgtcccatagggaggtcacaaagaagtccttattgagggcagatatctggactcaccacattcagtaactgggagagagctgagaactggaaatttggtgagtgatgtctgtgttctgctcctggtacaagacaatctgatactcaaa

SEQ ID NO: 11470 - DNA, 2300 bp, Homo sapien
tacacatgcctaatctcataagataatttgattccaacaataaagatgattttggttggtagatgggttaatttaggaattcttatcactcacaactctttgtgaataaaaataataaactattttcaaaagtaagaaacttgttaagtctggtgttttttccctaactaaactgtttgttctgttattagttttaatttattataatttcttaagtcactactccattaatgttttcaaaactccaaattacataaaagtctttataaactactaatgctgaatatgccttattttaaaatgtatttggtataaagtaaactttaagaaaatatgaaacattaatatttctaggagcttattcaaagaatttaaaaattgacaaacacacataatgtttaaatttcttcctgagctgttagagtctcaaaactatcagttttaataaaatagtaacagataaatacttaacctagtttccttttgaatatataaggtgaattgcttaatgtttctggataattcctcccaaaaagtgtttatatttactcaacaaaagggtataaaaatttcagtacatttgattttttaaattataaaattataggtaactagcatattaaataacttttaataacattttataacttcatagtattcatagtacctaacgttataattctttttcctaaaatatttcacttaatggaatgatagataaacttatatttaggtctcctatatatggaaaaaccattgacacaattgataattccagattatacttctccctcattaaaattatcttacattatagtacatgtcttaatataacattagaatatgttcaatctctgaaaattaaaattaaaaaatatatataatgtatataattgaaaatttttaaggatatttttaaatctataaccacatatgtcagcataattagggagcacatatatacatacacacacatatatacacatataggttatacatatataattttatctattctttttggtacttaatcaaatttataagaaactgattcaatcaaccaaaagactaaaaaagatgcttctgttactaatttgttactgtgtagtaattaaaatttcttaatatatacattatcattttcctatatttctcctgtagttcttctttaataatgtattctgatatcacatgaatctaaatgcaaatcatttcatatcctgactatattccaaaaccagtaatgatgtggtttagaatagtaatgagtcaattctctcaaaatgtaaaacttgggagttttatgtctatgaaggattttctgtaagtctttaaagtagcagaactctacacaaagaagcataatatttgaaataaactagaaataaatattgagctgtttaccaaggagacaaaatttcaatactgagccaacaaatcacaacagctaaatgcaaagggactccacgacagtttaactcaaagacttactctgaacaaggcaagagtgaacacaaagtaaaaggaccagaagagaagttgggacagagaataagacgactgcatttcaggagcaaaaagagaggtaaaataatgttgctgtccagtggcctcattttgtccacctcattactcctggaatagattcaaaccacagggaccttagataatatgctaagtcagttactaggccaatatatgagatgcattctgatgatgtgtaaagcaaaatttcatcttcagataatggaacgactgatataatttaatgacggtagatgacagaagaacaccataatctcaggaatatgagaactattccacttgaaggcttacaaaaatgcatgtaagttcaattggtggctacaactttgaaaacttccaaaaagaaaagtgaggtgtctgaaccaatagaaattaatgagcaaacttgtaatgaaattagaacttgagtaatcaaaaccagggtggcatctcttaacccacattttcaacctgaaacattttagacttagtagccacatgagcacacgcggtgaaatgagtggaaattgagagatgcttggaagccccgtggggacttactgtacctgtgtccacatccttcacctgttgcctggctagagttgtctggctccactttgagctcttgcagaaccagccctttttcgtgtggtccaggaaagtccatgcctggcaccacctcctcctctagtgactccacgtagaagagagtcctggctggctgctgagtgccctgcccaggagccccttgctgcagcctcgtggcaactggaagc

SEQ ID NO: 11471 - DNA, 2300 bp, Homo sapien
ctctgtcctgtttgtgatgtgtaatttcataaactattttcttccctaagggaaatgcttacttgattccattgttggataaaaatgatctgtcaccattgttggctttaaagggttttttgcttaataaacaaaaaacaaacaaaaaatcactgaatactgagagaaaaatcaaggcacaagggattgcagtccagctgttgtggcataaatcaatattttaaaagcactatagtgatttttattcccctaaaaataggtcttttgtgcacttaatttcttattttattaaagcgtccaactttgcctaaggactccaaatttagctttggtttctggttacgtttacagctcaaccttgggggtaactgagcagtagcctaactgcacttcagtggttgattcctatgctctgttgggggttactgaaactgtgaatttcatgaatggacaacaaccatattcttggttaagttagggaacacattgcatttctggtccctttgccttcaacaaagactactgggttctatcttaatggctcattaaaggaaaggttaaaacattccaagtagtcatgtactgaaagtgatcgcaatcctcaccattctaagtatagatataaggggaaaacacatcttctccaaacgcctatttgcaagatagtaagtagccttcggctattctcatttattgcctaaactcttccatgcatagtatacaatgatttatgtactagaaggttataccttgaaattctcttttatcattttattccattcttgatttacactgataacagctttcattccgaggctacacaccaaatgcactgatttcgcaaaacccgtcccccgtgttcagatgcccatcttcaaatttctaccgtacgcctctggccccaggagtgaagcagtgcctgggtgccttaatagcagaatcacaatgtaagtgtcaggatggtggcatcgtcacattttgacgccagcatccgtttcttctgtgtctcactacagagaaactaaggctaaaggttaaaagacgcggttcattaaataattcaagccattaacctgcaacctgcaaactgatggcagcctattaagtttacactgccatgattcatgtgtggtgtttactgatgcaaaagcataatgcctgttttctttccttgtattgctacacagtaatgtagcgaggaaggagggtgaaaaaaggtgacaagacccacgcaaggggacaataagagcagcagtctcacttgcataaagaagattgaagccttccctccctccctccctccctccatctctccgtataggccccagtgcacatctgcgtcacttacaggggaggaggaggcgctgaggcagagagaaaattgtactgtgaggaccttgacagcttcacaggcgggctttttcttttgcctccctatatgcgctagaatatctatttttctcttttacaaactgactatataaaaccacctcttctggcattgcagaaagcaattgactttctcagagccacccggcaggctatcggggcatcctcgaaaaggccagggacaggggcgcaggtgcaccaagagatctggcgaggggtacgcttcctcgagacttggggctctttctctctgcgctctccagacactgaactctgagctgcaaggacaagaacgccaccaccttccctactaaggctctgccacaagcgcatcccagtgaggtgtatccagctgcagccgcctccggagcttcggagcgctcagacctccctccctcgcgcatctccagcctaagggttgtcccacctcgccataacacggggctctcgcgcgggcatcgaggattctcagcttttggcgtcccagtcctgcctctgctcctgcctggtggtgtccccacgcccaggtcctgcggacccgaccacggctgaaacgcgcggctttgccgtctgcgctccagccttcgcctggcagagcgcgcagcccacctagcgtcttctggctctaggggtgcagagggcgcatcccgcctcttcctccgcccccgggccccgctgtcctcccccacctgctgaccagcctactcctgcgtgagctgccagccttttgccttctgtgcgtaaagcatgtcaggctctgggcgaaaagacttcgatgtgaagcacattctgcgactccgctggaaactcttcagccacccgtctccttccaccggcggcccggcggggggaggctgcctgcaacaggacggcagtggcagctttgagcactggggacccagccagagtcg

SEQ ID NO: 11472 - DNA, 2300 bp, Homo sapien
cttctcttctcgtccttctcactttcctctctttcttccatttttttttcttgttttattttctccttccttttctacaacactgtagtatggtaacaatcaagtgaaaataatataatcatctttgtcagtcatttcagtttaacataacttcatgcgtaatttaattcttaaattcgaaatattttcatttgataataaagttgaattttatttaaatatattcccaagaagagtgattttttcaaacttatatattgtattaagattgacaaatatagaaaggtacctatatttacataattggctctggcagtgctttaaacatactaaatgttactacaagactaacaaataggctttattcaccatctgctaaatgtgacaatatttttaattcatgttcctttataccacaaattaatgttatatctcctttgggtcatataaaatattgtcctttaaacatataacttttaactgtggaatattcttattagtattgcagagaaaaaggaactgcaaaattaaattttagaataacaaataaattttatattacagtttgtgaatggtgaatgaaaaatatagatacagagacttgacttatgttattttatattattttaaataaatcaagtgagataatccatgaagcactaatttctatataaattaattacatgcacttcaactttcaacattatttctgatggaaagtttcctctgtcctgtttgtgatgtgtaatttcataaactattttcttccctaagggaaatgcttacttgattccattgttggataaaaatgatctgtcaccattgttggctttaaagggttttttgcttaataaacaaaaaacaaacaaaaaatcactgaatactgagagaaaaatcaaggcacaagggattgcagtccagctgttgtggcataaatcaatattttaaaagcactatagtgatttttattcccctaaaaataggtcttttgtgcacttaatttcttattttattaaagcgtccaactttgcctaaggactccaaatttagctttggtttctggttacgtttacagctcaaccttgggggtaactgagcagtagcctaactgcacttcagtggttgattcctatgctctgttgggggttactgaaactgtgaatttcatgaatggacaacaaccatattcttggttaagttagggaacacattgcatttctggtccctttgccttcaacaaagactactgggttctatcttaatggctcattaaaggaaaggttaaaacattccaagtagtcatgtactgaaagtgatcgcaatcctcaccattctaagtatagatataaggggaaaacacatcttctccaaacgcctatttgcaagatagtaagtagccttcggctattctcatttattgcctaaactcttccatgcatagtatacaatgatttatgtactagaaggttataccttgaaattctcttttatcattttattccattcttgatttacactgataacagctttcattccgaggctacacaccaaatgcactgatttcgcaaaacccgtcccccgtgttcagatgcccatcttcaaatttctaccgtacgcctctggccccaggagtgaagcagtgcctgggtgccttaatagcagaatcacaatgtaagtgtcaggatggtggcatcgtcacattttgacgccagcatccgtttcttctgtgtctcactacagagaaactaaggctaaaggttaaaagacgcggttcattaaataattcaagccattaacctgcaacctgcaaactgatggcagcctattaagtttacactgccatgattcatgtgtggtgtttactgatgcaaaagcataatgcctgttttctttccttgtattgctacacagtaatgtagcgaggaaggagggtgaaaaaaggtgacaagacccacgcaaggggacaataagagcagcagtctcacttgcataaagaagattgaagccttccctccctccctccctccctccatctctccgtataggccccagtgcacatctgcgtcacttacaggggaggaggaggcgctgaggcagagagaaaattgtactgtgaggaccttgacagcttcacaggcgggctttttcttttgcctccctatatgcgctagaatatctatttttctcttttacaaactgactatataaaaccacctcttctggcattgcagaaagcaattgactttctcagagccacccggcaggctatcggggcatcctcgaaaaggccagggacaggg

SEQ ID NO: 11473 - DNA, 2300 bp, Homo sapien
agctttgtttttgttcttcccattatttacaaaacatatatttactgacaaattgaaaaggactttccaaaactacagcagcacttttcaaacatgaaaaaaaaaaaaaaaaaactattgtgttgtccaaaaaacacattagcaattggctttgggtcttaaaggacatgaggatagttggttactgtgtaagacaggtgaattaattatagagttttgggtaagaaaaccctttttccactttctaaatcttcaaggataccttatctccttgatagctctaggtttaacaggtatttctgactggcttttggggagacagtgaagttattctaaatcatccacatcaaggcaagcatttctttccacaacctattaggaaatatggaattgaatacagagctttccattattcttaagcgatttcggactgactttcttctcaccacttgaaaactgtcctggaattttcactatctttatataaataaataatttagtagagaaataaacaatcagatgcaaaagaacattacgctttgcttacatgtgaattttcctcaaaataatttctgaataatcgtgaagtgggggctgtgttttcgtttctagctcattgccaaaacgcgtggagatggatcctaaatcctggaaggagagagctcggcgcgctcaggctcctctttaagttggcgggcgattgtttagaagctttggaaaaaattaccagtccccgcggacgaaatggaatgtgagacatgcaatctaacggtagtagtagaagagaagtagatgatctccctctccttttccgatcgccacttctgtgtccccggcttttcctctccgtccctcccacagtttctttccgtatcctccccctcccctcctcctttcctcgcacgctccctctccagtgtctcgcgctctcggagtctctgctccgagttcctggttggataatttgggttaatactagtgagtgaggtttttgcggcttcaaagggtatttcaagtttccggagctcctcccctctgcaccgtgtgacaacaacaactcgtccagccggcagcctgcacttttcagctcattttctctctgtcattcccctctcaatctttgatcaatgtacttgccagggagagcccaagtccttcaaacctcctccttttcaccttcatccttaactttgtgctagagcgagacccacacaacaacagccgaccctccccgccccacccccacccccaaaccagccctcgatcccagcccccggagaggactcgcatttcgacttgcgggacacttttgtgcgttcctctccagagcgcctctcgtgctcgcccctcttgcgctcgctctttattaccttcacctccttttctcccccttctctccctttctccttctcgttctctcccggagttgttgttgcccccctcgctccttctccccccttttttccccttcccctcccgggggtgtgtggcaacttttcctctcgcttctcctccgtctgtttccccttatatgtgaccatggcagtgccggcggctttgatccctccgacccagctggtcccccctcaacccccaatctccacgtctgcttcctcctctggcaccaccacctccacctcttcggcgacttcgtctccggctccttccatcggacccccggcgtcctctgggccaactctgttccgcccggagcccatcgcttcggcggcggcggcggcggccacagtcacctctaccggcggcggcggcggcggcggcggcggcggcagcggaggcggcggcggcagcagcggcaacggaggcggcggtggcggcggcggcggtggcagcaactgcaaccccaacctggcggccgcgagcaacggcagcggcggcggcggcggcggcatcagcgctggcggcggcgtcgcttccagcacccccatcaacgccagcaccggcagcagcagcagcagcagtagcagcagcagcagcagcagcagtagtagcagcagcagcagtagcagcagcagctgcggccccctccccgggaaacccgtgtactcaaccccgtccccagtggaaaacacccctcagaataatgagtgcaaaatggtggatctgaggggggccaaagtggcttccttcacggtggagggctgcgagctgatctgcctgccccaggctttcgacctgttcctgaagcacttggtggggggcttgcatacggtctacaccaagctgaagcggctggagatcacgccggtggtgtgcaatgtggaacaagttcgcatcctgag

SEQ ID NO: 11474 - DNA, 2300 bp, Homo sapien
tggtaatggcagatgctcggcatttaattcccattcttccatttgtgggtctagaacttaaaataatgagactatagtttagtcttttaaaaccatatcaaaatttattaaagttaggcatagaattcgaaaataaaattagcttttcagggcttaatactttcttcctcccctcccctcattataatagtagtttggtatgtcttaaaaaagtaatattttctaaaacatgcaaaaatacttaaggaagtgttttgatgtatgtgatatatattgaattcctacttttacccataacaaatttgaagactgaaacataaataaaaattatttctgaatgtattacaatacattggttaaccaggccaaacaactgtttaaactttagttgtccttgcagaagttcatggacttttctgcaacaatcgattttctgaattcttatctcccaggaaagcctcctgatttaactgctatgtcccaaaaattttagtataatcatacactaattagtccatagtgtcatatttctatttttcggtagacagttcctgcactatttgacactgcgattcacagagttcaaaggcttaaaatgatatagagaaatgtgatcatttcaacaccagaatggcaaaaattttattataaaatttcccaaccctgtgaacctgctactaacagtttattttaaaaatctgtcaaatgctaaagcattgcttcatatcttatgaacttactgaacatgtgtggaccggttcaaaggctaactaattgaagatacttggagacatgagcagcaaatagatttgacccatattcaaatgatatgttagtcaaaaatccttgaataaatacttcagtgcaacaagttagaaaagaaaagaaaaggaaagaggaaggaaaggaggaatagagtcagtctaaactcagcctcatgttgttttaagcacagctacccaagtctttacaagtcaactagtgagctttgtttttgttcttcccattatttacaaaacatatatttactgacaaattgaaaaggactttccaaaactacagcagcacttttcaaacatgaaaaaaaaaaaaaaaaaactattgtgttgtccaaaaaacacattagcaattggctttgggtcttaaaggacatgaggatagttggttactgtgtaagacaggtgaattaattatagagttttgggtaagaaaaccctttttccactttctaaatcttcaaggataccttatctccttgatagctctaggtttaacaggtatttctgactggcttttggggagacagtgaagttattctaaatcatccacatcaaggcaagcatttctttccacaacctattaggaaatatggaattgaatacagagctttccattattcttaagcgatttcggactgactttcttctcaccacttgaaaactgtcctggaattttcactatctttatataaataaataatttagtagagaaataaacaatcagatgcaaaagaacattacgctttgcttacatgtgaattttcctcaaaataatttctgaataatcgtgaagtgggggctgtgttttcgtttctagctcattgccaaaacgcgtggagatggatcctaaatcctggaaggagagagctcggcgcgctcaggctcctctttaagttggcgggcgattgtttagaagctttggaaaaaattaccagtccccgcggacgaaatggaatgtgagacatgcaatctaacggtagtagtagaagagaagtagatgatctccctctccttttccgatcgccacttctgtgtccccggcttttcctctccgtccctcccacagtttctttccgtatcctccccctcccctcctcctttcctcgcacgctccctctccagtgtctcgcgctctcggagtctctgctccgagttcctggttggataatttgggttaatactagtgagtgaggtttttgcggcttcaaagggtatttcaagtttccggagctcctcccctctgcaccgtgtgacaacaacaactcgtccagccggcagcctgcacttttcagctcattttctctctgtcattcccctctcaatctttgatcaatgtacttgccagggagagcccaagtccttcaaacctcctccttttcaccttcatccttaactttgtgctagagcgagacccacacaacaacagccgaccctccccgccccacccccacccccaaaccagccctcgatcccagcccccggagaggactcgcatttcgacttgcgggacacttttgtgcg

SEQ ID NO: 11475 - DNA, 2300 bp, Homo sapien
aagtacagctaacctaagaaaataggctagaagtgaggtcttatactctacctttttccaaggaaatatacaagacagtaaatttatatttatatacacacacatatatatattcatacataaatccacttacaaaataaaactattaagtgttgatacatcgaaaaggatagaaaaataagctgaatattaagagtaacattctcagaaaaacagcaaggtagatactgaacaagtgaaaaattagatgcaaaggctctaaaagtgtaattctttgaaaagaaaaccaggaccagtgcagaaaaagccagcagcccctctgcaagtgctacataagaaaatgaggccgggcatggtggctcacgcctgtaatcctagcattttgggaggccgaggcatgtggatcacctgaagtcaggagttcgagaccaacctggccaacatggggaaactccgtctctactaaaaatacaaaaaattagccgggtgttctggcgggcacctgtaatcccagctactccagaggctgaggcaggagaatcgcctgaacccgggaggcggaggttgcagtgagccgaggttgcgccattgcactccaccctgggcaactacagcaagactgtgtctcaaaaaagaaaaaaagagcctacggtgaaggagagagagatacagcagtgagaatttcatagggttatcttttaacagagacggaagctgacgtgagtagaccctggaaaacgtctaggcccactgcaaataacaacatcgatcaaacactcataatacaggtggatgtgagtaaaaaggagacaaagaaagaagactacaagagagaggccatctgaaataatataaaaataattgatcatctttgatatgtttttacatggttgtcttatttaaatattcacaactcctggaggtagggttttattttacagaaaaaaaaaaaaaaaaaactaaacaggctcaatgatgtttaagtatctagtccaagctcaccacaggggcataaagtggcagaaccgacattagagggtagacagagggtaaccgcaagacacaaatttcgtgttctgcaacacttgtgtaggcttcacacacacgtgcctccggggccgaaaacaggcgacaccatagcacttgggcactggtgtcacccgcttcaagaggaaactaggataattatgaccaaaggggaacttgttcattcgccggatattaaaggtgcctacttaagtgcgaagaacaggaggcatagcggtgaccaaacacctggcccctgtccccgccgggatcccaaccttggggacccccgaagcgccccgggcgggaatcgggtgggacgcggcacgcaggagggaacgggtgtactgggtggggtgggcgtgacgctgtcaccgcaggagatcgggcgggtagggcggacctgggatgcgggatagagggggcgcggcattcgcgcgagagggacgcggtgcgcaaccggctgactaggggccgcaacgcctagcgcgcgcgacaaactacgcagcggcggagacaactctcaagggatagggccatcagccctgcggccctggcaggtccctaccaaagatcttggaagatgccgtttggggcactaaggggacctgaagtcctccccaggctcattcccgcctgggggccttggctctgggaaggcacgcaaggtaaagggagcgcaacggaaactcaccgtccatggtctcccgcaccgcattcagattcgccgccgcggccgccgccgccgccccagcaccgctgctactcgccatggctaaggccgagggaggcgggagaagggcctgacccggaactggagcgccttcctctctccgaggcaatcacacagcgcgtctcggcccacgccgggcaggctccgcccctcgcgctcgccgccggcgtgaggctgcgttgatttgaatttggagccacgttcctctgcgcggaacgtggagcgaggagttgccattcgaatttcctacgcggcctccgtgcgattggctggttcgcggatggcgggacgacacgattggctagtcgctcacaagccccgtgccctggttggcccaagacagcgcggaagcggggagttaaagagtctatgcctgtcgtggaagctggcctggcccccggagctccctggagtcggtactgggggcttcgttttgtacgcaccggtaggtacgctctttgtggtccctggcctttcctcctgtctgaatggagaggtttcttttcccagctcctgacttgcctgcccgctcgcccctggt

SEQ ID NO: 11476 - DNA, 2300 bp, Homo sapien
gcacttgggcactggtgtcacccgcttcaagaggaaactaggataattatgaccaaaggggaacttgttcattcgccggatattaaaggtgcctacttaagtgcgaagaacaggaggcatagcggtgaccaaacacctggcccctgtccccgccgggatcccaaccttggggacccccgaagcgccccgggcgggaatcgggtgggacgcggcacgcaggagggaacgggtgtactgggtggggtgggcgtgacgctgtcaccgcaggagatcgggcgggtagggcggacctgggatgcgggatagagggggcgcggcattcgcgcgagagggacgcggtgcgcaaccggctgactaggggccgcaacgcctagcgcgcgcgacaaactacgcagcggcggagacaactctcaagggatagggccatcagccctgcggccctggcaggtccctaccaaagatcttggaagatgccgtttggggcactaaggggacctgaagtcctccccaggctcattcccgcctgggggccttggctctgggaaggcacgcaaggtaaagggagcgcaacggaaactcaccgtccatggtctcccgcaccgcattcagattcgccgccgcggccgccgccgccgccccagcaccgctgctactcgccatggctaaggccgagggaggcgggagaagggcctgacccggaactggagcgccttcctctctccgaggcaatcacacagcgcgtctcggcccacgccgggcaggctccgcccctcgcgctcgccgccggcgtgaggctgcgttgatttgaatttggagccacgttcctctgcgcggaacgtggagcgaggagttgccattcgaatttcctacgcggcctccgtgcgattggctggttcgcggatggcgggacgacacgattggctagtcgctcacaagccccgtgccctggttggcccaagacagcgcggaagcggggagttaaagagtctatgcctgtcgtggaagctggcctggcccccggagctccctggagtcggtactgggggcttcgttttgtacgcaccggtaggtacgctctttgtggtccctggcctttcctcctgtctgaatggagaggtttcttttcccagctcctgacttgcctgcccgctcgcccctggtgaatgggagcagtcagggagtaggtgtggaagagaggggcaccagaaagagtggccacgtagggttgggggcgacgcctccttcgcactccatccagggaagccggctgcatctcaaccttccagaagtagactcttttccaccccaccccgccaaggtgtagcctctgtagcctcctttgattgcaagtaatgcagtctccctttctatcccgggaggggtggaggggaggtcttggcgaaaggaggatttttggaggaaaggggaccccaggcagttaatttcctagcccctgtcaatcatacttctctggctaggactcatgtgcaagaaaggcacaagcttcctcatctcttacctgcttgctacaaagaattgtttaatagcaactgtagttggatagggtatccgaagaatgttcatagtgttgagacatgagatgatgaatttaaaaaaaattgtagctataagtcctttagttgagaagagatctgggcctgttgtaacctttagtttcctcagaggcagatctgaattcattcatatttgattgctgcgtataagccacttcacttctctgagcttaatactttcgcaaaataatatcactagtaagttactgctatagctttcaaggttgtttcgaggatcagttgagaacatttatatgtgatactttttttgtaagctgtatcatagccccaagagtgtgaggttttgagttgttttttgtgacacatttgtcgagtacattttaatagttaaaattaatatctatgggactttgtaattttaacatgcatactcttgatttctttttagttttctctctgtgctatgggagatgtcaaggaatcaaagatgcaaataacaccagaaactccaggaaggatccctgttttaaatccttttgaaagtcctagtgattattctaatctccatgaacaaactctcgccagtccttctgtttttaaatcaacaaaattaccagtaagttattcctgactagtgtttacaactaattttaaatgtaagtaattacaaataattttaaatgtaaacatctgtctttacaaggtaaggaggaaatacattatggagcatatatagctgcaatatacttttttaaattgtagtgt

SEQ ID NO: 11477 - DNA, 2300 bp, Homo sapien
tttcaaatggttgggaaaacaaacaaaaaaatatcttgtgacatgtgaaaattatatgaaattcaaatgtgtccataaataaagctgtattggaacagagtaacatttatctctttacacattgcctatggctgcttttgtgatacaagacagaagtgagtagttgtgacagagaccaaatgacctgtaaagcttaaatatttactgtctggcccctaacagaaagtttgtgacccatacatcggagtataacctccttaaggatttgtgcctaatgatcctaacttgttcacagtgtaatccctgcttagcactgtatctgacacatagcaacactcaaataatgtttgccaaataagtgagaacagaatattagatgatgcagcttcttctctaatgtattagtagctatatcgtcaaccacagaatgtagctacacccacaactgcaggaagctaacgtatgttcttgaacttaaaaaaaaaaaaatcttctagctaacttattaacctaaccactagattataatgaacactacaatttaaaaaagtatattgcagctatatatgctccataatgtatttcctccttaccttgtaaagacagatgtttacatttaaaattatttgtaattacttacatttaaaattagttgtaaacactagtcaggaataacttactggtaattttgttgatttaaaaacagaaggactggcgagagtttgttcatggagattagaataatcactaggactttcaaaaggatttaaaacagggatccttcctggagtttctggtgttatttgcatctttgattccttgacatctcccatagcacagagagaaaactaaaaagaaatcaagagtatgcatgttaaaattacaaagtcccatagatattaattttaactattaaaatgtactcgacaaatgtgtcacaaaaaacaactcaaaacctcacactcttggggctatgatacagcttacaaaaaaagtatcacatataaatgttctcaactgatcctcgaaacaaccttgaaagctatagcagtaacttactagtgatattattttgcgaaagtattaagctcagagaagtgaagtggcttatacgcagcaatcaaatatgaatgaattcagatctgcctctgaggaaactaaaggttacaacaggcccagatctcttctcaactaaaggacttatagctacaattttttttaaattcatcatctcatgtctcaacactatgaacattcttcggataccctatccaactacagttgctattaaacaattctttgtagcaagcaggtaagagatgaggaagcttgtgcctttcttgcacatgagtcctagccagagaagtatgattgacaggggctaggaaattaactgcctggggtcccctttcctccaaaaatcctcctttcgccaagacctcccctccacccctcccgggatagaaagggagactgcattacttgcaatcaaaggaggctacagaggctacaccttggcggggtggggtggaaaagagtctacttctggaaggttgagatgcagccggcttccctggatggagtgcgaaggaggcgtcgcccccaaccctacgtggccactctttctggtgcccctctcttccacacctactccctgactgctcccattcaccaggggcgagcgggcaggcaagtcaggagctgggaaaagaaacctctccattcagacaggaggaaaggccagggaccacaaagagcgtacctaccggtgcgtacaaaacgaagcccccagtaccgactccagggagctccgggggccaggccagcttccacgacaggcatagactctttaactccccgcttccgcgctgtcttgggccaaccagggcacggggcttgtgagcgactagccaatcgtgtcgtcccgccatccgcgaaccagccaatcgcacggaggccgcgtaggaaattcgaatggcaactcctcgctccacgttccgcgcagaggaacgtggctccaaattcaaatcaacgcagcctcacgccggcggcgagcgcgaggggcggagcctgcccggcgtgggccgagacgcgctgtgtgattgcctcggagagaggaaggcgctccagttccgggtcaggcccttctcccgcctccctcggccttagccatggcgagtagcagcggtgctggggcggcggcggcggccgcggcggcgaatctgaatgcggtgcgggagaccatggacggtgagtttccgttgcgctccctttaccttgcgtgccttcccagagccaag

SEQ ID NO: 11478 - DNA, 2300 bp, Homo sapien
ggagttgctaaccttttttttcctgttaatttctaagataccttacatattgtggttatattggtcttaaacatttcaaatgttatctcccattctgtcatatgtatgttactctttgttcttgatatcctgggttgcatagaaatttttattttggtgcagtcaaatccatcgatttttttttttcctcatttgattgtggtcttaaacttgtctaagcccttctaggggaagcaaccaaaacacttggaatagagttgaaaagtgatgtgataatgttgctgtaggtgtctttctggtctgaggaaggcaaggaaggcatgctggcagaagataaaatttaagctgagatttgagttagactcttggaatgcaggggagaaaaggcagggaggagagagcataagataatacctagagatgagagagatacctgtttcttgtttgtttgttttaggtactcaaataatatttaattagatggcaaccatgctagagaaatagacatggttttgaaaggctttgtaagccattgaggtgtttggattttatcctaaagactattgcagggttttaggcagagagagtattgattacatctgccttatagaaggtcactctgcatgcagtgacaaagtcatctgcatccaaaattttctttatttacccgttttgatagtatttcacagggaaatttaatttattcagcaacccacttacccattttaaaatttagaattgttaggttactacactctattttgtcattttattttagaattcctgagttgtttctggttttggggggagggggggtttgtttggtccccttgctttttcttccttttatcttacttatattagtctttttgagatggttttggtttttgagtttttttaatctggtgatttttcaatttataaaactttagagttaaaataatttgcacccatatttttaactcttcttgtgaaagaaactatatggttttattgatcaaatttcaggttttgtcaaaataatctggcattttaatctgttgaggacattgagggtagctaaaaggtatccctaaccttttaaggttgacgtcatgaagagtaatcatcatttccttaaaaaaaaaacattactttgggattcatcagtcctactactgggtatttatccaaaggaaccaaaattactatttcaaagagatacctgcactctcatatttattgctgcatcgttaatcacaacagccaagatatggagtcaacctaagtgtccatcaacagatgaatggactttttaaaatgtgatatatatatatatacacacacacacacacacacacacacacacacacacacacacacaaaatggaatactattcagccttaaaaaagaggaaattttgtcatttgtgacaacatatatgaatctagaggacattatgctaagtgaaaaaagccagccacagaaagacaaatactgaatgatttcacttatatgtagaatctaaaaaagtcagactcttagaagtagagaatagagtggtggttaccagacggtagggaggaggggtggtgggggagatgttggtcaaagggtacaaagtttcagttagacaggaggaataagttctggtgatctgttgcacagccaggtaactatagctgataatgaggtatcatatagttcaaaattgctgaaagtggattttaaatgttcccaccacaaagaaaagtatttgaggcaatggatatgttaattagcttgatttgctcttgtcatagtgtatacatatattgaaacatcacattgtaccccataaatgtatacaattatttaaagaaaaatgtaaaaaaaatattgcttggtgactccttatttgctgtggtaatcctttagttttatccttgtattccctcaaaggtaaaaaaataatagaaacataccaaaatatatacttatatatgcagattttttttaatgttgcaaaataagtttccactttcttaattttttactttggaaaaagtaatgctaaagcaaatgaagagtataaaacataggatttttcacttaaaatgtcttacaggcactaacataaatagtgactctccagttggaaaaaagctgaccattcattctgagaaaagcgatggtgagtatgaacacaatttgaaaagaaggatgttccatattaagctacattgaattctaaacccagttcaggtagtaacactttactctggaattgaaattgtttcctttttttttttttaatttatttttgtttttttgagacagg

SEQ ID NO: 11479 - DNA, 2300 bp, Homo sapien
tttgaatttgtttatttatttgcttgtttccagctgcttgtcagacattgctgtctcttcctgtggattttaatttagaaaatatattaggtaaatactgtatttgtttaaacttttaataacttgaaccaaaggttttgtttggctggctttttgtaaatggtaacatgggaaatatgtggcagtgcctctttctaaagaagtggggaaactgccctgaaatttctctttttcttgaacatggtttgaactagccttattatcatagtgaactttattactatagacagaaactataaacattttattgatattatactaacaatgtagcacttaaaaactaaggaataatttaagatgtaaaacatcaaatatgcaattaaactttgccctctttttgggaaaaaattcaaacatagtgcatgctggcttcttaaaagttgagtaacagaagtataattgccctttaaaatgactagctttgccttttctcctattattaaatataggtgactattttagagctgatgaatttgcagatcaatctcctggaaacctcagttcttcatccctcagaagaaagctgtttttagatgggaacggaagcatctccgactccttaccttcggcttctcccggaagtcctcacagtggtgttcaaacatcactagagatgttttattcaatagatttgtctcctgtaaagtgtaggagccccttgcagacaccaagttcggtgagaagtatactaaaaagcagttggctaatatgctgtcaagcttgaacccacattttgttgttgttctatcttaggctttcagcagcctgaagccatggttgctttctgtctctagtaaataagtggaaaagagggatgaggaagggcctttactggcctaaccagaaacagaaactaagaactcatgactgtattctctcccttggacacccctgtgagctgcccagattgctttcagaaggagggatggttgtcttttgagtattatgcttcacagaaactaactctagttcgtatgttatcattagtcatagggatgttttaggtcagactcttcaattttgtatttagatatgtacaggatgaccagatttatcatgagtctcaaggaaattcagcataggttatttactaaagtgtgtgagatttacagtataatacaactggcttggcattaataaatttaaaaatttttcacagatggttgcttagtgtgaaacttaatggtttgttcaaatacaatgtgtttatattttgactaacatatttgatactatttcagaatttttgtagcaatcttcttagttgtctttgttgcaaggtgtcttttggtggttctcgtgaactattactagtttataagtgtgttttgaagaccatgataaatagcatgcagcataagagttaaggaagagaaccatatacatttatttactatttaattttattacaggggcagttttcttctagccctattcaggctagtgcaaaaaaatacagcttgggaagcataactagtccttcgcctatttcttcacccactttctcaccaattgaatttcagataggagagactccactctcaggtatgtctcataataaaatacctagttaaaagttttatactatcaatatttgttattagagaggttcttttaatttgtcttaatgatagagctcaaaatgatcactaaccttctaacatttaggaactttgatttttaaataaaagaacagtttaccttcaaaggctggaattctcaccagtttgtactgtagtgttaaatatagttactttaattagcaatatttacatcaaacactatcaaaggaaatttagcaatttccatttgtgctattgtttttgacatcacaatttcactttggtaaacaacacaactgttacagaaatgcagtttttcctggcatgaaacatgattaccatttagtagtgacttttccattttcatgtttttatgatgtgattttttttcccttcccacctttcagaacaaaggaagtttactgttcattctcctgatgcttcatctggaacaaattctaatgggataactaatccgtgtatcagaagtccttatatagatggctgctcgccaattaaaaattggtctcctatgagacttcagatgtatagtggtggtactcagtatcggacctcagtgattcagataccttttactcttgagactcaaggtgaagatgaggaagataaagagaatattccttccacagatgtctcatcacccgccatggatgctgc

SEQ ID NO: 11480 - DNA, 2300 bp, Homo sapien
gcttgagcccagcagttaaaggctgtagtgatctgattctacgactgcactccagcccgggtgacagagtaagaccctgtctcaaaaaaaaaaaaaaagaaaaaaaagaaacggcatacaaggctgggcatgttggctcatgcctgtaatcgcgcagcactttgcgaggctgaggcagaaagactgcttgacaccaggagtttgagaccagcctgggcaacacagcaggccctgtctctacaaaaaaataaaatgcaaaaaaaattggcacataaaattaaagactgtcctgactagtgcctgaaattatgatgagtttcttcaagtatgaatatataaccaccacctggaaggttcagtaaatgccctcatcaaatacacgctacctttgcacactttgtagtatgtaagatacttgtgtattcagagtaaccaaaatatttaaaggttattggatgttaagaaaacaggcttaccttttagtgttttaaatttcatatagtttctcaatagtactattgtctaataatcaaaattattttatatttctaatctaaacaatattaagctttcactatattttctccgtaccttcatattaaatgcttgagatttactctcaacttcacatgtttgtgcatcactttctttgcagtaactttctgccccaactgtatccataatattgcttccacaattctgcgtattatagccactatccatctgacaggagaaaaaagaaaaaaatatattgtgaggaacttaaaagtcaaatatttaaataagtaaaccactataaactctcattcactacatctgaatgatcctaacatgtaatattgatcatgttgaacaaaattcaaaagtaatgcacaaatataaaaggtagtcctgcatagtactgattattgtagtcattttacaattccttccaatgaaatatatcttgtaacttccttaagaatcagtgaacagcctactgacacaatgctttcctgttattttgtgatcgtacctagtagacaaaaatgagtattacaactaacttcaccttccaacgcattttccaggcttgtctctaaatggcttgaggcatgctgcctttaaaaaagtggattatattatatttacacctagttgttcacaataatgccacatatataatggctctagatgttagttcagcttttcatgttaataaaaattgtagcatcctaagatacactgtttcagtgcaaaagagcaaaaaagaaagattctagcgaacttccagcttggaaacatttattgagtgtctaaaaaggccaggcactatctctatatatttaatatttttttctcctttcaacaaccctaatactttactagagaaggaaattaaggcttaaaaagcttaactttcacaatgtcatccagtgatgaggtgatgaagatgtgagacctaagtccaggttctgttcactgcacaacgctccatttacctgtataatgctgagcaccaaagaaagcaatccacaagggaatcattttgcatttaagccctccctgcaagttaggatcagagggaaggaaaaagctgactgtcattttgtttccctcacaaaggtacagactagcctagaaacggcactctttatcacttaataatcctgaaaaaatgttcccagatttcaaggctggatacatatctgcttactactagaggtcatgttccaattagaacaaaagccttgtgatgtgtaacatttttggggaaaagccttgttctgctatcattcaatagctacttgatcaaaaatataaatgtcagattgctcccagagattctgccaatagctcttccttctaatattcatcactgccaaatagctggcttataatgcaatactaatatgtaactggatatatatggagggaagagttactcattagtacagcaggaagtaaggcatgcggggagtttgtcccacactatgggaagagcaggattgatgagagccaagttgagatggtggctgacttcactgtctctcatctagacttctgctaatgtcaatgcctaatatgtaccaaccaggcaacagataccttgttatcccccacaggcatcaaggcaggcatcaatctcactttatagctaagaaggatgaggggacaaaaattaaaaagtcatgttctattcactgctatgtaaatcttgccttaagatcccacagcctggaaataaaagaactctaattcaaacttggttctaattgcaaactttatattccagttgggtcatggtgcctttaaatggt

SEQ ID NO: 11481 - DNA, 2300 bp, Homo sapien
ctcccgggttcaagtgattctcatgcctcagcctctcaagtagccgggactacaggagtgtgccaccagacctggctaatttttttatatttttagtagagtcagggtttcgtcatgttggccagactggtcctcgaactcctgggctcaaatgatttgcctgcctcggcctcccaaagtgctgggattacaggtgtgagccactgcaactggctgagtgcaatttgtaaagtttcctctagcatgtaagatttactcatgcagtagttgcataataagagattgttagcggagtaactgagagatgaaagaatcataagttatttaaaatacaaatgtacacacacatatgaatgtttacataggaaatgctcttattatcttcttggtaacaaaggtaacctgtgaaaaaatatgatatatagaagtctcagattctcttttttgtttgtttaatgctttttccattggcagggaaacaaattccatggttgaagaatttatgttacttgccaatatttctgttgcaaaaaaaattcatgaggaattttctgaacatgctctgcttcgaaaacatcctgctccacctccatcaaattatgaaattcttgttaaggcagccaggtcaagggtaaggtcctacagtttgaaaaatcatctatttgtgttttgatctacctgttgttctaaataatttatattcatatttccataaaggttttattgtttgttaatacaagaatatgccaatagttcttttttcttttggttttttttttgagacagggtctcactgtcacccagactggagtgcagtggcacgatctcggctcactgcaccctccacctcccacccagtctcaagccatcctcccgcctcagcctcctgaggagctgggactgcaggcgcacaccaccatgagtggctaattttttgtatttttttggtagaggtagattttcactatgttgcccaggctggtctcaaactcctggactcaagtaattatctcatctcggcctcccaaagtgctgtgctgggattacaggtgtgagccaccgcacccagcctaatgtttttaaagagcaccctatgctaaagctggatgtttagactaagatctatgcagcatcctggtcatataaaactcttccatgtttccttgtctttatgcatgtttcatatgtctatgttgcttcatggctcctgtcaactgcctgactttacaaataatgtattttttttttttatttatttacttcaactcagttaaatcctttccatttcttgttcgtaagaaaagtatatttattgcatacatggaaaagaggaaactatagaaagggcacattttttcagccctgtatacccactacttcttgttagtagattttcatttaggggtgcttaccccttgggtgactatggcctacattgcttttccttggattacctggttaggccctatccttcccatctagaagagagctgggagcagtaatgttggactgcagggcattattcgatcatgatggcattggtttctgattttggatcagacctttacggcatgcatgcccagcttctccagattcataggaattgaatcagcttctcactcctctgctccaagccttaatctgtaaatagggattttttccttcattgtcttatttcttccaaagacctaagagaagagatgtatatttgactcatctccctagggtagaacaaagcagctaaatttgatgaatccgaacattgttctgacagaactgtagtgaccagtacagttttgtttctggctactacttctactttgaagggaaggaaaataacaaaaacatgatgtttgttcagtcagatcagttatattttgaagacataatggtactgacttagaaatgtttaatatggtgctcttccctcctttttgtttacagaatttggaaattaagactgatacagccaagtctttggctgagtctttggatcaggccgaatctcctacttttccatatctaaacactctgttgagaatattagccactcgctgtatgatgcaagctgtgtacttctgttctggaatggataatgattttcatcactatggcttagcgtctccaatatacacacattttacttcacccattagaaggtattttttccttatgaaattaaaggagatagaaaatggttaattttgaattttaaaagcacatattagtactgacataccatggttcttatttttccatctatctagatacgcagatgtcattgttcatcggcttttggc

SEQ ID NO: 11482 - DNA, 2300 bp, Homo sapien
agtttgtgaagtttctattttgtttaaaaatagaaagtagatttattcttaatggtctttttaaaagtttaatactttgcagctgattacattgagcaagattaggttaaggaatagaattctttttttttttttttttttttttttgagatggagtctcactctgtcacccaggctggagtgcagtggtgtgatctctgctcactgcaacctccacctcccaagttcaagcgattcttctgcctcagcctcctgagtagctgggattacagtcacgcaccactatgccaggctaatttttgtatttttagtagagacagggtttcaccatgttggtcaggctggtctcgaattcctgacctcgtgatccacctgcctcagcctctcaaagtggtgggattacaggcatgagctaccgtgcctggccaggaatataattctttgttgtgcttttagattcaagacctttgaactcagtgtgtggtctcaaaaatatgatattgcctattacgttatattacataaataatctatgatgagtatggtacttttattggattagatcagggcttctcaatcttggcattatagatattttgaactgaataatttttttgtggtggaaaggctgttttatacattgtagtatgtttaacagtgttcctagcctatttggcaggatcaccaccccttaccccccccaccaccaccaccaccaccaccactcagttgtaatgatacaaaatgccctgaggggtgaattcactcaattgagaaccattggattagagtgtagacttctggtaatgaaattccatcagattatgcacatttttaaaaaccttaatatctcaactttcttgattcttatatctcaaacttcaatgttcttgtaaagaataccagtaaagcccttgtaggcttcttattgttagtacctccttgaaatccagaaatagcaacatcacttgtttttcagtgcagaaagacccaagtttaaaaccaattcaaaaatttatgactgtgtctttcactgatgagcttaaaacattagcagctgggcgtggtggcttatgtctgtaatcctggcactttgggaggttgaggtgggcagatcacttgaggccaggagttccagaccagcttagccaacctggaaaatccctgtctcttaaaaatacaaaaattagctggttatggtggtacatgcctctagtcccagctacttgcgaggctgagttgggaggatcacttgaacccggaggtagaggttgcagtaagctgagatcatgccactgcactccagcctgagctacagagcaagactctgtttcaaaaaaaaaaaaaaagcattagcaagtgcattcaacgatgaggaataaaataattctaaaactattaatataaatcaaattattaaattgaatctattaccattaagtactggaagctattgtagtgaactttgctgttgtacttaaacctggctttgatgaacagatttaaagaaatagatgaatgtgttgacatacttgggagtttagatagaagaaatacgtaatatctattaatatacctgacttttcagtctctacatagcttcagctattagtgtttaccatggataatttatatgcattatttattaatgactgtagaattctgattataaatgatctaattatactatttgtagcttttaggaattgctattaacctacagtttgaatgaaatctgattatcatacctgtgaaattgtattataatttgtcaacaaactattatttagtgtctcaacctaaagtataaattctgatcttgaatttttctttttaggaaataaaattgtattagcctttttcttgtccccttaataacataattttcttcttttccaagcaaattgtttcttaaaaacttaattataagaatcttgatttcttctctgaggtgtacatctgaatacattcaagagaaaagatataccattgactttttctagtttagtggttaagcatttatgtgctaagagttttcacatatccttgtttctactgatttccttttatttcgttttttctttccatttagagaaacctatgtagaacaagaacagggagaaaatgctaatgacaggaatgatagagcgattcgagtagcagcaaaatggtacaatgaacatttgaaaaaaatgtcagcagacaaccagctgcaagttatcttcataacaaatgacaggagaaacaaagagaaagccatagaagaaggaataccagctttcacttgtaagtctaaatgt

SEQ ID NO: 11483 - DNA, 2300 bp, Homo sapien
cacactgagttcaaaggtcttgaatctaaaagcacaacaaagaattatattcctggccaggcacggtagctcatgcctgtaatcccaccactttgagaggctgaggcaggtggatcacgaggtcaggaattcgagaccagcctgaccaacatggtgaaaccctgtctctactaaaaatacaaaaattagcctggcatagtggtgcgtgactgtaatcccagctactcaggaggctgaggcagaagaatcgcttgaacttgggaggtggaggttgcagtgagcagagatcacaccactgcactccagcctgggtgacagagtgagactccatctcaaaaaaaaaaaaaaaaaaaaaaaaagaattctattccttaacctaatcttgctcaatgtaatcagctgcaaagtattaaacttttaaaaagaccattaagaataaatctactttctatttttaaacaaaatagaaacttcacaaactcatatattttattaccctctgttagttgttcacataatatggtattccaggaacttaagcaaatctcatcttccaagattctatggtccaactcatgctaaaaccaattcaaaatgaaaacattttggaaattaaagtacctattgtagtctaggagtcagcagaccttggttttaggcttgagcccatcaatgcctgtgtgaccttagagagatccacttagcattatcttctgcacagccatgtaagaattaaataaggtatgaaatctatcacttatcttctgacaatgtcataaattactcacaggaaccctctcccgaattttgctaatcctgtggttttctgatatttaacgtaatattcctcctacctatggtgctcattagtgaaagtatagaaatgcttctcttggttattagtcacatctcggatgcgtttatatacgggggcactgcgatttctcacttcttgaagaactgtttgtagcacaattacattcctgatggcagggtcctcaagaacatcaatcttaaagaaagataaagttaatttttcctatattcatttgtaaatagctctgtcaaacataaaatcctgttttatgttgggcataaatactttatgttttaaaaacactgaataagttaagccaagaagctatttggctatagaaaacgagacaatagtcactaaacccttcagatctattaaaaaaagcacacttaaacagaccaatcacaagacttcgtagaattaagggtattaataaaggaatacgttggcccacatagttttttgttcctaggcacttacaagctgcctgggagtcgcaggctggaggccacagaagcccaggtccccggcctccaggcacttacaatctaaggcagaagagacaccaggagttagaaaaataacgtgtctgaactacgactccaagaactaaattttttaaagcacaaggaaaagaacctcggcctggggaacaggaagcttcggtcccgagggggtttccctttcgctaggtatgtgacactgccaaagacccgcctccctgggcctcagtttccctgtcatacccccttgtccccgtggggccgcgctgtccgcggttcgcccgcccacgcacctggtgcagtaacacattagtgtcgggcagcaagtagtgcggttgcgggcagacgctgctcgccgggtcctggggctgcggctccagggccggcccctcgtgcgcccctccacacgctgcgcacccgggcgcaccgcagccgatgtcgtctcgcaggtagtgctcgcgcacgatcttcatcacgccgcccgcccgggtcttttttaagaacgtcttggacttgagcatcttgcctcgccgcgcagaatcctaaccccagcagcgctcttccagcaaaaggcgtcaatctagaatacgcctaaccccggaggttcttccctttccattcccggatattagtaacacttctcgcgggaaaatgccgagataaacattggttggctctctgacggccgcggggattgggcgagagtggggaggggcggcaaagcaaggcgaggagccatttccgcccgtggcctaggcggggcttccttctggacgccacctcacaacgtgtgttgctttccgctcctcggaacatccgggagagttgacttccggcggcttgtgggagtgctggttctgtcctccttgcgggtgcggagatggttgtcttggttacgggtcctaacggtcccctgccttgaaatcccttgttgagggcctgcaaccttgtgcttccgaccggagacgcctttggtccct

SEQ ID NO: 11484 - DNA, 2300 bp, Homo sapien
tgtgtgtatatgtcatgtacaacataatgttttgaagtatacgtacattgtgaaatggttaactctagctaattaaaaaatgttttacctcacatagttattttagtaatgagaacacttaacatctgctgtgtttttcaaaaacacaatgttttccaagattacaatgtcattaactatagccaccatgctgtccaatagatctcttgaatgtattcctcctattcaactgtaattatgtatcctttgaccaacatctccccaaccctccttcacccctaaccatgccagcccttggtaaccaccattctattctctacttctatgaacaccaaaattatttaaaggctgtacttgtcaagaaatataaatgtatcatttcaagttcagataatgtgtgtatttaattcttatttacctgccgtttgaagacaataaagcatatagaacacaaaatttaaacctgatcttacctttgtaagataatccactttcaaattgtcgatcatcatagttttctgggatagctcaatttttagtaactgaatattatgaagtagttcttttcgttcaattagctgcctggtgattctgactttgccctctcgctcttctgatgaggaaatatcatccgtaggaactgttgtttctaaactaatatcttcagattccagagaactagagatgttcactttttttgactcctttgaaatttttcgagacatttttattattatggatcagttttcttctctaatttgattttaatattctgtaggttaaaaaacattaattcaaatgtactataaaattaactacagaaatcatggactgtattaaagagagactaaggattccttaaataaatattaggcaatttagtgcatcccaaatctagaacagattattgcagttaagttaatgctcaaatcaaacacattaattcctaatatgaagtcagccttcgagaaacttaaaaaaacagttcctgcggggaggaatcttacttggaggaaacaaagaaatgtacaagatgaagaaaaaagcccattataatcaagaatggcaccactaaaaccaacacatgctcaaagataacagaaatcacgtctgagttggtcagggaaacgttacacagaggtagcacttagaatctttaaagatttggacaggcatggtaaaaaggagaaatcatgcagttattaatgatacgtaagtggaagtaaaaaaacaaagccaagtcttggaatagttactcctttcaccgcccccccaacacaaacacaaacacacacacacacacacacacacacacacacgcccttaacgatcaagactggaaggccttaaatgtcaaaatagggttggattttattctacaggcaatgaggcatcattgaagatgttttaaatagggaaaacggggacaaaaacattttttatagatagcagaatgaaaacaacaggatataagaaaaattcaagaaattctaaatagaacttacttctaactctctcataagaatgttagcaactaccttgttttaatacctcatgatataacaaattatgctattaaatatttcagtttttctaaactgaatgataaggaaaggtgtgtggaggggaaacagcgagaactatactaagatcggcctccctccttctttttgaagggaaataggtaagaaaaagtgaattcaaagacaaattctctcctcgattacaaagggcccgagacggggactgcctatacactcggcgtgaaaattaagccccaaacttggcagctcgggggattccttgccccacgcgggaaagaaagcgatgatagtcgcaagttacctcgaaagtgtcaattactccacactgaagccttgaccagcagccagtgcagacaccgagggaccaaaggcgtctccggtcggaagcacaaggttgcaggccctcaacaagggatttcaaggcaggggaccgttaggacccgtaaccaagacaaccatctccgcacccgcaaggaggacagaaccagcactcccacaagccgccggaagtcaactctcccggatgttccgaggagcggaaagcaacacacgttgtgaggtggcgtccagaaggaagccccgcctaggccacgggcggaaatggctcctcgccttgctttgccgcccctccccactctcgcccaatccccgcggccgtcagagagccaaccaatgtttatctcggcattttcccgcgagaagtgttactaatatccgggaatggaaagggaagaacctccggggttaggcgtattc

SEQ ID NO: 11485 - DNA, 2300 bp, Homo sapien
tagttattttctgtgagactgcagagcagggcatttcagagaaactattacttaaaagtggcagccctatttcatgaatctttatgcccaaaatggaattttaaaacctgctactgtattggagcaaaaaggaatatattcagttactataagaaccccaacgctagcttcatatctatattatgaaaagtggaaatatgaaaaattaacaagactaaaaatattaaaaacttagttgtatggttttttttttgcaatgaaaaagcttttgtaaatgaaagcatgttaaaaagtggtgtgaaattatagaagcatttccagtaaaatacatggattttattgcagtgaaaacttaggttgaaagaccgggccactgaagctctcgtaaaaagacaaaaggaaaggtctagataggtttaaaagcacattaagatacagctaccgaatgtattaaatctaagttagatttagcttaaagttacaagagcacaaaagttctattaagaattatctacatcacatttaggtttgatgttatcagaattaagtaactaaaaatctttcaaagctcaattttttaaaagagttacattaaatcccatcctaattctataatctgtttctaagctaattaattacatgataggttttacattagagaaaagcaggacagctttttaaagatgaagatggacagcatggggctgcttggttagagaaaaacttgcaaaagcacttattaaataatactttgataacatgaaagtagtcatcagccattctctgaaggcagtgatcacagctataaaaatgaatcatgtgtcaacaggaagagaaggaaaaggagaaaaacccagtttacagcataattttatattttctaataataaatacatttctttatgtgcatattaattttctacccattgaaaatgagatccatacctttgatagatacactctttgaagtgaacgtttttatccaagacttttttttaaagctgttttactctgaagtgatgaataggctgtggtatatgtaaaactgtctaatggtatattgtgtgtcaacatatgtacatttgtagtaatatcacaggcatttttattgcagtttattgttccgtcctcccaataagccagataaaatcatgtacaagaacattaaggattaagggaagtggtttccttaggtgattgctggcaaaaattcaccctcccattataacaacatagtaaatggatggtaatatatttggctattactttccaacaaatttggattcccagttttcagagctgctctgtgtctatgtttgcggctttttgattgtctcttcgtaggaaaaggtgccacaatgtgaggtaaatgtgctaggtttctgctttgtaaatattaaagtccattttttgaacatacagtgctagcaaaaataagtcaaagatgtaatgtctatttaaatacacgtttgagctagtcgtgcttaaattagattccatgcttcggctagaatcaacacggcttaaatattagaaacttcaaaattcatatggcccaagccctcctccccacacacggatgggaagtagaaatgtgtgggaaaacgtctagcaattaaaatcctgaaggagtgggaaaaacccaggcttttatgcaaggatctgaaaaaacgcttgccatcaaatcttttattcaggcattctgaatttgccttgttaaacggatacactcactgctaaagatacacagggacaagagctgttttaaatttgtttatcacaccgcccctagttttctgctaaagagaagtacattttggatatttaaaagtacacactcattagacaaatctctaaaagcctcagcgcccctacctagctgccttctgggtttcagcttttgagtttcaggtccttgcacaacacctaagacgtgcaatactctttttcttcctaatcctggcagagaacagtgcgaagagatctccctccgcgtctccaccctaattccccctcttcccagattccacccgctccgctacttccctccgcccccggctccgccagcccaatctgtcagagaagttgtgtacaaactgcgcggccgccctgcgcgcgaagctcgtggcccgagaggggtgcggtcgggccgacggaggcggggccctggctgcctctctccctgctcataggctggccgctcaggcctggccggcctcggggcctcgggattcgcggcggcgctgccaatcaggcgatcgggccccgcccccccggagttgggtgaaatagaggcgggc

SEQ ID NO: 11486 - DNA, 2300 bp, Homo sapien
agagatgaatcttgaacactctcttgggagcctgaattggatggaaagcaaaaactagttttgtatcaggccgtcccatgctttaaaaactacagaaatataaatttaaattgtagaaggttgcaaatgtagatggtatgacaaaccacgaagagccatgccataagatttgggactaagacaggggtttgtaagaaccttgacattatctgactttttccttggttataaaatttacctctgatcagtttcatccttatgtcttctcctagtgggaatataaattggtacagctaagtgcggtagtgtaggatgaggttacctgggggagtggtggttgtagtttgcggtgggctctgcttgcaggccttgccttcttcctgattggaggctctttgtgtctgtccagaggaggcatcctttccatttgcttaaaggcatcattcagaccagcagagactctggtgcacaccagatttacacggaagggtgtttatgtgtgattcgtaataaaagtcacaaattataaggcaaaagttaagaagtaaataatgatatattccctcagtggagtattatgaatttttggattaagcattattaagtttatatgagaacatgcctatggcacattaaatgaaaaaaattatagaactaccctgtgaaaaataatgagccaggttttgatgtaccttgattgaacattcggctaagaagttggaaccgattggattagatatattttgaagactagaaaggacaaaacatctttgagaacactgtgtgttaggtgactttttaagtatttcaaaggataccatgttatggtttaatcatgttaaatagaggaattatactctgaatttcaagagaatgtttttagtctgccactataatattgaaatgttggattccctttttagtagcatgcctggtaaaagctgtagtgcatattaggggacatgttttgagacattgttatagcaagagagacatatatatttaaaactggaataaaattaaaggccagtttccttcactggtcaagcctatggagcttgtgaactctgctgcatttcatttaaggcctttatgagtgagtgagttcttttcaaatgtatggaaacatacacaggaaaccaggcccagtgctacggcccatagacattggcacagaatgggcgctgctgagaactccagggtgtgtcccctcttgagtgtaattccaaatgaaaaataaagtcaactgtgcctaataagctggctcaactgaatgccaaagaaaatttgcctcatgaaatggaaattctgaagcaagtaacataatgctgagagagaatacataggaagacttgtaagatatatccaaatagggcaaatggtctattataatcagaactccccagcccaataatatttaatgatttggtgatatcctaatggtcctggagattttggaccttttagaaaccacataaatatttaatttatatttaatttttaaaagaagggacatatattaatttagatcatttttttaaagttacttgggtattggctgacatggaaccaccgaatttatttgtattcattattttgcacatttgtatcaactgtaaagaaacaatcatttcccccaatgaaatgacattactttaaattctctcagttgctaagaataatgaagccaagggttccagtttgagtatttgggacttctcttttatacaggaaatttacttataaaccttttttttacttggccattttctcctcagctgtctctctctgttgcatccctttctttttattctcctcctcccttcctccctcatttttgtctaggtcttaattatttagtgcccaggatcttgtcctagtgtcatagctggtgtttttccctctactgcattttgccctttgatggctgctgaagagcaagccaacaacacatagctgaagaaaagatattcctcagctctatgatcacgagcttaaggaactgtagaattaagatgtatttttttccccaaaggagcaataacatcaagttgtagaactttctctcatcatttgtctttgtgtttttcttgcaggatcaatgtgactctaagaacaaatggatgaatgaatatccatatgaagagaaaaacaataaaggttggttagtcagatgttaaaattgcattgaaaatattgctactttgagcattacttttgggcagtttattctcattagagtaccttcttgtgtgaatacgagacagaggtcagtacttacatgtgcatatctatctgta

SEQ ID NO: 11487 - DNA, 2300 bp, Homo sapien
ttgtgggtttatttattgtcaccctagacaactgttgcggcaatgcaaatggacaagaagggatcagtttgagaggttttctcagatagaacttgtaggacttggcaactaatagaatgggaaaggtctgggtgaaggaggggtcaaagatgatgtcaagcttttaagttgagctttggagagggcagatggaaatcagaaaagctggttttcattctggcctgctttgcagaggcaaggattattgtgagagttgttatgaacatttttgacttcctcagcttcgggaatactgttttgtatgactatattatatgtagggtgtgtatttaagcagaggggatgactccctaaaggaatcatggagaaaatgcctgttaacagctttcctgtgtaatgcattcattgtgtctaagtgagtttttccaagaaccttttagtcagtctcaagttgtttgaaaatggaaaaggtgagaatttgtaggcattctgatgttggcactgagttttttatactggaagtctttttcattcctgaaactgttcttgatacaatggaggctccccaggtcttctggaatcccaatgtcccaggccggggctgcagatggccagtgcatccactaggggtgtcagtcgtcaggagtggtgcctggtctgcatagcacagtaccgtattccatagaccagcagcacgagcacactttttctcttcctcatagatgccctccttgatggcatgaatcctgtctgtctgtgactgttgaatccctagcacctggcattatgcctgatacatgttagactaaaaaaatataaatgaagtgataatgtgtttttcccttagtctgtggctatcacatctgtcctgtttattaataaccctgtgatatacagattttgaattaacagataagttttgaaagataatgtagtggccatttattagggaaaatttgaagaaagggtcctatatatgtgatttaccatttatatattttaatgcattaaacccacagttgaatactttcatctagattgtctactaaccacacttggtctttgacatccatgagttggtgttcgagcaagccatactttttacattgacagccgtaagtcactattttatactgaattttgagcaatagctcatgtgtgaaaattgaggcatgacaggacagtgttatgtgtcagacaacagtttagtggagtcagcattaccatcttttgtgtctgtcatcttgaatgcagcactcatccaagctgaggctaaagatgtgtgaagaatttctatctttatcctaattgtattacgcttttgaaatataacattgatatttcattttttatttccccctatttccagaagtactgtccattttgtaataaatctttaaggccaaagcacaatatcattaaataaaaattattttataattttttacagaattatgtttttctttttagtttttaaactttttatgtatttttattttttatttctttggagatggggtctcgttgtgttgcccaggctggagtatggtggtgtgagactgaaaagctcactggcttcacctggctcaagcagtccttccatctcagcttcccaagtagctgggactacgggcatatgccaacttgcctggctattttttcttttggtagagatggggtcttgctgtgttgcccaggctggtctcaaactgaactcaagcactcctcctgcttcagcctctcaaagtactaagattacaggtaagagccactgtgcccagctgagaattatattgtcttaatgtagcatttttcagatgtaatgttaggatagggaacccaaagatctgattagaccaacttggcagagagactaataaattaaaataccaggatactgttaattgaaattaattagaagcaaaggaaaaaaatgcgtaaataaaatattaatttaaaatgaatttaaaatgaaatcgtctgcttttacaaaacctttccaggaacacacatattgtgcaaagtgaatccatagctgtattaaaaaaatagtaatggctattcgaggttaattttttttttgctagttatagatattcaaattctaatagcataaagcatttttttttcccctgggatgttatcgtccctaagttttacatgttttaaactaagctgtaaatttagcttgaacaattttaataacatttccaaagatgtatcttaaaaaggaatttaaaagaaatactgagcttttgaagtcaaacacaaccccctttcttacaaaagcagtcaactta

SEQ ID NO: 11488 - DNA, 2300 bp, Homo sapien
ccagaacctaggagtggcaagaggcagagaacgcaccaggcagacgccgcctttgttgtcattaggaacgcacaccgcgcctgaagtggctggaaaccgccacaccgatggggagcccagctggccctggctcacattcgtgccttcgttctcatttcctgtttctcggcctctcccttgtttctcttcccaccccactccacgccacagtacagcaaagctttctctctgcacacaaacttccccttcccggccttcccacagccctggcgatttcccacgcggggcgggccgggccgggggcgcggggcaggggaatactgtcgtgcccggagcgccgcgctcacctaggatggtgaggaggcgggcccacagcctcccgcctccgtccgccgcgcgccccgcccgcccggccgcttccgccccgtctgctccccgcccccgccgaccctccggctcggcgctgaccccgcgccctccgagccgccgcgggaactgcagggccgcccggccgcctcctccctctcccgccccacaatcccgcggatccgctccccggggcgcggaggcggggagggaggggctgccggggagagcgtcaaggactcggctccgggccgtccgcttcttggggctccgctctgggcgtggggcagtggagctggactcccttccccgccgcccccgggccccgcgggggtctgcagatcccgcttcctctgccccagtcctccaagtttgcgtgctttcccacagaactggcgcaggcaggggccccttcgctggggtggcgaggccaggcgcgcatctccgcctcgcccccattcatcccgccaaggtgaagcgcagggaaaaggggcgcccccgcttcgcccgcaacgtgcgtcgctccggaacccaaacaatgactcccctgcctgccgcgcccggccctccgcccgccccaccggcgcgcggggggcaccgcccgcggggctgcccctgcctgaccccattgttgcccggcgcgggcgatgcccggcgcccaggggcggtccccgcgagctgccccacagtcccggccggctccgcccacacctttccaagttcgctggcgggcgagccgcggggacgacccgggcgacagccccctccctccactgcgcgcccccacccgggcgggtgcggcgaggggtgggggcccaagcgggctgcacgctttttgggtccccgaattctcctaagcctgtctggcgcgctctgacacaaaagaggagactttctcgcggctcggcgcgagtccttgcccagcgagttgctctccaggggtccctcccgccgcaagcccccgcgggccccctcggccgacgactccccgagctcccagggccatgtgtgggttatttggggtgccgcagcaaagtggtgcaggtgaaagggaagcgctgccgaggcccggggccggagggcgggggcaggggtggggcggggtggggcggggtggaggcgccgcggacccagcccggcggtccgggcggggaggcgagggccgggcagtgggtgttgccttctacctctgcgagcggggaggggttagtttcccacaggggatttcaaccatcacactcagagcccgcctcctaatcctcgggcggagcggctcgggggccccattttatggcaataaagcgacttagcgcctgctgagcgagcccctccccgccgccgcccccgccctcggccccaccccggggctcgccggcagcggcggggctttgtttctggggaggaggacccggagctcttttgtttgggggtttcttgttttcggccccccccctcacagcaccccaccccaccccaccccaagcgcctctccggtttcctgagctgcgggctgcgagggaggagaagcggcgtcctgcaaccccctcggctgggccccggggtaattcgatgcgggcctggcgaggctccccacactagaccggggctcgcaactcggcagcctccacccaccggcccaccctacatttagcgcatcatgtgatccgggtaagtcatttgcaagtacaacagttccccgggttgccccccattcatttcctgagaactgcagagagccgctgagaggctctgcgtgtgcgtgtgcgcgggtgacgccgtgtgtgtgcgagtgtgtgtgtgtgtgtgcgcgcgcgcgtgtgagagagagaaagggagagagagagggggactctgtgtgagggaaagaaaacaatttctcctgctctgcagcttctgttcaggtctgtgccgattccgtttcttatcaaaataaa

SEQ ID NO: 11489 - DNA, 2300 bp, Homo sapien
tttgactcctgtatttattattcgtggttttgaacatgccaggttcacgagttctacctgcacttggcaacaattctgtactttcctcagccccatggtgtgctcagctgcttgtaaaaagtaaggaagctctggtgacggtgatgcatggtaacaacagtttttattcctgtcagacttgaaagggtgagaatttggaaaaggtaagagtttatgagatagtcttaattaaagaaaactattcacttataccaacacttggaaagttatctaaaatactaactacttcttttaggttggaaaaattagaaggtaactgttcctttccattttttcataggtactgtggggcagcccaggagccactaacaaccaaggcctgcaccggaataagctacaaggattggtttggaaggccaaaaacctcagctgaccctaagtcagttctgcttcttatacagactatttcagtcccgtctccccagtgttaccaatgttgtgtttccacctaatcctaactccttatcttctaaaatgtgacatgtttccttggctcttcaaagcaaaatggaaagagggagagattcaaatcctaatgctgtcacttaactgtgtgaagatgggtagatgaggtacattacttagtttctctgagctgtacttttctcatttttagaatgagatgataacacatgatatgatttggctgtgtccccacccaaatctcatcttaaattgtagttcccataatccccatgtgtgttgggagggacctggtcggaggtaattgaatcatgggggcagttcccctgatgctattcttgtgatagtaagttctcacgagatcatatggttttataaggagcttcccccttcacttgactttcattcttctccttcctgctgccacgtgaagaaggacatgattgtaagtttcctgaggcctccccagccctgcagaactgtgagtcagttaaacctctttcctttacaaactacccagtcttgggcagttctttatagcagcgtgagaatggactaatacacgtatctttaagttttctgtggtgaagattaagcatggcagacacagagtatgtacccaataaataataggtataattgtgctcatccacactctcatcaattacctggcaaaaattctattcaagggctaggactctgctactccactccaatcctcttcagttccactatgtttacctcagttccccaaccaaatgggtaacagctggttttgcatgaaagtgagcaactatggaggcagaggattgtctcctcacgtactcgggatgaattctaccccgaggcaccacacccttgttgggccaactgcacagaattctgtgcatgcacgactatcaagtgtttatctattgccccagaagcaagcttctctaaacctggtgcttgtttctctcctatgcttccatctcctgttgacctcccttccaattctttccaatgtgcctcatggaattttcattctgttatgagtaaccctctgttgatctcctagttttcattaaacgttgtctgtgcttcaagaacactgaatatctttttgctgtgttaaatccaaagcttagtcattggtcctcatcttagttgaatcctcagtactttcgctactaccacccttgtacaagctgctaccttttttttttttttgcctgaaatgatacagtagtgtataaaccaagtatctctgcttgcatcgtcatctgcctgtcatgtatgctcaatgtagtaaccacagtgatccttataaaagtaaagtcaggtaaatgtcactccttggctacttcaggtcagggaccatgtcatttttttttttccctctgtatctccagggcttatcgctgaaacttagcaggcactcagtaaatattttgctaagcagttaaaactaagagaagaaagaggagggagaaatatggtaatcacttaccacatcctcttttaacctcttgaatatcttaccaatgtcttcttttgttcttactttcacatcatttgatttgataaaacaaaactattatctagagaggtaaggcagacttgtgaactggacccgtagaagttaagtgatgtccctgtttgcagtgtcaatgagattgagggcttgggcttgaacccaaccttctccctccaaatagcctgctctttctgttatgtcatgtttcatatacaagtttgggagcctccagccctgactatcccaacatatacaacataatgtatatgttgtctttggaaatatcttctgtgaaggccaa

SEQ ID NO: 11490 - DNA, 2300 bp, Homo sapien
cttctactctcctatctcttcctacagtatttcacaggccctgagtgctcaagttgtctttttaggcacaagaaatcctcccatacacacacaaaattaggactaccctctccccaaccactactcttagctcactctttctatcttccaaaggataactgaagataaacatgatgaacaaattcatcataaaatgctgaatgttgatagcagggtcattttacctcttctttttttctctctctttctcttctgtctctcctttcctttcttctcttctttctaagagggtgtgccacactgaaatggatgtgaggtaatgtatacaacgaaaagtacagataaaagtacaaatgtgttaaaactgtaatatgattaaaacaaggtaggatgtcactattcaaataacacaggatggatggagaaattatagaagaaaatctaagctagggaagcaactgaaattcatgacatttcaaaatattgagcttccaggaagacaagatgaaaagggaaacagtaaaaagcgtattcaggatagacaaattttctctaatgtaattgttagaaaaaattttcatatgcacattcttggtgcataaattagaaggcaggtaataccatccatgcagtctttttttaaaagtagggatagccttcatatgggtttgttaaaaaattgttagcactgataaaatacaagctgacatcacgtttacagggactcctaggtaatttgcatttttaaagtgagctctgatcttaatcctgagatgacttacaaaatcagcatctgtggtgttaggacatggaggctgattttgtaagcagagatcttcatcatcataataattttatgcacttgctgtggctttgcacatgtattttctcatcgtgaatggattcagtgtgccttccatgagttttatgtctctgtctggtttttggaatggggactcagtaaatggaggtagagccttggaaagaatagtccagaaatcatttaaaccaagctgtagctatcattttcatgtccctttgaaggagaaagcctcagaattatttcacatatagcctctcaaaaatattttaaagtaagctttataaatcattacatggctctttcctagccctggtcccaaaggtctggtaagctttaagtccctagtgacacctgctgggcagacctcggctcactgctgcaggctttccatcagcctacctcttccttagcatgcaaagctgcaggccactaggtaaggggctggctgccgcttccacagcttgcagcccgtctgctcattgctcatgcaggtgacctctgtcggcagaatcgtgtgccagagtctccccagtgctctctcggggaaatgatttccaacctgtccaggccccaagaaacaaacagggatctatcaaagttgagagagagagagagagagagagagagagagagagagagagagagaatccacctctatccacccccaaccccagccccaatttactaagctgcttctttgtctgaaaactcggaggtgaaagatgctacttgagccgtatgttttgttcaagcacaaaccaaattatgctatacttgcttatatctgaacatattggtttatcttacatagagtttaattgatgcaaacttgaacttcagtatgttagattttcagggaaaacaccatccctgtgatttagattgctatgtttttctttgaacaaagcaaagagaagcaaggcaattacacccctgcttcggtttatttccttcatattcaccaaccattacaaaaatagtgtttaacctcttgtagtatgacctcttgtgtcctctactgtccaattgcacaatttctttctgagccaacatctgcatccttggacagagcaacttgtgtgcaaagtccatgttagctgatcaagcatggctttgtttgcatttattcactgctcatccagcactgcgtaagtggttttgcatattaactaagtgcacagtaaccttcctttacctccttagagctccacccccctcccacccggcccagggaaatcaacactgttactcgctgaggaagctgccaaggggttgccatggcaactgttctgctttcagcagctacttttctggtttgaaggggggaaggaaaaaaaaactggggagaactaggcggctttctgatcagagttcagataaaaagggtcacagtaatttgtgggcactgactaaaataacccaatggatttgagagttaccgcaaaagaagcaaacagacaaactaaagaggtaagtc

SEQ ID NO: 11491 - DNA, 2300 bp, Homo sapien
cttacaaataatcagattaaattttagtaaacagcactctaaatgtgctgccaagtattctataaaagcaatttcacttcagcacctatgtcaaaaaatgtcctatgtcctcacaatatttttacacattgtaataagaaatttttcacatcatcatcaataacctagaaaattaatattgataaaggcattttatgcttattgggaaaacagttctccattgggccataaaatgaaattctaggtcagtttcaaggttttgttcattctttaataagagtattaaaggtataaatcttctgcaaaatgttaaaatgagatttcattttgttcatagttgtttctgacactaagaagccaagcagtaggatgattcatcagggcaatttacttcgtgtatgagaatgtcctctatgacagcaatggggctcagggcaggggagaaacttgtgtgtttacctatcgaaaccattgtgttcccagccaccattctctctctctctctctctcacacacacacacacactctctcgctctctctctttctctctcattaatcagcttggatgacctaacaacagtaataccaaacacccctttgttataccaccttttctccccctttcccactatcctgcttgactgaaagagacatcttcgtgtgtgtgcagtgaaagaaagagagacactgtcccttttccagaatacagtcacaattgagagtcatgttctgagtataaagacatgactaaaattctcctagtacaatcagcacacactttttttttggctttaaagccaattctatacttctggaacctatcagggatcatatttattaaaataagacatatccattgttaaaatgtgttatgtataacacaatatatacaaaaaagtaaatagcatgatcttacaaccaaaaggaaaaaactgaaaattttcttgatctataaatggtgagtacaaatattcacagtacaaaatatatgctatatatttttaaaatattatttcttatgtcaaaataatcatttcatctgtacacaagaacttaatcttattcaattcaatgtaaactcattctaatcacaatttatggagtccctgcagtattttctagataaattaaaattttgcagtcaattaggttctccccctctagaattgtacccaggttttggttcagctcaagtggcaccacattggggaggatatgggtcctttcccagatcatctgttcacactgcactttgtttgcatttattcttgttaatctttaatgagacattccatatgccatctggactcccttagatcgtggcttctacacccacctctttccaacaacaagatttttgattctctagatctcttttagctacatccataccctgtaattgaagaacaggaaagacaaatggctactctcctgaaattgtagagctgccttgaaatccacctgcccaggtaacttgtgtggtcattgctactcaatatcgtagaaattatacagaacacaggctgggtgccatgactcatgcctgtaatcccagcactttgggaggccaaggcaggcagattcctagcccaggagtttgagaccagcctgagcaacatgatgaaaccccatctctacaaaaaatacaaaaacagccaggtgtggtggcacgtgcctgtagtcccagctatgtgcgaggctgaggtgggaggatcgcttgagcccagtaggtaaggcttcagtgagctgagatcgtgccactgtactccagcctgggtgacagagggaaaccatgggaaggaaggaaggaaggaagaaaggaaggaaggaaggaagggagggagggagggagggagggagggaaaaaagaaggaaggaaggaaggagggaaggaaggaaggaaggaaggaaggaaggaaggaaggaaggaaggaaaggaaacagaatacaggacttctctacaaggcttcccaaatctccactcaccatctgaaacacaagacacaggtcccctcggtgtcctgcactttcctccctcaagtgtagttggaggttctagaactctattcacttatatctcagtttcaggttacggaactgagctttgaactttctttgttttagaaaattgcattgatatagtgttactctcttgtgatattgtgttgatatgacattactctcttaggagacagtaattttctaaaacaaagtcatattctctcaagttttcctcccctaacttggacaatccctacctaatctccagggatagactcctatcatatttccaaactat

SEQ ID NO: 11492 - DNA, 2300 bp, Homo sapien
agataactgggtaggaaagtaaatgtaattggataggctactgggtggggaatttaatttcttgcactggacagtaggtatccacaaatacttgtttatttattccttgtaaccctaactatgtctgaagtatttattttattgttatttttctactcctgtgacagattatgaaatgttttatttttaaaaggaccaatgggtaaagggggatatttaacaaattaggaaaatttgtcttttggaagaaaacacaaattagagttttctttgcatagagatttctagatattaccaatatttccaatattcctcctttctgtggacatactatgttttgcagagctacatttatctttctgatcaatgggctctgataaattaattaggagccagtgaatgattgtccatgctctttcctctgttgcagacacctgtgtctagaaagacggaacgccaagttttgcagcgggaactcatttggtaagactgtcccctctgataatgtgcgaggcagaatgtgtacccaatgaatgtgtgtctctagtgtgagatctcgcaaagcaggtatttatctgtgctggtcgctatgggctgtatttgataaggaattataagaaaaacagttctgaaaagtattatctgtttgccagcaagaatgaaaggaaatagttcagatatttggggtcttgaatgagttaaaccagtaattgctttcaatcctaaatggtaaaagagaaaatgttaaaagactttaaaattgagctggttcaaaaacaaacaaacaaacaacaacaacaaaaataaataatagatttaaactgaacttttacttataaaaaggaattaatgagataaaaatgccttagggtaaagatcaaactaagggcctgaggcccagtaatcttttcaatcggaaaaatagctcaggtaaaagagcttaagggttccattctctcatcaaatccagatagactcaggaaaactaccaggtcttcaagcagggagaggtacaggcacaagagtgtaaagaaatacggatgaagtaagaagtgtgttaggtaaagaatcgtagctgtaattattggcacatggaattaattggaatccaatagcttagaaaaaccaacaaagttttaagagagttgtattgcttaagaaactgtgagcctgcactaaaagtgtttgagactctaaaacaaggtgtccaatcttttggcttccctgggccacactggaagaagaattgtctaactaactaacactagtgataggtgataagcaaaaccaaaaaccaaaaaacaaacaaaaaccaaaaaaaaaaaaaaaaacctcaaaatgttttaagaaagtttacaaatttgtgttaggctgcattcaaagctgccctgggcggcttgctaaaacacctctcgggccctgggtaggaagtaggctaagaaaacttcatattctctagtatctattttatatgagcccaagaagggagaaaggaaaggacaaatatctccctgagggtggagacagaagacacagagaacaagaaccaagttgaatcctccaggagagcagagtccgggcctcgtgaaggtagggggctcaaaaaacgtctgcctggaaggacagaatttttcagcaacagggactcctgtttcctttttcaattacgagatgtgtaagtgccagataacttgtcattttagttgctaggtttccaaagctatgggagctacctatagacttgacatagagagtacagtatgcagtaggccctttgtatccaaggattcaaccaactgtggatggaaaatattttttaaaaacccaataaaaacaatataacaataaaaactaatgtaaataaaacaatatagtattaactatttacatagtatttacattgtattaggtgttgaaagttatataaagaggatttaaagtatatggaaggatatgtataagttatgtgcaaatactgcaccattttatatcagcgatttgagcatctgtggatttgatatctatgcgggtcctggaaccaagcccccatggatacggaaggacaattctatcactcagagattctgaattctggactttgagctcaatgccatgactgaggaagaccacggggttttctctcttagaggggaggtgagtataattgtcatacatatctataccagagggagactgcactgaatatttggagaaacaaaagggtaaattgtggcagatactaccagtccttagcaatatttccagttctcctttttcactcctctagtcagtaggccgta

SEQ ID NO: 11493 - DNA, 2300 bp, Homo sapien
tcaaaacaagtcatatgattgtggctaacttcaaggagggcaggaaaggactatctgcccatgtgtgaggattcagagaggatcagacagtaaaaatgctcagtagcattcagtaagataaacctaacagggctgggtgcagtggctcatgcctgtaatcccagcattttgggaggctgagctgggcggactgcctgagatcaccccgtctctactaaaaatacaaaaaaatttgccaagcatggtggtgtgcacctgtaatcccagctacttgggaggctgaggcaggggaattgcttgaaccacggaggtggaggtttcagtgaaccgagatcgcaccactgcactccagcctgggcgacagaacgagactccgtctcagaaaacaaaaacaaaaacaaaaacaaaaacaaaaaaaataacaatagaaagaatgaggggcattctcaagcagaaagcaatcatacttagcatgtcatgtaataaaagacaattctgtttttctgtcaatcagtgaaagggtgttctttgttacttcactttattatgccagtagtaactggcctgctggagctattaattcaatcctagctcccaagctggttgatttcgtagagtctacaagacttccatgctttctccatatctttgttcctttcttttatgtctcagatatgtagcctaaggaaatgggatctgtgtaacagagtttctgggaaggttctagaaggtctcagtctaccttccaagaacttttcattgcttctttgaagacatgggtctttttgaacaaaggttttttaagtggttcaaccaaatgacttaacctaatcaattagtaatgtctccatcttggaacttagatacctattaataagagagccatcagagtgcaaccagaaattcagcataagaacaatggcagttggttatattgatcttaaataaatagaagggaaaaagtggtcccagggctttataaaaagtgagaactcattaaactaaaaaccaagaaacccgagttttcattcttcttgtaagcacttaggagaaagtcaggaacttctgtgtctttcttatttattttgtctttacttcttacccaattcttaattatcattcggtatgagtaaaaagggagaatacttgtctacctgtcttaaaattacaatgatcaaattattccaaacttttttttagttctttggaaatatgtattaccacatatatataaaagaacaagaaatctctacattagctctcaactggggatataacataaataaaacataacttttccatattttaagaagttggctgctttaataactaggaagattcaagctgtcgatattatgttttaaagtgaaatttggaactggaatttataatattgtgattgaaaacacgagcgttttttgagattattaggaaagataattcagaaattaatgtgtaggctttagaaggaactgaaaccaagcaaatactgttaaaaaaaaatcccagttctccactgcgagtggccccctctctagggggcagcagagacgcccgggaggagacggagatcgcggcgactcaagagaggccaagtgggtccgggcagtgcccgcgccaggctctgagctgcagccccaagggcgggggtcgaaggaagaggcgaagaggcggagaggcggcttcacggataagcttttgcaggcgacgctctccgcccgccggacgggaggcggagtagcagcccgattaaagaagcagcctggaaggaaggaaggaaggagcgagggagggacgggaacggcaggaggaggagcagcgagctgggctgcagctgcggcgggaggaggagcggcccccgcgaggccacgttttgtttttgttattttccactggagtagttgccggagcctttcctgaggactgaccgcgccgcagccctgcagccccgaccttccaggtgacagccggtcaccctggtaggagtcagctccgccccaagtcaccccctcccgcccacagccccattccccgcccagccacccagtgtctgccccaggcgagcgcggcggccgcagcggggctgcagcgctggagccggcggccgcggggaccctcggcgtggtcctctgaccctgcaaacccgcgacggaggaaggggaggtcctgcccgaggcgccagcccaaggaggaggatgcccatttaacccgccctcgcctgccgggcgcttgcctcggtgcccgccgccggagcctccgagccgcgcccgtggaagtgctgcatggggcagggctgctga

SEQ ID NO: 11494 - DNA, 2300 bp, Homo sapien
ccgacacactgaccagctggatgcacagcagtgttctgtgttttcatctgacttccttagagaagaaatcgtctgattcattcagggactatcctcccaagctaattagtacatttaatcacgtccaataaccttgagtcagtggggggtttttttgtttgttttttggttttttggcctagtttccgagtgctacatgccagggacatttttaggtgcttaacatgcattaactaatgtaattctccaacaaccctatgagggtatttaaggtaagcattattctaaaaatgccctcctccaaagatttccatcctgattactcattgaaacactaatttaggtactgatctgaagggactttataaatataattaaaatttatgtaccttaagatagaaagaggccaggcacagtggctcacgtctgtaatcccagcactttgggaggccaaggcccgaggtgggtggattacgtgaggacaggagttccagatcaacctgcccaatatggagagaccccatctctactaaaaatatgaaaattagccaggcatggtgatgcatgtctgcaatctcagctactcaaaaaggctgaggcaggagaattgtttgaacctgggaggcagaggttgcaatgagcttagattgcaccactgcactccagtctgggtgacagagtgagtgtctttttttgagactctgtctcaaaaaaaaaaaaagttaattgtttggttatatttgatctaataattttttaggcccctagaaacagagaattttttcaggctagagtcagagagatgtggcaaaagaaggaacaggaacaggagagatcatacagaaagggagatcagagagatttaaagtgtgaggaggacttgacctgcccttcctggctttgaaggtggaggaaggagccacaagccaaggaatgcagatggcctctaggagctgggagtccccatctaaaagccagcaaggaaactgcacagaactgagctctgccaacaacctgaattgaggctgaaagcagatcccacccctgtcccccacccaaaccccaccaccccggaaccttcattgaggaacacagtcctgctgaccgtttaccggtgcagttctagattagaggagactaaagagacatgatcaccaaattcaaggcggcccttgattagattctagttgtggatggggtagggaataactttaaagaatattgtttaaacaagtggggaaattttaatttgacttatttattagagaatagtattttatcaatattaaatttcctgaatgtgatagttgaattgtggttatttagaagaatgccctagttcttaggagacaacatgctcaagcatttaggagtgaagtatcatccttaatacaagccgagataaagcaaatatgtacaatgcgaacagttggtgaatctagatgaagggtatacaggtgttcattgaattattttttgcaatttttctgaaaaaaataaatttttcaaaatacaaagttggcggggaaaaaacatcactgtggatacttcctgtaggatggatttgaggtcaataggaaagaggtgggaagacaagatgggaaggtattccgcagccagactgagggctgggattcaagaggaacagcagggataatggaaagcatgccccgcccacagctaggccagcgaagcagctcatcctataactgtggttcccacagccttcccttgcaggacaaactcccatgtgccgggggtgcggtcgcccagcgccttccgaatttggttgggattgaggagccgcgcagcgggatgctgtgccccgccccgctccagtctggaagagcccacgtgtcactgttagatgggggaagcggcatcctaaatttaattagcgcttctcttctcaaagtatctcccaaatctttggcctttttccataaaataattttcttttagctcaatgtctcctaagatatatgttgaattaagaaaaaatatgagtcacataaagatgcttttttcagcttcccctgctacgtccgccccatgcgccaggccgctaggggcaggacgtggaagcggaagcgctggtctgggggcgttctctcgagtccgggccgcaagtcccagacgctgcccatggaggcgtccagcgagccgccgctggatgctaagtccgatgtgagttccaacctggaaggagagtgggcagcgaggctctggagcaagaaagatgtttctctaaattgtgtttctgcttccgtttcaggtcaccaaccaggtgggtgagcggc

SEQ ID NO: 11495 - DNA, 2300 bp, Homo sapien
taccaatttcgttttttacattacaccataatgctcatgagatcagagtttatgccatagttctatggatttcttcctatgcatgtgatagtactaggcttactgtaagagctccaaaaatattttctgacatatgttctacttatatgtcattatgtaaaaataaaacaaaattatactcatgcatttttaatattagcattttttgactctattgataacatctgtattttccaactgcgaagtttgtgtaagtgatctcttgtaagatggaggtctgaaacataaacagtttatcacgtgttgctggagtaacaattggcagagattgccctaaactctaatgacattttactctccccaaatcagatcgataggtttttgaagtgcactcatgttgaattagaacaataataaacagtttttaaagaaatgcatgaaaaatacaaagaaataacaaaaaataccttttaaaatacacatcttttcacctttttgaagcatttttacaaagttaaggggtgtgtgtctgtgtgtgtgtgtgtgtgtgtgtgtgtgggtgtgtgtgtgtgtgtgtatttaccaccccctcaccatgatgacaacaagaactgaagaaaaagatttcctggggctgggcatggtgactcacacctgtaatcccagcactttgggaggctgaggcgggcagattgcctgagctcaggagttcgagaccagcctgggcaacacgttgaaaccccatctctactaaaatacaaaaaaatagctgggcatggtggcatgcgcctgtaatcccagctacttgggaggctgagtcagtagaagcgcttgaacccgggagttggaggttgcagtgaggtgagatcacgccactgcactccagcctgggcaacagagtgagactctgtctcaaaaaaaaaaaaaaaaaaagatttccttgcaaaaagaaccgacacactgaccagctggatgcacagcagtgttctgtgttttcatctgacttccttagagaagaaatcgtctgattcattcagggactatcctcccaagctaattagtacatttaatcacgtccaataaccttgagtcagtggggggtttttttgtttgttttttggttttttggcctagtttccgagtgctacatgccagggacatttttaggtgcttaacatgcattaactaatgtaattctccaacaaccctatgagggtatttaaggtaagcattattctaaaaatgccctcctccaaagatttccatcctgattactcattgaaacactaatttaggtactgatctgaagggactttataaatataattaaaatttatgtaccttaagatagaaagaggccaggcacagtggctcacgtctgtaatcccagcactttgggaggccaaggcccgaggtgggtggattacgtgaggacaggagttccagatcaacctgcccaatatggagagaccccatctctactaaaaatatgaaaattagccaggcatggtgatgcatgtctgcaatctcagctactcaaaaaggctgaggcaggagaattgtttgaacctgggaggcagaggttgcaatgagcttagattgcaccactgcactccagtctgggtgacagagtgagtgtctttttttgagactctgtctcaaaaaaaaaaaaagttaattgtttggttatatttgatctaataattttttaggcccctagaaacagagaattttttcaggctagagtcagagagatgtggcaaaagaaggaacaggaacaggagagatcatacagaaagggagatcagagagatttaaagtgtgaggaggacttgacctgcccttcctggctttgaaggtggaggaaggagccacaagccaaggaatgcagatggcctctaggagctgggagtccccatctaaaagccagcaaggaaactgcacagaactgagctctgccaacaacctgaattgaggctgaaagcagatcccacccctgtcccccacccaaaccccaccaccccggaaccttcattgaggaacacagtcctgctgaccgtttaccggtgcagttctagattagaggagactaaagagacatgatcaccaaattcaaggcggcccttgattagattctagttgtggatggggtagggaataactttaaagaatattgtttaaacaagtggggaaattttaatttgacttatttattagagaatagtattttatcaatattaaatttcctgaatgtgatagttgaattgtggttatttagaagaatgccctagttcttagga

SEQ ID NO: 11496 - DNA, 2300 bp, Homo sapien
agttaaaatgtacagtttaactctacaaattagagtcctacatttgtaagggttttatgggtctaaaggtctggggtgtgctaggacaacctctgtaaggtgaaagacaagttattgcatcttgcaattcctattcacagcaaaatggcagagaacctactgggcctctttggcttttggagatagaatatacacttgggaatacagcttcaacacatttattgggtggtatggaaagctaccaatttgagtgtatccctagcaagacagtgctctgcagcaagtccctgctgggatgcaaactgtcttgctgtccggccttgtgtctcagcagatccaatgctgctagtgtccctggaagataaagatgctgtgtgaagtcttaagcaaccctaacaggtgaatcacagtgcagaacctcagggatctggaacaaggcaattcctttgacagtaagtaatttgaaaagcagcccctggcatgcactgagtccagcagagactaagagtctggcaatgtaactctagtgataatgcaactaagcccatcacgagctggacactgccagttttaccaagccaaagtgttaggtgagtatagcagcaatccattagataacgatgaagaggagttaaggtaatgaaatacctctgaagtcaaagaacagtggccagaagaacgtgggtgggagagttggaagtttcccaagaaatataagctcagcataatattatctttttctgactccctaactgctctctacctgaatttcctctattaggtgcagaatagtaatatgcactcttccccaggtcaaatttatggagttatcattgataacttctgctcatcaaaggcatcatcccttaaaacagaatctctttaatctgtgcctttctccgtggctactgttttaattttttcagcatttatttctcacacgtttttcacattattgacaagtgatgtttctgcatatctgatcatcccatttattcttcagatgtttaccgagcattttctatgtatcatgcactgggttaggccctggataaataatgtgaagaagaaaaaagagacactgctactgggctcctggaatttgcagtttggtgaaaaagatacatgacaaatcctgcttaagatccttcagtggttccttgctgttttcaggaagcccagatgtcttgaccgggttgcctctgtttacctctacagcatcacctctaatcagcaccctttactctgcagccacagtgcgttttcccttcttcacagcaccttcctctctgcctaggtaaagtctaccatcttttaagggttcagtccaggaatccactttttcaggaagacttctggacactctcttcccccttcctccgtaattccagcacacttcatgccatcactatcatataggtaccacgctttttatcctgattctccgttgtcttgtccactgcctctactctacagtgaactcaactttgtgtcaatacttagtacagtgatttctagtactcgacattttttgtcaaatggaatcggatatatagaaacacccgctgcctcccgcaagagcagacaaggccaacccatcactcctgcaccccgacaaacgaacaacagcaccgtgctgcacggcgtcctccggccttgctgcctggcaatgggtagccacctggcgtctgtctcagaataggactccgcggcacgcctcctagcgcagtcggttgacactgcaagaatgggaaggtgcgggtgaccacgcggtcccagaccggcgcaaggcgcatgcgtagaacgcgagcgctcggcaaggctcggctcggaagagtccaagcgtgaggggagagggctgtggattcagatactgtttttctcccgaaataggaaattggcttatttttttctcctcggcagcatcttaatttaaaatatgacacttgacctacggccctgcacggagcggttaagagggtgagaggcccgtcaaactctttttggtgtttaggcgctcctcctccgggcggtgtgttgggagggcccaggtcaaggcgcgcgtgggcggaagcggcggcggcggcgaaggcggcggctgtcagagctggagggccgggcaccgcggccatggagggtcaacgctggctgccgctggaggccaatcccgaggtgggcgcgcttcggggcagccctgggccgtgggcaggtgcagagggagccggcttgctgccgcgagtccacggtggtttgtctctaaagcgtgttctctgtttcgttttcaggtcaccaaccaggtg

SEQ ID NO: 11497 - DNA, 2300 bp, Homo sapien
aaccctcctttggctgctctggttgatgtcccccactaggtcatgtgcccccgaagtccaggctttgatgcctggatctcctttcaagtttatttaggattccagagcagttgagcctgcactggcaaagcttgccagaactcaagttccagccactgagatggatgaattcactctggctagggctggtctaaatgctccctctgtgggcattggctgagttctgtcaagtgttgctttccactgtgacagggcagcactgagtttcaatgcaaagtcccataatcactctactctccctcccccaagcatacagattcactgctgctggggaataggggaaggatggtgtcagcaattcaagactgttttttctaccctcttcagtgcctcttgcagtgattttaagttaaaacaatatactgtaattgctcacctgatttttggttcttatgaaggtgcttttttgtgtagatagttcttaaatttggtgttcctgtggggaggatgattggtagaggcttttatttggccatcttacttctccagatctcttgaaagtgacttctttagctaaattaatcaaacatcagagagaaaatgtttagagcaacttattcatatgtattatacattttagagttgatgcctatgtagatactggggatttattgagtgtattaggccattcttgcattgctataaagaaacacctgagactgggtgatttgtaagggaaagaggtttaactggctaatggttctgcagattctacagcttctgcaggctctatagcaatgcttagaggcttctagggaggcctcaggaagcttacaatcatggcaaaaggtgaagagggagcaggcacatcacatggtgaaagcaggagcaagagagagggtgagggggtggtaccacacaattttaaacaaccagatcttgcaacagctcacacttttggtgcaaggacagcaccaagaggatggtgctatgccatttacgagggatctgtccccatgatccaaacatttcccaccaggccccacctccaacattgggaattacattttaacatgagatttgggcagagacaaatatccaaactatatcattgagcaaccaacctggttttaatatgaaacatagttgttctcaaactttttaacatcaggagccccttatactctaaaaattattgagcagcttagagagttgtggatctctatctattagaaattaaaataacttttaggaatatttgttcatttaaaatgaaaaacaagcttatcatatgttgacataaataacatttttataaaaatattttctttttttttttttgagacggagtttcgctctgttgcccgggctggagtgcagtggtgtgatatcggctcactgcaagctccgcctcccgggttcacgccattctcctgcctaacctcctgagtagctgggactacaggcgccctccaccacgcctggctaattttttgtatttttagcagagacagggtttcaccgtgttagccaggatggtctcgatctcccgacctcgtgatccgcccgcctcagcctcccaaagtgctgggattacaggcatgagccaccgcgcccggccccaaaaatattttcttaataaagttagtgagaaaagtggcactgttatatttttgcaaaatctcttcaatatctggcttaaggaggacagctgtgctctcttattgataatgaataaagagtgcttcccagaattgacaattcaagacatcagtggtgatctatatcaaaatgattttgaggatagtaatttgaggacaaggaccatgtcttttgtataccattttatcctcagagtctaatacagttcttggcacatagaaacggccagatatttggtaggtgactaaactatactgcagtgtgttgagaagtgaacagaagatatggattcaggaagtatagaaacctccttcatgacacttggttgagaaaagaagagaaatgaggggaatgagggtgcagaatcagcagaggacttttaaaaataatgttttcatatgaggaaaaaaataaaaacaaatagaaattaagaaaacaggaaagaagtggaataattaggaacctagggtggggtagggtagcaggacatttcaaacattaatgagcatatgagattccaggtcttgttaaaatgcaaattctgattcagctggtaggtgaggtctgagattgtgcatttctaacaagcactcagataatcttaaggctgttggccccagggtcacacttatagtgat

SEQ ID NO: 11498 - DNA, 2300 bp, Homo sapien
tcctccaacttacgattttttgactacgatgatgcaaaagagatgcacatttagccaaaaccgtacttaagagtatccatacaaccattctttcactttcagtacagtagtcaataaattacataagatattcaacaacttattataaaataggctttgcattagatgattttgcccaactgtaggctaatgtatgtgttgtgaggatgtttaaggaggctagactaagctataatgtttggtaggttaaatacttaacaatattttcaacttataatgggtttatcaaaagtaaccccatcataagttgaggagtatctgtattaataatatagtgcatactgtgcttaaatatttttccctgcctttttagcaaaacaatttgaattgatagtaaggttatttctcttaccaaataaagttaatgagagatcaggtggaaattctttaccaaaacataaacaaacacacacacacacacaaataaatgtattttagggaaaactggacttgactatttttatctttgattatccttactaaagatatcctacgggaaacacagactttatttttttttcgtttcatgggcttcaggaagagaagcttagtaaacatacattctctccttcctctttcccagaagctgcaatagtttattttaaagctaattctagggtaggtccttttgatctcactgctatcacttagagaattataatgtggttttgcaattctagctagaatgggggacctttaaaaaaggtcttggatttatgttaaatgattttagttcaatgataggaaacccctctacttgttaaaaaaaaaaaacacaaaaacctcaaaaaaagctcttaagatctttatagtaggaagaaaacaaccaactgcttttcaaattatggggttggtcccatgttttgaaagttaccatctcagttgatctcttaatgagatgtctgtgtacatgagacaaaggtcgataagaacttgagggcttctcatctatcccttctcagttaacaatccagtagcttcagaagacaaatttaggacccttgcctttgtccactgggtgaagcattcatcatcctaaagctgcactggaaacttcctggaggtttgtcttctttttggaggaatgttctgatatgggattcactttgtttttctccttttgctttctggtgcatacatgttttccctcttatgttcatttcttaatcattatctgtaacattttggcttccttttcctctggctttgatttccaagtatggaattgaaccttcttgtctgaataccattatgtaagtactgacaacatcacatctttttattactgacactgaaggatgtattttttgtgggtagaaatggggtagagatgggataggtataattcttattaaacttatttttaatctaccttctagtccttctttgtgttaactaagctgtcatataagcatgagaaatacacacataatccatatattggttatttctgaacttataagggcagacgcttttttgaatcataaccaatcaaagtacaaaattcagttcttttattagaagaactcccagtatatctgtttcttctttcaattatttccagccaacaggacctcttctcttataatctttgtccacacaccattcagccccatcccttcttcctttacaacacagagtagcctttttctgcccaattcatcctaactcctctccaccctaccccaccacttgctgcaagaaacttgggcctaaggttcacttttactgtacaaaagcattttctaacaaagccagtttctttgtgtagaacagttgtcctccacaggggctgatttgcccccaggggacgtctggcggtgtctggaaacgtttttggttattacttctactacagggaaactgctggcttctagtgggtaggggccagggatcctgctaaacatcctatgatgcacaggacaatcctcctaacaaagaattatccgacccagattgtcaattgcctttctgttgagagaccctcctgtaaggaaattcttgtatcagtggcactaagcaatcatattttctactctgctgttatcaatgctttattaattctgtacattaagttataggttttacatatacacactccagttaataaacagttgttgaatactagatatgtgtcaggcaccaagccaggcactcttaaattgcttatggttcagtgaggaaaagaggcaatataataccttgtgaaaggggctatgattgcataaagaagatatgcc

SEQ ID NO: 11499 - DNA, 2300 bp, Homo sapien
aggtcagagtttgagaccatcctggacaacatagtgagacccctctctctacaaaaaatacagaaattagctgggtgtggtgtcacttgcctgtagtcgcagctacttgggagtctgaggcaagaggatcgcttgagcccaggagttcaaggtcacggggagctatgatggcgcaactgcactccagcctaggcaacagagctgtctcttaaaaaacttaaaaaacaaacaagaacggctgggggcggtggctcacgcctgtaatcaaagcactttgggaggacgaggcaggcggatcacgaggtcaggacatcgagaccatcctggctaacacggtgaaacctcgtctctactaaaaaaatacaaaaaaattagccaggcgtggtgacgggcgcctgtagtcccagctactcgagaggctgaggcaggagaatggcgtggacccgggaggcggagcttgcagtgagccgagattgcaccactgcactccagcctgggcgacagagcgagactcctcaaaaacaaacaaacaaacaagaactttgggaggccgaggtgggtggatcacctgaggtcagttcgagaccagcctggccaatatggtgaaaccccgtctctactaaaaatataaaaactagctgggcatggtggtgggcgcctgtaatcccagctgctcgagaggctaaggcaagagaattgcttgaacccaggagacggaggttgcagtgagccgacacggtgctactgcactccagcctcggcaacagtgagactccatctcaaaacaaaacaaaacaaaacaaaacaaaacaaaacaaaaacaaacagaaagtaaatacaatttaaaaaattaaaaaataaaaccctccagcagaaaaggtgatacataaggcaaaaggcaaacagttgttaaatacagacgctaggttttagatagtattctactagtctctgctctgtatctgacgtttttcttcataaaaacaaccagaaaaataagaacaagagtttgctttcgtttcagcagagtaagaaccggtctttgtcttccgccaaagatgaagccatcaacctgtggcctggatagtgcctcaggagcgtggagtgagggaccagggagctcagacagatgagtaggctcctttgtggagacctgatttgagcactggtgtgaaaaagacccgcgcaagccgacccgtgtgcctcccgccccgcccccaaccccccggccctgcacacctacccagggccgcggcggataccgcataacctgccacctcgctgtcccctgagtgtcctcaaaccacgaagggtgggaattttgacgctcaccgcgagggcgatcatcaaacggcctaaactgggctgagcgggcgggaagtggggaatgcaaggaaccctccagcttgctcgaaccctcagccgcgagccggggtggaggggcagggaccctccttccaccgcacccacctggaagccgggcggagcggggccgaactccgccggggggaagcggcagcacgtgccaaggccacgaccctcctctgccgccgggagggcccggccgccgcagggggcggggagcgtgggaggggacggcgctcacctggcggctgggccggatcgcggcgggagagcgggtagcgggctcagctggccggggctcaggtgagggcggcgggccgcgctccccagcgggggaggtttcttggccgggaaaggtacaattgtgtgcagctatttctggtatgtcaagcgggccgggcggccgcgagccgggaggggcgccgctctcaggggcccgggagagggcaggggccaggcgggcgggtgcgggaaggatgcgggcgcgggggcgcatcctctcggggcggagccgcgggctgtgcgggaaccccagcggggcccgggccgcggcccctggcggactgtggcatctcccgggccagacagtctgaccacagaggcggccgcggccgggagcccggggagccaagggaggggcagacggaagcggcgactcggcgggccccgggagggcggtggggtgggccggggcggggccaccgcggggaggacggcggcggcgctgcgacttttgaagtccaaactgtcgtcggggctggtgccgcgcgctgccgctgggcacccgcttcgcttcccgcgtcctgcctgactgcccgggtccccgcgggccttgggtcgctttcaggagtttagagaaagccaggtcttcacgttcgtgtaggttcgagaccttaacgaactgcagagcgcaacaaagggaactagagccccgg

SEQ ID NO: 11500 - DNA, 2300 bp, Homo sapien
gcctgcatcctttgaaattgcaaggaataaattaccagtgagctcaaatccagtaggaatgactgagactacattaccaatcttagtacaacctcgtcctgctgcataggccatgtgtgactttgtttacaaagttgtactgtgttaaacttgagcatcgttgaatgatttaaaagatattctgctgttttggttaaaataaagtctttatttaaggctagaatttagccatattaatttgtatcttctcttgaactttgtcttcaactaagtatagtcactttagatgtcaagttctttctctctactttggtggtttttgaggagagtttggctttatttatctatccttatcaatctgtacctatttgtcaactagatgaatgctattatgtttgtatgaaatatgtgaagaatcattttggctctcatttgagtaagtttacttttagtttaaccttattttaatatttttgtaatactttaaacattcagaaccaaatcaaattggttgaattggtgtgaagacttctaatggtttgtttttcctttattgatatgagacttgcatcctgtgtgtattagttcattttcacactgctgtaaagaactgcctgagactgggtaatttacaaagcaaagagatttaaatgactcacagatctgcatggctgggaaggcctcagagagcttacagtcatgggggaaggggaggcagacatgtcttacatggtgacaggtgagagagagcgaagggggaagagctccttataaaaccaccagatctcttgagaactcactcactatcacgagaacagcatgggggaaactgcccccatgatccaatcgcctctctcccttggcatgcagggattacaggtccttcattgacaagtgaggattacaatttcagatgagaattgggtggggacacacagccaaaccatatcattatggaacttggggtattggtacatccaaccatcttttcttgcctgcttctcagagggccaattttaaaaccattaatttgtatcatttgataattacagatagtatactttttagaaactatgggcctaacaaaattatcacattttgctcctcttggaattttgccaataaattgtgtctcctttttccataataagtcaaatgaaaaacaaaataaacacctttcattgagctgttcaacttttgacttgcaagtttctttactctttgacttcatcttatttaaaacgattcgtggatttcatctttcagctaggtagttcgcactgccttttactcacagtagattggaatgaccaggatcctgcctgtacaaatagtgactttttagaatgtctctttccttagtaatcagtggcgcttttctcttgccacacctttccttgtgctttcccggaatccccttactctccaagaacccaagctgtagaatttagccactttatcttaggaaaagagtaattgcctttctccaagtggcagactatcttctggtctgtgaaagtcgcctcttagggagggaggtgaggtttcaaggaggctcacgccatagaggcagcattaccagctgcctcagtggacagatgtgtgttggcatgctgggaggccacccctttaccagcgaactgtaacagttaatatggagaacccgcctgggattgtcacaagttcaaccccataaagtgttttcttttcttcttcttttttttttttagagtagtagagatgaagcctaagttaattctggtaaccaaatgtatgtctctgaaatgtggctggctttaaaatagcatatactgtaatctgtgtttgcacagcagtttacattaacgaagagcactggtttgtgaatggaggatttgggttttgaaattagatatgagggcaaccttggagggaggggataggctttcatatttttggaggcagctcttgaggcaggtgcagggagtgagtaatgtgccacacaaactatgcaatttagccaatgaacactaggtttctcctcagtcctatagtatggtttccctgcctgtcaagagccagctcaacaaccaaacccagattccaggtgtggtattccacagtcgttctgtaatttgtaatcatagaaacagaatgttcctcctcttatttcttccctgccaacagtttctgggtgggtgaatgtcagtagctggagttatttttaaagaggagaggtgaggcttgccgtgcaaagctggaaagagggcgtttgtttgcagagcagagctgacatcaaagtgtagattactgctcagtgg

SEQ ID NO: 11501 - DNA, 2300 bp, Homo sapien
gtagtttttaaaaataaaaaatgtgaaacgctatttcagcattaacctttataattactgccacacgtattggctgtttgctgtcaaggtgtgacattttcatagcccagatgacgattccaatacgtttaaggaaatgaatctgagtatgtgattcatctgagtggttaaagctgtaaaagcagaggctgaaattctgaacccgctgtatttcttttcccttactgaagaacctactccatgtaatgacagaatttatatctagtcaaggaataaaaggggaagggatagagggcatgtgggaatatgcaggcttcagtcagttcagatgcagtggcccacccagcggtgtggaatctaagtcgtcttctcagatccttgttggaatgggcacctgtccatgtaaccaaaagcagaaggccactgtcacatccctttctgatcttggaaatggggctgcagaccttgtttaaagagtgcgtaagtgaagtcttggaaattacaactaagcggggaaaaaaagcctgggatggaggcaccaggccgataaagctcttttgtgatcagtgtgttaaaattctactgctactctctagattgtagtcctaaattgatgagcactataatgtagggtaatatttttaggataacagaattgcaatgtcacattctctagttttacgtgaaaactcatatcaagaatgatactttgggggaaaaaattctctgcaggacaccgtactgggctaaaaaatactttttcttaaaagttagaaagtaaaatagtctctttatgactttaaaattccacatgtatggatttcggcaggagtaattgatatacttattggaaatgagaaataaatgtctgattttttagaaggtggtaaaaagaaagcaccagtttattgactactactcctcatggtcacagctgcgtttactttccctcttttgccaagactctactctccttttactctgtccctgtctcatagctgtatgttaagcgacttcctgtagactgttctcagtgttatttactgtagcttcctgccaggcaggagggaggggaagagactgcatttaactcaggttaaccctgcaggtgctctacctgctgagagcttgtagctgtcaggcactgtgcacagccaggcctggagagaaccctggtgagaagcaagtaacatttccaaacctttacaagtgcacaggaggcaggaagagaagggtgtgaaagagggacagcttggcttggatctgtagtgttgttctccccccttttcttcctttgtctttaaaagagtagattcattcttcttcttttaagaaagcagattactatttgtatctatctgaccttgaggagtatcaaagggtgttcttttgaatttgtgtttaaatgattttgaatcataatacagcgttcccaatataatttccatggccactctgaagaaactgtgagttctgtgctctcatttgggcataagacttcagattcctttggaactttagaagtcatccagtccagcctcatatctaatgtgtgattctggtttatagaatctatccagaccctttacaagcttgtttttttttttcttctctttctacatccttcctgatctctctcctcacatatattatagatagctgcatgccttattttaaattactgagttctcccagaattatttttgcatgttgttttaagtatctgtgactccattgctagattttatttctatgtattacatcaacaaatcttatggaaaatcatggaggaagagattgagaaaaaaggggctcactagtaaaataggacttattcttcttagagcctacagcagcaaaagaatgtactgcatgtgcctccagtatgcaaagcaagttcctcctaatggatcttatcacaacttcgtgacaaatttctaaaaatattccctgcagttagcagtggcagcactgggtttctaagggaaagacaaagcaggcgcgctgtgtgggtttcagttaggcgaataatctggagagtaaagcaaattcttgtgccttctttataggttttgaaagtgacacagattcggaatttacatttaagatgcaggattataataaagatgatatgtcgtatcgaaggatttcggctgttgagccaaagactgcgttacccttcaatcgttttttacccaacaaaagtagacagccatcctatgtaccagcacctctgagaaagaaaaagccagacaaacatgaggataacagaagaagttgggcaagcccggtttatacag

SEQ ID NO: 11502 - DNA, 2300 bp, Homo sapien
ttgcacagacgtagtatactgtaaaactcgaaacatttggtttagaaaataacttaagttccatgaaatttggaatttgttgtgtagtacagtgatagctatgagaataattataccttttgtccaagaggctattgttttggggcttatgagctgatgtcattttgaagaagtcatggactgtaggtcaggatgtgtcaatagggaccctcttggtatcttaaggagtaattccttacaggtgacatagttctgcattttgcagcatgtagagcagctatgcctttaacgctaaatcttcatgtggcatttgggcaagcaaaaatgccttgccaaacttcacatgcccactagggagtggtaccagtcctagatggatgccactggaggctaaattatgtgtctgtgaaccacttgaagttattcagatcaatatgccaagtattgggagtaggtgtttaaaagtatggtggtcctttttaaataaatgatttaaatcactgtactttattcctgggcagtgaataaatggcctggcctataagttagacccaattgtacagtgggcagaaacctaagcttatccacggccaactgaattaaagtattaatatgaagaaaaacatgtaatgacaataagatttcccttagtttagcagaaaaataataaacttggtgctatttatataaatgaaagttttaccaacctaaggaagaaagaatgaagcttctagtttatcatgaaatgattcaagtctacctagcgtgcagtctccctcctttcatggatagactttcctccatgtgggtgccagggacaccggataccagcgtttcatgttttgttttcaggatcagttcagtgatatgagaatcagcataaaccagacgcctgggaagagtcttgactttgggtttacaataaaatgggatattcctgggatcttcgtagcatcagttgaagcaggtaaattatgtgtttagctctactgaattttcttctccttttctatccttcattgtggggttggggaccacagaaattagtgtatttgatataggaggagaaaacgtgaaaaatgcaaccataaggccagaaaatacatcctctttcctgagattattagttggggttacaaattccatattgtttattctccttgactaattacttttagttttgaagagtcttaattttgtgattttacagattttatccattttggactttatatttggaaatgctaacaaacggcgcttaagtaaagattcagaaagagctttccatgatcagccatgctttgtagtagatatatatgtgctatttaataagttgattttttttgagtgttctaatatacctattgcccatgaagttttcagggtgcttcaggacttctgcaaaaggattacccctcccctgtccaggtctataccatgtcaagcccaggaactctttgcaaaacattacaaggcctaaaattaaaaacaggagttcctttatttttacttttattttttagttttttttacatattttagctatataaaattgcatgttaacaccagttagttcttttacatcttaagattgccttaattagataatggtattttagttatggagtaattttaagcagttttaaatagctgtgttttcttctgcttcattccagaatgtatctgaattggaagctcaattaaaatgcagtatgtttcatatttcaaatttaagagtaacttaaatttttttgtccttgggaggttaataaagaagtcttattgaatagatgagtttatcatttttcctttaatgaagatgcattctatagaacttcaaaaaacacctctaatgctttgtatgttgtactcagatatttggtattaaaaaaaatagtgacctccacctgaaaaagagagaaatggttaattgaaattcagagtcatttttcttaagttcaaagcagcaactaatagaacatgtgggatttttttccccaattggttaatttattttgcatttttaggtagcccagcagaattttctcagctacaagtagatgatgaaattattgctattaacaacaccaagttttcatataacgattcaaaagagtgggaggaagccatggctaaggctcaagaaactggacacctagtgatggatgtgaggcgctatggaaaggctggtgagtttgtgttaccaccatgtctggcatttgaaactgggacctggccgttggcaagtggttctaacaatttgcttcaataactttttattttttcacttatgttttggc

SEQ ID NO: 11503 - DNA, 2300 bp, Homo sapien
gccaagatcgcgccactgcactccagcctggtgacagagcgagattccatctcaaaaacaaacaaacaagttcccattgttatacatttttttgcaaacaaactaaatatttcatgcataaaaattctcatcagaaattaatatgtttaaaactattttcagatgatatattttatcagggtttgaacaaatttatgcgaatatacacaaaaggaagagtcagtgactgcagtggaatggaaatttactagctcatttttaacaaagcctccacttaactggtacataccattgagtaatgagctccatgatttagtaaaccagccatagaccaactgctttcacctaatttttgtatctgcatccgtttgtgataaccatgcagaccaaggatgcccacacactagctcacaaccaagtctccaatcttggtcaaccaagatactttgtaaaaatagagactatttaatcatactacatttgaaaaaaaaaattttgaaggaggcatgtttgtttttttataaagcttataaatagtgaaaatactgcttttatctcttttttacctttttagcatagtttaatgatatacacaaaatgtagtgctttatgtatgagatttatgtatgagatttatacataaatatgcatattgggggctatatgcatctgtatttgttttaaaccgaagtgccttacttaaaaagatgagattaaaaggtttaaagccctggcaatggaaagccaagagaatgaagtaaactgatgaagatgccttttaattccctgtcgggtcttcccatcttacaaccttgtaatgtatctttatgactccatgtgaaggagattgcattaaaacacatttgcatctttggagaattggagtgttagccgtaggatgcactcttttacttgttttgttatacctgtaggagaatcttaaacccttatacacgaatctccatttgaaaagctgttggtgatcagataaaacactgtctcctcttaattttttttgccacaaaaagctgtttgtctcgcaactccttgagggttcaattcaagttttctaattattgtgcattgtctttctggcaattagcacttagaaagagggacaggatggtataaaatgtgaagacagcagtttaagactgacactatctgaggcttagtggcttcctgcgcatgtaaccttgatgaccttacttttcctccccgtgcctcaattttttcacgtgtaaaacaaaagtgaaacaggaatcactagtagcacctctcatgagcttcttgtgaccaagaactgagtaaattcacgtgaagctcttggaaaggtggctggtgaatagaaacaatagatgttaactcttagctttttgcaagaagtaatgcctgtgctgttttctacaaaactttatttcagctttccagatgaaacaggattgacaccattttagaaaaatcaacaataaatggcacttaatgagactatgttcctaaatctgcatttctttgtgagaattttgattttgcaggttcttcgtattcataacactaggtggcagtgttagcacagacggggaaaaaaaacactgcgggtttccccattccccccatttccctttccagttttataactttttagtcagcttttgaaccaccgatcagtccatattagtagtctggggacaccccagtgccgagtcctacaggacactggctgacggattaacaggacatttcaatgatcgttgcctcgtaggagcaaatgtggtccggtgcgatgcgaggaaactacgtcctaatttctctatcaggggcttgcacaaggctgtttttctgcacaaaagctgacttaggaacgctttagctcactatgcagaggcctgaagagtccttgattttcctggagagagctggcaggtttgatagaggctgtcacgttttaggaatctcaatggtcccccagacaataagccaacggcctttggcgggtgggattttgctgaagtcatttctttgtgactctgtgggcgaggcaagtatttgccaggtcactggggtcttgactttaaaaacgggcagtttttaaactaaaagttttattctttttagatgattatcccggggctcctctgagaaaagtaggagtagattgctggaattaccatgggttaaaatgaaagaggatgacctggctggacaaaggcgtatggactcaggaagacgagaactcctgctccttctctgaatcggattttcctggctgtagagaccagatcaacccttccattccatcg

SEQ ID NO: 11504 - DNA, 2300 bp, Homo sapien
ccaagttgtcccactctagttagattttaccttatttgtttacactagtgaattctgggctagggacattgtaaatgataaagcaagccaagctgacattccaaccaagagatgacttgcatccagagtataaatcaagagatctttcttctcttccaaaaagccagggaagcagtacttttgctacatcagtattctaccatgtgggttagtcttgcagacatttttctctgaaaccccttaagaaaggtatgattttgaaagcaaacattttcttcagattataattttttcaggaaacatttgtttagttactttgaggtagtcaatgaggcactccatttctagctttcaagtgctgctaaaagcattggtatatgcaagggatgaacatttctttgaagaaaacctgttttattctaaatcatttcaacatctatacatgggaaataagagctactctgcactttcacagggctttaaataggttcaaatgagataatgtaggcaaaatattttgcaaactctatcagataagtattgtagctcttataatagtaaacttatgtgctccaaaacatacagtttataaattacaaagtatgtggttctgtggtttcggtagacaaaagaatttcatttttgaaatacgttctagttaattacacatcttagtggtatgaatgacttcctctagcatatttgttttacaagttcaggtgttgaactttttcatagcagggcatacttgccctgctgttttaaagcacatccattgcaatgaactaatgttttacgtaataattctgattcactataactagaagacatcttgataaacgcatatttggcctttctagaaccccagtgtatttcagaccctgacaacgaaaacaagttaagcttttagcacagcccaattaaatgtctaaaagctttttaaaaccaagtcttcaattttctgcaaagctagacccctggctgtgagaatgacattgatgagcagtgttattgtccctgaactgtcacactgtacttgaatcccattacaatttggtacagaaagcagtcagaatcaaatgattaaatctgagctttggttgctgtcaaagtttcaagtggccacataaaaggagacaagcctatgttgtcagcacctagaactgacataaatgtgctgaaggaatgggtaattaattatcttgtgtagattagagcactgagcacagagtggttcatgatgggtctttatctctggatagagctggctggtgttagcaaaagtttctactggagctgtgcattgcctctgggaatatgtcaatacttcctctgaattccagttactctttccaaaggctataaaacaagagtcaattttgtgcgggcctcctcggaaaagagagaaaaacacccactgggcaattggtattataaaattatcatacgaacggtatttgagaatgatatgagaaaaataggaaaaataggaggcaggcgaaacctattcttccatttccagataaatggcagagtctgacaataaaattttattgttgatgaagttagagtgctttgatataacagtttcaagagaggtatagaatgtcacagatgaattcttcaaaccacagacaccatctgtgaaaatatactgagggcaggcattgatagaaggcagagaggacactggtcttgaactcaaagttaggtttgaggatgagcactactaccactcatccagcaaaagtgattttgcttccaaatttttttgagattttcattttgctatcacattatttttaaatttcacaaatctccttttttctctcaacattcttaagtttataaccttctgttcttattttatggattaagttttactacattacctctctgagggtttcagttattgctcattcaaagctcctacctgcttaccacattgttcctgtttcccttgaagttttgtgtttttgtttttactttctatatctcttagattctctttcacattagatacttttctcaaatgtcttgcaattgttggcttctattcgttttaagaatgaggcaataggagggaggagccaagatggccgaataggaacagctcccgtctacagctcccagcgtgagcgacgcagaagacgggtgatttctgcatttccatctgaggtaccgggttcatctcactagggagtgccagacagtgggcgcaggccagtgtgtgtgcgcaccgtgcgcgagctgaagcagggcgaggcattgcctcacctgggaagcgcaaggggttaggg

SEQ ID NO: 11505 - DNA, 2300 bp, Homo sapien
taccagccttggattataagcagggtccctgtttttgttctggtgatacaagactgtaggagcagaagtagaagcagttaggagaccagtgcaataatccaggcaagagatgatggtggcttggtccagggtgatgatagggagatggtgaaatacgttaatagtctagaaagatttttaacacagagctggcaggatttgctgatgcaatgagcaatggtaattatacaaaaatatgtgcagaactgatacaaagaaggcttttcttggatttgtagaaaagaggctggttttgtcaggtctctgacactaatataacgcctagtagcacaaccacctcgaaatcctgcactgggacttggaagttttgtgttatctattatttatcccaaagaacagaacaacaacaaaaaaagaatgttgaaatacattcagtatcaaaatctgtacttgcaattaagataactggtttgggggttgatctcatttcagcacactgacatgagcgcggtaattgttgagcagatataaacatttcaaaataaaaatgacatttatctgtgaggagactgtgaagctcactgggtagttacacagaaggataaattttatcaagaacaaagatcttgcctgatttatcctgatgtgtggtctatacttcaaactgatgtgataactgcgcagacccctgaccctttgcttattgggctacactgaaagcgctttggagattattcgcctttgcattcctcactccctggtgccctgcaaataatagcaggtacacaagaaacattcagtgacccaatcatttcttgacaccctcctctgcactcttctctttttgcagcattcaggagctcttacttattttcatacccaaatcagtgatcagataatcactcataaatatgacatttcagaacgtgctgggagcagcgcagacagtgtgtagggagccatccagaggccccacccacctgggaagccagggaaagcttccagggggagggggcggttctgtgggctgcagtccgagggggaaaagcaaacgtgtaggcagcaggagttgagagatgggatccagacaagggccttcagatatataaatatccctttctgagactgacgggaacttggacagggccgaagagtgaccgaggcatgcgggagagaaggggcgcctggacttttggaaggataaacatgcaggcgccaaaggtggctttaaaaattacgttagatctgcaactgttgtgagtctaagggcgcgattcaacgaaggctgaatgggacccggagaccgaacgttccggagtcttaccccttcacttcgaagtgaagtgcctcgaaggccctgcgggaagagggaattgcaattaagagcagatttgaagcttcatctcattttgtctctgcagccagaaaataaactatcgtaaagcatcctactgcgggacactgaggtttgctttttgtttctaggtttatttatttattttccaggctggctgcaaggcaacttgaacaaaatctggctgcgctcggactggggcggctctttcgtctctccaggtttttcgcgtctctctactttcagtgacacgacaaccaacgatggcaggccgcagctgcactgctggaagcgcccagttccgcaggcgggagggccggaggcggccacgcatttccactcccggggcgacaggcttccgaaagttcacgtcctccttccagagtccttgggtgcgggctggggcgagaggggagggggcgcggtgactgtccctccaaggagctgtcttccgaagccgccaagtctcgggcgggtcctcttcggaagagggagaaagttgggcgggaccacggggcggggctggtgggtggggagcgggtgggagtccgggcgcccccagcgctcgcgagccggggtggagccagcagccccgcgtggcgtccgcgtttaagatgcaaatcgagtccccgctccccacctcccctcgcccggtaagcgaggctccgccgccgcccacgcctcctgcgcgccacggcaccagagcaggcggctctacttaagcagcgcgcgggccgcgacccggcactcgcctggagcgcgcgggcaaggcgggcggagcgcactggaactcaagggggcgcacagcggcgcgctcgcaccgctcggctccgcgcggctctaggaggtggcggcggtggcggtggcggcggtggcggcggcggcggcggcggggcgcagggctgagcgagcgtccgggttccggggctccggggaaggcggttgc

SEQ ID NO: 11506 - DNA, 2300 bp, Homo sapien
gaggctacagatgatctgggggattccagcgaggaggtggtaggggggcctatggaactggctactttggacaaggaagagaaggtggcatctgttaaggcttggttatgtcagttcctgtgtgtagacagtaagaaaaaaaaagccatgctatgtgtgacatttttttccaatgtttatttcccaccaaaaagtaaatgcattttaacccattctgtggttcactgtagcttaaggaaaccaagcatatagatgcattagtgattttgtttatattatgtaaaatgtaacgatctatcttagaaataccacagtttgtatttttctttaaggagtaaagatttgtctttaaaaataacttgatattttcctggctttcatttaatacaatggaaaataaagtattacacgaaaaaaaaattttttcttagagacagtatctcattatgttacccaggctgaagtgcagtggctattcacaggcacgattatagctcactatagcctcaaagtcctgggttcaagcctcctgagtagctagaacttcaggtacatgccaccttgcctggcttcctgctttcttattcactaagaaactttgttctctaaaatcatagattagagacaacttcgtgtttgaaattacatcagtaacaataaaatatcccacctttgcttgaaggacctcagtcattccacacagagaattggcctcaatttacaacccagatgtcaagcttctgataaggggtttccagacacaaaactccatcgctattttaacttcatagtctccaaggaaataggcccttcatccactttgcagtctagacctagagcctgtgtgttgatggcagcagcaggccgtctggagcagccactaccatcattgacatacagccttgttttgctttgagtctaccaaaatactgcttatttaaatttcatctcaactccacacttccccagaatcctatcactctatctggggagatgccatgtggtccaggcagtcttaggctgaatgggcaaggatccaagggaaaccaattagattgaaattagttctgtctgtgggccctcaagatttaaaagccatggacaagggggaagcaaccagtatcgaccagcgataatctatgagcaccttcagcttggggtgtggggtcatagacaaaaagaatggggtttaatcagtgttcccatccaaggcaaaaccagaccagaagaatgggagctaccaggaggctgagttaagaccaatactagggccaggcatggtgactacagcctgtaatcccagcacttttggaggccgaggcaggtggattacttgaggtcaggagttcgagaccagcctggccaacatggtgaaacctcgtctctaccaaaaaaaaaaaaaaaaattacaactggcacacacttgtacccagccactagggaggctgaggcaggagaattgcttgaacccgggaggcggaggttgcagtgagccgaaatcacatcactgcactccaggctgggtgacagaaggagactccgtctccaaaaaaataaaaaataaaaaccaatactaggaagtgctttcttaccatgaaagctccctgcacacagaatgaagagacagatggcagaagcaagaccagaggcctccaccactgaacaaggtcaacctgaatttgtttttgtagctctgggaagtcctgaactgaatgggaggttctactgtggccctctactaacagtagatggaacctggaaccatctactgttaattgtccttttagtagccaagacatgaagtacctatctcccttctttgtatttggtgaaaagatttgaactcgagccatctctgctaaaggcatgactttagtcaccccactgcagttgcttctctttgcctccaagaaagtccaatctgatgggcagattgtgcttgcagatgactggattaaactgcaaatatctcatgaagctgctgcctgcatcaccgctctccaggcagccacggaggctctggttgttgaggccatctactgtggccctcatacatcatactgtgtatggttccaggatttgtaaatgctctaatcaatgtttttttttttttttaaagctgttcctgctgattgctttttaagctaggctcaagtgtggggccacggaatccttcaggtgcccttcaaatcagacattacatttcagctctcagggctagaatgcttccccctcttatcttgggcaggtctttgaagaagccagtttagccttggtaattttgaatttggccatagtat

SEQ ID NO: 11507 - DNA, 2300 bp, Homo sapien
tgtacccagccactagggaggctgaggcaggagaattgcttgaacccgggaggcggaggttgcagtgagccgaaatcacatcactgcactccaggctgggtgacagaaggagactccgtctccaaaaaaataaaaaataaaaaccaatactaggaagtgctttcttaccatgaaagctccctgcacacagaatgaagagacagatggcagaagcaagaccagaggcctccaccactgaacaaggtcaacctgaatttgtttttgtagctctgggaagtcctgaactgaatgggaggttctactgtggccctctactaacagtagatggaacctggaaccatctactgttaattgtccttttagtagccaagacatgaagtacctatctcccttctttgtatttggtgaaaagatttgaactcgagccatctctgctaaaggcatgactttagtcaccccactgcagttgcttctctttgcctccaagaaagtccaatctgatgggcagattgtgcttgcagatgactggattaaactgcaaatatctcatgaagctgctgcctgcatcaccgctctccaggcagccacggaggctctggttgttgaggccatctactgtggccctcatacatcatactgtgtatggttccaggatttgtaaatgctctaatcaatgtttttttttttttttaaagctgttcctgctgattgctttttaagctaggctcaagtgtggggccacggaatccttcaggtgcccttcaaatcagacattacatttcagctctcagggctagaatgcttccccctcttatcttgggcaggtctttgaagaagccagtttagccttggtaattttgaatttggccatagtatacggaggagagctaggtagctatcaaaacgcttagacaaacgtatggtaaaatgcagcccagcctgaacctccgcaaaacccccaaacctggagcagcaagtgggcaaaggagtgtgtgtttggggcagggtactgagtcccatatgtaatcaagagacctggagggcccaaggaagtcagtgacacccccacaagctacatatcctccaatggattgtggtggtcatctccggctaccgaagccaccttgcttattcccataggcttacaaacattatgatgcttcacacgagttgtgggtgaagtgaaggaattggaaagtcccggtctaaggccctgcaaaactgctgtctggtaaaaacaagtgactatggcaaggccctgaatgtactacgtatagacttaagtcagtatttgtgcctaacagcaaagcatgccacaagaggctcctcaaaagccgggtaattgatgccattgttttcttgacctagttgaagagtcaaagaagagaaggtgatgcagaaacttctttccagtgaagtgacagatccaagcaaggaacacctgcctgtgaggggagcggtaggggagggggtagattcggcagcactcgggtagtggcagggaccacatattgtcggtgttaaccactgttatcactggcccaggtcgagtgaggacgagtcatttccccactaagcacttggggagtggcagggaccacatattgtcagtgttaaccactgttatgactggcccaggtcgggtgacgacgagccatttccgcactattgtcccttcttcctcactgcacccccagccctgcaccctcagctccaaatacacattctcgttcactcaacgtttgttgacacctagcgtgggccctgtgggatggggtaaaagttcggtgttgggaggagccccggtgacagatttttggttttggtggtggcttttgggcaaggacaggtcaattcataaaagatgacgccccaggtctggatcgaattctcctgggagccagaccaaagcaccttcctggactgcaaagtgtggaagccgccgcgggccgggcgcggggaggtgtcatgcgccggaacctgcgcttggggccaagctctggagctgacgcgcaggggcaaggcgccccgcgtcccggactggcggctccgcgcatgctcctcccaccggcgtcgcaggcctcgagaggctccggaagtactgggtgcagcctgatggcgcaggaggtagacacggcacagggcgccgagatgcggcggggcgcgggcgcggctcggggacgcgcttcctggtgctgggccctggcgctgctttggctcgcggtggttccgggctggtcccgggtctcgggcatcccctcccggcgccactggccggtgccctacaagtgagtgcggcg

SEQ ID NO: 11508 - DNA, 2300 bp, Homo sapien
aataaaaaatcacagtggtttgtgtgaggcttgtcatgttttgtttgggtgatgaataatgaaatatggacatgtttactggatctttaaacaccagattttgtggtagcaaataacttattgaaaaaaaaaaacaatgcatgaatacttgatttatctggacacaagcagttgctgaatagtccaggctaaacctaggcagaacagtagttcttaacccagagcttctggccataactaaaatcttgtcttccctcgaagaatgtaatttcctcttaggtggagattacctgcttattctcccatgtctgtccaaggaggaggagagaattggtggtgggaatggttggatatgtttttgccttttttttcccagaaaactgcacaaaggcgcttaggccactgattgccaggttttacaaataaaaatgtaagatgagtatttaaatttgaatttcggataatcaatgaataatttttagtatagttacatcccttttaatgtttaggacatctttaatgctaaaaaatatctgttgtttacctgaaacttaattggtgtctagtatattatcttgcgatcctaactgggggcaaaggtagggggatcaaacaaaaattcaggactcatccccatacccccagggaagaaggctaaagaggtttctgtttggttttagttatctttgaattgtgtaagagtgttctaatggtaaattgtatacaaagatgagtataatacaaatacattcctctgataggtcttaaagtccagttccacctagtagatttgctgggtcatttttatagccctgtgatacaattcaggtgtatctagtataaccctcataaaatcatttgtgcaaaagttgaacatttttagtagggttttttttttaattttcctgaggaaataatttctgatttacaaaaaagagtcacatcacaggattcttctgggctctcctgatagtcttcactgattatagaccaaggaggcttatagttagaatttttagtctagaagagtggttctctaactttatgtgcatcaaaatcacctgaagggcttgtaaagccaaaaattgctggtcccacccccacagtttctgattcagatggtctgggttgggtatgaacatttgttcccatttaagttcccaggtgatgttgatgctgctagtctcagggaccacatattatctataagtagctctgaaactaatataattagcacattagttttacaatccactcttaacatttttgggataaagtagtgtatatgaatctggaaattaataatatccttttaactgttttaaggtgcttcccaggaaacaactaactttttgatggatgaactcctttttacatccttgagggattttttggccctttatccttcccttaggaaatgtctttgcagaagtatgtgtgagaatagctacatcttatttagtttagattttcatgcctgactggtccagtacactcattttacttcacatctttccattaataacattaatgatgaatcccaggttgtgatacacgtgaacattttgagtaaatacttagtttttattgcataccatagacactgtatttacatctattatgtgatccactaccaaatacataattattttttaaagactataaattgatttactccattagtttatacagtcactttggaataaatcagtgtaaaagccaacattaaatatgtctcttatcataatgaaagctaggtcttgtcttgacaattgcccttatactttttcagagagacttagaaaaggccaagttggaggtgagggtggagggtggatgattgaaagaatattctttaagttataatgcaataaactagtaatgatacttctataaaatgaatatgtgtacagagaaatataaatatatacatgagtaatcttgaagtctgggtatttggggaaaaaagtaaaaaaataataaaatattcatgagtaaacggtgtttcttttctaaggtggacagcagcaaggaatcagctgaagcagcttgtgatatactatcgcaacttgtgaattgctctttaaaaacacttggacttatttcaactgctcgaccaagctttatggatttaccaaaggtatctgctgtttttgttttattatctattactgagaaattcagtgaaagtctaatcttttttttttgtattgacagtgtgagtataaggaaagttatatatatacataatggaaaaccagttactatttaggatgaaaataaatagtatttttttaagc

SEQ ID NO: 11509 - DNA, 2300 bp, Homo sapien
ggggtggtgtgggaatagtctacaccattctacgtggtggagggggtacattgtctgtggataatttaaaacaataataaagagactaattgttcatctgctttttattaccacatgcattggcaattccaaacagggtcagtaataaattatttttcccagttggatcaatgtgctccacactcatcctttctcccacctaccatgccactgatcttgatgatacaattgataaatgtaaataagtactgactgattaaaaaataaacgttttttttcaaaaaaaatgaggtgaaataaaatatttgccaataacagggaagaaaaggggtattcaataggtcaagtgtgccaaggtccttgtcttgtttaggaggagaatagatcataatggcgaaaaaagaaaaaaaagaactatgattggaatgtgatataaccgtaatgtgatacaatattaacgtaatgcaacctatgctcatcatgtttactgaattggtttaatgtattttgctgatcatttatactgttcacccaactttaaataaatgggcctgtatttgacttatttgtttttccttaataattatcattgtccttcttagaacttcctattgttcctcatcatccagtcactgagggacctaaacaaatgttgcagctcaggcaaatccacactcttatgctactagaggctttgtacagtttgattcagtgatctgacagctgacaggcccttaaaaaacaccgaacaaacaacactggcatttccccacattgaattcattttattatagaaacagtctcactctctcacccagactgaagtgcagtggtgacatcataggtcactgtaacctcctactcctgggctccagccatcctctcgattcagcctcctgagtagtagccgggattacaccaagctcgtctgattttttaaaattattactcttctatttttttgtagagacaagagtctggacatattgcgcaggctggtctccaattcttgaccacaagcaacccttctgccttggcttcccaaaatgttgggattacagacataagcctgtaccactcctggcctcacactgaacttcgacgtaactttatacatggcttcctagctcaatttcttgagaaaacgggaagaacggagagctccctgggcaccactgcttttcagtgtcttatacatgggtctgagtgttctaagacatctttgaatggaaaactactttctctctttttttttggaggtgtagagaggaatggcgcatgattcaacttaatgatattgcacctaagaatgtttctaactgtaagaaaacgcagtatcaaaaaatccaaactttaaaacaagtcaactaggtagcagttacaaagatgccttgatttacaaaaggattcaccagaggttttcttttcagcagctttgtaatcctttactttccccattgcgtttcaaaagctatttacaaatttcaggactctatttcataaagcaaatgtcgtttttaaaatgtaataactctaatgataaaagccactttagaaatattgggaaatacaaatatttgaaaaacaaaaaccatgtgcaatcccagcgttaatactctcactattctggtacatttccttggcatcttttaagcaccacttatgcacatcgatgcgcgggtcttcggagactgtatttaactcctcggtttcaggcatccggggcggccacccgcgggccgcggtccccagcaggctccggcgagactccttcctttcttttttctgctccacctccctaaaccttccagtttcagccacagatagtctcttccacatatagctagcttcagccctcccacattccatctcaaaacaacaaaaaaaatccccttcaagcgggagtcacatctctggcaggaaggcagaggctcgtcccacagcaaggagactggggcggccgcagcgcgcgctcccgcttgggcgcggccctactcccgccgggctccgccccccccccgcccccttcccgcccccttgggcggggacgcgccagggaagcgcgcggccgcgagccctgggcgccattttagactcgctgtttgtggcccaggtgcaggaagcttacgcggtggcagccgctcgctgaggtagtctctcgcggcgccggggatccctgaacacagacagcgcgggactgagaaggaaagcttctttctgggcagccagagccgcaaaggtggagccgcgttggcgccctccgcgggaccagcgcctcggatgcgggcggagcgcggggg

SEQ ID NO: 11510 - DNA, 2300 bp, Homo sapien
atttcttgatgtgctttgcgtaaaacttattcagccttaagatatttgacactagtttgaacatgtattgaacttgtactgtttgacatttattttgtgtattaatgttgccttccctagtttggcaagtatcttgggggatagaacctcctctcatatatcctacttcaaatctgtaaggaagtctgggtacattgtgacactcataagtatttgttagttcagttaccttccctctttatacttccaaaagtaatgaaaatatagcaacaagagtctgacataagtgacaagcagatttgttgaaaggcttcatgaggaaggaatctgaatatttagactttgaataaggagagggaatgtcaagctgtgagagagcacctggagagaggctgaaatgtgcaatttaagatggagtttgtgagaatgagactaaagttataggaaccgtggttagttggagggatggggtggggtcaatcaggaaggaccataagagacaggcagaagagttgatgtggtattagtaggtcatgagaaaccattgtaagttctgaagcaggaatatagcatattaactattgtgaattgtctatttcagaataaagttacctcaatgaccttcttaactggcaaagcagtagaagatttgtgcagaataaagcaggtaattgaaattttgtcattaaatgtttcgctacctagagagaaatttcttcttctcagccttcactattgaattccacccttggcacacaaccaaagtattatagggaattatctatttacagaacactaaattgacaagtggtccaaaacataggaatagtaaccaccatccctgtgctggacatctcacctgttttcctaaatgttccccagtcatgagcaattatattgtacctacagtctccctaccctactccccaacaaagactcagggtatcttaaaatttatcacagatcccattcacacttaaaaccttacttcacctatactttgagttaatacaggttattgtcctctggcctgaaaaatctgtctgttataacacttataacactgcagctatatccaggttgcaagtcagtttaaaccaactttagaaacaagttaagttttatctaggcatgtgtctgagactgtgctcaagctcccttacttgtattcatgaaactttgtcaaatctgttcctcactggctactttatctcacaaaaagttggccaatcgcttgcttgcttgcttgttttcaaatcacattgaaggaatcaattaagattttggactaaacatataataaattttgtttaaattgttgaagaatttgggaaaataatcctattcaatgagattgtgtttgtttatacttaatacccctttttgaaaattgacattattaattaaaataatatcaacttaatgtctatttaaatcacatagaaatcgccaggtcatttcttggttattaaatgccataagaacagtttttattttatgaagggaatagtgtcaagaactatttcacagtatattaacatttaatccttgaaaaaaaaagtcatattctcaatgaaaattagtgaaataaggaatcacaagtgtgaagttacatattatgtaatttttgttcaaaagtaaaacatattaagtaactgcactttaaagtcccttatctttaaatggtactttaatgtgaggatgcacaaaaaaagaacccttttctgatcttgtgaggtttccacttacagatgatatagataaagtacagtcatataaattatttgtaattatttcactcatataattttgctcggaagccatatcgtagtcaggcctggattttaattctcaattccaccatttactgaaaatcccttaacctgtattaaccttagtttcttcatctgtgtaatagctactataaataatattacttatcttcacctggttgaaataagaaaatcagtgtgaaataacctcataacctttactctgtgcaattctttgttatttgagcttgctggtatcaatgctaagtccagcacagtgataaaagtgatccagctgaatcaggttcctgcctcttttctactcaaccaggttgatctggattccaggcacattggctgggtaacaagtgaacttccaggaggggataatcacatcataaaaattgaattaaaaggcccagaaaatacactgagagttcgacaagtcaaagtcctgggctggaaagatggtgaaagcacaaaaatagctggccagatttcagccagtgtggcccagcagaggaactg

SEQ ID NO: 11511 - DNA, 2300 bp, Homo sapien
gccccaaattggagctggggattctacctcaagaataattttaaaaacccaagaagaacagggtaatatagtgatcaattatcagagagatcacttgctaaaatgaagatttggcctaaaaattatagtcagatgattaagttatcttactgaagacttttaagaaaaacattattgaagattgtccagcaatttataggttcattcaacaaatatttttgacctcctgttaagaaatgtttcttataaagccatcttttagaaaatgatgcagatgagatgtagatttcatttagagaaaatataaatcacttagcttttagagtgttttagaaaaggtgaactttagattcagctctgattcaaaacccacctctacaacttaatagctatatgactttcagagagtaacatatttaatctttctgaaccttggtttcctcagtaaaagttgaaattgttatgatttgtgtcatgttcaaaaaaccaatgacaaaggctttaagtgaatatattagatattattatcttaaatatatatgcactgcctatgaaaattaataattttctttttctttaatagaagttggttcttcccttttgagacatccgtctcctgagctttctcggctaatctcagcccacagctctctttctaaaggagaacgaaatttccagtggccagttttagcttttgttatacaacatcatgatctagaaggtcttgaaatagcaatgaaacaggccctaaggaaatctgcttgtcgagtttttgctatggaggtatgaagacattaatgaaattactgattcattgattatacaaatcatgtgatgattctatttcacgatgccacttttttaccaacagaaattgtgtgaaattaaaaggcattagccaattaaaagtattaagtgttcctataaaaatcagactctaaagtttatgaatataaatgaatttagaatttcatatttaagcaccctaaagaaatttatttctgtattgctttactatttgaatcttgagattatcttttttttaaaagctttttatactcagaatgtcattttattagaatgaaatgacagagtaatcatggaaagaagataaggagtagggcttttgagtggtaagttgaccagtaataacttctctgggcctttggtctctggaaataataggattactgtatattacaggcctatatatagtaaatctgtgtttttatcaaatgtgataaataacctaccacttcatggatgggaattatatgaatatatttaagtaaatggttgcttgcctagagcttgagatacactttgtgttcatccagatgcaagttggaaaaaatgtgcttgaataaattaatattaaaatgaattttcaaagtaaaatgtgatttgaaaaaatattttggtattgtatcttataaattatttttcctgttttttttaaattaaaaccccaaattattaactgtttcaagttccgtgtgctttcagtgaaataaaggtcagattttcaaggtgccaagcatagtagcccatgcttgtaatcctagcactttgggaggcggaggagggaggatcacttgagcgcaagagtttgagaccagcgtgggcaacatgtgagacctcatttctacaaaaaaaaagttttaaaatcagctgggtgtggtggtacacacctgtagtcccagctacttgggaggctgaggtgggaggatcatttgtgcctgggtgcttgaggctgcagtgagccatgatcacaccactgtactccaacctgggtgacagagcgagacactgtctcttaaaaagaaaaacaaatagtaaaactataaggcattttttttaattaaaaaagattttctagtatctttctttgaagtcttaatccatggaggtactttatttctgagtactttttaaactcatgtattttattcttgaactcatttaaccgtcatttcttcaggctttcaactggcttctgtgtaatgtcatccaaaccacttctctccatgatattctgtggcattttgtggcatcactgactcctgcaccagtggaaccagaggaagaagaggatgaagaaaataaaacaagcaaagaaaattcagaacaagtaaatgaaatttttgttttgattgtgcatatttttatagaaactggtagtataccttcaaatagtccaataatttgcatgaaatcattcgcagatctaacttgaaagcaaaaagaatattttagtgctatgggcaaagtattaataatgagacctggattttatagaa

SEQ ID NO: 11512 - DNA, 2300 bp, Homo sapien
agaattggataaactttgttttatacttattaatatagttttattaccttttcaataaaatattattttaaatttttaacaagttttcataattgcctttcagtgactagtttgcaattataattagttgtgccaaggcttaactcccagtgttaccctgaatgatcaaaagttagaattattgttataattaattaaatgcactaggaatattattaaataccagtgaagttgggtttttttgctaaatctatggatatttgcttttttatgttgccatgtaatttttaagaatcagttgtgagtgggattaaaacttgccccttccaactatgaaatggcatgatgtatttatttattaaccatttacaaacagacattttaaaatgtttacagaaaatcttgtgagtgtaatagcaagtactatgtaaagtttagacctgtgttactctcaatttttatcttgagtgctctctgtgtattcatgtaggtttgcatatatataaattcttacaaatatatatgatgagtatataaaatgcgtattttacatttattttcggttgtaaatctaagttttttgagtgtttaaaattctcatttccgttaaatttccaatatgtaaccaaagaatattggtaaataaaatataattacagtaaatgtaaattaatttttcttagtacatatttgtataagtaaaaattggttattcatcactatagtgagattcacaaaatattatgtgaaagttaatggtgactttaacattttccctgaccagtcatgtatggaattaacaaagtagcaggtatacagaattcttgaatctacatatttttaaacctgaggattctatttttaatattctactgtgttactgtgtgtatgaacatgtatacatatctcttcattatgaggctactggtagggatagaactatttaatacaattctatcttgcataatgttagttgttaaatttttattctatttataacattattaaatatcagttttaacctaatgtttgcatgtgtgtctctttatggttatctattactctatctgaatatgaaataaattatagagttcatattactgtatttaaaaatgcagttttaaatctcttttaaaggagtaatgatgacaatgagaacacccagtgtggaccctttatttacatttagttgggaaaaagagaaaatatggaaaggttattatttctctttattacattcacataggaaacaattttatcacagcattacaatttaacagaaaatttagggaaggttctttcattttagaagtgactcttttcaataataaatttacgttatatttacttaaatccatgtttaatttctcctttctactaaaaatatagtctgtttttctgttactagcattaatgtatcactgcatagtaatggcttaacaaatctagcaagacgtttttatttgtacaatattagagagtataagttgttaaaatattgtaagcatcaatatttcattcataactaacaaatagcaagatatagctatatttttaatgcatatttttcatcatctctgcttatggatcagttttcagattcttcatacctgttttctctatttataaataattatttcaacatgggaagaaatgaatatttagacttttttttacccataacaatatacagtaatgcagtaataatgattcaaaattattcccttgtggttcacatagtatagtatttttatttttccaactttaaatattgcattaaagataaaagtaaaatcaaggatgattatatttctcaaattatggtgggcagaagccagaggttgactggtttcctgctatattttcttgccttcaactttattttaaatagcattgttgaaaaactgagattctttaattagtgctaatgactaattcttcagttatctttagttatgtgttttttttatattgacagtactgtagacttgctataaaagctattaataggaaggctttgaaagtgataatagattgtattttgtttatttttctttcctattcaaattttcaggaatctaaaactaatactgatgactttttcaaagacataaactcctgctgcccacaggaagcaacaatgcaagaacaagatatgccattcttgcgaggagggccaggcatgtacaaggtagtgaagacgggaccttcaggtcacaacatcagaagctgccctaaccttagaggtatcccaattggaatgttagttctgggaaacaaagtcaaagcagtgggagagg

SEQ ID NO: 11513 - DNA, 2300 bp, Homo sapien
ccggagaccagggcagccacgcgggtcaatgtccactagaaactctaaatgggcagtgactgcacattccaccacctgagcctgcgctgtaaatgttttctgtgcaagcaacattcattcattcagccaacatctatttccctcctgttcagggctagaccctgtgctaggagcctgtgatggttgaacagacaccattgctaccctacggaaaacctagtgttttgtttagtatgtgctaccatttgtgaaaattcatgtgccaagttggacatcctagatcctttaagtcctccctcaatctcatgtagtgggtattcttttgagcattattcagaggagataatttgcccaaagccagacaagtattaagtagcagagtcaggatccaattccagggctgtctgatttcagagccttttagctaccctgctaggtcttgcaatagtaatgggccctctcattgcttacctgtcaggccttagaattcttagaatttagctgcctctacaccattgtcttggttctcactccagggttaggggctgcctggtcaacactgaggtctttaactgtgctgaagcattaggatagaaatttagtctaataaatacttactggatacctactacatgcaaagtcctgaagtggctgaaggagacacaaaagcagcaagctctgaaggaacttaggtaaggaaacaagacaaatacaaaaacttaacagggctaattacagtactaaaatactatgattccacatgtcttgtcctttgttcctatgtttatcccactgctaattatctttaaaaaaactaaatgaaatccatccattatttaaagcttcagaaaaaaatgcattgctttcagcaaccttccaccctaaaactagaattaatttactttcctattccttgttgtttgcacttctcaaacactaaggaggattttttaacatttattttatttttttttaagagaaggccatccgaagaagaggcacagatataagaactagtacatagatgaaagatacagtactgggatgacagaacttataaattattttgtcaggactgtaaattaggaaactcttcaaattgagagtcaaaggataaaacgtagtaggaatcaaagtgcattggcacgtatatttctagagcatatacttagatggggttcgtaggttagcttggaacaaaggactgagcaaatgttacttttttatagacaacaacaagatatgtgatggatctgacattttcagacgctatacagtctccgtcacaattattgtttcagatcgcattcaagaattatctttaaaaatgtaagtttgggcagaaaaaaataaaccattaaatgaccactgccaagagataaaagtgcactcttaggtgagtgaggagtcaataaaaaagagtaatttaaaaaatattattgctccgttgagaacaagaatttgggaatgactctggcttgtgaatactagcctatctgttatactttcacacacaaaatactttcacacacaaaaaagaatgtgctagattactacctgtctttgtaagtaaaagctgtgttaaacaagcgtaaatcctaatgacaaaaaccatataaaataagatcgctaaaggcacttctaattgggatggttttctctgccttaaactctgaattaaccagcacaattcacagtaaatcttcctgttggcagcagagccttggagaagaggtagcagaagagcgtgccactcctcctctggcgatgggcacgttcccccttgctttctggtcctcgttcttccacctggagggaacctgaagtcgaacgtcagtagctgacagcctccccagcactttccttactcttcttcaagctgccagtaaaacccggagaagtggactacttcagattccgcacaacccaacagccccaaacccaaagccccgaggcggagggagtggtggcggagagggggtggggaggaaaaggggcggcagttactgagcatgtgcgaggagtggcgcatgctctgtgaggccggcagcttcccattgcgggtagccccggcggtggtggcggtggtagcggtggtggcggcggcagtggcggcaccgcctcctcctcacattcccggggtggcggggttagatgagcggccccagtagcggcgagggcggcgcgggggggaggaggagaagaaggaggaggagaaggaggtcgctgtctttgtagtctccctgctgcgggagccagaggccgccgccggagccgtcgtcgttggaaaagggctgtgt

SEQ ID NO: 11514 - DNA, 2300 bp, Homo sapien
ccacttccttccttttgtatatagcatcttcaatgtgagagatgccttgttgaggaatatcagttaacattgtccagtggtgttcaagaacctcaaggctgactgtcattggcaaagaggctgaacagctggcacatcaggcaggggtaggttgtgtcagcacagacactatgaatgagtggaagccctgggttttgcctctggatcatggattggagtgtattataatcaaggtgctcaggtaagagtgttgggtgacccccatctgttgcttaccttccgcattgcaatctcattcattcagtccacttttattcagttactgttgagcaagatagtcctggtcaattgaaaaatgtgtgaggcatgcctatgacctgcagtgaatccatgagtcggtaacaacttcaattcttgcctccttagaagaaagaattccactgagaggcataaggcaaaaggagcaactaagttttttttttttttttttttttgagacggagtctccctctatcgccggggctggagtgcagcagcgcgatctcggctcactgcaacttccacttcccgggttcaagcgattcccttgcctcagtctcctgcatagctgggactacaggcgtgtgccaccacgcccagttaattttttgtatttttagtaaagttggcgtttcaccatgttagccaggatggtctcgaactcctgacctcatgatccacccgcctcagcctcccaaagtgctggtgtgtccggaattggtgggttcttggtctcactgacttcaagaatgaagccgtggacccttggggtgagtgttacagttcttaaaggtggcgtatccagagtttgttccttctgatgttcagatgtgttcagagtttcttccttttggtgggttcctggtctcactggctcaggaatgaagctgcaaaccttcacagtgagtgttacaactcttaaggcagcgcgtctggagttgctcattcctcctggtgggttcgtggtctccctggcttcaggagtgaagctgcagaccttcgccgtgagtgttgcagctcgtagaggcagtgtggactcaaagagtgagcagcagcaaaatttattgcaaagaccaaaagaacacagtttccacagcatggaagtgcaccccagcgggttgccactagtggcacaagcagcctgcttttattctcttatctggccccacccacatcctgctgattggtccattttacagagagctgattggtccattttacagagagctgattggtccgttttgacaggatgctgattggtgcgtttacaatccctgagctagacgcaaaagttctccacgtccccactaaattagctagatacagagtgcccacacaaaggttctcaaagtccccaccagagtagctagatacagagtgtcgattggtgcattcacaaaccctgagctagacacagggtgctgattggtgtgtttacaaaccttgagctagatacagagtgccaattggtgtatttacaatcccttagctggacataaaggttctccaagtccccaccagggtagctagatacagagtgtggactggtgccttcacaaaccctgagctagacacagggtactgattggtgtatttacaatcccttatctagacataaaggttctccaagtccccaccagactcaggagcccggctggcttcacccagtggatcccgcacaggggccgcatgtggagctgcctatcagtcccaggccgtgcgccggcactcctcagcccttgggtggtggatgggactgggcgctgtggaacagggggcggcgctcctcggggaggctcgggccgcgcaggagcccacgaagtgcgggggaggctcaggcatggcggcgggctgcaggtctccagccctgcccggcgggaaggcatctaaggcccggcgagaaattcagcacagcagctactggcccaggtgctaagcctctcactgccccggcccgctggccggcgggcagctccgagtgcagggcctcccgagcccacgcccacccggaactcgcgctggcccacaagcaccgcgtgcagccccggttcccgcccccacctttccctccacacctcccggcaagctgagggagccgcctccggccttggccagcccagaaagtggctcccacagtgcagcagcgggttgaagggctcctcaagcgcggccagagtgggcgccaaggctgaggaggcgccaagagcgagcaagggctgtgagggctgccagcatgctgttacctctcactgggattacag

SEQ ID NO: 11515 - DNA, 2300 bp, Homo sapien
gttttctttctttttggctaagttctaaggctgaagattgcttctagtttatcttttgagttaagtcacgtctttgtttttcagctttatcatttgtaatattaatattcaaaccaagatttttgggcatcacagaaacttaaagcatattttaaaaatattttgcatgtataaaattccataaaaaagctgagtagacacgtatatatgttttactttgaaagaacattttccattttagattttcaaattcctcagcccagaataagggaacatcagggaacatacaggaagtggtctcccagtcacaatgaccacatactgcaattgccttgctcttcagtctgggtttctgcttcttgttacagtcatttcagtgggcgtcactcagctgcattgtagttttcaggagcagttgttcaggggggatttggttcattgctggtgtgacatatgaatgacgatcacccaggaagttctgatgacgtggcttctctcaacaatgtttgctaagcttctttaaagcctctttggctcttagggaaggtgtgtttcaaaacctgtaacaggagtccccgcctagaatggctcttcagtgttactccttcctcccagcggaagcagcctttgttttttgttgggttttttttgttttttttgtctgtttgttttgttttttgagatagggtctcactctgtcacccatactggaatgcggtggtgtgatcacagctcactgtggcttggtcctcccatgctcaagagactctctttgcctcagcctcctgagtaactgggaccaaagacatgcactaccacacccagctgatttttttatttttagtagagatgagatcttctcttactgtgttgcccagtttgtctcgaacttcttggctcaagtgatcctcccaccttggcctcccaaagtgcaagtgaaagccactgcaactggccagaagcagcctttgatgttgggtctactgctgccctcagcattgaaagaagtttcaaccatccttttcacattttttttttttttctgagacagtctcactctgttgcctaggctagagtgcagtggtgtgatcttggctcactgtaacctccacttccctggttcaagtgattctcctgcctcctcctgccagagtggatgaatggttcttcttcttcttgaccatctaatcattgtccactcagactttaaaactctgcatcaacatcaccttccaggttcttccttctctccactatgcgatgcctggcattgaaaatttctgtatatgactttatcatggtgtgttatagttatttaatatagctggggttacaggtgtgtgccatcacgcccagctaatttttatatttttagtagagatcaggttttaccatgttggccaggctgatcttgaactgctgacctcaggtgatccgcctgcttccaccgcccaaagtcctgggattacagatgtgagccaccacgcctggccccttttcacatttttttatacatggataaataagatagagattagaattcttacatgctaggtgtattttccctctgatagttttacaaaatagtctaggtgtagaatgtgtggaacagacttcttttgtgttttctaatcctagggttcctgggtttctgagaatttgtttgtcttgaagattcctttaagccatatactccttgcatgcttgtctgtgcccctgccttccaggtactatgggtgtatgggggttccttctatcttgagttttcaattttattttttgaaagagaatacaaaataggttgggtcctatgccaccttgtcagtgatatggttgtgcatactgttgatatcagttaaaagggtgatcacaggagcatatatatatatatgttttttttttttttgcataaggccataagttaaacaaagaattcaaacaaagacagtaggtatatgagtgagaatgctttaattgaactggtatttgtacaaggtgacaccctgttgcataccacacacctcctccctgagtgactcagccgctgagcaagaaacctctgaactgttcactaatacagtcaggtagaggttgagactccactgaataaactctaggttcccatttctttcagccagatcctcccagggaatcactacaggctggttagccaaaaagtcctgattttctgctcaatagaggtaagttgaattatacttgcaaacagaaatacatctgctgtatgtgcacagctttctctgtgttccttacaaatgattaaaattagaacttactgtatt

SEQ ID NO: 11516 - DNA, 2300 bp, Homo sapien
ggtaccaatagagttaaaaatgttgcagcataattagaaaggttacattttaccatttatagttacagacagaaaaatataactgtagtgcaaggttgccatggcaactcacttctcaatcaggatatttttttcctcctccaagtctaccaatcagctaacaggaagtgaaataaccactgaaggagaagaggtcaaaacaaataaggatgagaaattatgtagaaaatatttatatggtaattttcccagatgcgtttctactactttaattttatcaaatattattttcttttctatctttaaaaatgattccagaaaaaaagcacattcatttctagtggtggcttcattattgttcctaaatgagaataatgaataacattcataaatattcatactgtctgttaagcaagtactttagtttggcttccatgaggttcttaaatgagctttacatgccatttaaccactgaatctccaagtcacctaaatacacagttagaatcatttgaatttaccaaaaacagaatacaaaaatttaatggtaggttctgaaatcagaaagaaattcaactttccagaactgttatttctctagttccttgtgatgcacctgaatatttctccagatggctcctattattccctccattggctcacgtccggcaaatgctaccactcttttaaaagtctcaaaaacaagaaagtgtttaagaacttgaaaaatgaagacatccccaagtgactgctgacacgctttgcatcaggctttcgggcagatcataaaacaaaagaagtgggaagaggggaacatggctctgaccttctagtaattttctacattgatgacacttgcactttcttttgtacatattccaaatctacagcatatggtcagagctcaaattacataacagcacaacattaactcttaaaatagaaacatgatattctaaaagggttcttaggcttaccacaaattatgagtggatatctgcacacagtgtcttacattaaaagacattttcccacataacatcagatttggaattactggatttcatgctaccactaaacataattgataaaggacaaatgcagagaatgtcccatggacaggaagcctatagttctatgcatacaaatacactcacatacacacgcccatacacaccgtactctctggcactggaactttgctcctcctctcctttctgcctggaatgcctccatccacacctcccctttgcatctggcttactcttgcttgctgtttaaggcttacctctggcattgcctcctttgagcctactctactccagatacaacgtctactgcctccctctccacactccacatattttgtgtctaccttgacctttgtgtttatcatactcccaaggaccctcccttgatgagggccagccttcaagtttaacaatcctggctcaaaatgactccctggtagaagctgagttttctctctgtactcctttttgtactcctggcagagcccaacaattgttttggaaaaagaaagagacagagacagggagaaacacagagaggaagagagagaggtgttacttagcacatagaatacagcacaactacaaaaagacaaataagataacaggttgagggaaattcattgtctagtagatattaagaaatattaaaatcaatctatcaatcaatatgtacttattgacaaactacaatggataaattaacttgatgattcaaagagttataagatgatgccatttagttgatgagtacactgcaataataagtgatgtgtcaaagtaatgcacaattaattgctaaatgagaatcaaagataataagccttctgagtccagatgacaaaagtaacaccttagagtatgaaagctttcgggaggaagtaaaattcatgccagacttcttgaaggatgggttggtttgagatggtagaatccatcgacccacactgccttcaccctacctacctctcattacaccttacctttaccatgtaaccttagccccccaacacacctaatgtacagacatacatcaaagttcaactttcattttcttctcatttaatcttttctcaacaggtatcttcactctaaagatactacattttaaatccttgggttcattcccaaacctagatctttggaacctgccttttacctgagcacactccttcctcccctgtagctgtttatctttacttgggaatcactgctacaaatatatcctgccggtgtcccagactctacctgctcaaaacaaagcacagt

SEQ ID NO: 11517 - DNA, 2300 bp, Homo sapien
atttacttttaacttatttgtttgcccatgtttaaggtgcgtttcctgtaggaagcatataattgagtcttttgtgacacttccacctccctttaaggaaaaacttgtccgcaagcttatcagatgattttctctcagtttctgttggctaggattgtgtctggggcgtgggcctaaaccagtcaggcaaaggggaacaatgaaaataccatgattggcttagctgagtgcctctcaagatgtggtctccagaccggtaatattagcatcacctggaagctgcttagaaatccagattctttgaccctatgcatcaaacttttaaggggtgtggtttagcaatttgtcttaacaagatgtttaagtaattttgaggcatgagacattgagaataactagcctggactaacctatacttgtgagtagggagaagtaccgtgtactgggcagtttaggctatgttgcaaggaagtggaagggattattacctacataggtaggtgataatcttgccatagtaggactgagctggggcccaagaatatgatttttaactatatatactcttgatggagtcacaactgtgcaacacactctaaggaaaaaaaaaaatatattggacttacaattaaatccattgagatctatattttagagtccttacctgtaactggagtgaacaaactgtctcaagggcaaatcagagccgttgcatgttttgtatggtgggtaagatacggttttatgtttttaaatgatgaaaaaaaatacaaagaatgtgaaaactatgggaaattcaactttcaatgtctataaatcaattttaaaggaacacagccacgtttattcgcttacatattgtctaggatgcctttggactggaatggcagggctgagtagttgtgacagagatcatgtggcttacaaagcctgaaatatttacttgccggtcctttacagaaaacatttggcaatccctgatctgtaagaataatttactgaagaatagtacattccccaaccatcttgtataactgataaattactctaataggtgaacgttttgtctagaacagtgaaagtatgaataatgaagtatgttatttcaagaatatgtgcttattagaattgtggtagctttgttggaaagaagattactttagatttgtaattaatgtaagcttatagtagtaaggtgtcacgtattagagccagcagttttggggaggtaattcaccctccccccttttttagttaactgctgtttattcctcaagataaacctttctgtatagccctatcactgaaaatattctaaaatctaccttaacatggcatattaatgagagaagcttttttataacttgcagtgcctccgggtagtcattttgaatactatccattactgtgtaattgtgtaggtgctgaaagtgaagtcttcgtaaaacatatcttttaaagctctttgtttggctttaatgaaaaagaaacatataccaaggttagtatagatttgagacaggagaaatatgtgattatgtaagggttcaaagaatcaagtgactggcttttacgggtgtttagacttatttttaaaaaatacacataagatttgccttgtttgtcacatcatgtttaccttcattagcccaagtttacaaaagattctgttgccaaagagaaagatgaaaatgttcatttcttgacatgtcaatagagatagtaagatcatgatagtgcctttttagggctagtttagttaaaaaaaaaaaaaaagcccttgatctctgatgctgaaacacacagttagggggaaaattgttagacctttttttggaagttctcaccaggctacaggaagtgtcatattctatttggggatatttgcctgttaaaaactatttctgatactttgaagtcatcaaatatgagttctgtttctatggaaattgttaaatacatgttgctttccccagagagaggtactctctgtatacctatatcatacctataatgtagatttctttttttaaggttatacattggctcttcaaagacgttcacctcatcagagaaatccctgactcctttgcagtggtgtagacatgtcctagataacccaactcctgagatggaagcagcgagacgttccctgtgctttagactggagcaaggtaattgtgagtgtgtgcatttacattctccaactcttgtcactctcagtgctgcttttgttgctggttttggaataaacatttcaattgaaaattcttaccctgaggtgcagctgttgcatgcaa

SEQ ID NO: 11518 - DNA, 2300 bp, Homo sapien
gagattttagctggtttgaaacatctaattagactattatgtgtcttcagagttaacagaattatacttaagtttaaaaaattgggcaaagtaatttatatgtcaggataggagtggtagaatggtttgagataaggaaatattagtcaacttgccaaaattttgaccacatttagcatttattgagtgcatactgtgttccaagtcttatattaggtactgaaatgactgtagtgagaagaatgaaaaggattgttgccagaatatgttatagtgttgctttatttttgaactctttagtttaatgcactaccgaccttttgagtcttctaagatattaaatcagttttttcttttatgtgaattaagtaattgctttcttaaatttgattttgattatgtgtagagacatgtctatttaacaacaatttgaatactttgagtctaagcaaagatgatcaagcaatggtaggaatgtcattgtttctgggaactttttgttggtcacagaataattttcagtgtgacaaattaaagaaacttaggttgttccttaaacccattctgtcgtctgcctttttatgattttcttgattttatcacgggagcatttatcgaatctagtttttttggtcatactttgcttaatggtatacaaaaataactacacagatgtgttataacttatcttttcagtcaagcaactttgaaaatgtacaaaaaataagagaccgttagtcaccctcaacttatatttttgaaaaaaaatgaggtatcagtctacaatttagtactttatcacattcattcagtagaagatgattgtcagacaagggaggtgaagtataaagtttaaccaataagggtgcatccttagggtagcttcagagacactgtagaggtgggcatgagataaatgacagtctgtaagggtggtagtgaaatgagctgaagtacctttaaggtcttgcatttgatgaaaagcccctgcggtactttaattgatgagagtaacacagttaaaatacatgacattcagaacaggtttgctcagggcagtgttggtggctggaagtttgttgaagagcaggttgcagtaatctggtgagaggtggtgagtggttaaggaagttgcggtagaactacagagattatgcagaaagaagtgtcctgggaggcagtttagcttaaggcatttgggaaagaaaactgtgccaagtatcgtacattgattcagtgtgtagtcctgtttggggccagttcgatgctattctagggattggaataaaatgaaaaaatgcatagtctatgccacttccaagtttgcgaaccgccccccccccctttttttataaatagaactctggagtaggagtatagggaaatttaactgttgttcaaaaatggatcacccattttttctcttttggcaaaattgcctcactcctttctttagagctatttcggtcatcactgagcctcttgaatcatttcacatcattttatataccaaaaatccactgagataattggttgaaaaagataaaattgctcttttttacaagttctttttgtttgttttattctttataaaagtgcttcctgttacaattctttagctatgtactgaagaacaactaggatgtgatagcttccactcctgtcctcctcctcctccactgtaaccttgggcactagtggagcattattgttttgttagcctgcctttacaataattttcctcccctttctgaaaagcttcaatgctaaacaacaatgtagagcattctttcttgcaatagacgctaattgtgttcctagttgggatcttgctgtcatagccacaataactgtgtcaattgtgcagggaggctgggtcacagtggttattgtgcagagtgatgaatgctgcttacttgtgatgtgctgccgcccgcatctgtgggtgagaacacgcagttactgtaatttgcctggcaagtgatcagactggtataaaataacatcatctgttaggcaagatagcagtcacaaagaactattggtcttttaaaatatagaatttttaatgagaaactttgaataatagagattgaacatgtgagaacagctacctagtgtgtgttgcattattaacccctagtttgtagtgtattctggagtcaagttgacctacatagaagagaaggaactggaagtgcatgtctgtgttctggctccgattgggaaaagctgcttaaccactgtaagttacgggttggataagtgacatatacgactggtgtcaattggcaaccagg

SEQ ID NO: 11519 - DNA, 2300 bp, Homo sapien
ttgtgttcctagttgggatcttgctgtcatagccacaataactgtgtcaattgtgcagggaggctgggtcacagtggttattgtgcagagtgatgaatgctgcttacttgtgatgtgctgccgcccgcatctgtgggtgagaacacgcagttactgtaatttgcctggcaagtgatcagactggtataaaataacatcatctgttaggcaagatagcagtcacaaagaactattggtcttttaaaatatagaatttttaatgagaaactttgaataatagagattgaacatgtgagaacagctacctagtgtgtgttgcattattaacccctagtttgtagtgtattctggagtcaagttgacctacatagaagagaaggaactggaagtgcatgtctgtgttctggctccgattgggaaaagctgcttaaccactgtaagttacgggttggataagtgacatatacgactggtgtcaattggcaaccaggcttcacagtttcatgaaatgtgtggattctgaaagtgttgtcattgcgaatgtggtttccttgcctagttcttccacatacttaaggaaaagatatttttaatgtaattgttagaatgtgttggtacgtaatgattctgaagtaaaaggaatttttttttttttttttttaagtaaacttggtgttttgcaaggatctgaagaatcccagtttggagctgattattttcttgactgtccacatcccacagttttttttttttctctccatcccactgcccattttaaagcacttttcagctgtctgattgctcattagcattgctcattaaaagtggtctgggggcatgcatttcaaagcagtccttttaatacttggtttttcaagttttgtcaaattcccagtgaatacaaaccaagttatttcttgaagtttagccttgtttatattttttatattattccttctgcttagtacatgtctaaatgattacttttcagaaaagtgaattttgcttagcgcattgatttgtatctcatgagaggagagtaaatcatgtttggtgtgacttaagcttttatgatttgggatttgtgtgtgtgtgtgtgtgtgaccccaagaacatggagatacaaggggtggtaattttggaggggagaagtacattaattagacaagtgaggtaatgtaagaatgagatcatctgcccatggctggtgtaattcctttttgttcattatattaatttaaaaaataatattaaagtaataacatgtatattcctaccttgaaaagctagttatataaataatatgtatgtttaatgcagataatttggaagttttttttaaagaaaaaatccgagtgatcaccaatagtctctgtaccggatagtcattgttaagctctggtatagacacccctctgttactctgtacactgtttttcctttaaaccttgttttggtctcaaggccatttggaaacacaatagtcattctaagtcctcccataatccaatactgaatttacataaaatgttttttatcaacattttctgatattaactgagtagaaaaaatatagaattacatatagttaatattaagaacatttcccttaattcctaaagattaggaagattataaacttgagtttttcttttgacactaatccttttttatattgcaaaacactaaatccttatgtggaaatagaaaattgaaaacatttctaacgtagaaactcaaaataaattttcattattatacaggcatgttggctttaatcaaagtaagattgatttactttttaaaaatggatgtataaataggaccctaattcacaaattgtttattttgtatatattttttatttagataagtggaagtcagttaagatagtcctatgaaaagttgctttgtctttttttttttttttattctcttccctttctccttctgacaagtcaacatatgcttccatatagctaactgctgctattttctgcttctgtgacagctagccgatggcggagtctcttctcttcaactgcctcactggcttttccttatagtcctgttgcaagactcagcccttatagcaatggcattaatactcccagcttctctaaaacctcaaataaagcaatactaacacctgaaaaaacaggtaatattttaacttcttgactagctgcttgctttgtaattcagttactaaacacggcttaaatattcatctttcatttgaaaagcttgagaataatcttaagagtggagagtttgtgctgcacacttactttgggtac

SEQ ID NO: 11520 - DNA, 2300 bp, Homo sapien
gtatctttttttgagaaatgtcaattcatgctctttgcccactttttgatgggattagttgttttttttcttgttgatttatttgagttccttgtagattctagctattagtcctttatcagatgcatagtttgcagatatttttttctactctgagttatctgtttactcactgattatttattttggtgtgcagaagctttgtagtttaattaggtcccatttatttatttttgtttgagttgcctttgcttttgggattttagtcatgatttctttgtctaagccaatgtccagaataatttttccaatattatcttctagaatttttatggcttcaggtcttatatttaagtctttgatccattttgagttgatttttgtataaggtgagaggtaggtattcagtttcattcttctacatgtggcttgccagttttcccagcaccatttactgaatagggtgtcctttccccaatttatgtttttgtatgctttattgaagatcagttggctgtaagtattagggtttatttctgggttctctattctgttcaattggtcgatatgcctatttttatagcagtaccatgctgttttggtaactatagccttgtagtataatttgaagtcagttaatgtggtacctctagacttgttctttttgcttagtcttgctttggctatgtgggccgttttttggttccatatgaattttaggattgtttggattgttttttctagttctgtgaagaatgatgatggtattttgatagaattgcattgaatctgtagattgctttgggcagtatggtcattttcacagtattgattcttccatttcatgagcatgggatgtgttttgtttgtgtcatttgtgatttctttcaacagtgttttgtagttttccttgtaagatttttcacctccttggttaagtatatttctaagtattttattttattttttatagatgttgtaaaagggattgagttcctgatttaattttcagcttggttgttgttggtatacagcagtgctactgatttgtgtacattgattttgtatcctgagactttactgaatccatttatcagatctaggagctttttggatgaatcttcagggttttctaggtatctaatcatattattggtaaacagtgacagtttgacatcctcttttccaatttggatgccctttatttctttctcttctataagtactctggctaggacttcctgtgttatgttgactagaaatggtgaaagtggacattgttgtgaaggacgttttgttccatttctcagggggaatgctttcaacttttcctcgttcaatatgatgttgactatgggtttgtcatatatcgcttttattactttgaagtaagtcccttgtatgcctgttttgttgagggtttttatcataaagggatgctggattttatcaaatgcttttttgtatctgttgagatgatcatatagttttggtttttaattctgtttatgtgatgtaccacatttactgattggcctatgttaaaccatttctatatccctgggatgaaacctgcttgatcatgatgtgttatctttttgatagcacatgtatcagtatttctgtgtatagattttgccttgtataattaaacacattttttaaggaaaaaaaatttaaggaaaaactatttttaaggaaatattttcaagagatgataaataaaaccatagatacttttttgggtctttttcccccttatatttatttcaaaaaagtatttatatatttcatgattaagtaaattcaactgttttagaaaacagggtatgtccatgtttaaccatgttgccagtactaggcatcaaaggcttgggtagttagtatgtaagcagaattctgtgcataagtttctattaaatttgattgttttccttggagaaagggattaaaaaatttaaaaacttctgcctaccagtttgttacttttaatgtgaaatgatacacaaagttggatcagtatattgatgaaatttttaagggttcttatccagagagttcccagtgcccttcattttataggttttgctactattataaatgtaataatgcccagcaactcagatagataaatgacataatgaatattatttaaggaatatatctgtaataaactgtttgtacctacagataccaccttgtcttcttttctgtaattacaactattaaagtatctcctcattttattttcttggaaccaccaccaaagcaagcatcaagaaatcctaatgtctagcaag

SEQ ID NO: 11521 - DNA, 2300 bp, Homo sapien
ggaacaagttggggattattttgcatgaacagctggctattgctagacatgaacaaagtaattggaagtgatttctctttaagcaatgcaccactggacctgtatactttatatgaaaatgttgactttcattcaactactaaactttttatagacattacaaacatatctgttgacaaaactcagtctttgatatgcaaagaatatgactttgttatgaagcttataaaagctcattcctcagagtttatctaaatgactttcatcttcagtggtctgtggaatattacccagtcttcacactgcacctgtctggtaagaagacaacatattatctccattttagagaatgaaaaagaagaatggggtgagtctaagtgatttacctacattaattacatcttgaaaagagatcatagccctcatttttgatttgtaaccttgagaatgtgttttgatgtaaagctttctgacgattttcaattcaaaatcaataacatttcacactgtatataaaatatggtaagtcgattctgctacactttgaaaatgtgaattggcttcaacacgattaatatataaagaaagaatttgaacatgatatgaagttcatgttcataaatgtacaatttcatcctcagaagcactaggtaaacacagaaaactacagcccttgcagctggcccttacatcaaaggaatacacaaagcccaccctgtgcacctcaaatgtctcccggttaactaaagtctttgggtgtattatgatccactgccctcactccccttcacatctactgttaacaacatttttgtttttctgattttggaaaatcctctttcaacactttacaatgactcacaagctacaacccttccagacacccacttctgcaagcaaacttcggattttgttcaagtaaagtgcaatagttactgcagtatttgtgtatttcttaaccacttaatgtgtgctactcttttttccaggttcttgtcttgtttttatgtgtcactgacatgcatggcacctaatcccatattttctcagatgccctgtggtttatattacaagatattgcatagggcagtgatttttaggaatgtgtatatcgcattatatatagatcatcacactcttaaactccacaaacaatgatctagcacttgttatgtttcagacactattttgtacatggtgggggatacaaagatgaacagttctggtccctgccttctagcatcatagtttgtcagagattgtcacacacacaaatgtctctaatgataagttattatgtgctcataaatgaagagtcacaatggtaaggtggagggagagaataattctaccccagaggatctaggagagtttcctggaagacatagggtttgaccagcacactgaggaatgagaggtgcctttagtaggtatgagggaatgagatagaaagaagggttttctgatgcatcttaaatggccctttattgtagttattttttttttctgtttctctccctcttcccaccctctgacaggccccagtgtgtgttgttcccctctatatgtccatgtgttctcatcattaagtggcactttaaagatgcttgcattaattgacaattctgagtccataatggtagaacttttgagaagcaaactgactgccaaggaaaaatctccatgcactacaaacagttttggctttttttgaagagattgacaatcagttaggagtctgaatcaggtaaacctaatttttggtattcatccatttttcctgagaacaacacttttctcattcttgctgtcactcttctctaatctctaagtaattttccttttcagtggtttgtttctgcctgaacattatttgataacatagctgtcacctaaaaagaatgtggtctcttccagagaggcttaaaactgcagaggcatttttagggaggagtctggaaggatgcaggagaataggaaaacacattcattgagcacctaccatatgccaggcactgtgaaagtcagtttcatatatgtgatgtatttgatgtcataataaccccatgcatttatgtaattaatcacacccattgcagaagggatggagacacttgctgagcctatagtagtagttcttaactttgactgttccatcagaatcaaacggtgggaagagcttttaaaaatccctttacctagaccatactcagcacagtggaattagaaaccagggtgctgtgacccaagctttgatattttttccccataatcctcaggtggtgccaaagttcagccca

SEQ ID NO: 11522 - DNA, 2300 bp, Homo sapien
ttgatgctgactgtccatggaccacacacttttgactagaggatgtaccccattaggtgcacttagggactagatccttcaggactagtggttctcaaactttacagttcatcataatcacataaagggcttgttaaaatacaaattactgtgctccactccagagtttctgattcagtaggtctggggtgaggccagaaaaatcttcatgtgcaccaagttcccaaagtgatactaacattgctagactggggactacgcttgtcctaagcttagcagaggtctactgaagacctgaatggaattttattccaatggttactgacttttatgagtggacagaaccaaatggaatttggttccaaagattactgacttttaggaggggcagaaccttaagagggagctaaagggaagctccctctacaagctttctcatctccccgtctccaaccaggcccccttcctcaagcccaccatgatttcagcaggcgccctttaccttgtagacattgatagggatgtcaatgacgatgtgcagcaggtctcccagagccaagctggcgatcaagatattgggaccgtttcgcatgcacttgttcttgtagataattctcagaagtgtggagttcccgatgatccccagcacgaacacaaggcaggacacaaccgtgttgatgtatttgaaagtctccttgatctcgatgggtccttggcacgggggaggggagatggtgcgtggcggagatcctgccgtcctgtctcctttaggcacctccgcaggtgccaacgaccgcgccagactggcgttggaacccttgggccataaggtcttagtgggtggcgtcattatctctgcggtttgcaaaagcggagtggccctgtcaggcgggaagcctctctcctctccccagatccgcgacaggccgcaggcaagaaccagcgcaaccagggcgcgtccgcacagacttggaggcggctgcatgctgctacctgctccagaaggcgtccggtggccgctccgcagtttcagagcctagagacaagcagaggaaggaagacaggacacttgggtcagctgcccgagccaagtcgctgcaaacgctaataccgcccgcagcctcttcgccagtatccacgctcaaaagtaactcaagtttgcgcgccagtgggaaacttggcgctcatgactcgccagcgcgggtcgaaactccttcctgatgccctctcagctgtttttcttcccccgcgtggccaggaggggtaaataatatgcagtggggcggggcgttctggaaggggtgtgccagggagggaatgatgggggtcccaggcaaagctccgaactctttcacgtaacgggaggaatacagacacgtcttagttaagcgtgcgtgggaaccgcggaattaaggcacctagaggccaagggcttgtgtcaagctctgcattttgccccgcaggggaacctctataccccgcgattgaactcgaaagactcctcccggcggatgaaagccgctactccctggctggctgagctacagctcccgcagcgcgcccaggagtgcgccggagattcggaaacccgcagagacttctcaagtcagcaggaacttggaaaccgctgttccctccaaacggcttcaaacactcgcgctccttcctttacccaacctaattttaatttgccctctctataggcttaatttttatttttttaaaatcccaaactagtaagccaaaccgaagccccagaataaggttcaatcaatgattttaattcaacaccaagcccgaatgtttacctctcggatctgacaaaccagatgcagagcgacgaatggagaccaccttcccgggaggcggaacccagctgggttccagcctgctctgggagaggagcacgcctcccttgagctgcaggcgggtccggctctgacgaaacgctgcgagaatgccagacagtgtagcctccaccgtttgctcggggtctctgctgccatcagacaagtacttttattcattcatcccttcccatcaatcaccgccagactcctcccgcgccttccgaccccgctgcaacctttccccttgggcgatgcctggacagcatcagtagtagttgcccgagggaggggggcagtcctcgtccggggacaggtcccaaaaggctgtttatttgttagagttctacgctcttcaaatgaacccaaatcaagggcaagttatcacgcaccatgtgacacccggcagctccagactagaacaaggctctgcactgaacgtgataattgaac

SEQ ID NO: 11523 - DNA, 2300 bp, Homo sapien
aacccaacaaagcttgtataggaagggcagatccaacactgggtggagtcaactaagcaaaatattcatattccaaagcttccatataattccttattcagacaacattgtatattgttacttggctcagcaattgaatgttgacctcgttcttacgagacagggaggataaggactgcaattcaaaatagccagatttggaattagcactcacaaccctagaccatatttctcattcctttagccttactccgtaaccatgttcctaaccacatttcacacttaaagttcacctttttaaatagaaattgattttctacttccactgtcccagaaagcattgcctaagagccaaaaatccaaggttcttgtcccatctattccattaactaacatgaagcaaaaaacgagcctcctgtctctgggtgaaactgctacatggaatgggtgcttctgggtttgaagttccacagatccagtagggattttgctgattggaggacggcacagtactctccagtgcatctccaagcctgacttcctgacctcttttatacaatctctgggcaaaactaccagtcgctgttattttcctctctgcggtaaacatggagctcaagaatggatagaaagaccttattgtattgctctacctggtaaataaatatcatgttgaatttgcatggcagctttctgattattttcatgtctccgataagcatcaagtctgtcataggtacagtataaaaatgcctgagattgcctaacaccgatactgtggcaggaagagaggagaagagctgtactggggaaaatgaggagtacttgtaatcctctctcggggcagtgagagggcctgggaagaaaagatcgagctgttccgtgttggggttaatgttggcttgaaatgaaacttcagggcaaaatgaagcagagcaaagagcagcgcccacaaaccaaccttaaatatcacagcggcggaacatttacctgaaagaaaagtgacacttggcattaaaagttcaattatcacgttcagtgcagagccttgttctagtctggagctgccgggtgtcacatggtgcgtgataacttgcccttgatttgggttcatttgaagagcgtagaactctaacaaataaacagccttttgggacctgtccccggacgaggactgcccccctccctcgggcaactactactgatgctgtccaggcatcgcccaaggggaaaggttgcagcggggtcggaaggcgcgggaggagtctggcggtgattgatgggaagggatgaatgaataaaagtacttgtctgatggcagcagagaccccgagcaaacggtggaggctacactgtctggcattctcgcagcgtttcgtcagagccggacccgcctgcagctcaagggaggcgtgctcctctcccagagcaggctggaacccagctgggttccgcctcccgggaaggtggtctccattcgtcgctctgcatctggtttgtcagatccgagaggtaaacattcgggcttggtgttgaattaaaatcattgattgaaccttattctggggcttcggtttggcttactagtttgggattttaaaaaaataaaaattaagcctatagagagggcaaattaaaattaggttgggtaaaggaaggagcgcgagtgtttgaagccgtttggagggaacagcggtttccaagttcctgctgacttgagaagtctctgcgggtttccgaatctccggcgcactcctgggcgcgctgcgggagctgtagctcagccagccagggagtagcggctttcatccgccgggaggagtctttcgagttcaatcgcggggtatagaggttcccctgcggggcaaaatgcagagcttgacacaagcccttggcctctaggtgccttaattccgcggttcccacgcacgcttaactaagacgtgtctgtattcctcccgttacgtgaaagagttcggagctttgcctgggacccccatcattccctccctggcacaccccttccagaacgccccgccccactgcatattatttacccctcctggccacgcgggggaagaaaaacagctgagagggcatcaggaaggagtttcgacccgcgctggcgagtcatgagcgccaagtttcccactggcgcgcaaacttgagttacttttgagcgtggatactggcgaagaggctgcgggcggtattagcgtttgcagcgacttggctcgggcagctgacccaagtgtcctgtcttccttcctctgcttgtctctaggctctgaaactgcgga

SEQ ID NO: 11524 - DNA, 2300 bp, Homo sapien
ttctgcactttaagacactcctacagaggcagtttgtcagtcggactgatttattggagcaagaagtaactttaatccttttcttccattttacaaaaggggaaactgacacccagtcattcatgaagatcaatgaacaattctttacatttcacatggttgtctttacatgttaaggtgaaatatttaaggttaaacttcaattgcatattactgatgtctagaacactgtttccccaaaataagaaaaaaatttgcttaggctttctgcaattacaataataaaaagcatagtctgtgtaaccatttagacatgcattcaaatcctagctccaaatcctggtcccacaactaactagccacatgaccttaagtgaattactgagactcagtttcactgcctataacatcatagaaaataatacagagctggaagacaaacatcagagaatcaatgaggtactgtgaaaaggtgtctaatgcaggtggtagaccctgtaaggagtagctgatactgtgttttaaattccaaatgaggaatgtgtatatttaccttaaaattgtttggccttattcttgagcccaatgaccagttaataaagtataactgaatactttaaaatatcattatcaatttataaaaaatatttcttaagctcattttgtggcaggtagtgggatggtgcagaaagaacatataactcattcaagtccctgtcctgtaaaagaaattaagtcacacgaaatcaatagtgacccatagatgtctcttatgtgatcaagtgcttgctaagttgtggttaacagtccaaaagtgctccaagaaaagtaaagagatagacctcagtgaggattagagcagacttccaggactcagtggaggaaatttgaatggagatggagatgatgagaaggccagtggggagagagaaaagtcaccccacaggagccataggcatgaacccaacaaagcttgtataggaagggcagatccaacactgggtggagtcaactaagcaaaatattcatattccaaagcttccatataattccttattcagacaacattgtatattgttacttggctcagcaattgaatgttgacctcgttcttacgagacagggaggataaggactgcaattcaaaatagccagatttggaattagcactcacaaccctagaccatatttctcattcctttagccttactccgtaaccatgttcctaaccacatttcacacttaaagttcacctttttaaatagaaattgattttctacttccactgtcccagaaagcattgcctaagagccaaaaatccaaggttcttgtcccatctattccattaactaacatgaagcaaaaaacgagcctcctgtctctgggtgaaactgctacatggaatgggtgcttctgggtttgaagttccacagatccagtagggattttgctgattggaggacggcacagtactctccagtgcatctccaagcctgacttcctgacctcttttatacaatctctgggcaaaactaccagtcgctgttattttcctctctgcggtaaacatggagctcaagaatggatagaaagaccttattgtattgctctacctggtaaataaatatcatgttgaatttgcatggcagctttctgattattttcatgtctccgataagcatcaagtctgtcataggtacagtataaaaatgcctgagattgcctaacaccgatactgtggcaggaagagaggagaagagctgtactggggaaaatgaggagtacttgtaatcctctctcggggcagtgagagggcctgggaagaaaagatcgagctgttccgtgttggggttaatgttggcttgaaatgaaacttcagggcaaaatgaagcagagcaaagagcagcgcccacaaaccaaccttaaatatcacagcggcggaacatttacctgaaagaaaagtgacacttggcattaaaagttcaattatcacgttcagtgcagagccttgttctagtctggagctgccgggtgtcacatggtgcgtgataacttgcccttgatttgggttcatttgaagagcgtagaactctaacaaataaacagccttttgggacctgtccccggacgaggactgcccccctccctcgggcaactactactgatgctgtccaggcatcgcccaaggggaaaggttgcagcggggtcggaaggcgcgggaggagtctggcggtgattgatgggaagggatgaatgaataaaagtacttgtctgatggcagcagagaccccgagcaaacg

SEQ ID NO: 11525 - DNA, 2300 bp, Homo sapien
gtgtatatatatatatatatatacacgtgtatatatatatatatatatatatatataatagaatatcatttagcccttaaaaagaaggagatccctttgggagtctgaggcgggcagatgacctaaggtcaggagttcgagaccagcctgaccaacatggtgaaactccatctccactaaaaatacaaaaattagccaggcgtgatggtgggtgcctgtaatcccagctatttgggaggctgaggcaggagaatcacttgaacctgggagccggaggttgcagtgagctgagatcatgccattgcactccagcctgggtgacaagagtgaaactccatctcaaaaaataaaattaaatttaaaaataaaataaaatgaaggagatcttaccatttatgataacatgggtggatctgtaatacgttatggtaagtgggataagtcacagaaggacaaatactgcatattcctcttatacgtaagagatacctaaaataatcaaaggtactgaagtagacaatagaatgatagttaccaagggattggtgggagggggaaataggaagttgttgttcaatgtgtataaatttacagttatacaacatgagtgagttccagaaatctgctgaacaacccagtgactatagttaacaataagattttgtgaacttaaaaacttaaagagagtagatctcatgtgaagcgttgttaccataaaaacaaaacaatgggacacaaggaaaatttggaggtaatggatatgtttattacctggcttgtagtaatgataacgtgagtgtatgtatacacttgtccaaacccaccaaactgtgaacattaattacatgcagctttttggatactagctgtacctcaataaagctgagggggaaagtgatattactgtaaacaaataatttggcctcatgacgggtggagaaactattttagagagtgtactagggaagacttctccaaggagaagacttgagaaggaagtgaggaccctaataaagtgagagatcaatacaggcagacaactaggatagatcatttcagtctgggagaggtgggaatgggggaagaagttcagcaagaagaagtccctgagaaaaggttcagcatggcatgtttcaggatctgcaaagaggctggtataggtggacatgagtgggggcagggtaagaaaggaagttggagagcttaccagaatggatcatttagggccttgtaggcaatggcaatgagttagaaatgtatttggtgtttatcttccaaattatatttggaaatatatatgaactttattcagctactgggagacattggaaagtcttaagcaggggaatgacttgaattgacttagacttgcatttggtcttgctggctagggtgtggagaattgactatagacatagcaagagtgcagggagacatctcagaacatcctctgtctctcctggttatgcagacttggacatttctcggataaggcacgaacattccatcttagcagttcactgtctgccttttcctcatctatcttgcctaactcaaacctaagactctgccacctttctgctgcatcaacctaagctgctccctgctaatggagagcaatccatacacccacagctgacttacatttattggagtccatttaagggaggataccacccctcatattgtcttatgcccaatttctgcctctgaagaaagaataagtaaaaactaaaaggcagaaatgaaatccactggcagacagtctggtgccacaccctgggtctggtagttaaagatcgacccctgacctaaccggttatgttatctatagattccagacattgtatggaaaagcactgtgaaaattcctgtcctgttctgttctgatctgattaccagtgcatgcagcccccagttatgtacctgctgcttgctcaatcaatcacaaccctttcacgcagacccccttagagctgtgagcccttaaaagggataggaattgctcactcagagagctcagctcttgagacaggagtcttgccgatgcttctggccgaataaacctcttctttctttaattcggtatccgaggaattttgtctgcagcttgtcctgctacatttcctggttccctgactgggaagtgaggtgattggtggatggtcgaggcagctccttaggtgacttaagcctgccctgtggaacattccggtgggggactctggccagcccgagcaacgtggatcctgagagcactcccaggtaggcatttgccccggtgggacgccttgccagag

SEQ ID NO: 11526 - DNA, 2300 bp, Homo sapien
aaactgtaagaaaatacatttgcattgttttaagccattaagtttgtggtaatttgttatagcagccacagaaaatgcactcactcatcaatctccctagaaaatacaaagtttgtccaaaaaaatagaaataaaatcctacaggtaagattaagaaagactggtaaagacaaaaaacattgaaccaattagaacacaaagaaaaaactaacattatggcatgcaagttggcagtaggcacagtctttggtacttctatcaacgttttctccatctagtccttacatcaggctgcatggaggttcatgtctccatttcacaaatgagaatgtagtggttctgagagtctaaataagtaacctaatgttcacatgactaatacgtggaggattcaagatttgaactatgtctcattcacgtcaagatgaggtagaaaacaagaatactattcctaacagtgtgatataaatatttactatgtaaaatgatttccaacgcaccattttgactgatcattacaataatcctgcaagaaaggcagggcaggtattgttcgttatattttgtggataaataaaccgatgcattgttcaaagtcacagagctatatagtggcagagctcagtgctactgaggtgaagtgaggaggtgaagggaagggaatcagtttgcacttgccatagggatcacatgggagctggaagattcttgtatttttgtttgtttttatttattatactttaagttctgggacacatgtgccatggtggtttgctgcacctatcaacccatcatctaggttttaagccgctcatgcattaggtatttgtcctaatactctccctccccttgctccccactccctacaggccccagtgtgtgatgttcccgtccctgcgtccaagggttcttattgttcaactaccacttatgagtgagaacatgtggtgtttggttttctgctcctgtgttagtttgctgagagtgatggtttccagcttcatccacgtccctgcaaaagacatgaagtcattcttttttatggctgcatagtattccatggtgtatatgtgccacattttgtttatccagtctatcattgatgagcatttgggttggttccatgtctttgctatagtgaatagtgctgcaataaagatgtgtgtgtgcatgtgtctttatagtagaatgacttataatccttgtttttaagataactagttaatgtatcttctaagtgtaaggtgatggcaattctttaaaagaagaattgataggacttggtgacaaatcatagtacaaattgattatggaaaagagaacaaaaatatttcttcacaggtacataaacttggtgtctattttaaatacatgtaaagtattgatcctcgtctcacatgtaataagagatgcctcacaaatatctgttgaactgaaatgtccattaagaaattgcagtaccaaaacttgggagaaagagacagatagctttgacctatatttttaaggataataaaaataaaaatgaaagttaatgtcataagaatcgatgagctttctgagagagagagagtagctacagagaagacagtctgcctaacatgacagcacaattctcctgggtttaaaactcctgtgtgcctgggtgtgttggctcacgcttgtaatcccagcactttggggggccaaggtgggcagatcacctgagttcaggagttcaagaccagcctggccaacatggtgaaaccccgtctctacccgaaatacaaaattagccaggcatggtggcagatgcctgtaatcccagctacttgggaggctaaggcaggagaatcgcttgaacccaggaggcagaggtcgcagtgagccgagactgcaccactgcactccagcctgggtgacagagtgagactccgtctcaaaaaaaaacaaaaaaaacaaaaaaacaaaacaaaaaaaaaccagaaaaaaacaaaaatacataaaactcctgtgtgttcaagagacccctattaaaatgcagagcatcaagtgagctaacagagttttaaatagtaccagccaacacttcagagagactgctttttactgaaataggccacctaacaatgtcaaggcagagaaagaagcttctgggcagttagtgtgtgaattatgaaaggaagatgaatgggaggtacgaaggtgggaaaaacagactgaagtagcttgtcacttctacctaggaccagtcttgcttttaagtataatgaataccaggtaatcttatcaacatttctatgataactactagcccagtt

SEQ ID NO: 11527 - DNA, 2300 bp, Homo sapien
agggtaaaagacagcaagggatgttggtagtgttgcatccaagtgtcttctatttgtcatgattgtgtaaacacctataatttctcacttcacttctctagcccctctggatggatattcagagaatgaggatgaacattcctctgaatacaaagacttgggatattctttccctttaactgagagaaagaaaagcaaactgaatagacatggaaataataatttgcatcacagacatcccttcaggtcggcagtttgagttcaccttaaggcaatgccactgactggggctttccttgagtgtgtgtgctatatcttaggcactgccatggccctggttggggcttagaacatgtcatcccaaaatataacaccatggtctgctgagtactttcaatggaaggaaattggaagggcctcagaagcaagaatttctctctgaccttctcctattctcctttccccatttctctaccaaaagtgggtcatagaaactaaaactattctccttgaaagcaggccataaaacctataaactttactctctggtcttctcccttttcccttgagggtccttatgtgacaggtgtcataccctatacctggaagaaggaatgctgcatagagaggcccggaagaatctgaaaaaacaggccttactgggctccttcagtttatcaccattacaacacaccctttttgtccaatcgtatttctatacagctgatcctgcattgagtgcaagcaaaaaactgtcaagttttccctggatctttgggctttcatttctgaagtctcctgtgtcacgtaaaactttgttaaataaatttgttatgcttttctcttgtaacctgtcttttgttgtaggagtgtcaggcaagacccttggaatgggtgggcaaaaggtgttactatttcacttctacagcctcaagacctagcaccatctctagcatatgttgtattaatgacgttagatgattgaatgactgttatctcaataattgccactgatttgactatttaagcaggtcattttttccccctaaatattccccccgtgctatactgaaagtcacagaacatcattattgcagaagaatagctttcctcagtcaaggctaaataagttacaggaattgacagcgaacacctcccattcaagttagaatgaacactatttggtcttagacacataaatgttcagacaagaggtttccatttagaagaagccaaccaatgatgagttcagaaaacattcttgttaacacactcaaaaattgcaataaaaaatggagcatcacctgaaaatggtaaactttttaaacaaatagaacgatatgaggataaagggatgtttctaattagattcccttttctaaaatctttcactttccttactagtctgatgctcacagacataaggtcagtgtgatatttttgataacatacgtaggtctgcagagttcatagcactgcagacttgggaagattttacatgtccagtgcatggcccagaggcagcagtatttattttagccagtaacaaacatgataaatgatgtgccaccctccgtcactgctggtcactggaagtgctggctgaccatcagcccagagctcaattcccacaggttccctgccaaactatttgaataaacctaggcaagtttacaatttctgctttggctgaaaaacttctttcacttggcagtctaaatacatttcagagcgtttgaggatgaactgttggtttctatgcttaaatagtaatttcaggtatttttaaaacatcttccttgaaatataattcacataccatacaatttttccattgcttttaatatatttacagacttgtgtaatcatcaccacaaccaattttctaatatttgcattactccaaaaaaatcctctgtacccccaaatcatcccaccttgcctactcctaagcaaggactaatgattccccttccctgttaggtgggctgttttcattatcatttgcttgtttattgattggtgacatggccagtctattttaatgaagtctatttccctgcagtgtctctcctaagtaaggcacagctttggacattcatagttacttgggacaacagttttagcagggctctctttctcctttcctgatctctctgttaagctgcctggctcatttgatatcacatccaaattatcagctgattgctctattgttttggacaatgccctgaagcataccaaaatgtgtctggaattggtgggttcttggtcttactgactttaagaatgaagttgcg

SEQ ID NO: 11528 - DNA, 2300 bp, Homo sapien
attgtgggaagaggagcctctgtgacctgttactgtccaactggacagggacttgtgccttagttcaattggccattccattcaccttggcattccataagatccccaaaaatccacatggctaccaaagctggagaaatctaacaaattcttttaaccccaacatttatgttaacatcaatagatgtccctaaaggagtgcctaataaatgtaagaaccaaagggcacaaaaataaatgtggaaatgggaccaataggggtcaaaaaaaaaaagacgagggaattgaaggaaataatatatacaatggtccatttccaagacaaagtgccttcagtcagctttggtcagcaaactaccagaaaaaacagaatatactaggctcctgcttggatagccaaagcctgcttgtcagccttagttgccctcacccaaaccaaaaaagtttagtttaaaatgaaagtttactagtttgcaaaatagcttgctttgtctgatcttatcagcctgcccagctacttaggtcataagtcaaatacttgaagagccccctagttaactaggattgcaatgtattgtgggctgcagcaaaatacagcaaaacaaccctgaaaaaaacatctaaagaccctacccaacaatcaataggcgaagtccgggaaaattgtaacctcatagtactcagcctataaggaacctggggagggacctgcacagtaggggataaattgcttgttaaaactgtgctgtgtgtgcctgcctatcaaacatccaatcggcctcagcagattctcctgcctcagcctcccgagtagctgggattgtgccaccgtgataaatttttgtatttttagtagagacagggtttcaccatgttggccagactggtctcaaacgcctgatctcaggtgatctgcgtgccttggcctctcaaattgctggaattacaggcacgagccactgtgcctggcgttaattcccttttaaaaataacaataatttattttatgacctatgaccatttcaaatggtctgaaaaagtgagacagattggtgcccattgatagtttggccataattcactcccccccccaccaactttttttttccccaggccacagattgaacctaaaacccatttcttgttgctcttcactttatttaaatcaaagacagtttcaggagctcatgccccatttaactgttaccctttactttttaagtagcagtctagacactttaaaaaaatgcttatattagttttttccaaaatcatctttctgcatttcacaaaacagaccaagttaaatgaaatcctgtacccctagtgattcaggtgttaaaaaaggaggtagctaaaattttaatccctagttgctagtttatagataaataaacatggatttgccctacacaaaggaaatgtgctggaggattatgatggcagactttcttccttccttcctttctccctccctccctcccccgctctctctttctttctttctgttttttttgatggagtcttgctttgtcaccaggctggagtgcagtggcatgatcttggctcactgcaacctctacctcctgggttcgagtgattctcctgcctcaggctttcgagtagctgggattacaggcccaactaatttttatatttttagtagagacggggtttcaccatgttgaccaggattgtcttgatctcttgaccttgtgatctgcccgccttggcctcccaaagtggtgggattacaggcgtgagccaccacgcctctctttttcttttccttctttctttttctttctttctttctttcttttctttctttcttttcttttctctttctttctttctttctttctttctttctttctttttctttctttctttccttccttctttcttctttttctttccttcctttctctttctttctttttctttctttctctttctttccttcttccttcctttctttcttttcctttctttctctttctctctctccctccctccttcccttcctcccttccttccctcccctcccctcccctcccttcccttctctccccttccccttccccttccaattccttccttccttcctgtttcctttttcctctttccttctttctttctctttcttcctccgtctccttcatccatgtctccctctctcagtctctctcatttctctctctctcttccttcctgttaacttctttgctgaattaacttaatttacaatgatagggataggaaggagttacagaggaagtaactgtagctgggcaggt

SEQ ID NO: 11529 - DNA, 2300 bp, Homo sapien
aaaagccctggaatcccttgggagaagggaaagatggaggtagggaccggaaagctttccaaagttgattctgggcaaacaaatatcaggtgaagattaggaaccggcaacttgcttaagcagccagtattaaaacttttgcataaggcgtggcagtggtgcgcgagagagcccgcttcttggctctaaggctgatttcaagcctccggttcagattacactttggaaagaagaccccggcgcgcactcccgcgtcgaatacaatggactccctctccccacagtcaacacacacacacacacacacacacaatcccttagtttaatataagcaaatgaaacaattgaaacaaatctgttttatttaaaactgggatgaaagcgtctgtcgctcaaaggcgtcacagtccgtcacattaagataaattttcagaagaaacgcaagccctcgggaaatacctctgcccagagtcaaatggatcctacctgcttttttaaatgcctgcatttccattgctaactcatacaacacattttacgattgtgcaaagtgcaggacagttgagccccaatgtcagcctcagagctccttgtcacattcagcttctttttctctctctttctttcaacacaacgctatggtgaagtcacataagtgatcaaaattaacataaatcactattagttattaggatttgctctaaattacactgtgaatatcgtaccagccccatctgccgcccctgctctcgcagcaatagattgcagataaaataaatgtccttaccccattagaaggttcctgtctctgtagccaaaagccaaacaaaagcaataaataccgggctttttctctccactattcagctgtgactcttttcatcagctcttcttctagaaaagctcaatagctgcctgaaaatattgcattttatatcaccaaagggcgattaatattgcattaactgtatttaacattttttaagcgcgagtaatctgcaatgagttagttttctgttagtaaggacagggggtatcagaactactgcagaccacttaagatatccgtacgattgtattatttgtctcacacgtagttatatatatatatttagagtgtaccgcgatgtttgaagtggaagaggccgtgctaatggcctgcttaaagtattctgacactgtctggagacaaccaggtctctgccttcattaaaatgtttattgtcaacatttggtgggggcggggagaaggagaaactggtttaagtgaatttccacggctggaaattgacaacactttgttttattctaatctatgtctacaaaagtttgtatatattatactgcactgaggccaggcgtaagagttatcaaacaaacttttgtttgtaattccttttacctgatcaatgcgaggagtctcttcctccaccactccttttgacaactttccttccacgcttttttttttcctcaatcggaaagcagctgtctttcgccaatggggaggggactgggacacgggcgcttcttctctccagcccttggttcgccggagcaggatgctggtctcaacactagggctatgtcggcttctcaccgaaccgagattttcaatttcagctttgcgattcaggattccacttgaattccccaggacgaaagcctagcggccaggctgcatttcgccccgggtataaatccctgccggataaattcaaatctgtagcagggttttggtaatatgcatcttagcaacaaaacaaaaaccaacctcgtatgccttccagttctttttaaaacgtgtacggcagttgtgaaagttttgtggtgcttgagactgttgacttatgcaactggggagagggtttttttaaccgctttgagatattggtccatcccttttctctcagaacgtcctcaagggcacgtaagagttggaggtgacctccgggagcgcctaattttgagccgcggaacttcggcccacttctccgaggggaccaggcgcgcgccaatacgcatgtgcgggctctgagcgctcagagcgcgcctcttccttcccggctccccgcggtgcgcacccgctggccactctgcgcacgcgcgccgggtgccccggcctaaggccgttgacctcgggttctccccggcacagtcgaatccacgccagggccctcaggccggtagctgtcctgcagtccgagcggagctgcgacctcgggcagctggaagcctgtgggctgctgcttctccaggcaggcggcggagggatgcaggcaggatgagcggcggtccct

SEQ ID NO: 11530 - DNA, 2300 bp, Homo sapien
aacctgtactgtttacctttctgttgctcctgtacccttcagggtccctaaagaccagcgcttccttgagaggggaggggcaggttccaggccctcaccctctgtgggggccttttctttcccgtcaagagagagcgcagggaacggccaccaggggtgtcaggaaggactaggttaagcccggactcccggtgtgatgactaccgtaggactcactctttccctctagcgacgtcctgctcatcgtccactccccgttgagataaagttgcatttagcgctcccaggggactgcgtaatggatggaaccagctccttctctcaccagcaagtgaacatccttctcacttccctctggagctagaaggaagggagggggtgggggggaacatgaaaagaaagaaagaaaaagccatggtgacgcctgtgggctcttcttggaatctgagtaggtgagtgggtatgctaaacacacatgcatttgtgcagaggaaagataaaatccacgggaacgcaaatttaggtttatagaaatgagatctgctctttggtggaaatacagacttccttggtgtgggagagaacagaaagattatctgatttctgctttccataagcagccccttgctgctctccagctctcttaccgcagatgtgataacatctgggctgttaggttattatcaccgcgagcaagtgctccttccctggggactttggcacctgaactgtggctcccctgggaggctcttgatctgctaccacataagggccatataacaggttggctaattgatttattctttttaggtcttaatttcacaataattttttaaaaatttaaaaactggaccagagcttgtccccgttctttcaaattggcttgatttaatatttttgaatcaagctttcctgtaagttagtttgatctgtctcctattgaaaaaaatatatataagcaggcagagatatgaggcaaaaagccaaaaagatggaagggaaaagaaagttctcttttcaacatcttattcccttttctctgaagcagttttcctggagttcccagcataaagtgtgtgtgtgtgtgtgtgtgtgtgtgtgtgtgtgtgtacgctgaggggaggaaggatcccaactacaccctgttaactgttttttccttttgattactagaagccttagatcacccggagctcgtttgaaacgtgggtttgtacacggttgaaggagacaaacaataagagaaatgcacaatttcatttcaacagcttttcccgagtagaaagcacacgctccttgtggctcctaagtggctgtcactggcggtgcctgacacagttatattcacaacaacaacaaaaaagtatgcggaggaaattaaattatatggaaatcaatagcgtctgactgcttcaaacaaatgtctgtcaccgcgattattctccaggaacctatttataaacctttaaagaaacaggttcttgcagcaaaagacagcaccttctgcatttctgtgttgttatttatactgtatacagaggaatgcgcgggcataatttaacgtagaaatgtccagctgtatacattatacaacagcttgttaggcatcccgaagaggaggaatgcctaagtaatgctcatatattcaaggcttgctatcagggagaagaaacatacacacatacacacacacgcacgcacacacacacacacacacacacatagaggggcgtgcgcgcatctcgtcttttttattctaaaaggtgcccacccttagacaatagctggaccttctgatctttccagaccacggtgggaaaggtgaggcgggcagtgcgcatgcccgggtagctacaggtgcatcacctgcgctgtccttgctggtggtcactataagagcggctcccacgcgctggtcgcggccggacgagcgcgcgcgcgcgcagacgcacggggccgccgagaaggagagcgcgcgtcagacagacggagacagctgatgcctgtcagcgcggtggggccgcgagctctcgcgagagctccccgggacggccgcgagaagtggggctcaggtgttagaggagtgcatcccgtcggcgcgcggggctagagctgtcggagaagcgggaccgcgaggccggcgcgcggcgctctgcgcggtcagagggagcgcctggcagcagcaggagcagcagcagcagcccgcggcggggccgccgccagccgccgcgaccgccgcggctgcagcctccgaagggaggccgggtgagccggcgtacgcactttcccgcggactttcg

SEQ ID NO: 11531 - DNA, 2300 bp, Homo sapien
aatggcttgtttttcttaaaatgagcatgtgttatttttataattctcaaaaagcaatagaatcttccattttgagattaaaaacaagtaaagaaattgtttaaaataaaacagcctgagtttattataaaggtaggctgtagcaaatgagaatattactatttgtggaacagtaacctattacagacattagataaattggatgcaatccctgacctcaagaaacatagcctgttgtggggacaaacacatcaccaactataatacaatgtcatcagcacagaaatggctgtatggactgtgcactgaaacactgagaagctgtgacaatggtatgaaatgtggaaagagatgttagagatagtctaaattttaatactttacttaaaatgcaggatatgatttttaaaattatctttgtgactacatattgacacccatcaacaagatgatttacaaggaaatgaacttgccccattaagtaatgggaaatgttttgaaaagaaatgtctttacaatagaatactattgagccataaaaaataataaaatcctgtcatttgcaacggcatggttgaacctggaggacgctgtgttgagtgaaacaagccagacacagaaagacaattaccacatgatctcacatgtacaatctaataaagttgatctcacagaagtagagtgcagaatagtgctcacggctgtaatcccagcactgtcggtaggtcaaggaggggggatccattgagcccaggagctcaagaccagcctgggcaacatggggaaaccactccccgaccctcgaggcaggcggatcacttgaggtcaggagttggagaccagcctgaccaacagggtgaaactccgtctttactaaaaatacaaaaattagccaagcatggtggcgcatgactgtaatcccagctactcgggaggctggctgaggcaggcggatgggatcgcttgagcctgggaggtcgctgtgttggcacctagtggtgacagagctagaccctatctcaaaaaacaaaacaaaagttgccagaagccatggagctaccgtttaggtaggaagttgttgggggcagggatttccgctgaagcagcccaggtccagaacccctttctcttaaccatgaggctgcttcttgaagtcatactgcgtctttttcacaaagattagtaaaagttgtcccgatggtcttgtctttaaatctctcaactcacagattttacttgttagcgtaatttatcacatcagctcttcctcgcttcaagtaagttgcagataaattccaaatttgttatactgcatttaagataaatttaggaacttttaggtttttttcttttttgttggtaggaaacgcaacttataacctcacaaattctcccttggggttcaacaacacagcggtacatttcatatgcaaccatgcacctgaaatgaagacgtgaaaacgttaatctccttttggtggaaaacccagagaagcccacagtaaaaatgtattttcagggaaagctgcgattaaatgtatcaggatcgtctcggacacagataaggagacaatcactgttttcttaagtgaattattgtgccctctggaagcacattatattgagtggaaagagaactgacagaggtggaaagctgttttgaaaaaaattgaaacgtgtagataatgtcttttctctatgttttgattacgctgtgttggcggatgtgtggggtttaataattaggcgaaaaactctccatccttcaccccatccaatccccgaaaacaatttggggatttaaaaaatcgcctttccgtatcttcctcttctgtctccactattccgctttcctttagattttccaagatcctcgatacttgtagtaaactaccttcctacacattcgcaggaatcttgcagctccctaatcagtgaattttctttctttctttctttctttcttttttttttttttttttttaatgaaaggaaaacgccttggagatcgcgcgtttcgaaagcgcgttttcgttttctctcctgggcgggttatggccctaccggggcgccgtagccggcccgcgcgtgcccagtcttggcgaagagtagcggtaggtcggcgggacttccgtgttggcgggattctgaacgctgccatggctcagaccgtgcagaatgttacattgtcgctcactctgcccatcacgtgccacatttgcttggggaaggtaatgggtgattgtgggcacagctacaaaacggggttggataagtcgctcgccggggccgagggccgt

SEQ ID NO: 11532 - DNA, 2300 bp, Homo sapien
ccaaaaccgaaacccactgtttaagagaaacccaagttttctgctgcactaacaagtatctttcatgccaacatcttgagacaccttagttcagaattcccagcctgtgagaggacggtaccatacctgacattcatgctactgggccagcacccctgattaatttttaatgtatctttatgagtttcctcagtgttaaccacaatccaggtggggtgtacaaatttaaaacaaacaaaaaaaagtctttcaggaatgaaaaataatgtaagctgaaatcaatatttatgaagttgtgattaattgactgatgaccaaatgattacaaaatgtctgtctgaaacatctactcaaatttattagctttgaccaaaaaaattaaaaaacaatccaaactgggtcaatgaaagaataatgcattcctaatcaatttttaatagcacttaagattttatatttttttaaacttgcttttaaataatttatcatcaaaatgaatctgatttaaacatggggtaaaaggtgttccatagctatttgatggttttcttagcaaagaaattcaattatgactgactttttattactgagacactttattaataataatacatcttgcacttacacaaaggcattgggccaacattctcagagagtccagcaaatgtgatctaggatttagccccaattctactgttatctggtgatttaccttatgtaggccttgatttcctcatctgtgaaaggaaaggcctgcataacaacccctaagagccattttagctctaaatgtttataattctaaggatgtaggacagctttagcccattccagatgtcaaatgtaatagaactcatcagatcacagggctgctcaaaaagctaccaagatgtggtgatcaaaattaagcagcagtgaaccacataatttttgttttcctattagggtaatggtaggatcttttagtgatttgggccaaacgacatctatttagaacatgaattgtcaaaaaatgggaaatgtccttcacagagcagagaagagataattcctgaccttaagccacttgcattattaaaagcaaagcctgggaactagcctggcattcatctggactgaggaagagtcctaatcaatctatattgctaacaatattatttggatatgtgtgtgcatgtgtgagggcatatgtgtattgattcataaaacattaagtgaataaagcaggtatgttatgctatgaccttgtttgtgcttatgtatacagtaatagatgaattagtatgttttaaggatatgttctagaatgttaatagtgatttctacactggatacagaggtgaggcagaaatatggaggaacttttacttattttatatactttttaatggcttgtttttcttaaaatgagcatgtgttatttttataattctcaaaaagcaatagaatcttccattttgagattaaaaacaagtaaagaaattgtttaaaataaaacagcctgagtttattataaaggtaggctgtagcaaatgagaatattactatttgtggaacagtaacctattacagacattagataaattggatgcaatccctgacctcaagaaacatagcctgttgtggggacaaacacatcaccaactataatacaatgtcatcagcacagaaatggctgtatggactgtgcactgaaacactgagaagctgtgacaatggtatgaaatgtggaaagagatgttagagatagtctaaattttaatactttacttaaaatgcaggatatgatttttaaaattatctttgtgactacatattgacacccatcaacaagatgatttacaaggaaatgaacttgccccattaagtaatgggaaatgttttgaaaagaaatgtctttacaatagaatactattgagccataaaaaataataaaatcctgtcatttgcaacggcatggttgaacctggaggacgctgtgttgagtgaaacaagccagacacagaaagacaattaccacatgatctcacatgtacaatctaataaagttgatctcacagaagtagagtgcagaatagtgctcacggctgtaatcccagcactgtcggtaggtcaaggaggggggatccattgagcccaggagctcaagaccagcctgggcaacatggggaaaccactccccgaccctcgaggcaggcggatcacttgaggtcaggagttggagaccagcctgaccaacagggtgaaactccgtctttactaaaaatacaaaaattagccaagcatggtggcgcatgact

SEQ ID NO: 11533 - DNA, 2300 bp, Homo sapien
ataagtataaaatacatttagttcagtgtgttttgaagctgaagtttaacagtagtgctttaaagttgagtcttatagaaaataggatatcatgaacggctgatatatatttttaaaagttgaatttgtattggtaggtgttgtctacatctactggcctaacaaaaacagtgtataatccagctgctttgaaggctgcacagaaaaccttacttgtttccacctctgcagttgataataatgaagcacagaaaaaaaaacaggtaagtacaactggtatagtataaaaaatttttgcatataggaaagctttccttgtgtatgtgttttttcagtgcttattgcaaaataagactacaagggtgtttgttggctgccactgaacgtttattttccatagtatagcggtaaataaaaattttttctttgaaagaaaggttcctgtgattaatctttgaaacttgcatacatattttaagttttacatagaaaagccttgcatataatttttgttgacagacttctgcagttacaactatttctcttctcttgaataatattgtttatccttagtaatattctaatgatatttttgatccctgattctaggaggcattgaaacttcagcaggatgtaaggaaaaggaaacaagaaattttagaaaagcacattgaaacacagaaggtaaaatgttaaagttagatttggccaaattgcaaatgttataatttggagtgaacttaatcttatgctacctagtcataaaaagatttactataattggtaatggtaaaacaaatatttgtcagtgataatattggagatgaagagcatacatcagatggtgggtatactttatactttaactggtactatagttatcaacatgaaattaaggtgttcattcagttgtgttgctgcacagtagttttttcaacagataattaaatggaaccttttttctcagtattgatatgtacctttcttcactagcttaggatcctctagtcctgtgttttttagtatagcagttagtagccacatgtgactgtctatagccacatctgactgttgagcatttggaatgtgtctagtccaaattgagatgtgctataagtgtaaaatatacactagatctcaaaatgtagtacaaagaaaaaagtaaaacatcacaataattgttgaaatgtcacattttggatatattaggttaagcaaaatattttattaaattaattgtatttgtttctttttatgtttttaatgtgactgctagaaaattaaaaattacttatgtgacttgggttctttcttttggactgagttactctaatttatgacatttaattagtctcagttcttgattatgtctagtaatgaaggttagtagtatgacatttcaaaatgttgaaaatacagaaactacattttgatttgaaatgtgtgtcttttctaatttaaagttggatatacttgattaagaaaaatcacaatactttacaaaaccaaaaactgaagccatcctaattcaggaaacctacaataaatcatgtggcttcttttacccatactatcttgcttatcttgttgtttcctgttcatgttgggaataccattctcaggtgaaaaagtaattaaacattcattttttctaatatctcattgtatgaaaggaaccataaaacttttcctctggttctttctgggctggagatgacattgatagtgggaatacttagaggcgtaacatcaacaaatggattagaaagtaaaattgttaatatatttttcaaattgataatttttcagtgatagaattgagtttcttctggttgtgtgcttcaaacttatgttctgagagacccaaatagtaacagttcttcacaaatttaaccaagagtaaaacttgagttgagatagttagcatcaccaaatctgctattctgcgatctttagataattcatggttgttagccttctcacgaatgcataaactaaaaaaagtagtaatatttatttttaaattactttgcagtgtttgttttgttaatgataataggagtaattagctttatttttctctttttaaaaatttggcagatgttaatttcaaaactggagaaaaacaaaacaatgaagtctgaagataaagcagaaataatgaaaactttagaggttttgacaaaaaatattaccaagttgaaagatgaggtcaaagctgcttctcctggacgctgtcttccaaaaagtataaaaaccaagactcaggtatttaatttcattgttgttcatattattac

SEQ ID NO: 11534 - DNA, 2300 bp, Homo sapien
atttcatctgtatactgtgagtcactgagccagaactagaatttggggctcctatttttagtccatggctcttttcagtctgaagattgggaatcaatttcagagataatgcatcagtgagatagctgccctgctgtcttcactatattcttcagtatattattttctttatttacaatgttaaactttggcagttttaggtatttgaatctgagtttgtgtatcagactttgctcttgggcatctcagcattacttcgggcataatgtgcctaaaatgaattcattatttcctatataaattaatttatcctagcccttagctcagaaagtgataacaccattttctaagctgtgtgatccaaaagccttacaatcatttgcttgtgtttgtagaccacttctttttctgccaccttcagttccctagcctctgggtgcagtgtcttaactggcatcctggaattcccctcgtctagtttatactgtcaccatcttacactcagacttattttggcgttaattcattatagaaactttgagtttctcagctaaattactttccttgattcacagctcatcgataactcaataattctggttctattacttctgctctagtctttttacccaagggagtacttttctgctcgttttcctttggcctttcctgacttttattattttattttatttttttggtggtgatttttctggagtgcatttccccccccgccgccccaactaaattccagtcattatttaaagagtgaaagtctctctaacatctcccatgaaacctccagatttttctgttatccccacctcctccttggaatttctgtgctgcttagtctgtgctactaaatttagcagtatcaaatacttacttggattaggtttatcctcgttgaaaataagtatttcagaaaaaagaaacactggaagtgtttgaggtgatagattttgattattacataatgtatatatgtatcaaaacatcacactgtaccccataaatatgtacagttctgtcaattaaatgtaaaataaaatttaacactaagttcagctgtacttagtgtactactgagaaattctagagacatctaaaatgctcagttatatttggagtctgtaatgtcagatttggacttttgaaattgaagtgtgtactcatagcttttataaaatttttgcagtgtattgtgagtacaaatttgtagttgataatataactttactaatgcatagactaatatatatacccatatattatgctaatgcaataaactactaactgaatttttatgggaaaaaaatcatttatggtagcaagctatttatggggaaaaatatttttgataaataccgtaaacagcctattaaggaaaacagtaagtatgtaacttttattcatcttcagtgagtgtctttacagagaaacattttatttttgcttatttttgttgtttctgttcccctaatccttagggggtttgggtccaaaatacttacagggcagtgattcaaagaagtcttagaaagaatagaagaatgttccccatcatcaaatattagttgaaagattctttttttaaaaaaaatgaaggcaggggaaaacccaaagcttgtatctatacagtatcctatgtcattattaaactaaataaatacacaaatgtaacattttataccttccctatcaacaacacacagtaaaacctttagtgattattctttatcctgagaccccattttcgtgaggaggctagaagagaggaaagttaaaacgtaattgctgctggtaaatatgaagatattgcaagaggtatttagttattatgtgaatagatttgataaattatgtttgagtgcctctgcttactaaagaaattcatgaagaataaagggctacatctgtgtatactgtcctggttagttttttaaaacagacttaagaccgttcaaattatcttgctgaatcccttctaaattctaagaaggcaaactgcgtaaccagtggaatatttaatcttctttatcatatcagctttaaatatcagatttatgatacaggatgttattgttcttgtggtttttgcaatgtaaaaatatatcttggtctctgcatgatgatatattaacatctataccatggaacttttaaaaggaaaattgtgtggtataattaaaagaatattgcatgttatagagaaacttcacctgttgatttagcaggtgccattgtgtagatgctaagcaaatcttaatatgtttccttggatttttgaaatttga

SEQ ID NO: 11535 - DNA, 2300 bp, Homo sapien
ctaaatatgacctggatagaacagatccattagaaaataattatactccagtctcttcggtacctagtatttcatctggccactaccctgtacctactttgagcagcactattacagtaattgctcctactcatcatggaaacaacactaccgaaagttggtctgaatttcatgaagaccaagtggaccataactcttacgtaagaccacccatgccaaagaaacggtgtagagactatgatggtaagtctttcagctgtttgataaagtatttaattaatatttccagctgcctaaattctgtgtttatgttgtacatagttattcaaagacttacctctgaaaagtgggaaattagccttagtcactttttgaattcctcaatatgattgaaacatttattagttgccactaatttgattatcaatttaaaggtagtatttatttgcaagtaagtcttaataaattgtgggagtttaccaaatgagtaaatatctactgagtttttatcagggaatctgctactgaaacattattgacaaaactcatttctttagaatgagtgattattggactgtaaatagaaatgtatctagaaatgtaaatgtcacctttgtaagaattttattaaagaattaaagacttttggctgggcgcagcggctcacgcctgtaatcccagcactttaggaggttgaggtgggtggatcatgaggtcaggagatctagaccatcctggctaacatggtatgcaaccccgtctctactaaaaatacaacaaattagctgggcgtggtggctggcgcctgtagtcccagctactcgggaggctgaggcaggagaaggcgtgaaaccgggaggtggagcttgcagtaagccaagatcgcaccactgcactctagcccgggtgacagagcgagactccgtctcaaaaaaaataaaaataaaaaaataaaaagaattgaagacttttaaggatttaccgtaaaagatttataagtagtattaaagccatcattgcaattttttttagttttaagagatttaaatgaaggacatttctaaagacaaaaatatgacaaaaattatatttaagtctcatctcgttaggttattttcatttgtgtgttttttttgtttttttagtatgtatacgttagtttaacattgctctaaagtaatgcctgagcctgggaaatttataaagaaaagaggtgtctttggctcatggttctgcagactgtacaaaaagtgtagtgccagcatctgcatctggtgaaggcctcaggaagtttacaatcatggtagaaggcgaagggagagcaactaaaagggagcaagagtggggttggtggtgggggaggtgccatgctcttttaaacaaccagctcctgtgaactaatagagggcgaactcacttgttaccttgggagggcaccaagctattcatgaaggatctacccccatgaccctaacacctcctaccaggccccacctccaacatcgtttgtcacatttctctcttttgcctcttcttcttcttttttttttttttttttttttttttgagatggagtctccccctataccccaggctggagtgcaatgacacagtctctgctcagtgcaaccactgcctcccgggttctagcgattctcctgcctcagcctccctaatagctgggcttatgggcgccagccaccacgtccagctaatctttgtatttttagtagagatggggtttcaccatgttcgtcaggctggtctcgaactcctgacctcgggtgatccacctgcctcagcctcccaaagtgctgggattacaggcctgagccaccacgtccagccagattgtcacatttcaacatgagatttggagaggataaacatcctaactatatcagtatgttaaatatactatcactttacaagtatttatattactggagaagatcaggtagctcttgggaaatggttaattatacttttgtccaatattaaaaatattcatatttttaaatattttacttttgctaacttagagaaaatatatatttccagtgcttttgacatttgtttctaactattccttcctcatagaaaagggtttttgtatgagaggagacatgtgtccttttgatcatggaagtgatccagtagttgtagaagatgtgaatcttcctggtatgctgcctttcccagcacagcctcctgttgttgaaggaccacctcctcctggactccccccacctccaccaattcttacacccccacctgtgaatctcaggcccccagtacca

SEQ ID NO: 11536 - DNA, 2300 bp, Homo sapien
atatatcttatatattatataaaatatgtaatatataagatatatcttatatattatataaaatatgtaatatataagatatatcttatatattatataaaatatgtaatatataagatatatcttatatattatataaaatatgtaatatataagatatattttatatagcatataaaatattataaatatatttatatttatataatatataatatatttatataaaatatttattataaatatatatcatataattataatatatatcatataattatatataatataaaatatataataaattacaatatgatacataaatatatataatatgtaaatatatatttatatatataaacatgtatatgtttgtgtgtgtgtatgtatttatgacttggtgagttctaatgtattctcctatattccttgatgtgtttggtaccacaccaagtccacgaaaccaaaacatgaatatatgttagacttttgaaagaggaataaaattggatttccattaattatgttaaatgagcatacttgcttaaaatgttttctcaccaatgtaatcatttcattatagttaaatgattatacttagtagagaaatttactttgtttggataattttagaagatgacaattttgcttctacgttatataaactaattttaatgttaattaaattttatttaatgttaattaaatgttaatgttaataaagtcattaaagcagtaatgtgtctaaggcttttttttgtttgtttgtttgttttgaggcagagcctcactctgtcgcccaggctggagtgtgcactggcgcgatctcagctcactgcaacctctgcctgccaggttcaagcgattctctttcctcagcctccagagtagctgggattacaggcccctgccactgtgcccagctaatctttgtatttttagtagagacagggtttcaccatgttggccaggctggtgtcgaacttccgacttcgtgaaccacccgcctcagcctcccaaagtgctggcattacaggcatgaaccactgtgcccagccctatctaaggctatttaacagtggaataattactaaacttgtacacttttttttttttttttaatcagatcactaaggaggaagagcgagagaagaagttttctagaaggctaaatcacagtcctccccagtcaagctcccgatacagggaaaataggtgagcagttcattgaaccatactcagtgtttcgatgtaagttatcttttatacaaatgtttagacttgggttatcttttacgcagaggcaagtaatatctactcttttattggtctaggaaaatataactaggtccgtttctaccatgaaaatctaggtcagatttgtagatcttgggagtgagtttagaacagtgcttgacatatattagctgcttatctttttattcctaacttcagattccagtagaatcttaatgtgtgggtgttttttttttgcctgctgtttccatttagtgtgattaaattgtttttctcattcaggcttcaaaagcacttagaatacaatgcatgtgatacatgtctgtaagtgagattatatgtacgggatagtatgttctatatgtactctaagtcttatatacagatgcctttatctacagatgcctaattgtatagttgccaatgtgtaataagactaagggttaaggctttaaaaagattgtttttcatttaaaagggatttaaagtactgaatattaagctcagttttttcagttgtctgatggtaggatagaaagttaagttacaagaattaaatgtaacttttgcatttaattagctttttcctgtgtcacttaaaaattatttgtattaaagtgatcacatatttctttagaagccgtgatgagaggaaaaaagatgatcgttctcgcaaaagagattatgatcgaaaccctcctcgaagagattcatacagagaccggtacaatagaagacgagggcggagtcgcagttatagcaggagtcgaagtcgaagttggagtaaagagaggcttcgtgagagggacagagatagaagcaggactagaagcagaagcagaacacgaagcaggggtaaataatatattttggttatctttttatgaaaaactccatgtttaaatgtttttaaaaattgcttaacattttgtcagtgttgtcttcatttttttctattatgatgtattctgtggtccaagagaatgctttttaaaaattcctttaaaagttttattccttgcaaattaaaatcacagttacca

SEQ ID NO: 11537 - DNA, 2300 bp, Homo sapien
taaaaatacaaaaattagctgggcatggtggcacgcgcctgtaatcccaaaaggggattacaggagggatacttgggaggctgagagaggagaattgcttgaacccaggaggcagaggttgcagtgagccactatggggccacgacactccagcctgggcaatagactaagactccgtctcaaaaaacaaacaaaaaaaagtgtgccactttagatgagaaatcaaatggaaatcctattaacagaccaaactaggagaaataatctttaaagcattctttcaacagtttgcctttttaaattcaagtactttcgtactctttccacctattccagctctcctcccagaccagacaaaaaaccgggtactaatacgacccttctgatgcactctttcccttctatttcctcaatgcacttttgcgagttatctaacagatcaccatattccacagtacatgcccatctgcaaacttttagtatagccacagcattttaaacgtagattgccatctggcatttcaacaattctgaaagatcagggataagtatctcccacaattggttgaaaaaacaggaagtattattacatcaatagataataagactaaggctttgctactaactcgatttaggggaagactactcaagccaagggactgtgatttactcaagattttctgagaattaaagcatacatataatatatatattatatatattttatacattttttatatactatatatttatatttttatatatttatatgatatatataaatatatatttatatatatcatataaatatatatttatattttaaaaataaataatatatattattcatatttatatatattatatatatatattttttttttgagacggagtttagctcttgtcacacaggctggagtgcaatggcatggtctcagctcactacaacctctgcctcccaggttcaagcgattctcctgtctcagcttctcgagtaactgggattacaggcacctgccaccatgcctggctaatttttgtttttagtagcgacagggtttcaccatattggccaagctggtcttgaactcctgacctaaggtgatccacccgcctcagcctcccaaagtgctggaattacaggcgagagccacagtgcccagccaaagtataatttttcacagcaaaaatctgaaaccaaaccaaagttccaccagtaggcaaaacttgaataaaccattgcatatctctatgttgcataagcaattgccaacacaatatacaccgtccctttcttcctaacagaacccttatactgttaggtatgaaataggttcagttataaattacatttctggtcttcccaggcagataaaactgattgggatgttacatgtgggtatgtgtatatgaaaatatacaaatatacatgtgtgtaaatatattcagatagagatataaatatatttgagattacatattataatatatattttattgcataataaaatgtattatttatatgtaatctggaaaaagcataaaaggagaaaaaaaggtcacaacatcaacatctcttacaatctcaaaaatgacagcagctaccatttactgagaacctaccatgtgccacatgtgaaaagtaaaataatgtatataaagcacttgattggtgctttatatacattattttacttattcctcacaagaacctttaatatttccatttcgcagctgagtaaaatgaggctcagaaaagtaatgttttcaaggtcacaaaccagtgatttgtagaaccaaaattttaaccaagatatgtgtgacctaaagctagggctaaatgcagaaacataatggcttgactgccaacaattattttcactaaaattatagtttgtttgttttttttttccagacagggtcttgctcagttgcctaggctgcagtgtaatgctttgatctgcaccctcaggctctggggctcaagcagttctcccacctcagcccctcaagtagttgggactacaagcatgcaccaccccatcacacctggctaattttaaaatttttttcataagagatgaggtctcactatataacccagactggtctcaaactcctgggctcaagtgagcctcctgcctcagcctcccagagtgctgggattacaggcatgagccaccacgctcaccctggccaaattataatcttttaacatcaaattgaaaagatataaattattatatgactagtaactaagggtgaagagagaaggttgtaaaatacacacaaaaattttg

SEQ ID NO: 11538 - DNA, 2300 bp, Homo sapien
ctgttctctgccttctctaatatcacccattctgttgcttgggttatctaaggcaccacccttgatttccctttccctcatctcccgcatttaatccattaattttacttatgaaatgtatttggatctgcctgtctccaccatcactctaatgcaaactagccacatctctgcctacaacacacttctgaataatcttcttacttccattcttgccctttcagtctctacaaaataggcagagttaaaacaaaattaaatcagtccttgtctgctttaaatcatctcacgtcttcccatacatgatgtggcccctacctacttgtccaacttgttgcctttatatcctctccctcatcacaaggctctttccagccacagtggcctttctcttcctgaaacacaccacaatcacttctgctacagggcctttcatttgctcttccttttgcaaggaatgttcttttccaagactttgacacacatggtcccttctctttagatgttactccaatgtcaccttctctgagagtccttccttgaccaatgtgaaatagcccccctcataatcacttttacatgattctctattattacaatagtcacaactctattaatatctggatttatttatgtcttgtcgattttagaatttaaaagctctatccccaaagcctcccgtagtatacagtaggtacctaataactttattaaatacgtgaattttccccattgcattattgtaaatcaaccaattctgattaagcactttggtccatgtcatattttgtattaacaagtcgtcaaaacactccttaaattttccaatctaagactatttcagcactctaaccgcagcccccaacacaaaatctatctatagcatcccacttaaaactgctaaatattccatatggatgaagattcaattttcttcctcctctccaagctaacgaacgcgtaggcgggaaaggggaattttactggccacctcagcacctgttacatcttcaatcagtgaagagaggtgcagatgagccagacagcacatgggagacgtggccttgctttcaggaattatatttaggtgaaacgtgagtgatttaagctagaactgcccgaatccccaataaaggccgtctacttcatttagaaaaacaaggtaaaataatctgtaggaagtaaaatacagtcggtttcactaaaataaaccgattttgaggcccccggaaaatattgcgggtgggggttggagacggtctatatataacgggaaaacgagagcagctcagcaataaaataaagctcgactcaggctctcgggggtatcctgaatctggaagcgaggtggacgaggaggagaagccacagaaccctgggacctccgttcaccgcttcggcctccaccgcaggcacttggggaaactgcacagatctctgggtccgcctatctcccactgccatccctgcaaagagatatcccccggatactcacatgggctcgagagtcttgctgagccaggacttgagtgcctcgaagttttcaatgatcattttagaaaccatccacagcggccctaaggcccgtcacactcctccgcccgcccaggtcgcggccgctacagccgccgctgcccccgccccctcctccgcgcgccgcccgcgtgggccgcggtgggaggcgccggtggcaggttcccgcgggccccggtcggcgaacagctctgcaaggaccgccgcaggccacaagtgcacggggtgccaggagctccccgtccccggcccccagcccgggctgaaacagcaacggtttgcccgggccctcccccttccctcttccccagcaaatctacccagaccggaagcgcgacacgcgcttagacccgagccttctctcagcctcgggaccaggtgcttgttggctacgtcgaaaaggcaaaagtaaagaaagcgaaggcgaagggcagctcaatgggaacgattcagggggtcttcccggctcccagcacccccaagaagatggctgccggtaaatctcgcgagaattgatgaagtctcgcggtggctcccggagcctgctgggagagacgtaaggtcggcggagaatgcgcgggtcgagtgctgtagttcgatttttgcgtgtgtgcgttgcttgcggcctttgtgcctttttattctttgcttacctttatgatataaagaccttatttcttacaaggaggaaaagaccgctgacttcagaaacagcgggaaccccagctcgtccccggtaagacggccgtggcctgtcagctggaacg

SEQ ID NO: 11539 - DNA, 2300 bp, Homo sapien
cactctttactgaccaaactggatttgtctgctttgttcatttgatttctcctttgatgtttggggggcactttgcataaagggccttttcatggaacaacttattttaaggaactcaaaatagtttaggatggctggagcaaagactgaaaggagtttctaggcaaaaaggaaggtgtctgatttatgaaagtccctttataggatgttaaataatgtgttttattctaaagataatgtggaagttgaagattttaagcaagaaagtgacatgattagatcaaaattttagaattactgctattaaaggcaatgatgatgagggcaactgaagatgaactgagatggaggtcagcataaaaggcaaagatattaaaaggcttttgctattatttaggaagaataaaagactttaaataagacagtgacagtggtatgagagatggatgggcaaagtttgagcagtcagggaaagaagtagaagcgttctctgtggaaaataaagtgaacaaatgtttggagaaagggagggtgagcaaatcagtttatctggggtatacagtatttgatagaagctttggaaggctgaagtggagagccagagtaatggagtagctggtgataaggttgaaaatattggtggcgtcagcctgtggcaaggctacaacaaacagactaaacaaatataattttaactttcggcagtattaaatttataaacaatttttattgtaaaatacatataaaacctaccgttttcattaagtatatggtccactgcattaagtacattcatattgtgcaacccacacaacaccactcatctccagaatctaaatcatcctaaactgaaactctattatccactgaaatataactcctcatttccccttctcctgggcaccctctccacccctgctcttgctaccattccaccttctgtctctaggagttttgactactctaggtacttaatgtaagtggaatcataatatttgtcctttcatgtctggtttatttcactcagctaaatcactttaatcaacaccctggttattcagtagctggattctaatttgtattctactctatatgctgtattttaaaacaaatgtcttgctttgtagttcataatctttccacctaatccttaaagacacttcactctagcaaattataaactcaagagttcctaagaacaatttagcctatcggtgtctctcataaagagcttttattgatctacttactgaaaatgtctttagattgtgaatattttcattccattacagttcatggaacgtagaccctttgtaaaattccacctagtatctaaatagaactcaagcaggaatcaaacttatttgatcacccaggaaaatagtttatttatttgggttgctaatatgaagactctctcttttgatactatataatttcccgatctgagatagggctgaatttgctctaaataaagagaattttaaaaataacaaaacttatctttagctgggggaaagtgcaggctggaaactacctgagagacgtgaaggttctctcacctttcccttgtgggcagccctcagtcattagggctctaccagcaagtcaagtactgttggacaagacactaatcctctggcggtctcattgggctccattagaccagcctgtgtttacaaacctcgttcacatcacagcatacacagaatatgatactggtagggcacttaggtaaactgaggaggtagtgtgctcggcacctggaacctacgggccgcctggtgtcgcgcacgcgggagtgtacgctctcaaagagcgatccatccggcaggaccgttccagctgacaggccacggccgtcttaccggggacgagctggggttcccgctgtttctgaagtcagcggtcttttcctccttgtaagaaataaggtctttatatcataaaggtaagcaaagaataaaaaggcacaaaggccgcaagcaacgcacacacgcaaaaatcgaactacagcactcgacccgcgcattctccgccgaccttacgtctctcccagcaggctccgggagccaccgcgagacttcatcaattctcgcgagatttaccggcagccatcttcttgggggtgctgggagccgggaagaccccctgaatcgttcccattgagctgcccttcgccttcgctttctttacttttgccttttcgacgtagccaacaagcacctggtcccgaggctgagagaaggctcgggtctaagcgcgtgtcgcgcttccggtctgggtagatttgctgggga

SEQ ID NO: 11540 - DNA, 2300 bp, Homo sapien
gttctggtgaggctaaaataatagatgtatagtactggcttagaaagggctctatactagtaagctgttgttctacttctccttcccctctttctcttcctcattacaaatacgctttcctgctgaatttgttactccactagattagcaaaatgttcagagaatctgggaggagggtaaaatagaaagaatctgttactctatcaggattcaagatgtctgcttttggtcagatctttgatttttacttttatgttctcagtgctgcattgggtgtaagaaatggtctctgccctgagcagccatctatttgagaaacagatgaacacatgaatgattaatgaaaacacatatgcatataaaattaagttctaaataaatcttatagatcgtaagtgatataaggatctaatttcagtttgctgatactggctgttgttttggtcatcgagaggcaataccatttggagtgaaattgtgagagtgagcgtttgtaccagtaataccaataaaatggcatatgtttattggcttagaaactaaaatacattaagatcaaaacaaggcaagtttaacaatatttaagtatgagatatcactgcctcttattgttagcacagtaatgctttatgctattagacatgtcaaaacggcacaaataggaagagttgatgaatgctttaaaaagaactatgaggaaggcttacattttttagttgtcaatctctcaaagagtttctgtttttattctatcttgctattttaaccagttgattaggctcacccagtggcagtcttcatttcaaggatctcctctggacattcatgaaggaaataaatggggctccagatccctttccttcccttcagggcgctccactgtaagatcatttagggaaaatgtggtgttatgttaaaaacatagctgggccacatcaagcagcatcatagtttttagggtatagaacgttggtcttcaggttaaaaggtacttttcgctgctctgtcatactcttctacttgctagagaaatatgctttatgccgtgtcatgtgtggttaaccagacagtgagatactactaacagtgctcccaagtgattccttgctgttaaatcaattggaattattgagtattaccacaaaataatcctatctgatttcattactttcttctaacgtccttccagtaacctagaactctagagacctctttctttgagagttgtctggagagtccgttggatttttaaatctcttattaccaaaaagtggaaaaaagagtttaaaaagtaaccaaagagctagtgcctgtagtctcagctactccagaggctgaggcaggtggatagcttgggccgaggagttcgaggctacagtgagccatgactgcgcctgctaacagccactgcactccagtctgggcaatatagtgagaccccatctctaaaaaaacaacaaacaaaaacaaaaattaccccacagaagaatttcagggcagtggaaatactctgtaggatactataatgatggatacctgccattacacatttgttctaactcgaggagtatacaacaacctgagtgaaccctgaggtaactatggactttgagtgatgatgaggtgtcaatgcaggttcatcagtcgtaacacatgtaccactctgaggggggatgttgataatggtggggggttatacatgcgtaggagccaagtgtatatgggatatctctgtaacttctcaatttttctgtaaactctaactactctatattagtctttaaaaaatcgcttatcttacgaatgattttgaataagcgttttgggaatgttctagagatgaatctcctccccatgtcctacgctgggtgaggaagtgtcgggtacccgggcgacctgtcctcaggtgttctaggaacgcggccccatcccttgtcagcctctgtctctgtgtggtgagaaggcgcactggctcgtgcctgcgcgaaactcgcgcacacagaaaagaccaatcaaggacgggtcattcccgccccccgcgcgccttttgcgaccgcccactcgacaggttgacaacctagacagctcccccggacttgccttacttttccatctcctcccacccagctataccctcccactggcggcgcggatggcacgccggcggagccagcgagtctgcgcgagcggtccgagcatgctcaatagcgcgcgcggcgccccggagcttctccgcggaaccgcgaccaacgcggaggtctcggcggccgctgcgggagccacaggaagtgaagagcttc

SEQ ID NO: 11541 - DNA, 2300 bp, Homo sapien
ggcagccacctacatagtcacgtgatttgttgtcttccctccaccagaaggcagtagacagacttatcccaaattgagtcttaatgggatagatgtggccaaggataagcggactagagaattgagggtgcagttgaaggtcatacaagttttgcattttatagtccagactacataggatagaaggtaaaatcaggtagcagggaatagagggcccagagaataggctcagtggaagtaaggaatgaaaaatgttgaggccagaaggttgggataaggaaccaagttgtatgaatgtaatgtttttgggaagaagcagttctagatgatgaccagatcagggattctgtcagagggtagagaactgaggtttactggaccactcaactgtagatatccatcattactttttgttttgtggctgaggtgttaggatggtttagttgtcttgtattacagtaggatttaaggttgaggggatgatattgtgggtggagagctggcttataaatcttactcactgggaataatttggactcctgtcaatgccactgataagaatagggtgatagagagtctggcaggctgtatggacagtgtgaatttcaaaagagcctcttgatttggaattgaaaatatccaagaaaattttccttgtcttcttgttcccagataagagggagagatgtgaggattagcacccttatttgagagggctttgagggatgtagtgccattcatggaaagttggagttcagttaaatgtggagagatcattttataaaatggctgaaggtatagaggagttaatcatcatataggggttctagagatagagggaaaatttttagatactgaattgtaaagttttaaattaatgtatttgtttttatacaatatattctactttcttactatatagcattttgctttttaaactttattgaaaaataattttagacacagaaaaatggcaaaaataatacaaagaattcctgtgtatattttacccagtttccccaaataatattttatcacatttgttttctgatgagttctttacctgtatttgtatataagtacattttttcttgaaacattttaaagtaaatgacagaaatgatgtttctttatatctaaatgtttcagtgtgtatttcccaaaaacaaagatgttgtcttatatagagtgcagttatcaaaatctgtagcattggtgcaatattaaacatatttcaccagttttcctactaatgtcacatagcaaaagaaaaaacatttttataaaaaattgagatctgatctgtgattaaacattacactcagttatcaagtctctttacctggaacagttctctaaatttttttttttttgtctttcattacattaatgttttagaaaggttcaggtcagttattttgtagctctgttttattatactttcactcactggttttaaaattcattggtggttcttgccttaaatagttataactttagtggttgtcaaatggtgatttcctaattccatttttttctatgtttattaattagaattctgtaaggaagagttttctcttgctccccatctattcatttatatcagtatgaattcatggattcatgttttattctatgagttataatctgatactgtcataatttattttgaggctcagattatcccagatttggccagcaggagcctgttccatctgctcttgcatccttgtaacatgttcttggcatttttgtactttcttgccatagagcattcagataatgtgaatatgtctgacttctagaatttaatttgggttgaagaagcactgtttacacttacacatggggcatcagtgggagaaaactgaccaacacaacagttactgccataatggcttactgctactgtgctgggtgcctaatgaacattttctcacagaattgcttgtggaaaggttgctagagtcctttattagccggattgttgaataaagcagttggaactttggtggcatgttgctcacaatgtgggtgtgttatccttactgtgggagttctaaagaataagtagttgccggcgcagcagctcatggttgtaatcccagcgccttgggaggccaacacaggggtattgcttgagcccaggagttcaaggccagcctgggtaacatagcaagacttcagctctacaaaaaaaatgtaataaattgaccagatatgatggtgcctgcttgtcccagatacttgggaggctgaggcgggaggattgcttgagcccagaagttagaggctgtagt

SEQ ID NO: 11542 - DNA, 2300 bp, Homo sapien
ttcacacagattgaggaaaacaatctagaagcctatagaagcttctgtggcctgttgctcatattaaattaagtgtagatgctaatgatcaagacttgacattgtttattagatattgtagcacagggttataaaaaaaaaaagcaggaagaaaccaagttgggaaattggatttctcttgttgactctggcattaactagctggataactcagacaactggcctaacctactctagttttacatttcttaactccatcaatcacgtgttgaaatggttaatacctttagtcctttgtaattttattattttgtaagaattatattgaattcatataatcatttcctatttgcaatatggcgcataaacttctagaaactgtaaaacaatcattatatctttttttcttttctcattcctgttccctttatcatctccacacaccagcatcctccctttcttactcacatgttgtctcaccatatgatacaaaggaaaccagtcaacgctgtctgaacaatattatgccatctggtaggatttccatcccactcacttctctattgctataattctcctcatatatacttgggggaattctccctagacagcatcttcaaaagctgcatattcagatttacctctaaaggtttacctgggcttttcaccttcattattcattaagaccactagaagatgtgaagacttacgcaaaagaaccaaaagagacgagaggatactttcttagagatgttcggtttttcagcttgggcaaggggagattcagttttaaatattgattgtgtctcttaaaagctgtatgacctggcaccaggtcattctaaaacacaggtcctcgttctaaaacacaggtccgcattctaaaacacagggacataaatagtactcacctagcttggctgtttaaattagttaatacatggataatgtttatagcagtgtctggcaaaaaacaaaatgtcacctagtgttagcttaattactggggaaggaaagattctcagagatccatagatactttttctgataattttcaacttatttccaatgttgctagatcttttcctactttataatattttttatctttgttgatcattgtttgttttcctcacttctttattttacctccaggttatacattttatattctacctaaatcaatcttaattcaaggagaatcattttcccattcttttattatcataggcttctgataagagaaggaaagtaattagctcatcttacttcaaggaaatatattgcccacttaaaggcaattagtagttctgtggtccaggaaaacaggatattgatttttttttgtttgatccagtggagtagttgacatgtttatgttttattctgcattgcagaaacttggaagtggggacccagttttataagtaaggccttgtttgtgtataatggaacattattcacctagtaggaactcatttaggacatgtttgttaatggtttttcttgtcttaaaataaaggattctgaaacacgttccaagtaagattgatgatttttaaaagcagcagcaagaggaaaggtggaggatgagaagctgtttctaacccccttctcttctgaatcctctctcttggctttattactgcttctactctcagttgacggtgttagtaatttacagatgggcctactgattttttaaaaagagaattcaagaaggcctcgacctctttgcaacacctatatttaaaaaaaaataactatcccatattttggaagaataacatgttagctctttaacgcagtctaagatagcatgttgggacagccttgaacttcattctctatgcctcaatttcctcatctgtaaaatactaataataggactatcttatttatgaagaattaactgtgtttgtcagccaatgataataatgcttgtcataaagtaagggctgacaaaatgtagctgtgccgattattctcttctatatgttattctgcagctatggtttatgggtgcaagaggtagttacttatcccctccctggaatctttctgtggaatgtctattgtgaccccattattcatttctgtttggatggttggcctcttggttacaagcatgtacattatggctctctccttgcctggaactggatatgagaaatgcttgaattaagatctgtgaattatcttattttcttggtaaagtgggattgattttattccaaataatatttgtttgttttctaagagaggaaacttctggcctcagtttccttagataggtttga

SEQ ID NO: 11543 - DNA, 2300 bp, Homo sapien
ttttcccattcgctcatctgccaggaaaagggacttgccgttggcgcttcggcctcttgttcattgagaaaaaagaggaaatactccgcgtgcgcttgtagaaggggagtcgtctccagctccgaaccccggagtgttcatcagcggggaatctggctccgaattctctttttttctcccgccgattgctcggaagttggtctaaagcagaggttggaaagaaaggaaaaaagtttgcatcgagactggatttatttgcacatcgcagaaagaagagaatccaagggagaggggttggtgcaaagccgcgatcacggtgaggcacgtttggctcttcccctcctggcgccgcggccggcgcgttgtgggcaacatggagtaggtgcagccggaccaggagttgggtccgtctctccccgagcctccctttctcaaatcccgcagggtcttcgcgaggatccggggcgctccccgcggacctgcctcgcccggggcttgggctcggcctgcctctgcggggacttctgtatgcaccccgtgcagtgtccccgacaggcgaccccgcgcgcccgcgctctagggggttgggacggaggacagctagcctgaagtctgctcccagccgtgcactggccgcgaattcggcgctgagagcgggagagggagagaaaaacactttgtattttccaggttgcctttgcaggcgcccgcatttctaacctgttcttcctcttggtggaaggcaaagtccagggagaggctgtccctaggcggggcgctggtggggctgggggacacaggttgcccgcctcgggggcaggagacttccagggtgagaaaaaggcagggtgccgggtggagggagtgcccgcctctgctccgtgtggacagtctagcccggagcgggtgggagcgtcgccctgcctggcgccgggtctctgcggttcggaagtgcagctctctctcttccgttcttcgtggtcagcctgggtcacacttattttatttttggaagctcgggctgacccagcgcaggaagaaagtcatcaagcggtcgcgatcattttccattacctgaaagtaggtggcaaaataggcaattttttatttccttttgttgttgttgttgctgtgttttaatttggattcttgtgtgttttttacaaagcagtttctgtgtccgtttgccccaccctagagctgaagttcttttcccctaatcctcagtctgatcacacactgttcttaatgggggtttcaaagcactttcaaaggggaggggggactgggaaagagaagaggggcggaggtagggagtccagctttgaagaaggaggccagggatcggatcggcagaaatcacttaaaaaataaaaacaaaaaagcccccttttatttcaaagatgctactttgactgcaagcaaatctgcaccgaaagtttacagctccgggagctgggtcctgcgcgcccggagtgagcagtgggaccctggaaaatgccctttttttaaaaagccatttttctttcactttaagaaatatgatatcttttttttttctctcgacccaaaaggagataggcgtgtgcagattacaggcaatgcccccttcggtcagtgcagcgtggagtcgccgtgtgtgcgtgggttggacttgtgcgtcctggctgcgtgtctcaggcagggctttcgtgctcgcagtgtcggggtgggaaacctgtgccggatgtccgaggggctttgcagaaagcctggcagtgggcggcgtgacctctgcctgggggcggagtggctccttggggctggaaggcagttctcttgagttgggggagatcttagctggggagagggaggcgggggaagtgtgctcctgcatttcgtgacacgtacccttcggaggcgcccgcggcccccgcctgtctgagtctggggatcgtaagcaggggggcagcctggcccatggacagcgtcagtccgcctggagaaactcccctggggatcggctgtgtcccacctgctggggacggtgttggggcacagagaggcgataaactaagtgaaagcaaagagcagcgttgtcttctgccattcttttggaggtgaggagatccggtttccagcactgccttgctccgaattgggagacgtttgtcacctgccttgttcgctgtggcctctattctaaagagcggagatcggataaaggtccacttttgcctgttttatactttttattgtcatataggcttgggaaagggggtgatcgttttgaaattgaagaaggactgcagtttaaggaa

SEQ ID NO: 11544 - DNA, 2300 bp, Homo sapien
ccgcgccgggcgggcgccccctggtggccagaggggccgcgagcgcagcggcgcctgcgttcaccgtcggctcaatggattcgggcgtccggcgagcggctgtggccagagaggcccagctgttttgcgcccgcagtcccgggacgctcgggagcaggccgttgtagcctcgtccaccctcaccttaggggtcgggggacgtaggccagcgcccggaaataacgcatgccacttcccttgccatctctggttccaaatccctagagaaagaggagagccctagagaaacatggagaagtcagggtgagaccgcagcgaggcagagagcgcgctggggacattctagagcaggagctcagaagaaggcagctagttccagggtagctgcaaatggattgggttaaagctggacgagtgaagcaccatgttttcctaacactgctttcaagaacaccccgcatggggcaagatcgcaggtgctattcgggaattttgaccgtacaagcaggtacttccctgtaaagtaaaagcattctgtaagtcgctcgacagaatgcaatattaggcgtgtgtatgcgcaagttttaattttccactggtgctcccacgtgaaggcacatttcttagtaaatgaacggcagctaggacagtgcatatgtatgcattttctatctttattttttttttgtaaatgggaaagaatagtgcaccttcaacatggacaacagaatcttgagaaatgttctaggtggcaagaaaagtgggaaatgaaggatgacttttagttaagggaagaaggaaatctgcagtgagccaacccttccctcccccccgcccccccatttcggaagcccatgctgtcgccctgagtaatcttgttcctgtctattaatgaattaagttaaaaggcttagactgtagactttagctactgcatgaagcaaaatagtaaggaagctcttcaaaaagcctccattcatagataaccccccttaaaaatgaaattctaataaacggaaaaactacaagtcgacacaatcaaaagcaaatcccagcaagagcagaaggtacttgaaactcgaatctgcattccgttcctcccgtacaaggctcggaggtgggggaggcggtttgtgctggtgcctggtgtataatcgggttaatccagtagacaaagaataaaccaatagccctcccacctcacttcccgctccccttcccctcccccttcttctccccccgccccagcccccgtcacccgctccgcaaaggggaacagaaaaggggagaggtagacttgaaatggattctggataaagtcttaaaacctgcaacttgtttttcatgctaacactgcgtggcccagattagtcttaaatgttcattcccctttcctggtggcaaggagaaagttccctaagtcagctcgagcctctggctcgtcctcattgcctctgggcaaaccttaaggtcagtgtttccttgaaactagataaactgaccctgcagtgcccagcccggccccgcgggcgccccgcgtgacggcgctcgggcggcaggaccggcctggggacgcgcggggcggcgcggttgcccttttgaatgcctcctgcggctcggagcgctggcgggcgctggagtgtgagtgaatgtagccccgcggagccaatgagctgggaccggatgcgatatatcctctgggacaacaactgctctgttccgcctcggatccacatgacgccatttactgctgccgcggccgccgcagagctccctgcctcctccggaaaggcgagggcgcaggccaacggcgagccccccccgggcgggccccagaccctcctcctcctcctcctcctcctcttcctcctcctccgcacccaccgcccccgcctcggcctcgctgcctcgcctccacaacgcccagtctgcaccgccgagagctgcgcgccgcagcgctagcggaggagaggggccggcggagcgcgcagcgcccaggcccccgcgcccgcccggcccggcccggcccgcgcccccgcgccgcctccgctacgacgcggccccggccgcaccacttggcgatctggctttaggttctccgtaaggccgttttcttttcccattcgctcatctgccaggaaaagggacttgccgttggcgcttcggcctcttgttcattgagaaaaaagaggaaatactccgcgtgcgcttgtagaaggggagtcgtctccagctccgaaccccggagtgttcatcagcggggaatctggctccgaattctctttttttctcccgccgat

SEQ ID NO: 11545 - DNA, 2300 bp, Homo sapien
gataatattctgtaagttgaaaaaaaatgtaaccttttaaggttaaaaatgtgggttttagatgattgtcctttctaaacagccagcatttttctgttttccttgagtcttgcctaaccctattaatcacagacaccataaggctgatttcctttctcagagtggtttcttgggccaagatattttagacctgagtcctatttaagaagaaacagaaaaatgatttccttcagttgaactcctccacatctgcagttctcaactgcatagcatttctttagcataatggtttcaaattgattaaggtctttttttttcactctctacatgtggtaatgggtcaaattaaatgagaacagagttatttcagaagtgtatcaggatgtctaaaaaagatctctctagtgtacacacgtgcacacacacaaacacacacatgcatgcacatacacacacacactgaaatgtcttcatccccacctcccttcactgaatttcaccagaggaatacaacaaaaatattttgtcatatgaaaacattgtatatagatatgaaattttctccacccacctagaaattagattctgacccagaaaaaaaaatcttgtaaacatctttaagaccttccctagccttgggaattttcccaaccccagtcctttcccccaaatttttactccccatctttctcaaaatacacacttccttgaacatttgctcttttgcacaaaatattagcaagctcgttgcagctgtccaacttgcaaaagacctaattaaaaaggcaagtggtgtaaacatatcctctctgcatagagtgaagaaagggccaaacagtaactctatttaaaagacctaaaaatttcaaatcctaaaatgatctataaatattttaggacgtattgatgtgaaaaggtgtcgactctgaaaggaaaagtcagcaaaagaggcttcacggaagcagcatgttcacgttttcttccatcccagaaggtgatattactggatttttataagctcagagtttggaatctgttgtttccttaactggaaaaagcctgagcttcgtgtttccccagcatcagtgacccaacaagcatctgcgcgaagaggagctgccggctacctgcagagagcgttctcgctgagctttagagtccagagatttctatctcctcctctcaaaatgcaactggttatttacttgtaaacatttaaattagttcaaactgatgtgaaaactttgtcagtggggtgtgtgtgtgtgtgtgcgtgcgtgtagtgtgcgcgcgcctgcctgccagtgggtttttaacagcactcacaaatcatcttgggatttttccctgccccctctcccttcttttccggttctcagttaaagctttcgggactggaatcaaggacttcagcatgcattgtgtttcaccctccagagttaaataacattcaagaaatatcaaagaacctaactctcaatgaccaaattgactaaatttctgcaagttttaaaaagtatatgcctaatttatataccttgcaaaaaaattcatactcaattatgatattatgtaacatatatgttccgaaagccactttgaacataccaaaagaaatgtttcaaagacatcaaatagcgtaaaacactgtgccgcagagaaggaagaaatgcatttaaagaaccgatgaaaatggcgtgcagtataattacctcaaattgctgttcgcttgacaccctgacactaattttattcaagccattgggaaataaatgttttaaaagcactcctttccgaatggtggagctggtgggggctgtgaactcgttaaggaaaggaaagggtaaagtttccagcacgcaaaaataatcaaataatccatttaaaataagcatctatgtagatcgtcagccttttatgcccacatttttaacgcttgccctgtacgtggattgatttttttttctttcagcattccctagccagatggatttttgctactgcagatcagcagagggtgtcagatctttcagagtgcaccaggctggaacgagcagagcttcttagcaactctcttctccgcccccctcccctcattctcgcgctctcttcctccctcagacaactcgccccccgccctccgcccccctccacgtaattccgaaagagcagaagaaagagaaggagaacaggaaaagaagagctagtaagcgagagcgagagcacagaaaagaaaaaaaaaagccttaagaggaccgaaggggaggaaaggaaaaggatggacaaccacaaaacgcagc

SEQ ID NO: 11546 - DNA, 2300 bp, Homo sapien
ttactttcaggattgttgattgggttctggtatgttttacctgattgtgaattttaatttgattcagttactgttcatatttcaaacaacaaaaatgaaaactgattactattttgaaaagttgaatagtcataagatgtgtttatatttcaatttagtttatataagtttaaagtataatatttaaaggaaggaaataaaattagatctcattagagctataaatgtttaccttgcataactgtcatttaaagggcaaaacctttttaagaattgctgtttcagatgcatttgttatgtgtttcaggattagaatacgtgatgttattctgaaccatcctttttttcttttactgaatttgaaatatcatcaaaaagtttaatatggtacagtttgtttcagatttcattgtttgcgactttaagccttttaataaaggcttaaagctgcttaattatgtgatgacattccgtgccctaaagactgtttcaagacctcattaggaagtcatttgctagaagtttatatgaagcattgtttattcttttacaacagcctgaaatgtgtgttaaagattaatcttgcttctttagtttttatcatttccacctcatctataacgtaattaagaagcagtaagcaatatactgcttctagaaattcaatattaaatataatgatttaagtgaaatttgaatggtcacacttaagtgtatgtatctgatactattacgcttatacaaactacccttgattgaatagttaaaagagttcttatagtactgtactttataacatgatcaaagacgcattttcctcaaggttttcaaaataaacaataaaattagtatatatatatatatatagccaaaaccgaagcaggttaaaacacagacacagttattagatgttattgtgtgacacccagttcaacaatataaagacaatgcatgctacatgcgtacatgcatacacacatacacatatgcacacatacattcttttatcattttttacattccctacagttctctatgcttacggctaataactatgtaattgtcttttactataatcctccagccttaaatgtatgaccataaggttaaaaaatattttcaaatatataactttgcatcacagtgaagtatcagtgctctaaggcagcatctctctcatctgttaaaatgcaggttattcatcagatgtgagcacaaattttatgatataatattttaaatcccccttgacctaaattttatattttgaacacaatgcaagttaaaagtcagccagacttgcctgtctgagtattaggaaaaaaaaaaaagaaacaaatgatgtaaatgcagcaaggtacccatattttcatggtaatccgtcatttgctttttggagaaaaacctattattttgaaaatatcagcttcatctcctccccagttctgcccactaaagtcccttgctattgcgttttattttacagaatcggatttcatcacatgacaacatgaagctgtggattcatctcttttattcatctctccttgcctgtatatctttacactcccaaactccagtgctctcatccagaggctcttgtgattctctttgcaattgtgaggaaaaagatggcacaatgctaataaattgtgaagcaaaaggtatcaagatggtatctgaaataagtgtgccaccatcacgacctttccaactaagcttattaaataacggcttgacgatgcttcacacaaatgacttttctgggcttaccaatgctatttcaatacaccttggatttaacaatattgcagatattgagataggtgcatttaatggccttggcctcctgaaacaacttcatatcaatcacaattctttagaaattcttaaagaggatactttccatggactggaaaacctggaattcctgcaagcagataacaattttatcacagtgattgaaccaagtgcctttagcaagctcaacagactcaaagtgttaattttaaatgacaatgctattgagagtcttcctccaaacatcttccgatttgttcctttaacccatctagatcttcgtggaaatcaattacaaacattgccttatgttggttttctcgaacacattggccgaatattggatcttcagttggaggacaacaaatgggcctgcaattgtgacttattgcagttaaaaacttggttggagaacatgcctccacagtctataattggtgatgttgtctgcaacagccctccattttttaaaggaagtatactcagtagactaaagaagg

SEQ ID NO: 11547 - DNA, 2300 bp, Homo sapien
agaacagcagacttgtctacgatcttttcagatgtgctagtgtatattttaactaagtttgagataatgctgagtaattcattatcaacattaccactttaaattaaaagttatagattgctcctcaaataatttttttttagttttttattcccaatgaaagcttatagaacaactgaataatttttttttaaaaaagtgtgtttagtcaatatttctctcccttaccatcatggggaattgaccagtaattactgcaattgcccagtaatttatgcactaaaaagacaagattcattatgtaggaaaggaattcatgataaaaatcttcaaatttctgctatgtgtatatgactgataaaatagatacatgatcaaattgaaggacatgagagaaacatgtgtcaatctacaaagaaattactttcatttgtccatatgtaggcttgaaaaattttgctccacatactatgctactagaatatttctcctatgcacttgactgcaaaacctaaaggaatgcatgtgaaaaattaggactacagggttgggagggaaattattcttgccccttctttttttattgattaaaattctaatttctaactatctatctaaataattaccttgatttaattaatttggctagcagctagcaggaaattgtgccaaacactaattatttatatttaacttcacttatactcttcattctctcatttttttatttttattgtattttcgaaccccctcctctgtatcatcatctcttttccatgttaaagcacaaaatgtcattaaaataaacgagaaacttaattactgggaaatataaagtaaagtgagaatactgaaaattcccacagagcccttatgtgtttagagccaatataccaccctgagacgataaaactatatcaatctgagtgtatgtcattaaataataatgtgatattcttctattttgatgatttaaactatatcaactctcctttttaaaaacagcactttctgaaatgacacctactattacatagaaggcctctagaatctgtatttattctaaacagaataaacaaataaaagacagcatctagtatatgcactttggatgtgaaaaagttcaggaaggtaggtaagaagaataactttttaaaccacaggctttttgagaaataaggaatctgacaagagtaataatggtgatgattcagaaacttttaagagctgaagaaacacgcaacttttaagatataacctattaagaataaattctctctgagctagcactatacaaatcaggttattgtaatatctacatatttcacttgtttcattttatctgtaaagatataatgttatatttttgaaagtgataaacagaactttatcaatgataattattttgtgtttaaagatttttaaatatattttaaaataattatgcttttcttctaaataaatatattaaaataactgaaagatcttcatttctaagtttaattattgaatattagctctagggaaagaaataatgaagtaaaaacttagagtccctaacataaggctttaaaaaagttaaatggtgaatacaaaaatacaaatattgcagggaagcagttcgtgttaacattttacaatctagttagtgcacaatttcaactataaataccagatttaaaaaaaaaaagaaaaaaaagaggcaactactctataggcagcattcttgtgtttcctgcacacatgtgtgcaaacactacagaacagtgttagttgagaatttaacataacgtattatttagcttgctataacacaatgtactattaagcatttaaaatgacgtgttattatttccatcaaaattcacttgcactatatttggtattgaaaggagtggaaagaccatttgcagaaagaggaggagttgagcagtcccaaggtggagctgtctcttgtgttatatgacactggcagattaaaacgctctgatggggaagggcttaaaggctgagtcaaaagccaagaagtctctttatttacgcctacctcccagcccttggcaatctgactaataacaaactgagctaacaagaaatactagaaaaggaggaaggagaacattgctgtagcttggatctacaacctaagaaagcaagagtgatcaatctcagctctgttaaacatcttgtttacttactgcattcagcagcttgcaaatggttaactatatgcaaaaaagtcagcatagctgtgaagtatgccgtgaattttaattgagggaaaaagggacaattgcttc

SEQ ID NO: 11548 - DNA, 2300 bp, Homo sapien
tcagagagattatgtgcttattttacccattgtattgctgatgtggccatatttaatataaaattcatttaaatcataaagagacacatctaatacttgaatgagtatataatttatcaatagcaccaacataatgcataattattattgtatatgtttaccatgaattatattattggtaaccattacatataaaaagttaaactttatactcttatattaatgtattttaaacacaatatttatttcttctgtagtaaaacacttgtagcatgtagaaaataatcagcataaacatttaggtgtaaaatatatacataagcaacatttttttggctgccactacataaactgcactaaaataattaataatgattttattattttcttaaaaatattagatgcatattcttatttaatttataaacttacctcaccaagtcatattataatctatccccattttacatatgaggaaaccagggtagctaggtactatgctaggaatttacaatagcataggaaaaatgcaaaagcattatttgccttcatggagcatctattctagcaagaaagacaaacaccaatcatgtgaagaaacaaatgaattaaaaattactagataaacaataacaaaaacagaggtggagaaaacagtcctaaaggattgacagcaacagtgagttgcttatatatataaggagttacttataaaaacaaccagaaataatttctttaagtataaaggaataacaagtacaaaagttttgagtagagggaacaatcctagtaattctagtaattcatagaataacaaaggctagaattctgtgagtgtgtgtaacataatgaagctggaaggataaacaaaagctatatctcttgatcacttataacctgatcacttataagcctgatcacttataaccttgatagccacgagcacggaggattgaaattgagcatttcttcctgtgctgggctgttactttgtacatgcgtacgagttcagagagcattttcatcttctacttattcttctctttcacagtactttgagctattcaggaatagggcctcctctttatttatccacaaatcaggcctaatactggtgaatttttaaaccacaataacttaaatgaatgatttcaactgtagaagatttaataatggctgtttccactcactaatgtatatgaattacaatcagacacacagaaaatttgtaacatcattttaaaattctgtatcaattgctactctccataaatcatttttagagtaaatgtaatcttcggccataaatttcatatagtaagtgtaccatgccttttcattaaacgagtagtgtaatataatgggcaaccaatctgtttaacatctttttaaaaacatcaaatatttatttaaaaatactaccaaaaatcttacataatatttgattgtattgtttgcattatcattttcttcagatattaaaagatgtatatttaaaaattgttacattcatatgggcccttttgtctgataacatataataccactgaaaatttttcataaggcattgagcttaatatgactaatttatgtcttgctcaaattgtatcattttgatctctcttcaatgcattcatatctattccttttcgtttttatatgtcacaaaaaaaatcatatcacaaaacatctgccaacaatttgcttttgggctgagtctgatagataagagacagggcaaatttggaaaggcttattttttccttgtgattttaacattttattttatattcctgttttttgctgcactccaaagtcattttgaccctgagcagaaaagttcagccagacttctttttttctgtccttctatgtcttcattttttaccttgcggttttatttttaaatgttgccaatttcaaaacttctttttttaatcaaattcttcattcagtacctattttctggatgttgctctttaaaattgtaattgccaattttggtctgatcctcatctagctttagaaaagctcctctaccaagaaggagaaaaaactaccgattaaaatctaacctgacggccgggcgcggtggctcacgcctgtaatcccagcactttgggaggccgaggcgggcggatcacgaggtcaggagatcgagaccatcccggctaaaacggtgaaaccccgtctctactaaaaatacaaaaaattagccgggcgtagtggcgggcgcctgtagtcccagctacttgcgggcgcctgtagtcccagctacttgggaggctgaggcaggagaa

SEQ ID NO: 11549 - DNA, 2300 bp, Homo sapien
attaaccagattataacacagtattatcccaaatattactaagaataaaacaatatcaataataattaagacgtaattaattgcaaaataaagtgggtaaaatatatttacatggagaaactaactacatagttatcaaaggaacaggcacatgtgcactcagcctgcactgggtcacttactattatcaacttttctcttatacccgggatgaacggcaggtctaatattacaaatattgaaaacatgtcttatgaaagtaaagacccctttttggggatggaagtgtctggtttcatggaaagacccaagaatacttactgtagagatgactctagtggagtttagcagatgactcttcaagaaactcgctttctatcgatattgcatttacttaggggttttccagctttttagtacacaccagatgtattcacaaacattccctctgaaagtctttcacattcccttgtgttgcctagacacacctataaaacgtaattctattaaagagaaaagaaaagtagcgcccttgtttgcagctaggaggaaccactcccttttccaggatccttaacagtaagtacacgagacagcagcattctgaatggcaggaggaaggcaggcgatcagcacagggctggaatcatctgttcctgaccaccagcaagcctggcactgccggggttatttccactcctccctttcccaatccgagaattgcacagtcccacgctcgaattacacacatggtccaagacttctctctcttcctacgaatgtgacatccaagggggccccggttgcgccgccctagcccagggacgccttcgccctcggctgccatctatcggccaccgagcgcccgcttcgccccgggcccatcatgtctgctgcagcttggctcgcaccagaggcgcgacaataaacaagtgcactggactgggccctgcacccgctccggagcagctgtctcagagacccggtgttgcttaccgcgttgccacctcctcggcgcccgggaggaagacgcaactttctcggagttttttttagagccaccgggctgccaggacaagccacaggcatagaacgacgcggttgctgcccgccccccccttcccccagaaaccccaaaggatgtcggtgatagagagttccaactaatgacgattgtgcgccgcatctggggaagggatacagaaaaaaaccctgcaaacaccgtgaggatgaaactgccaaagggatgcaagagcctctcaaatactaattaggggccgcggcggcggcgggctcggcgcggagacagcgtcggcgggatcccagcgcggtggtcgccgctgcgctggggggcggaggacagcgcaggagctgcagccgccgccttcgctggagcagccgaggggccggtgccacctttgctcgccccctcactaccatgtacagtgtgcgctgcaagaagaaggcgggagatgcatgcacacccccgcgacccgctccctctggctcgtcccccggcgtgcgccactgaccaggggggaatgtggtgaagacggcgaggaggagagccgaggggggaggggagggccggccggcgcgaacccaggccggagggtgcgaggagccagaggaggctggagggggcggcggccacagctgggtcggagaaagttgccccctatgcagatggcaactgtgagtacccctgtgggggggagggtgcagcgaaggctgccagggaccccgcgatcgcgccttaacacgtattggagcgagtgtgcgagtgatcatgagtgtgagcgggtgcgagcgctcggcggggctgaccgtcacgttggcggggccggcggggccaggcagtcttctccgcgtccccctcctcccgctccgtgcctcccctcccagcagctccccctccccgccccgcccggctccggctcccggcccctaccgcgaggcgcctctccagccggacctccgccgccccctcccgccgcctccctatcccgccgctgcagaacgccccccgctctccaccccccaaccctgctgcccgctccgactaccgcggagagcaccggggagagccttttggggagccccggaacccgcggtcgccaccgcggcggcggccccaggctggaggcgtccgggcgcctctttcctccagcctctgggactgcgctgctcgcagtctcctcgccctgcctgggcttgagaaacctagtgcataccccaaagagggtttttgtgtatgtgtgtgtttttaaagggtggctatgatgactgggccttggaga

SEQ ID NO: 11550 - DNA, 2300 bp, Homo sapien
ccgggcacagctgctcaagcagcagcccaggcagaagcacccggagttccaggacgcgaggctccccctcccccaccccgccccaaagagaaggaagggaaaacggaggaagaaggggagggaggagagggaaggaaaaccaccccgccacatagacacacacacacacacacacacacacacacacacacacacacacacacacacacctcttttgcaaagtaaacgatagacttacccagtctcacatctccaaggcccagtcatcatagccaccctttaaaaacacacacatacacaaaaaccctctttggggtatgcactaggtttctcaagcccaggcagggcgaggagactgcgagcagcgcagtcccagaggctggaggaaagaggcgcccggacgcctccagcctggggccgccgccgcggtggcgaccgcgggttccggggctccccaaaaggctctccccggtgctctccgcggtagtcggagcgggcagcagggttggggggtggagagcggggggcgttctgcagcggcgggatagggaggcggcgggagggggcggcggaggtccggctggagaggcgcctcgcggtaggggccgggagccggagccgggcggggcggggagggggagctgctgggaggggaggcacggagcgggaggagggggacgcggagaagactgcctggccccgccggccccgccaacgtgacggtcagccccgccgagcgctcgcacccgctcacactcatgatcactcgcacactcgctccaatacgtgttaaggcgcgatcgcggggtccctggcagccttcgctgcaccctcccccccacaggggtactcacagttgccatctgcatagggggcaactttctccgacccagctgtggccgccgccccctccagcctcctctggctcctcgcaccctccggcctgggttcgcgccggccggccctcccctcccccctcggctctcctcctcgccgtcttcaccacattcccccctggtcagtggcgcacgccgggggacgagccagagggagcgggtcgcgggggtgtgcatgcatctcccgccttcttcttgcagcgcacactgtacatggtagtgagggggcgagcaaaggtggcaccggcccctcggctgctccagcgaaggcggcggctgcagctcctgcgctgtcctccgccccccagcgcagcggcgaccaccgcgctgggatcccgccgacgctgtctccgcgccgagcccgccgccgccgcggcccctaattagtatttgagaggctcttgcatccctttggcagtttcatcctcacggtgtttgcagggtttttttctgtatcccttccccagatgcggcgcacaatcgtcattagttggaactctctatcaccgacatcctttggggtttctgggggaaggggggggcgggcagcaaccgcgtcgttctatgcctgtggcttgtcctggcagcccggtggctctaaaaaaaactccgagaaagttgcgtcttcctcccgggcgccgaggaggtggcaacgcggtaagcaacaccgggtctctgagacagctgctccggagcgggtgcagggcccagtccagtgcacttgtttattgtcgcgcctctggtgcgagccaagctgcagcagacatgatgggcccggggcgaagcgggcgctcggtggccgatagatggcagccgagggcgaaggcgtccctgggctagggcggcgcaaccggggcccccttggatgtcacattcgtaggaagagagagaagtcttggaccatgtgtgtaattcgagcgtgggactgtgcaattctcggattgggaaagggaggagtggaaataaccccggcagtgccaggcttgctggtggtcaggaacagatgattccagccctgtgctgatcgcctgccttcctcctgccattcagaatgctgctgtctcgtgtacttactgttaaggatcctggaaaagggagtggttcctcctagctgcaaacaagggcgctacttttcttttctctttaatagaattacgttttataggtgtgtctaggcaacacaagggaatgtgaaagactttcagagggaatgtttgtgaatacatctggtgtgtactaaaaagctggaaaacccctaagtaaatgcaatatcgatagaaagcgagtttcttgaagagtcatctgctaaactccactagagtcatctctacagtaagtattcttgggtctttccatgaaaccagacacttccatccccaaaaaggggtctttactttcataaga

SEQ ID NO: 11551 - DNA, 2300 bp, Homo sapien
agtgtgcgagtgatcatgagtgtgagcgggtgcgagcgctcggcggggctgaccgtcacgttggcggggccggcggggccaggcagtcttctccgcgtccccctcctcccgctccgtgcctcccctcccagcagctccccctccccgccccgcccggctccggctcccggcccctaccgcgaggcgcctctccagccggacctccgccgccccctcccgccgcctccctatcccgccgctgcagaacgccccccgctctccaccccccaaccctgctgcccgctccgactaccgcggagagcaccggggagagccttttggggagccccggaacccgcggtcgccaccgcggcggcggccccaggctggaggcgtccgggcgcctctttcctccagcctctgggactgcgctgctcgcagtctcctcgccctgcctgggcttgagaaacctagtgcataccccaaagagggtttttgtgtatgtgtgtgtttttaaagggtggctatgatgactgggccttggagatgtgagactgggtaagtctatcgtttactttgcaaaagaggtgtgtgtgtgtgtgtgtgtgtgtgtgtgtgtgtgtgtgtgtgtgtgtgtgtgtctatgtggcggggtggttttccttccctctcctccctccccttcttcctccgttttcccttccttctctttggggcggggtgggggagggggagcctcgcgtcctggaactccgggtgcttctgcctgggctgctgcttgagcagctgtgcccggagcctccggtgcggcctgggtgctgggctccagtccgagaggctccatgctgcttactgcagggacgtacagggcggtgatccagtatctaaattctttgggagaaaatgaatagttcccccgcccccgccctccaggaaaaaaaaaaatctgagaatctgagaatgttcagcgcacccgcgaatttgcatcggaggtgcgtttccccgtcagaatgtcagcctccccaggctcattcaactttattttctcaaatttttggtctcctttgctagcaaggaggagggggaagggagtgggttgagaggaagctcttcgacccttgctaactagaactgaattaaagttgtaaacgctggagtttaatactggctggactgaatttgcaatgggctttcagatggggtgggaggtgaatgggggcggggaagcacagggagggagggggaggggacccaacctcgctgaatggatgtgcggatttgatccagcggagaactgaaatttcaaggtaaacgttttgctttcactggggtggggatgtttttgccgcttttaagccgggagacgtttaccgttgcgttgggaggtcggggatacttgcgaggtttatgcactgtggttccaattcatctcgacacgtctgggtggccacacgtgaatgattcgcaggcacactgatacatgtgcgtttgaatgcaggggcgtttaataacgcgggctggagtcgacttggggatcaggagcaaggtctccaggcttgaacccgctgtctcggaaacatcttggctttagtttggagttgcaattcgatattagacttcggtagtgaggcaaaggcaaggttgaccagagaaaaggcataggttcctagagtccagcatttctatcaaatgtcctccaccccattaaccaacgcagcatgcgcgcgcgcgcacacacaaacacacacacacacacacacacacacacacacacgctcattccatttatgtccttcctttaagagtgctgctgttgatcagaagtaggaagtggaaggaagccttcaaggggacaaaaagagagcaagaaaaaaaagggggagggggtcatattgattcctgtgggagatgaaattcggatattaaacaactgacctaagtcgcttacagttcttcctcccacctttctattttgcctcttaatcagcccaggcgtcctttccctgagattaaaaaaaagagagaggggagcgttaacaattaaatgtaataagcaactccaaagatggggatgctgtcgaggtggtagttccgtgcaaaccttgctattaccgttgcaaatagacgcggagcccaaggtaagggaggctttcgtgctgatccttggtgtactgattcccggtaagcggtaggaacgtcctttttaaactctaggcatcgggaggtattcggagattgcggataccttcgctgagttctttgtaatccatcgtgcagaactatttcagtggcttaaagatgcggtttggtagcgtcgctga

SEQ ID NO: 11552 - DNA, 2300 bp, Homo sapien
aggttaatgatgtaaacaagagttaagttcctagggcatatttctggtcacgaaaacatcaccaaatttctaaataaagagcaaaacacttctaatactaaacattgaaatgtatgtgaaatatatatatatacatatatatatgaatgattattaaaatcaagtaaaattattttttacccaattatttcagttcagggtctccagtggctgcagcctatcccagaagctcagggtgcaaggcaagaagtaatcgtgggaccaggcgccgtggctctcgcctgtaatcccagcactttgggaggcagaggctggtgaatcacttgaggtcaggggttccagactagcctggccaacatgatgaaacctcatctccactaaaaatacaaatattaattggatgtagtggtacatgcctgtaatcccagctactcgggaggctgaagcttgaacccggaggcagcggttgcagtgagctgagatcgtgatactgcactccagcctgggtgagggagtgagactctaaaaaaaaaaaaaaaaaaaaaaaaaaaaaaaaaaagactaaccatgggcaagacatcgtcccattgcagggtgcactcacacacacccacactcactcacactgggacagtgtagacacaccgatgaacccaacatgcacatctttgggatactagagtaaactggagtgcttagagaaaacccatgagaacataggaagaacttgcataccccacacagacagtggtccctgcagggtttttctgtttgttggttgtttttccttcatcaagtttgtaatgaaacgatgttgaatgataaaatattatttgaggaattgttgtacaaggattttggcatttgtctgtatatggaaatcaaagacattttaaagtgattataaatctttgtacatgttgacaatattcaattcagttaaaggctttatcacggtacattgtgacctctctttaaatggttacattactttgagctctgaaaatttgttatacttacattgttctaattgttcataactaggaattcactgactttgctttaatgtatgctaggaaaactgaagtagataaatcatacttcccctttcagtctccttctctcttttggatttaattttaactcgaggtttattaattacagaagttacactcatgttgctgcaaatgtattttttctagttgttaatttgttcatgacattctgcttgatgatagtaatattatgatgaaggtgcctcagatatcaaaaaagatttcaagtctatagaacgtacctctagctacagagtcacaggatatgtgacagcaatgatattaggggatgctgagctggaaacccaattcagcaccagagacagaaatactgtattttgactcattcatcttacatggaagatgaagcctgccaatcaagtagaaaatgtaggcctccaagacaataactcacctgcctttttgtggtttatatttttcatcttggttaaaaagtgtccattgataggggatttaatcaaaacattaaagaagacataatatagccaccaaatctaattatttccaactactagatatcagagctttaaaaaaattgtttttaactgcatttgcttcatttttcttatgggatattaatagaaaaatggagtgcatttctaacagttgcattttttcatatgtgtggctatgtttatgctgatattagttaaaagttctaaaaacaagcaaagaaaatatacacagttttttggcattgattggttgatataataattatgtatatttacttaatatgcataatttaaaaatgtatatttttatgtatatatatttatacgtatataattacgtatatttacttaatatacataattattactatgagcttgggcaaaaaatgtattttggcattccactgttcagttttaagtcatttattggtacataattcttttatttctacttcaataaatataattaagttttgtgaaagccgtgttctaatgaacaagtaattctttcttttaaaatattccttttaattctaatttaaagtttcttaagtaaaaatatagctcttcaataataatattataatgtgtttctcttctaaaataaacagattttatactcattattttaaaatgtgatcaaaaccacataattgtttttagtcttctgattgggatttttaaaaagaaaattcaaagtttggcattaaatatattttctgtaagataatataactacatatgataaaatgattaagtactctgatag

SEQ ID NO: 11553 - DNA, 2300 bp, Homo sapien
acttttctcacacagagaaaggggtgatatgaaaacagaggttagagtgatgaggccacaagccaaggaatgaaggcagccactaacagctcaaaaaggcaaggtgtagattctctctcagagcttccagaagcagcacagtcctcacaacaccttgattcagccaagtgatactaatttcaggtatctggcctttagaactgtgaaagaataagtttatgttattttaaccacaaaatttgtgatagttgtgacagtagccacaagaaactagtatggggttaaagcaaaatagtagcttgaattgtgttttgtgaaaaatagttgttcaatagctgattgattttctgagaaaataaatggagaactggttttaaaaacttttgaaaaattctacacgtacatgtatacctacatgataaatcacaatattattaaaatactgaagtctctgaaaattcctgcaattaagaaacctagtttagtacgttaactctattactaaaattgttcaatcactgacatcttactgtttttgtagaagctctaatagtttggcccagagttccataaaacatagttttgggaaaagagtcacagtgaggcagagccgattgcctccagaggagcacattgcaagctgagctgactgttcaggttgctctccccatcaggaagtcttgtaccagtctgtggcaaaaacatatttgaagttatacagtaattttcgtgcatgacagtaacatttatttttaaaatgtgtgcatataagactgtatgtatttatgaagtcattcaaaatagccatagctttctatgtgatgaactctagtttccatagcagtaaaaaaaaaaaaaaaaaaataagaaaacacatcggggaaatcgcaagtacttaagtactgatgaaatttaatgagctacaaaaaaaaaaaaaaatgagctgaaagtatccagactctaaagaatggacattgttcttaggaatgacacctcagtcagcatctcagtgccctttgtgacttcctgaactgagattacagcagtagagatgcaaaggaggaaggacaaatgagatttaatccctggatatgtgtgagaagtagggaagaaagagtgccatagatgagtaacatatctctggatgtgataataagtcgggaaagctgaacccgggaggcggagcttgcagtgagccgagatagtgccactgcagtccggcctgggcgaaagagcgagactcggcctcaaaaaaaaaaaaaaaaaaagaaaaaaaaagaaaaaaaaaagaaatttcaaatggagattcataaattagataaaggaggacttggtaggcacaagtgagctgagtttcagacaagtagcctttatggtacttgtgtgtttaggagctacatatctgatctgaactcaatacagaatttgggagctatggtaaactgaataatggcaccccaaaaatgtccatgtactaatccccagaccctgtcaatatgtttccttacattgcaaaaagatattgtataagtgattaagttgaagatattgagttgtgagatcatgttggattgtctgggtgtgcccaatgtaatcatggggatccttaaaaggacacaaatatcagagattagaaggaaggcaatgtgatgacaatggcagagactggaatggtaggaacacaagccaaaaaatgatgatgctatgagtcgttcaaagataggaacagattctccctggagctttcagaagggactagcttatggacaccttgattttattcccacaagactaattttggacttctggcttccagatctgtaaaataatatatttgtgttgttttaagcaactgttttatggtaatgtgtttcagcaataatacaaatctagtatagggaaaaaaatgagtttggtcattacatttgattatatggacaagataaacacatagcattataagagaactacagatgtttagtcaatgatgaaacttcttaattaattaatttttgaggggttcttaaagtatttctttaacattgattaattaaatttataataactacacagtgtgtgtattgactataatatttaatctaacacaactctttacaaacaatgatgacaacttttttatattttaattgtgtctgcatctatcagagctctgaatccaacttaagtctccttttcttgactcattattacacaatttattgttttgttctaaagagttgcagataacactttgtttggaccataagatactaatatataaaaggaggaacatttataca

SEQ ID NO: 11554 - DNA, 2300 bp, Homo sapien
gagttttcctaattttttaggccattttacttcagagtttctctctttaaagtcaaaacaatcagataaatttgactttttaaaaatattttgccaaataacacagaccagcagaataaaacaaggaaaatagtaggaaaaagcaggagattatgcaaaatagatagaattatcagagaaaaactgtgtgggtctatccgtctgtgtgtgtgttagaaaaaaataaaaagaaaagaaaactataagacaagccactttctcttctcattcattaatatgattgaacaggcctgtttatgactagagtcttttgctaagggctgcaacaaatgcctaatagccttgagataggactcttaggtatgttattattattattattttaaagctattccccttcattgcgctgttggcagtggtgtctaaagattacctctgtacttatcaccaaaaattggattctaaaaatcagacttatctttgttcatattacgggaataaaacaaaggattgcatgttgcttgcactagtaaatgttcactgtacttaagtcctctatacttgatagtgccattcaattatttctttttgtcctctttctatttaaccagataaatcccttcttatatacaagtaatattatgagtattcattcattcacttaacagaggatttctttggtctttgtgtgtgtgtgtgtgtgtgtatatatatatatatatacacacacaaaataaacatatatatatatacacaaaacatttatacacacaaaataaacacatttgaaagacatatatatatttcaatatatatatatatcacatatcccacacatatatgggatatgtatgtatatatacatctttaaatgttcaatgaaagaatatcctatatgacttttaggttttgcagtcttagacttatgactttttattgtgtcggtgtgatattaatacctcatacccttaactttattaaaattgacaaacaggtttttcttctttatggcttttttaaacttttacttaaatttccatacaaagtgttggcaaaaaaggcacaataattacgttgccatatccattcacataatctccattcttagaatgttccagcccaacatgatatccttcaggatttgacatctcagggaagcaaagggctgcattcatcagtgagatatagaaaatgaaacttttaatcagtaaattgcacttcagtcatccactccatcatttctaaagggctgggctgctaatttacattttggtgtatatagtattatgataaagcagcagataatgacactaattattatgtgcataaggcagaaggaatttaccacttgcactaggaacaaaaatcaaaatacataatgagtttcagctcagagtttatagtcacttgtgtccttcttgaagaagccaaactgttcttccacataggtaaattaaatagcagctctttttatttcatttaattaaaatgttaaaaataaacatatttgaaatggtaaaaactgaaaaaataccaaagcacagtgagaattgtatctgtttactacagattttgctttggcaccctgcctgcataaattaactaacctgctttcaggaaaattacaaaagggttagattatattacatgcatgattcctataaacgtacacagtaattataatgaaactggggaaaccagccactttggctgatagtatcaagtaatattaaacaagtgataattttcttaagatgaaattcatatctgacaatttaaatttttcagcatgttattttaatatttggaaaaagaaacttgaaagataaattgttttttttttcttgatttcaagtataaagtttaatgctgtgtagactctttaaaaaggtgaaaataaaacaacgatgtctaaaatgttttgtctgcaaacagatttaacattgtgttcaataatttgaagaataaagtgaaaatcttgctcagaatgagagacaaatacaaggattcacttaaacaggtattttgatggttccacttatgcatttgtttatatggtgtttggggttagattatgacaccacaaaattcttacattgaaattctaaccccaactaccacacagagtgaccttatttggaaatagagtctttatgaagacaattaagatgtggtcattacagtgggctctaatacgatttgactggtgtccttgtaagaaggggaaatttgaacatagacacatacatagatagggaaggaaatgcgaagacacacagaaagatgaccatcttacaagc

SEQ ID NO: 11555 - DNA, 2300 bp, Homo sapien
aggaggcatctttcttattcccaactatttgaaaccaaaactgagaaaaactttgatcaataaaagcagattgaagcccgtccttgtgtggagaatcaaattaaaaggatgatcaatatgcttgctatccaaaagctttaagatgcttcacagtaaaagtccatctaagtgtgtggaatgaagtgtattctttcaattggacaaaattgctcagtgaaaagaggacaaagttatggctatatcacaattattgacaaatttaaagtactgacaattaattttagagagggcaaaatgactagattaaattggcagttctaggaagggggagatccagcattcagacaggcagtctgctcaacatgcgttctagtgaagtttcaaaagtaaaacacataccaacattatgcatgctatcatagaaagaatgaaggttgtattacatctaatttcacatcaacaacatcatttggcaaaagagaataaaataatggtttcagaattgtaagcaaaagaaattctggatctaaaatttggtattccatcaaatgtccaccaagaggataaaagaaatattttcggatatactaagactcagaagttttatttctttcacaatgttgcttaatgaaaaagtcaaaagagaatgcattctggaagagaaaagaaacaatcaagaagaaaatatgccatccaaaatgcattctacctacttcagagtataaagaataaaagtactatgataaaagctgtgcacctctcctagaaaatgactgtttacattggacaaaagttcacaagtttctgagaataatttttctgtagatcagtaaattttatgaagcccagttaggaatctggatagcagtatgaatgagagatgagcaaattattcttctgtcaacatgaaaaaataaacacaattaataaatctcatgggtctgagaatctataaaagacaattcagataaaaaagaaagcatagacatgacataattttgagttattcttttaatttagaaattattatgaatctgaccataaggtttttaatatttaactgctaacagcagacttttggtgataaatcattttgtatctttttaaatagtcctagtcctctagatatatttatacaattaaggctttgtaagtgctattatcagttttcaattatgtaaacaaatcttgaaacaaatcataagttactcttatatttacagaacagaattttcttatgtaaaccttagcaatagaaaagggaagggatagcttaacaaagtttgaaggtaaataagaaatcagtcaattgagggtcttaatttgatcttaacagatcagtaaatacaagatatattatttaaaattagcaattaaacaaaagtgtatagaaaataaagtcactataaatctgtcaaccaaaaattctaaagcatgaaggagatgtcaaatgatctgtataatatagtgacttgatcatattttataagaaaataactaaaaataaaataaattaaaggagaatatagtaggcaagtttgactttgggatagtatattagttttccaagactaccaccaaaagtatcacaaatcagcgttttccataatctccttgtcaggttcaatagttcaataattttctataacagtttatataactcaggaaacactttactcaagtttacaagtttattataaaggatattataaaagatatgaatgtacagccagatgaagaggtacatggagcaaagtccagaagggtcctaatagagtcacttttgtggacttggagtacgccaccttcctggcatgtggatgtgttcaccaacccagaggctctccgaatccgatagattaggaatttgtgtagaggtttcatttcatgtgagcatgatggatttactcaatctctaatcccactcccctcgctagaggatgtgggagtagaactaaatatttttagcttctaattatgacttggtctttctggtgacctgcccccatcctgaagctttatgggagcccaccaagagttgcctcataaaaatgaaaatgttcctgtcacccaataaatttcaaggaactcaggccgggcgcggtggctcatgcctgtaatcccagcactttgggaggccgaggcgggtggatcatgaggtcaggagatcgagaccatcctggctaacaaggtgaaaccccgtctctactaaaaatacaaaaaattagccgggcgcggtggcgggcgcctgtagtcccagctactcgggaggctgaggcaggagaatggcgtgaacccgg

SEQ ID NO: 11556 - DNA, 2300 bp, Homo sapien
cactgctcaaacctctaggagagcatacacacaggcaggttgtggagcgctgaccccatggcagtgtcctggggtgaatgtttacagctcctgaggcccccgtgggcgtgtgttacagtgtgctctttcagttttggcatccgaaggtggcttgtgttaatcagctcagttagatcctctgccttattgcaaggacagagggctttctgtatcccaggttcttgccttagcataccggaaaaatcagatcacatgtgggcttggagaatgagtacaaggtttattattgagtgatggtggctctcagcaaggtggatggggaggccagaagggggatggagcgggaaggtggttttcccctggatttggggtgctcagcagctagactctcctcagaccacctggccagattcccattcccgtcattccactgcaaatggtctaccagcatctgctggtgcctgtcggtgtgctaatggggtttttataggcaaaggatggggatgtggcaagccagggtgttcttgggaaatgcaacatttggacataaaaacaaagatgcctgttctcacccaggttcatggggacaggcctgggggtggagccctcgccagggacccgcccttctctacccagcacttccctgcctccctcctgcatcaataccacaagttaacaacagccaagattagttcaagctaaggtgggttcagggtagaaatacaggaaaattccaacaaatcttgctatgaaaaactctaataaatacaccctttaacataagacacaattattgtcatttagagttacaaatacctaatattttcattactgttatttaacatctgaaatgatataaggaaaaattggttactagcctgtgattgaaaatttcttacagaatattgtcatgatgattttgctattgaaaataagacactagaattatactcagtgtttatattttgaagtttgggtttaaaattctaatttgaatttttaaacaagaaaacagcatgacaatgaataataatttagttcttgagtatcactgagacttcacttcttacctaagaaaaaatagctcaaggcaataatgcttaaactccagtatctctaagccatttttgaaattataatattgaaaatgagcacctatatgccctttctccaggagaaacggaccaatgagaactatgccctgttttgatcatcaaatactgtgagccatgggggagagaatgagaaaagggggaattttaaagcatgaggcaccatttctccttctagtggcaagtacttgttccaaagaaactctgatacctaccttatcttatgtgacattgtctataagatgctaaaatgtgtggctcacaagagctacactaatttcctagtctttatttaacattccatctattccattaaactttgcttggacaattggaagtgaactgtcaggtaggaaagaagaaagtttggcccaagtcttcatttcattctatgtccgctcacgatatttctcacatccatattagaccagagtcctttataaatgtccactattaaaaattttctatttgagccagatgcagcactttggtagacgaggatgggtggattgcttgagtccaggagttcaagaccagcctgggcaaaatagtgaaaccctgtctctataaaaaacaaacaggaatttccaggcatcatggtgtgtgcctatacttccagctactcaggaggccgaggagagaggatctcttgggcccaggaggtcaaggctgcactgagcaatatttgtgccactgtagtccagcctgagcaacagagagaccttgtctcaaaaactaaaaatggggccaggcgcggtggctcacacctgtaatcccagcactttgggaggccatggtgggcggatccgaaggttaggagattgagaccatcctggctaacacggtgaaaccccatctctactaaaaatacaaaaaaattagctgggtgtggtggcacacacctatagtcccaactactagggaggctgaagcaggagattcgcttgaccccaggaggcagagattgcagcaagctgagatcacaccactgcactccagactgggcaaaagagcgagactccatctcaaaaataaaataaaataaaataaaaaaagaaaagttctacttgattgaatcgtgtacatgaattggggaggtttaaactagagtaccaattggatctttgaggaagcagatgtgtgggggcgggggagggcagatgatactgtaaaagataaaagtggaaa

SEQ ID NO: 11557 - DNA, 2300 bp, Homo sapien
tatcatctcctctttgcccttccacccagcttcccagcttctggtaaccaccattctactctctacttctgtgagttcagttttgtttagatttcacatataagtgagatcatacagtatttgtctttctgtgcctagtttgtttcatttaacacaatgtcctccaggtttattgttgttgtcacaaatgacagaatttcctgtttttgtaagactatataatattttattgtgtctatatacatttaaaaaatatattcatccatggatagacacttagattatttccatatatcagcaattgtgaataatgctgcaaggaagatgaaagcacagacatctcttggccatattgattttaactcctttgaatatatacccaatagtgacattgctggaacatatggtaattctatttttagttttttgaggtgcctccctactgttttccaaaatggctaaagatatacataattaacacataattgttacagtattattctgaatctgactgagtacttactgttacattttatacattttaattttttaaaatcaatagaattcttttatttcagcttgaagaactatcttcatcatttcttgtaacacaggtctaatgatgataaactaaactctgttagattttgtttttctataaaaatctttacctttgctttatttctaaaaaaaaaaattgttggataaagtattcttagttcagaggtttccttcagcattttgaatatatcatcccactctctcctagcctataggatttctgctgagaattctgctgatactcatgttgggaccttcttgtatatgatatgtttcttatctcttgctgcattcagaatttttcatttgtcctagatttttaatagtttgattattatgtcttggtgtacttctcttttgggtggattttattggagatcactgtgcttcctataacttaatgttggcacctactcacagattaaagaagtatttggccattattccttcacatgtgctttctggcccttttcctctttgttctcattctacaaattctattatgcaaaagtttagtctcttgattgtgtcccataattcccataggctgtcttcattctttttctttattttgtcttttttctccagtgactggatgttctgtccagctcactgtttcttctgactgatcaacccagtcttctcttgaagttttctgttgaaatttttagttcagtcattgttttttgtctctagaattcctactttgctctttttattgtttctattttttgttggttttctatcttttattttattgtttgccaaattttattaaattttatatctgcatattcttgtcattcactgaactacgttatgagtattattctgattcttttcagttatttcacaaatcttcatttctttggggttcatgattggagtctatttattttttattgaagtgtcatgattccctgattctttgtaatccttgtgtttttatgttgttgtctgcacattttaggagatagctttgttttttggcctttacaggagttctttggcaggaacaaagcatcactattttgttattttcatttttgagacagagtcttgctatgacattcaggctgaagtacactgtcaaccatatctcattgcagcctcaaacttctgggactcaagcaatctactctcctaagcctcctgaataggtgggactacaagtgcacatcaccgtgtctggctaattttttttatttttcttttttgtagagacagagtcttatcttattgcccaggcttgtcttaaactcctggcttcaagcaattctcccacctctgcctccaaaagggcaaggattataggcatgatccaccacacccagtccagagcttcacatatttagtctagcctgtgattctggaagggctagatagtgaaaaccccaggcaggtagaaattgctgtgagttctctagttggctgatccactgcctttgctctgatgtcagaatgggctattgattggttttactgaccaacgagaccactgtctgggattttctgtcagatgaaactactggctagataatacaatggcttctggtcaattcagtcataagatgtattcctggctggaaaattctgctatttggaatctacagttagacaagactgcatgttagactctgaagttaggcagggtcaccaccctggacaggtaagacctgaggctgaaatacactacttacataaagctgaagatttttctccctatctgggtagagcca

SEQ ID NO: 11558 - DNA, 2300 bp, Homo sapien
cccaaataccatcttactaactatagactacaatcaaaactctgggttccaatgagaggaatttagctgatggttcaaatgaaggtcatttaaggaagggactatgtttaaaaattgtaggcagtaatgaagggactgcttgagagaacaaaaatgggtatcgagggaggtgtccaaagaatagcagttgaagcagttgaagggactaaaggaggaaatagagtcacttctggagcccagacagacctggagcaactcaagaggcgtcacccatcaggagctgtggttacagaggaatagttctgagcagtaagattgctgggggagtaaatatcctctcactccccatctcctgctgatggtgactagtggtgaactcaacaagcaagggaatgcggccagcagagcgctgagcggggtggaaagagtcaagaaaaggtctaaatcggagtgcaaatggaagatactcagcacagatcagaatcctgaggggcagggcgggtctctagcatgatcttgggcaggtgtttaggactgcgttcaggaagtaaatcagaaagcctgggaatgccaggtaattatttgaagaggttcctaaggaaaggtagcattctgaaagctgtggtacctaatgtcctcaaatatcattataccaggaatggcactgagccctccaaaccctttctctcacttcttatagacaacatttatctctgggaggaataagtaccaataatctatcaacttaaaaagaactgatttttgagatcttacatagctggtaatagagagagtggtactcaggctgcattctcgtcaagtcttcagcctgcatctttcctttatcgcatgcttccctttgacatttgaaagcatttgcttcactcaaagtcaggtaggcagcagaaacccttcatcttctttcctggtggtaacagtgaccatatcagtcagcaggatcatcaccggggtcttttacttcagaccttccaactctgttgctttttcagatctggcttccccctagacctaggactaattcttacttccgcaccatctggtcccttctttcctattttattctggcttcagcccttagtgtctagtcaactacttcccacaaaaaagaaaccttcttgtgtttggaagaaatctggaatcaaaggtgaagaaagtgaaggaaaaaatctggaagtgagtagagaaaagaggataggaaatgttcatggagatactggcacttgttctgaagtgggcgaaaggagtcgggctgtccagggactgagttgcgtctctgaagctttggacatgctgtgagcccagaggagagcatgcagctgctttagtttgtagttttgagtttaaacctcaaaagaaactagaagaaagcagagcaggagtggactgaagtgaacctgggaagaattacacttctgcagccatgtgttttgtgagctactatagctgttttttcctcagcaggatttttttttttttatagaaaattaaaaaaaaaaatctagcaggactttacttgctgaagacattgaagttacatgaaatgtgctttcctaattcgggatgctactgaaatctggaagctctgctttacaatggaatctattaaattgacgtttttgcatggctagcatgtggacgaatatggcctctccctgtctacggtgcctccagcctctctctttcctgcaggggtaaaagtttattctcctgaaacgaatgaagtttaaatctcaggacccctcaattgcccgagctcctccgagaccatatgtctaattttgtatttgtagttttgtcttctttttcttaaagagggcccctcaaattttataagctttagactccacagaaactggttactggggtgggggggtgtatagggttgggcttcagaaaaggacatgatgtggcaagactacaaatccttttagcaccagctggcagattctccaccacttggtaaataccctgtcagcattatcacccttgacttcactttactactccacaacacatctaaaaaagagttaatcagtgacaaattcttctgtgataaattgcttccaagatcttttacacaacactcgggccaagtaaacttgagaggtttaatacgtgcatgtattaagtgctgcaagacttcaaggaagctttcaagccaatgaactctaaattgtatggaaaggaaaatgcagggtgagttgtccttctgatgcattactgttctttaaaaacattactcatcagtagttttggaataaaattgtctttctgttttg

SEQ ID NO: 11559 - DNA, 2300 bp, Homo sapien
tagcagttcacatatttttgtgatcttcaaaattataaccacaaaaatcttccctttagttatcaagtatacccaagtgtggcccctaaaatcagggaagataggtttctcactagtagtgacttccaaaaaacatcaagttggctaagcttcaaattcatttgggattaaaacgttttcaattattctaattatacttaagataatttattaattttgaaaggaagtatgagcgaaacccttaaaatgcaacctactaattctgaaactttctggaatttccaagtcagtaggtttaaatgaatttgcgtcttccaaaatcctgattaccataaaaaagggtatacattaagaattatttcttatactgtagtcacagaaaatagttgcttgtatgtcagatttccacagaaatatagtgagatacctaaaaacagctttttaaagctagtagtatttcaatgttgactttaattggaaggaaactatgagatgaataactcctgctaagaaacctgtatataggtgggatttcccatgattcagagagtgtgatgaacaatcttactcacaacatccccccgcctcaaccattctaatttgaaacagaagataaagttttaaagaaaaaggcattgacatattagtcaatgccgaccaaaagtaacgtaaaattagacttgtaataaaattagcagtgttttcctctttgaaacgttcataaatgactatattacagaaatattagatattgtaaaatttcagatttggccttttattttgatttacaaagaaaggaatatctagaaactagactcaataaaaaaaagagtagcaaaactttaatccactattttttatgtcatcactagtttgacaattggatttaagcaaagcatgataaaataagtcaaagacagtaaatgacaatactgtcaaggtttgaatgtcaaaaattttaacattggggcattaaagacatcctttggtaatgtgtgttttacagttgacttgtacaatcacgaaccagtgatatgtgctttgcagtagctacttactagatttaaaccaatttataattgctgtatttctcgtaaatgttatgaatcctcacttttaacaattatgtttctgagaattccggaatttcctgaaccacaatgtgaagaaggaggtgctcctgattgggcttcttttctcagctttgtggttgtttatgaggttctttccgagctatgctatttctactggagaacccagagttcttactaaatgcagctgggcatgagaggggaggctcaggtactgcagctgtgaaacctctgctcgggcatgcgttttggtttacacgcggccaggttaaggaaacacattgccacgaagtgtgcattcacaagagtgtcgggtgtaatgtatttatttctgggtctcaaacgatctttgcagcgagtaattctgtttcgatgttaaagtcactggattttacttctctggttccggttggcctggagcaggcccctaattacctcggaaacccaccaagggccggtaaagtaataaactgtgatcgcacagcgtacacgtcgagtcccagggagagcagggctcccaggaagccccgggaagcgtgcgcttccaggagggtgtgcggcgcgcgggggtctgcacgcgcgcagagcttgttaacggagggcgtgccggaggcgtggcgcgaggtgttcgggcgaggcgctccgcgaggctggcggcggtgggcgggccacgggggagcgcggcccggggaaggctgcgcggcgccgccagcggctcccggctcccgctctcccggccgccaagaacgagccgccgtgggcggggcctgcggtgattggcgggcgggcggggaggtcggaagtactttgttttttatgctaatgagggagtggggcttgtccgtatttacgttgaggcgggagccgccgcccttcattcacccacatggtccttcgaggtgccgccgccgccgcccgacctgcgccttcgcgccacttcgcgccctcgggcgaggccgagggggtggggacgactaccgcagcgccgccggggctcgcgctcctccgcgaagctctcctcgcggggcgggccggccggccgcacccccggcctggggcctccggtcgtagtaaagcgcaggcgggcggggaggcgggagcaggagcccgcggccggccagccgaagatggtggcggctactcctcctggtgagtctgcccgcccctccggcgacggagggaaacctgttgtgtgcggcccgggtctgg

SEQ ID NO: 11560 - DNA, 2300 bp, Homo sapien
tacagactaaatatattcttgttagttcctatggcatttctataaatgacctcccacctgttttgttaacttataaaatcactgagaaaacttgcttgtgtgtctctttaaactcctgttaagcctagaatagcggttaaaaaaattgtatgttttcaaccaatatgtattagtcaattagcttttactgaaccatcaatactcagttgtgtttatgatttttatccttgcaagacacaccgttttagagattccagttaatgggatagatggtaatttaaggatctttttgatgctaagagtctaagatgatcaaatctatcaaggagagatcttggtaacaataaagatgttttagaaaaacttgggaatttattagccttatatagagatacacataattccagtagaatacagttatatagatagaaattatgcatatttactagtaaaaaatctgctaaatgaataaacagcccttggtgttgctgcccaaaggcctttggtgaaacctgatgggtttttctgtaccacagaatagtcaaggagagcctctggagaagagcatgcggtctggatttggaagcctcagtttgatttctggctttgtcacttaccttaggcattcagtaagtcacttcacctctgtgttcctgtttcctcatctgtaaaacaatgataatagtagtaactactttataaggttgttataaagattacatgagtgaattcatttccataaaatacttagaatattatctggcccataagcactatatacattctcatggtttttcttgtttcttttcatagatataggtggcttccagacaatctttccatacttggtggttagagcagaagagattcatgaagagcactgccctttgaaacaaaatctcatattcagaaaactgatgccaaacaccaagtagcatgatttcactctgaagcagtgtttcagccattgccctggaatggttttaaagcaagtgatatactgctgaaagtgctgcctttgatattaaatgttcattaaaaatcttcactaagacataaagtttttcactactatctcttggtaagggttcaaatttgagatgaaattccttaaagtggttaaagcattcattgtcccctctgcctgatgcttttaactagtttattttacagaaggagtactctcttcaagtggctgtagattgagacactcttacaggcttagttgttgagtcaaccacatttaaaaaatgcacctgccctttggtttatggtgcgtaatgcattcctctcataaactgtaaattgacaaaattcctttgccattttaaaattgcttaaagtatttatttttctatattccttgtaaggaactcccctgagcactcttaacttaattgctctctgaaaaatattttaaagaaattccagaagtggtaaagctcagaggagccccacaaatacaaagtgctgaagtaaaatatgatgctaaatggtgataagagacttaaaactagatttcattgtgataagaatgtgataaagtttgattgtaattcttatacctcctttcagaaaatcatgttatagaaaaatgttcctaagcagtaaaacaaagccattttaaaaaataacttctcatgtgcactctttaacaacctaagtgttatgaagtctctcaattgagatctttaaccgtaaatagtttttgccttttgtattatgtccagatcctatttaatgcaattagaatacaaattcctatgtactgaggaccttgattacatagatgagatatttcttagttccagttggtgtttctcatctcttgtcttctctgaccctatttatacattctctgtttttatcagatgattcttccccagaacggactgggagagcgaggtccgggtttccttctatttatttgcatcgatgtcgctccgagtcttcagcactgggccgcgtatgacagcatcttagtgggtgcggagcgggacagcgcgccgggggcgtggcaggggcgtggcctgtccgcggggcggggagtgcggggcggggcttccgcggagcgcagcgagcgggcacatcccaggttagctgctgcgagccgagccgggcggcggaggcggcggcggcggcggcagtggcggcagtggcggcagtggcggcagcggcagcagttgcagcagtggtggccagagcggatgcttgcgggctccctgcggctccactagttttcttcgccccgcccagccgcccactcttctcggctagggaagaagaccagagggtgctca

SEQ ID NO: 11561 - DNA, 2300 bp, Homo sapien
atcctaatctttcctgatctctatgcctcattctacacagttaactttgccttttgaaatagtttgtttttcactttctgactctgttacccatgatctttcttctttctctcatcattttctcagcttcctttgctcgaatcctcccaatggcataccccaaattttaggtaccaaaaagggtaggttctggctgccatctcttctttagctgtactctttccttacatgcacagatctactctcaggttttaaaaagtatctatagacaacccaatttatatctttaacacagacatcgtctattaattccaggctcttgaattttactttttactccattagaacttcaattcaatgaaaatatttctataaaatatatcttaatttcctatcacacctatcatttctacacttcaataaatgacaatatcattcacaaaagtaatcaaactaaaactgtggagtaacttttgattcctctttctttcaccattccatcaatcctataatatcaacctttaagatgagtctcatatctagttatttttcagtttctattgacaataacctagcccaagccatgctcacgcctctgtcctagactattgcaataggctcccaattggtcctgttatttctactctgacttctctttaatctacttcttgaaaacagaaaattttctacaaattacttatactgcagtggggagatttctcttgaatatacaagtgagttttagggaagtggatcatctgacaaatattaagccataaagtgatccaaacagaagggaaagggttcaaaatgcaacattggcacaaaatatgtagttgtgaaaagtctgtgagaaatgttttgagttgcaacagaaattaaaatgaattatttgtaataacaagtcaaattaagtctcaaacaaatacaggcttgtagcgaggatcatttccaaactaaggcttaaaattagagctaaaggaaaatttaagttttaatgtaactacaaacaatgtgagagaaaactatcagtcaagactttggactgaaaacaagactgaagtgcagaatgtactggatttttaagttaaataattaaattacttgggaatattattgaatagaatgtataatagtaagaaattagacacataaaatcctatagctttaatatttctttcttacagattgttggctataaggacattgaagtaacaggtcatcatataaagaccgtaactctttaataaaatgcctagtattggggctattctgtgtaacataaagactaataggttataatttttgtatatgatgcatggctttgtctcctacgcatgaagtactaatgaattttctgaatgatatctgacatgactgaaaagagataaacaatagtttaaatgggactagtttaggtttgtcatgactctttctttattttatatattttttaatttttttaattttgtggttacatagtagctggatagcttttggtatataaaaaatgaaccttgaagtttatttcaaacctgaagagattaaaaaatgaagaagatttttctataggtagtaagaaagaactcttaaaaaataggatcagaacaaaacacgaaaacaaattctaaacaggcacattcatagataaatgcatgtcaaaatggtctacaagtagggttgttgacactgatactatggtcatttaaattcaattagatgctgtcttaagggaaactaaatttagtatcactggtaataggaaagaaggcttggtgggcttggtgaactgaataattttttttttttttttttttgagacagagtcttgctctattcctcaggctggagtgcaatggtgcaatctaggctcattgcaacctccgcctcctgggttcaagcaattctcatgcctcagactccggagcagctgggattacaggtgcctgccaccacgcctggctaatatttgtatttttagcagagatggggttttgccatgttggccaggctggtctcgaactcctgacctcaggcaatctgcctgccttggctttgcatagtgctaagattacaggcatgagccctcatgcccagtcccttaattaatttctaattcttctacttcttttctttggctacaatagcttctgcagttacagcatttgaattcacaaagtattagttgccaaaaggaaatttcttttaaggagctagtatatgagccatagaaattgtatactaaaactcaaatagagtacttgcctaagaatattttcaagtcgatttttaaaacctct

SEQ ID NO: 11562 - DNA, 2300 bp, Homo sapien
catgcaatttatatagcattttcacttaacaccctccccttaatgacctccacctggcaaccttcatccatctcaaaacacagggcctcaatcccctgtatggctcatgtcacatggaatgggcgaggggctcagatgtttatcacagataaggaacatatctccaggttgtccattcctagattccctagcttggaacacacatttggatgcatttgccacacaggatcaagtgtgtttaccccacagtagataatgtaaatcttattgtatggacttatgaatgcacaaaacaaacattttattatttaattcaacattaaatttcattcatatgcagtgtccagtttattttttcagaaaattgacatgtattgaaaacgagatcctggagtactattctgatatttggaattctgaccattttatacattctcattaaaggagtacagtttactccccatttgttttattactacaatgaattaccaacttattttaaagttggtattctatacagtaagaaacaaagtcatcaaaagtaccttagtttgttttctgttgctataacagaacaccacaggctatataatttataaagaaaataaatttatttcttacagtcctagagtctgggaagtccaagatctaggggccacatctggtgaggcctttccattgaatcataacatggcatagggtatcacatgacaagggggcaggagcatggcatctcagttctctcttcctcttttataaagccactagtcccttgaggaaggccccacatgatgactttatctaatgcacattacctcccgaaggccttgcctccaaataccattactatataaatttggggattatgtttccaacacatgaaatttgagggacatattccaaccatagaagtacccaaagagttaattttaaaatattttgtatcatgaatggcttgcttgacttttatacttttaagatacataaacttttccccaaaaaaatctccagctgcaattgttttcttcttagtatctacaaatattcagaaagttaaactatcaagcttaaaattgtcagaactggattatacttagctattaaaaattttgatttgccactgggtgcggtggctcacacctgtaatcccagcactttgggaggcccaggcaggcagattgcttgagctcaggagagaaagaccagaagaccagcctaggtaacatggtaaaagctcctctctacaaaaaaatacaaaaattagccagatgtggtggcacacacctgtggtctgtgcttctggggatgctgaggtgggaggatcacttgagcccagggaggccaaggctgtggtgaggcatgattgcaccaccacactccagcctgggcaacagattgagagcctatctcaaaaatatatatatactgatttgctaatttttcatgcagttatgctctgatctttgttacttcttttattctgctagctttggttttggtttgttgttgtttttctggttcctcaaggtatgatgttaggttgttaatgtgtgatccttctatttttttcatgtagatattggatgctatacactatactcttagcactgtttttgctatatcccaggtgtatggggtatgttgtatttccattttcatttgtttaaaaattttttttaatttccatcttaattttgaaattgacacaaatattcaggagcatatggtttcatttccatatatttgtatagttttgagatttcctcttggaatttagttttacttttattctgctgtggtctgagaagatgcttgacatgattttgatttttaaaaatatattaagactcaatttgtggtctaaaatatttcctatcttataaaatagtccctgtgatgaagacaagaatgtatattctgcagttgttaggtagaattttctgtaaatgtctgataggtccagttggtctaaagtccaactgaagtccaatgtttcttccttgattttgtatctttatgatctgtctagtgctgtgagattgaatcaataataaaaaatttcctccaaaaataaaaagtccaggatcaaatgaattcacagctgaattctaccagatgtttaaagaactgacaataattctactaaaactattccaaaagatcaagagggagggaatcctctctaattcattctacaaagccagtgtcacactgatacctaagccctatatgcaaatggaaaatctacagaccaatatccctgataaatatggatgcaaaaatcctaaacataatactag

SEQ ID NO: 11563 - DNA, 2300 bp, Homo sapien
tgtctcttacaccactgcaaacagtgtgacattactcaacaaatggaccaggcagggttaaggtcaccagtaaagcaagttatctaattctttggtctgacttgagttcacaaacctaccctaaactatttgactctcctgatggaattaaactaatctatttagtcattcgtctcatgtaatatctttgccacaaatcctaagatcattttataagtatagggacggtgtgcaatagtctagtgctataaagttgtattgagtgctcattcaatacttaacaattagctgatcttcaaataatttaaaaccacatatactatgcttttacccattcttcctttacctccatttaaaataatgaattatctgctatactgagtcagggtaaattacaatgagtcccaggataaggtggtaggacaggaagtgtgtgtttttaccctcttcctctggagtgcataatgctttactatgatacaaagagaagtttgaaggaagtcacgttgtcaaatatgacagaagtaataacttgactgcaattcctgagcctatcaacctcaccgtttgtccacaaacataaccagaatatattttatcttgatttccgacttgagggaaaataagttcagtgatttaagatctgccagttagcataaatattgtgaaagcaaaaaactgtgctaaaattttaagagaaaaaaagttaagtgtgttgcgttttcagaaagatttagctatggagtttttttttttgttttgttttgttttttttttttttggttttgttttgtcttgacctatgagtttgaagaagacaaagtggctctgtaaataagtcgacttcatttttaaagcgtttggaaaggttaaatgaggttgaatcttgagagtctttttggtggttaggagagggggaatttattaaagagaggaagacaatgtacctaatatgttgtgatgataatgacaaactcaaagatttaaacttcatgagtcattctggtcattcatatcatcatcaggaaaacatcttcatgtgtagcttcataggtgagctccacaaaactgtgcattaccttgtagtagtttgtgaataatgtgctgacctatgacacatagccacgtaagtgaataaacactattattattattattttgtcttggttttcattaaactatcttagtagtttcaggagctctgggtttcaacacacacttctgccagctgactttagtgcgtccattagcataacaaagtcaattaggcaaacctgaattttcacttttatcccgttcacagaacatcagtgtaaatggagacaggaagaagaaattggattgattctccacttgagaattatgttaacttggaagaaaatgttaagtctactatgtgagggcatctagtgagagggaaggaatcacctcccttcccccattatgtccctttatgcacctctgacccttgtgctctccttttcttgttgcttctgtggtctggttgttagctttcccgatcctccacacattagaaacctaagcataatgatttctgatcgaaggctatgagatatttgaaataaaaaaaggggaaattgttgagtctagaaccaaacctttaaaaattaagaactaccagtctgtaatgtgtgcctttagaaaaaaacaaagtcaaacagaaattaggcaactagttagagccgtgattgtgctctgccacccatgaactcccgtctatgactatttccactctggctttgtgtttcagtaggtcagggacacatattaagagcaacaattggaactgcgttatcctttacctccataaaaatacagcttaataacatgttaatgacttaaaattaccttgtctttctagattgtttattgatgtcatttcagatcggtataaaggatgtgaagtgaataagaaaataggtacgtttctttttctttttttcccctttctaccgactaggaagagatccagtccaggttttgcctttgactcggcctgtgaatttcggctgtgcaatgtgtagcacgtttctttctcccccctcctttctccttccctcttgcctccagtgactgtctccaggatttctctcttcctatttcaggaggactctcacaggctcccacagcctgtgttaagctgaggtttcccctagatctcgtatatccccaacacatacctccacgcacacacatccccaagaacctcgagctcacaccaacagacacacgcgcgcatacacactcgctctcgcttgtccatctccctcccgggggag

SEQ ID NO: 11564 - DNA, 2300 bp, Homo sapien
ataacttgactgcaattcctgagcctatcaacctcaccgtttgtccacaaacataaccagaatatattttatcttgatttccgacttgagggaaaataagttcagtgatttaagatctgccagttagcataaatattgtgaaagcaaaaaactgtgctaaaattttaagagaaaaaaagttaagtgtgttgcgttttcagaaagatttagctatggagtttttttttttgttttgttttgttttttttttttttggttttgttttgtcttgacctatgagtttgaagaagacaaagtggctctgtaaataagtcgacttcatttttaaagcgtttggaaaggttaaatgaggttgaatcttgagagtctttttggtggttaggagagggggaatttattaaagagaggaagacaatgtacctaatatgttgtgatgataatgacaaactcaaagatttaaacttcatgagtcattctggtcattcatatcatcatcaggaaaacatcttcatgtgtagcttcataggtgagctccacaaaactgtgcattaccttgtagtagtttgtgaataatgtgctgacctatgacacatagccacgtaagtgaataaacactattattattattattttgtcttggttttcattaaactatcttagtagtttcaggagctctgggtttcaacacacacttctgccagctgactttagtgcgtccattagcataacaaagtcaattaggcaaacctgaattttcacttttatcccgttcacagaacatcagtgtaaatggagacaggaagaagaaattggattgattctccacttgagaattatgttaacttggaagaaaatgttaagtctactatgtgagggcatctagtgagagggaaggaatcacctcccttcccccattatgtccctttatgcacctctgacccttgtgctctccttttcttgttgcttctgtggtctggttgttagctttcccgatcctccacacattagaaacctaagcataatgatttctgatcgaaggctatgagatatttgaaataaaaaaaggggaaattgttgagtctagaaccaaacctttaaaaattaagaactaccagtctgtaatgtgtgcctttagaaaaaaacaaagtcaaacagaaattaggcaactagttagagccgtgattgtgctctgccacccatgaactcccgtctatgactatttccactctggctttgtgtttcagtaggtcagggacacatattaagagcaacaattggaactgcgttatcctttacctccataaaaatacagcttaataacatgttaatgacttaaaattaccttgtctttctagattgtttattgatgtcatttcagatcggtataaaggatgtgaagtgaataagaaaataggtacgtttctttttctttttttcccctttctaccgactaggaagagatccagtccaggttttgcctttgactcggcctgtgaatttcggctgtgcaatgtgtagcacgtttctttctcccccctcctttctccttccctcttgcctccagtgactgtctccaggatttctctcttcctatttcaggaggactctcacaggctcccacagcctgtgttaagctgaggtttcccctagatctcgtatatccccaacacatacctccacgcacacacatccccaagaacctcgagctcacaccaacagacacacgcgcgcatacacactcgctctcgcttgtccatctccctcccgggggagccggcgcgcgctcccacctttgccgcacactccggcgagccgagcccgcagcgctccaggattctgcggctcggaactcggattgcagctctgaacccccatggtggttttttaaacacttcttttccttctcttcctcgttttgattgcaccgtttccatctgggggctagaggagcaaggcagcagccttcccagccagcccttgttggcttgccatcgtccatctggcttataaaagtttgctgagcgcagtccagagggctgcgctgctcgtcccctcggctggcagaagggggtgacgctgggcagcggcgaggagcgcgccgctgcctctggcgggctttcggcttgaggggcaaggtgaagagcgcaccggccgtggggtttaccgagctggatttgtatgttgcaccatgccttcttggatcggggctgtgattcttcccctcttggggctgctgctctccctccccgccggggcggatgtgaaggctcggagctgcggagaggtccgccaggcgtacg

SEQ ID NO: 11565 - DNA, 2300 bp, Homo sapien
atttctccagccaaatctcaatttctggctctcattacacatccctgtaagcctcttatcctttggtctgggtcctggccactgcaaaagttctccctgaactatgcagggatgttctcaatatgctctgtagccaagcccagcttttctgttgctccccaggattaaaattttggatggatgaagacccaatctagtacatcaggcagaatgatcacattactcccttccttctcaccttcctctcctctgccaaacaccccaggcaacaataaacaaaagcatattaaaacgtagacaaggggagagtcatctttgtgtactcactcatttttagtatttttgtgtttagtgattagcctgtcaaattggcatttgtgtctaagtcctcttttgctgttggctaccaagtagctcacgtgtaagaggaaatggagaacaggcaaatattcagctagtagtagtagtcataagaggcaacatctgaccctgttccctgcccttcatggatttttaaccctaggtatttgaggcaaactgcagtgcagtcacgcagatgttataataaatggcagagtcaggattccatcccaggctgagcactcctggatctctgctctgagccacctaccacatcatctctccagtgctttccagttcccagatgtgctggcgtcttgtggtcaacaccgcctatccctctatctcaccctgctgggcctgtcctgtcctagttattgtggggaggatgtggaaatgactgtcaaggaaaagtggaagatttgtttttaactcctacaaaaaaaaaaattacccacctaaatatagtccagccctcaaggaatctggagatttgacagggtaaatgacttgccaagtttccactaagaatgatgaatccaagactgaaacctaatacttaaatcaaaattagaaatagtcatgttatatataggaagtcaatacttggttgaaattctcaatttctatttcttttgaatggatactgttgaaaaattattgatatttctttaaaagggcagtagaaatattggtgggtaaagaatctacccatatctttgagaaaggcaggaacagtattaaattggaatttgtccctaaattaaagaggaatgggtgttttttgtaaaagcctttgttgaatcaatgaagatgtattattattattattttttacctcacaaagcctagtggtttctgtcttgatgttggcactaacaccctatcctccaagaatgtctgtggaatatggattattcagaggcaggagaatttaattgaagggatattttgtttaggttctttttcctttggatttatttgagctgaaatatattcacatttggagctccatatgaagttttttgtttatgtgttcttggtcttattattttactttccttcctggcttttattaatgtattttaatgatatacatatgtccagaaattttggcagccagtacatttttaaaagcaaaataaaaatattgaacagtaagttctatccttatgaagaacttattctatagtaacacctgcagactacccattgaactggatgcagaaataatttatatacaatgacataatatttttacactgcaaatctgcttgtgttttgtttttaagtatcatttctcatctatatactgtagaggtggcaataacgtaatgatttttttaatatatggcctaattttctcagagaatacacttatttgaaaaggaaaaaaccctaaataggtttccatatggtgatagcatctttcacatttcttgtcacaagggtgatattttttgtatgtgtgtgtgatttctatttgaaaacattcatttagagcctaccatagagaaggcacttaaccaagtattgttgtagattaaaaaatgactaataatgactaaaatttggtcattgcctgtcaaggagtttacgttttgggggagacataagtataaacctaagagtaagaaaggcagaattacttgtatcctaaagtagaagtccattgcaaagaggagggaggaaagttttctatgtagtggcatccaagaagactttttggaagagcttgcagttcagtattcaaagaatgtcttaagattatgataattaaagaagtcccaggacgagacaaaatgaatcaaagattttgtatgcaagtccacaaagtctgtcagacatattgtaaataatttaccattgattttattttcaacaatgttaatgtattgacatttagcatatatctgttagatagatattctatcacaatg

SEQ ID NO: 11566 - DNA, 2300 bp, Homo sapien
agaaatatctaaaccttcaagtagagaggtccagtaggaagttagataatatgagtctggggctcacaactgaggtcaaagtcagagttgtaattttggaaagtcatgatagcctgcatttaaggcctcagactagctgagttatctagcaagtgtggaaatgaaagaaaagagatcctaggacttcgacctggggcattctgacataagaattattgactccatcagttttaacatccaagaaattttatcttaacatttatggagccccaaggcttcacaaaaacctggaataaaattcccaagtgtcacaatgctggcatgaagtggcagtcaataaatatacatggaatgaatgaatgagctccaaaataaaggtttcaaaaacccctgagattttgcgattttagaaccccaagtttcttcccacccatgatgtgttaggttgaatggtgacttccccaaaagatatgtccatgtctcagaacctgtgaatgtgactttgtctggaaaaaagagtcttctttgcagatgtaattgagtgaagaatcttgagatgagatcatcctggattatctgagtgggctctacatccaataagtgtccttataagaaacagacatggaggaaaaacacagacagatggggagaaggccatggggctgtggcagacattggagctgcggtttcaagccaaggattgacagcagctgccagaagcttgaaaaggcaaggaggattctagcctagagtctccagggagagtgcagccgcctggctgacacacgccagtcctgccaacaccttcattttagacttctggccttcagaacagtgagaaaatagatttctgttgttttcagtcatccagtttgtggtcatttgttacagaagcctcaggaaactattgcacatggtctcttttagctgatgctgatgcaatatttcctttggagctctgctgtattctgattcagtgattctcaactctggctgagcattagaattgcctagatgttttctaacaaaggttggttggtgtctggaacatcctcagagattctgattcagtagggctgtggtacaggctgatattggtgtagagtcagacataagaattgccatttaattagtcacaacaacttaacatcaaggggtggcacagaggtacagggggtgggaatacctatataattgtttcaccttaggaatttgctttgaaacataacaatatgtgtctttacattcaagtatattcttagaaactagctgaagccgtttcgcatccttgtggcactaagtcctgtttccactgtgaaacagttaccaagacagtcctgtttccactgtgaaaaaataaatggatgttctgacaggtggccaccattgctgacctgaccattctccagaagcaccaggaggcattgctttctagactgaagctcagtcatgcttcactttagtctaatcaaaaagatttgcttgcaagccttcattccaaatggttccagtgccttccatacaatcagataatgacaattgtgagtttctggtggcatgctacttcatgtaattaaaaaaaaattgctgcgtagatgtgctgaataggagaagagtaagttattatttggagggaagaggattcccaattgtggaacaaagcaattccttgtaccctggttctacataaatgtttctttatttttgaagttgcatgaccccctgttgtggtcttttttgcacacatgtcagaaagcagccatgagtgcattgtagttggcaatgtgagcttctgtgtaaagggtctttgacgaagagctcactgcatctactgactccccaggatgtctgaggtcacaagtttggctggagcacatgagcccagataaagaagatggttttgccctcctgaaataaagccagaagtgatctcctttattgtgcactttgggtcatgtgctaatgatgagggtttctgtaatactaatccccctaatgaaggcttctcccagcccttacacaagcccccaaggccccgtggcttggcaagccagagagaataaaagcagcacggtgtttggcttttgaactgagttcaaggcaattaaagtcaagagctaaggagggagggagagggtttagaaataccagcataataagtagtatgactgggtgctctgtaaattaactcaattagacaaagcctgacttaacgggggaagatggtgagaagcgctaccctcattaaatttggttgttagaggcgcttctaaggaaattaagtctgttagttgtttgaa

SEQ ID NO: 11567 - DNA, 2300 bp, Homo sapien
tatatgtggtatttgtaaaccaaggacaggaataaaactggtcctgaagagaaatcataacacaggccttgaatgttaggcctttcctatcttttctttcttctcaatcaactttgtttttctcactgtgaagacaggctttctggctcctcactttgaaagaacatggccaccaaaaagttccagctttgtaggacctcagagttcaagtagagtaaccagactatactagcaccttagtcgaattctaaatcccaagaagaggcttcagttggcctagagtcagccagatttcattctgtggcctgcctgggtcaacttggggagatcataaaggacagtggggggaggagtctggtcagaaaaaaactgtacgtatcgactgcaatatattttggtcttcattccatgttggtatattctttttaaaggctatatagcagtttactgcattttaaaagttagaagacattatacacatttagattatttccagtgtttcattattgcaagcaatacagcaatgaacaattatctatattatacatcatggaatttgagggggtcatagaatatgaacatttgaaattttcatatgttttaccactttgccttgtaaaaaggttgtggtatgattcttccacatatacacctgtactggatgtttccattcgttttcagctttgccaaacattatggtggggaaaaaaagatatttatctattcgacaatatttaatggtcatttattctgtgccaagtctctaaggacatgcgattacagcagaaaacaaaacaaagcccctgacctcatggaacactaaacagagggcagtgacatcaatgtaaatgttgagtgctaggaagaaaaataaagaaggataagatgattcggcagggttgggcagagctcgctattttaattgtggtggtcaataggatgccattcaagctgaaaacggaagtaagggtaaaaactaggcagacatctggggaaagacaatcaaggtcccggggaagtagcatgcctggcacattgaatgaagagcaaggagggtggggaggctggggcggagtgagcaaaggagagaatagaataagacatcagcgtaggacctagggaatatctttatcatgattgcaagccttctgcgctgtctgtaataataatattattattttttgagacggagttttgctgttgttgcccaggctggagtgcgatggtgcggtctcggctcactgcaacctctgccttccgggttcaagcaattctcctgcctcggcctcccaagtagctgggattacaggcgcccgccaccacgcccggctaatttttgtatttttagtagagacagggtttcaccatgttggccaagctggtctcgaatcctgacctcaggtgatccgcccacctcggcctcccaaagtcctgggattacaggcgtaagccacggcgcccggcctgaaataatattaacaacagcaaaagatcattttgcaggccaggcacggtgctcacgcctgtaatcccaggaccttgggaggctgaggcgggaggttggctagatcccaggagttcgagaccagcctggacaacagggcgaaacccatctctaccaaaaattaggcgggcgtggtggcgcacgactgtattcctagctactcaggaggctgaggtgggaggattgcttgagccccattggtcgacgctgcagtgagccgtgatcgcaccactgcactccagcctgggtaacagagggagaccctgtccccgccccactaaaaaaaaaaatcatttttaaattgcaacctcccatctccatctgcaacaactccccgttctcagctcaactgataggtaacctctagagatggctgtagtacaagaatgaaaaaaggtactcattcataaatctgatccatagtggtggcatttccgggaaaaacgttccatacccctaccatccgggcgaccccaattgcacctggcggaccaggcaagggcggaaaggagcagcgcctgcgcgtggtgagcgcggccccgcccagcccgctagtgggcgggcagaaactggccacagagcagtctccggaagctgcctctggctgctctgttaacgtgtcccgcgagcgaggcgcgtcgcaaaaggtcgcggcggaacttccctgcgcttttcagaccatactctttacggtactaggcactgctgagctgggagatgtcggcggcgtgttgggaggaaccgtggggtcttcccggcggctttgcgaagcgggtcctggtgaccggcggtgctg

SEQ ID NO: 11568 - DNA, 2300 bp, Homo sapien
ggaggcggaggttgcagtgagccgagattgtgccactgcactccagcctgagtgacagagtgatactctgtctcaaaaaaagaaaatgcaactacacagcgcagaagggcctggacacataatcatcttgggtccaaatactccctagaagtttcccattggccacttggagctcacctcatataaatgaagtggtggcccccaataggtctgattcttggggaaagcaatgaatcagaggctgaagtggagttacaaaggtcacactcctgtgcaaacatctgattggttgcaaaaagcaatgttacagagttacaaagttgcacttctatgcaaacgaagactcagctggcaatcagtctgactgggtagggacagccaatttcttatctgcctcacagaaaaggtggggatttgcaaagggcatagcctctggtccttttgttacttagggtggaaagttagggttttcctttaatagttctagaaagtcggtgtaaaaacgccttaggttccctcaccccaggccctattctcctgcctcactttcattaagacaggtatagccagcaaggtggcttacgcctgtaatcccagcactttgggaggccaaggcgggcagatcacctgaggtcgggagtttgggaccagtctgatcaacatggagaaatcccatctctactaaaaataaaaaattagtcgggcatggtggcgcatgcctgcagtcccagcttctcgggaggctgaggtgggataatcgcttgaatccgggaggcagaggttgaggtgagccgagatcgcgccattgcactccagtctgagcaacaagagtgaaactccgtctcaaaaaaaaaaaaagtgtagtcactgaccagctggagctgacaatagaggcggagatttcagacacatgaatggatacttacagtacagtgcgtgagtgctctggtagggaagtaagggattctggttccaggggcatctactacagacttaggggtttgagaaaggcttcttaaagtgccttgggaaggaggagtaaaggaggaaaaggaaggtgaggaggtccagtgttggaataagcagaagtattctagccagagggatcagggagtgatataggcctagaagggagaacttgggagtgttcaggaaaccaacggcggtaaggatggagatgagaaaaaacagacatttgagagttgaagagccatattctagagtttgggttgtgtgctaaaggcaattgagaacctttcaaggcaagtgcagcaaattgtttcctacagctttctgtggctgtagggtagagatggattgtagccaattagaatgaagactgtagagacggtctttgccataggccaacaaagtgatgaactgagtaggactgtggccgctgcttcccaccctcaccagaagaagggctaatccacacttgttattgaattgattgaattgcgggggggggggggcctacaattcccagcggtctggtctgcgggcgggggtgggggtgggggtaatgtaattcgagaagccagagaacctaggagggaaaaatcggctggagatgccaagagaaggcatgcgttaaattgtggtcatgcggagctaagtgtctttgagacattaaatcggacacgtcctgtaggttatacaggcgccaaggaagaaaatctgcataagaacacagttttttctttgcgggagtttaactctctcggccagaaacagtcctgtcctgcatttcttaagttttttccgaatcccacaagcccttcgaaggccccgcggactcgtgccagcgcgcccgcgcatgctcagtagcaagacgtgctaggcaatgaggagggagatgagttttccgtaacctgaagcaacatcctcctgattcctcattaaagaaaaaggcgggaactagtcaaaagccggggactgatgggacgctaggatctgcgcgtcccgcccatttcggcctctgactggtgaatgtcttcggcttatggcagaggagcccgcctcattggctctcaggctccagagcagcaggtctccggcgcccaccccgcctcccccagctgccgacgtggggcgggcagccgccggcggctgggagccgaggcgtcggtgcagacctggagacgggcatgggggggctgcggctgctggctgtggccctcacgtgctgctggtggccgcagggcagccagggtaagaccctgcggggcagcttcagcagcaccgcggcccaggacgcccagggccagcgcatcggccacttcgagttccatggtagg

SEQ ID NO: 11569 - DNA, 2300 bp, Homo sapien
cagtgaccggctcgaatctggccttttgtgtgagatgatcacggtttcttttgtttatcacgccatttgcaaatcagagcaagagctctttctcaagggcaagaaacgcaaacaagaaatatttgtgagatgaaagttgtcaattggattttcttcctaaacaaacaacaacaacaaactactagaagtctccctgagtccactcgcttggatttctgacacagtttacaaaaaaggaaaaaggcactgctcctattttcccttatggctgagttcaccttaagattgtaaatgtgtatatgtcagtgaaaacattgaggcttggaaaatgtgttattttcgttgccctaagtttgagtcgactttagactcaaaaacattttgagcgaatatcaaagttaacttttaaaaattgcgaaactatttcagaatcgcaattttatcgaagattaaatcagacttttttgtctggtaattatatatttattatttagcaaaactgaagaaaaaaagcacagaattgtttcaacagatgtctctcattttcagctagcatttctctcccaagttgagctggtttaatgtgttttggatttccctcctcaattggcttattttttagatcacctgcaattcatttgcaaattgcaataaaacacattttagaaaaaaggaaccttcaattattagctttgtttctttttaaatgtatatattttgactaatgtttgtgaatgaagttggctaacatgtatttagtttcattttggctttatgtaatataaagtttttaaaattttaaatatggttttaacctttatgtgtaaatgattttctagtgtgaccttctaatttaatattagacgtctaaggtatatctgtaaattagaatccgactatcactctgttcattttttttgaacaaagagtttaaataaagcctgaaccagggaaaagaaaaatcttctatttcttgttgagttcctaacaagatttttatctgaattgcccttacgtgcctggtccaggtgaagtgtaaggtatcctccaaaggcaccctttgtttcacttttgaatagatttactaggaaatctaaatcaagccattgttattcagagccaaaaacctgatttatcacatttttaatcgtgaataggaaagaagatttttaaaaagcccaagtcgttgtattagctttaacaacaacaaaaaaaaggcattcatgaaccagtagaacagagcccattgaaaacatccagacctttcaaagcatttcaccagtttctagtaacattttaagaggggaaagttgcttgaccactttatcttgttagttgaagagccccaccacttaaatcagtgtaatttgttctcctatctttggggtattccttgttgacaccttaaggttttatttggaaggataatcactactaacgacaaagtacaaattttggcctctttaggacttaattttgttatgctaatcgcattaaagtagaagtataacattcaaatggagagggttggatttctagggctagacaaattgctactaaagtttgaaaaatcataaaggattttaattttagacaagaaatagaagactgtcagaaaaaaaaaaataggaagatctcgcccccccgcaaccaaaatggaaattctcaagatactatatacaagtcttaaaccagtttccccattgagaccatctctggagctgcacgtctttataaacgacccaagtctttaaagtcattgttttcccccaacggaataatattttaaaaaccatgaaaagttttggaaatgtgagaaataggctctgctggtttgaccctgattcactaattaaaatgatccctctcctgttattccctgagctctttgcaatattataagttaattcatatggttctgagcgattatgcaaaactaatttggactgtccaggggtaattatccctgacacggttaattaaatcctttcaaggcttcgtctttcccttttgtagcagcccatcccttctcaacacggaacttcctgcggctcgctggaaatcaccccagccctaaatcttagttaccaccctgagccttccagctcggccgcctcctcggcctgaagactccccgcctcctcccgccccctccccttttcccaaagatcagcgttttctgggagaaacgctccggagttgttgatgaatgagaagaggactggaaagatgggtaagaggaggggtgaggatgccgagggggagcaccgaggtcatatcgccaacagattgtgcggctg

SEQ ID NO: 11570 - DNA, 2300 bp, Homo sapien
gagagaacagagatctgcaaagttcaaatagtacaaacagggaggcgaggctgctcagagccatcccactcccagaaacgaatgacacaagcagcttttcccgtgtgccagccatttcagacctcacatttgaacagcgtgcatgcaacacggaccgggagggggttgggggttggggggctgaggggcgaggaagaagaatgagaaacaaaaacaaaaccgaccatgaaacttccaacaaaactggaaaggccaacatgtcaaaaagttactcctccacctccgtgggtcaaaacgcaacaggttccgaagtgcaaagcaaacgccaactgctgccgcacacaaccgcctgctttcgagttggctgccgaagtgcgggtctgaaatgatcctgcgaattcacaggcctgctcgcccgcgcccttgcgcgcttggccactcctgccccgcctggcctctctgcctctacctggcacctatacattctatgtacatacaaaccgggcccccggtcgcgggagggcgcacggggaggccgcagcgctcgtacctatacatatgtacacgtgtgcacaccggtcctcgcgaggcggccccgcggggtcatagcgcggcagcgtaggccgcggggtaggggtccagctggggcttgcccatgcccggcagcaggatgtaggcgagcggcggctgcagcccggggctgggccacgcgctgcagttgcacgggatcatgtagcccgggttgcccgggctggggtgcgagtgcgtgtgccccccggcggcggcggccgccgctgcagccgccgccgccgcgccgtggaaggcgcccgcgcccgcggtcgggtagcccagcgacgacgcgtacgggaggccggacgaggacgacgagatctctgccattttggagcccaggtcgagcagcgagtaggggctgcccgcggcggcggcggcggcggcagcggcggcggcagcggccgactgcgggaagaagacgcgtgcggcggcagcggcggcggccgcggccgccttctcgggattggcgagcagcgactcaggcaccaggccgccgcccgcccccgcgtgcagcccggcgcccgccttgagcgcagggtgctcggcgtccgccacgccgcccaggccgtagggcaccgggaaggcgaacttgtccttcttgagcagcgtcttgggcttgcgccgcggccggtacttgtagtcggggtgctccttcatgtgcatggcgcgtagacgcttggcctcgtcgatgaacggccgcttctccgactctgtgagcagtttccactcggcgcccaagcgcttgctgatctccgagttgtgcatcttggggttctcctgggccatcttgcgccgctgagcccgcgaccacaccatgaaggcgttcatgggccgcttgacgtggtccaccggcttggacatgctctcgccctgccgcggctgcagcccgccgcctcccgggccctcgccctcggcccggaggaaatcaatgttggctgcccgcggagacccgctcggccggccggggctcgtcgcgccccggcgtcgctcccgccccggaggagggggctgggggaccagcccagggccacgccgcgccccgggccgccttagtgtctccggccgagcgctcgagcaggttgtctctgggacactctaacttctcggcggtgccccctccccgcggcggcagtttgccctttacgttctttgggtccttcgtctgcagtggcgtttgctggtgagctccccgcaggtagcggcggccgggcagagcgctcctcctcctcggtcgttctctcttaaatgcaaagcgtccccaaaagttgcgtcgcggagactcctcgaagttgagccgaggagcccgccgccgcgtgctgccaagtgccaaagggggctctcagcggctggagtgtttgggttctcctcggtgactttctcatttgacagaagcagatgggggtggggaaggcggggaggtggccctggaggaggaagaggagggggaggcggaggagtgtccaggcgtgccacgagaacgcagagcgcagcaatggatataaatacaaatacagcagcaccagcctgtcttcttggctccgggcagggtgcgccgatgggaaacccccaatcggctgggtgattttttttttttggaggggggagctgtcccccgcagcacctgcctctcgagtcttcctctcccgctgctggactgacgggtggggcgaggaaggagggtggatgaggcttgagcaagcgttggtcgcccggcctcagaggaagtt

SEQ ID NO: 11571 - DNA, 2300 bp, Homo sapien
cttattgattttaaacaccttcacctcagcagcgcatgtaagtgagacactgtaagttaactgtaccttaaagagatcagtatatagatggttctggcgaccaagattacaacaaaagacaaacaacacagaatttttaaagagctgaatagtcagtcaaggatgcatactctcagtctgggctagctcttttttggaaaggttgccaagaatgtccttattccctccagagttatttttcactccactacctctgactaggtgcatcgccagtgcaagaaaatgcgagaagcctctgtttctgttgcaagcaacacctggacctccaaggaaaatgagcactttcttgctaggaacagtctcaaacattttcaagggtgagtctccccttctccaggtttaaccctcttcctccgtagctggagaggctctcctactcgtgcccgccgccttcttcctcccggcgaggattccagggccacaaccagggcagctgcacgccaggccggcctgggtagccgggatgacaccagggtttgccaacgccaaacagggcgcagactccccggcgcgctccggactctccactcgcctaaacctgctctcaagtgaaaaggagtgggaggaggaggattgggagggggcggggggcggaggggatctgttaattcgaggtcctgggggtgtgggagcgggaggcggctccgctgatccctcctccctccccgagtcctgggctccacctcctccgcaggcccccagatatacacacacagccgcggctggacatgcacacccagtgccggctccgggcgcgcacacatgcaggtagccacactcacctgagccggtgcagagggcggcctgggctgggaaggggccccctgcgccgcgggagtggggagagcgggaggtgccacagcgcggacctgcgaactgaggtgatggcccgttttccttaactctcctgcagcacctccgcccctgcgccggctcggctctggccacagcagcgaggacagaggggccccgggcgcggcggactcgcgggcgcacgctcccaggagcgcgccgagaggggcgccgcggcgcaggaaacttgggcgaagttagttgcaagtgccaggcggctgccgagaagagcgaggcggggacgcggccggtgccaggcctgcggcgccgcgtggaggctgcgctgccctccgcggccggcgagctccgggagccctaagtcggcaggcgcgcctgaaggggctcggagcgaacagagccggcatggcccaggggacggccggacgcggctcctcggcgagccgggagaacttcctctgaggccgggcgaccaacgcttgctcaagcctcatccaccctccttcctcgccccacccgtcagtccagcagcgggagaggaagactcgagaggcaggtgctgcgggggacagctcccccctccaaaaaaaaaaaatcacccagccgattgggggtttcccatcggcgcaccctgcccggagccaagaagacaggctggtgctgctgtatttgtatttatatccattgctgcgctctgcgttctcgtggcacgcctggacactcctccgcctccccctcctcttcctcctccagggccacctccccgccttccccacccccatctgcttctgtcaaatgagaaagtcaccgaggagaacccaaacactccagccgctgagagccccctttggcacttggcagcacgcggcggcgggctcctcggctcaacttcgaggagtctccgcgacgcaacttttggggacgctttgcatttaagagagaacgaccgaggaggaggagcgctctgcccggccgccgctacctgcggggagctcaccagcaaacgccactgcagacgaaggacccaaagaacgtaaagggcaaactgccgccgcggggagggggcaccgccgagaagttagagtgtcccagagacaacctgctcgagcgctcggccggagacactaaggcggcccggggcgcggcgtggccctgggctggtcccccagccccctcctccggggcgggagcgacgccggggcgcgacgagccccggccggccgagcgggtctccgcgggcagccaacattgatttcctccgggccgagggcgagggcccgggaggcggcgggctgcagccgcggcagggcgagagcatgtccaagccggtggaccacgtcaagcggcccatgaacgccttcatggtgtggtcgcgggctcagcggcgcaagatggcccaggagaaccccaagatgcacaactcggagatc

SEQ ID NO: 11572 - DNA, 2300 bp, Homo sapien
tcttttctctgcaattgtctcatcagttgattcaaagcttcttgaaggggtgtctgttctacttcttcttgtttggctaaagagcttgtgagaggatctcacacgggcatgacactggaggtctttttctgcctcattctccacaaggtctcgatctcgcttctttttatcctccctaactctcctccgttttctctctttttcttcccctggatcctgcttctctcctttctttctctttttctgctttctgtccttgtatttgtcatgatcttattcgccttcgaagaggctggagtcgtgccctgagctgcccgtggagaattcggtgacttcgttccctcctactttgaggaccagcctcaagggcttctctacatacccctcatagaagtgtttgtctgacttgcgctccttgtgcttcttgcccctgtccagctggccccggtgcccgcccccagagccaggagcaggcacgcagcgcagcttccggtccaggccaggcccgcgcagggcgggagcggccccttagaggccctgcgcgccggaggcaagggggcggcgcgaggtccctctcaacccatgtgaatttaagaagagttttttctaattctgtgaaaaacgatgttggtaatttgataggaatagcactgaatctgtaaattgctttgggcagtatggccattttagcaacattgattcttcttactcatgagcatggaatgtttttccatttgtttttgttgtctctgatttctttcagcagtgttttgtaactcttgttggagagattgttcacctctgtgattggctgtattcctaggtattttattctttttgtggctgttgtgaatagaattgtattcttttattattattatacactatccttctgcagcatagaattgcatttttgatttggccctcagcttggatgtttttgatgtatagaaatactactgattattgtgcgttgattttgtatcctgaaattttactgaagttgtttatcaattctaggaggctttgggcagaagctgtggggatttctaggtatagaatcatattgtctatgaagagagatcattcaactcactcttttcctatttggattccttttatttcttcctcttgcctgattgctttggctacgacttccagtattatattgaataggagtcatgagagtggggatccttctcttgtttcagttctcagggagaatgcttccagcttttgcctgttcagtatgatattggctgtgggtttgtcatagatggagacctgaattatcaggtcctagtggatacctgaattatcctagttaatataatgcttaatttgaaatctgattcttttttcttccccaattcttattaatgatttaatatcttctctaccttatcttacatattttgaactacatttgaataactacattgcattcatttttttgtactaatgtttacattgtttctctttgagttctacagacttatctctagcttttatacataatttttacataatattaatattaagatgtgatttacagtgtactctcttcttaaaattattcattttaccatattttgtggtttcaaagagctttcaaatttatttttgcctgctctttcccttcctccttctcttcctctttcttcctttacaatccagaagtcttcttcttcttcttttttttcacctgttataccatgaattcagttaatagactccagcagctcaggctccttttcattggttcttacaaagtgtgcttctctgggtggaacaggctgcagcttcaggtttctctttagcttccctctttatgctggttattttccttcacacactttcaggaaatcatcttggctcttagagtgcttaatatgcccaatatgcatattaattctcttggcaagaatcttgcccttaacttgtttgtttacaatgatgccaacagcatgctaggtaactttgtagactcttttagttttgccatggtgacatttgtgaggcatttctttttggacagtacccattcccttggtgtctacattatcgcctttcttgtagatatgcacttatgttgccaaaggtacaactccgttttctcaaaggcctaggggacctcagcagttgcctctcttctttcctctgtgttcgtcattttatcaaattactggaagctgggagttgaggccaaaaggtactttcctcttcttaaaagtaacctgagtgttgtatctcttctccttgcctggaattgtgctatttcttgcattcttcttcttctg

SEQ ID NO: 11573 - DNA, 2300 bp, Homo sapien
gcaagcaaactgtgattgcgacccgcaagtgattatttatgctgtactttctggttgtctgttaaacctgcctgtgaaaatcagttgtaagtcttccttagaaacctctacaaagtgtgcatgtattcctccttatatttctttttgtttgtttgtttgttttgttttttgagatgtagtctcactttctcgtccaggctggagtgcagtggcaccatctcggatcactgcaacctccagctcccaggttcaggcagttgtcctccctcagcctctcgagtagctggggttacaaatatgcggcaccacacccggctattttttttttttctcagtagagatagggtttcaccacgttggccaggctggtctccaactcctgacctcaggtgatccacccgcctctgcctcccaaagtgctgggattacaggtgtgagccaccacaactggcctctccttatatttctatagcactctgtactttctgctgaagtcatgtacttttatgtaagacagtgaactttggaggcctcagagcatgtataacgtgaatctgcacgtcccccactgttctatccttctcaagaagcaagcgttgtggtttcagagtaggtagggactaacttgagttgcactcatatttcccgaagccatagaccgtgatatcacatgtttcctaataaagatgaatactgaaatgagcatcatccagtgtcttgggtttttatgcttcttgcttttgtttttatatttcaccttttagaccaaggtaatttccaaagataatgtcaccttgctgggtgaggtgatgggtaagtgaacattcacagacccgttagcacagtgccttgcacgtgctcatacatgtcatttgctattgttatcatgtgcctctgaaatagacgtttgaaatactctcctaatcgtggaaaatttaatgcatatccaagtgttaaagctaaaaaaaaaaccctgttagacattttgacttgttttcttgttatcaaacctcttcctcagtgctactaaatgtaagagaaatagaagacaaaaatttctgacaatataaaattcaatatattgtaataaaaagaaaaaagtctcaggtcttttaaaacatgtaaaatttaattacatttctcttatctattctttattgggcatgttaatgaactctaatttcttatgtaagtgtgtttaggggaaaaattagagaaaaattcagggattttatcctgaccaataaaaagctagccgtatgctggggacaagctaaaatgtagtggctgacaatgcatgctcctcagctctgtgactggtgctgtgtgttcttgatcaagttacttttttctccctgtgcctcagtgtctccatctgtaaaatggtgtagtaatactacttcatagggatattgtgagatttaagtgagttgatacatgtgtatttaatatacagccagatatacaatcagcattcagtaaatgttagcaaaggatagataccaagagagatgactccccacttccaaaggtgaagatttaaattatttcctttttttctgagcactgaatttgcaattagtcacttccttatcccgtgcatagctgaggcttctgggttccttgtctatgatgcctgcttgctcatttcccgcataacatcaactgactcatgatagtttgggattcaagtcctactctaaatctcagttttctcatccattaaatagggaaagtaataatgcctgactcatgaggctggtgagtgtttcaaaagaactaatgggggcctggtgtggtggctcacgctcataattccagcactttgggaggcagaggtgggcagatcacttgagatcgggagttcgagaccagcctggccaatatggtgaaacaccatctctactaaaaatacaaaaattaggcatggtgacatgcacctgtagtcccagctactcaggaaactgaggcaggagaatcacttgaacacgggagtgggaggctgcagtgagaggagatggcaccacttcactccagcctgggtgacagagcaagactccatctcaaaaaaaaaaaaaagaaaaaggaaaaaaaaacctaatggataagtttatatcatagtgtttggcacatggcaggcatgtaatagatatcatcaggaccacctatacttttgttattcctttgtatggaaaagcagtccctggtactacaataagtctttcagagaaaggagtgtaatcctaacaacaactcatgcaagtatttttgaaaagaatacttgataaggaaaacctgca

SEQ ID NO: 11574 - DNA, 2300 bp, Homo sapien
ggggtttcaccatgttggccaggctggtctcgaactcctgacgtcaggtgattcacctgcctcagcctcccagagtgctaggattataggcgtgagccattgtgcccagcccagtgggcaccttcttaactccttgtagcctggaactcctgggctaaagccatcctcctgtctcagcctctcgagtagctgggactacaagggtacgccaccacacctgggctaatttttaaaacttttggtagagacagagcctcactatgctggctagcctgtgcttgacttttaaatatgtgtttgtgtaaggctttctttaaaagctattaactatactattttagcaaatatacatgggaaattatcaaggaacaataaaatgatcttgttccaagcaccatgaacttggagcctttcattttttttcattcagggtggatatgaagagcagctgctgaccttgttaaggtagccacagaaatgactgaagacttagaggtgggagtacacaagcttggaacaagattttgttcattcattcctacagccattcaaccagcatattctgggcacttctcatgcacactggccatccaccagggagacaggccatgcttagacataggcttattgcaaatcatgttttatcctttcttggctctaagactggacaagttctgcctttcagcttcaccttcctcatctataaagtaaggataaccttgaatggggcactgatagaattaaaagtgagataattggtcgggcgtggtggtacatgcctgtaatcctagcactttgggaggccacggtgggaggatcacttgagcctaggagtttgagaccagcctgggcaacaaagtgagaaattatcaaggaacaataaaatgatcttattacaaagaaaaccaaattctcaaacatgcatgaaatatgaagaaaataaacctccatgacaatcatttggcttcaaaaattatcagtatttgaacttggagcctttgattttgatttttgcatctctacaaaaattacaaaatatgagccgggtgtggtggcgggtgcctgtagtcctagctacttaaactgagttgggaggattgcttgagccctgggaggtcgagggtgcaatgagccataatcgtgacactgtgtgtgagactgccacacacacacacacacacacacactagtgaggctacgcactcagaaatgcacatgaacatcactggtattctggaacccacgtgtcgtttgccactgttatctgttaggctttagggcttgacgacagaaatcatcaggcagtctctctttcctcttatattcctttcccaatctaagggggcagcaaaaagctcagaggtccaccgtagcatgcaacatgtgagatgcctaaagcccgcccccatcgacgacagcattcatccatctcccgaattcatctgggtcatactctcgagttacccggctttcttgaggtcttgcagctctacaaggataatctgtggctaaactttgctgtcgtccaaggtcaaatgtttggctcacaggttgaagagcctcccatggcaccgtcgtttggtcctgagaagggaaaggcgcccagggggcgggctgctagagcacgaggcagctgtctcccagtcttcccaaacccgtagccgagggggcgtttctgcggcgcaggggcgggcacagccgacgcctccctgctccaccttctgtgtcggcgcctagactcggatagtgaatttcggaaagtttcactcgggttcgtgcacgtgggcacctccggacccggcctccttgccgcgcgctctgctaccctctccatccagcggcgcaggcggccctcgcctcacccctgggcgtagctctgggctccctttggcgtcgccagcttcgcctcctcccgccgcgtctcctcccgccgcgtcacccgtcggtcccggccgcgctcgcacgcggtgcgcagctcccgggctccaggcggcggcgcgtagcgggcgcccccgaggcggcgggcctgagaggcggggacggggcgtgccgccggcgcccggctcccggaagcggctgcttcacaggctccagccgagcggacaggcgtggcggccggagccccagcatccctgcttgaggtccaggagcggagcccgcggccaccgccgcctgatcagcgcgaccccggcccgcgcccgccccgcccggcaagatgctgcccgtgtaccaggaggtgaagcccaacccgctgcaggacgcgaacctctgctcacgcgtgttcttctggtgagtgtccc

SEQ ID NO: 11575 - DNA, 2300 bp, Homo sapien
tgggcacagtggctcatgcctgtaatcctagcactttgggaggcctaggcaggtggatcacctgaggtcaggagtttgagaccagcctggtcaacatggtgaaaccctgtctctactaaaatacaaaaattagcagggtgtggtggtgggcgcctatagtcctagctactccggaggctgaggcacaagaatcacttgaacctgggaggcggaggttgcagtcagctgagatcgcgccattgcactccagcctgggcaacagaatgagactttgtcttgaaataaataaaataaaataaaataaattatataagaaatagccaagagctaaaaaaaaaaaaaatccgaacattcttgaaaaagaagagcaagataagcaaggtaaaacactcaccaataagatttgagatatatttataaaattaaaggagttaagaaagtattgtactggcccaggaacagtcaagcagataaatggagcagagtaaagaatccaaaaacagatcatgtgaatattgatgcccaacatgtatgacagaggtaacattgcagatcaatagagaaacaagggactactcaataaaactggaaaagtgggtttccacattgcaaaataacataggtcccaaatcacaagacacagaaaaatcaatctggatgatttaaaaacttaaatacgtaagttaaaattttgaagttttttgaagtaaaggggaaatatttattttttttaggtagagatttctttttcttttctgtttttttttttttttttttcgagacaagatctcagctctgtcacctgggttggagtgtgtggcgcaatcatggctcactgaagccttgacctcacaggctcaaggcatcctcctcccacctcagcctcccaactggctgggactacaggcctgcaccacaacacccagctaatttttgtattttttatagagccagtgtctcaatatgttgcccagtctagtctcaaacccctggcctcaagtgatcctcccacctcggcctcccaaagtgctgggattacagctgggagccatcatgccaggcccaagatagggatttcttaatcaagatctcaaaccacaaatcgcttggtgaaacttgataaatttagctatcttaaaaccaagactctttctcaaatggccacataaagacaaaccacaaactgggggaagatacctgcaacataaataatccacaaaagattactatcttgagtatatagataactaaaaataaattataaaaaatcaaacaactcaatagataagtgagcaaaagttgcatatttcactgtagacaaaaacataaccaataaacacaaaaaaagatgctcaacctccttagtaatcagaaaatataaattagtaatcataatgtgacacctttatacccatcaggctggccaaaagaaaaaataataatcttgacaaccccacaataccaagtgttatgaagtggaacacgtaggacttacccactgccagtggaactctaaattgctataactacttagtcaaacaatttagcattatctataaagttaaagatgactgtttcctacaccctagcaaaattctgattgtaggatacgccctagagaaactctcactcacgtgcacaagaagaaatgcacaagaatgtttatagctacgccaatggttattacggagaaaacggaacagcacgaatgttcagtcagctccaggaacatgaataaatcatgttcgttaaattgcatttaatgaaatactatattcagctgtaatatttaatgaatgacagctacattcctgagcatggataaatccctcaaatacagtgttacatgaaaaaaataggttatgggagaatttctacaatatgattcaattatgtaaagattcaaaagcaagcgagactaaagcaactggtcaaataagctttaactgttactgtataatttgtactttgtaatatctggtagtcgcatggttcgttaagcttcaggctaacagaaaattaagcattaactatggtgccaagttaaaaaaaagtctgcgaaatcaaaacccttaaaattcgtctacgaaattttaataaatatccgtgtagaaaatcagaacgactctttcaggccatctttaaaatgtcattggtaaaccatacttgatcctaaattcctgtacttcctcaggccatccgagcatgaaacgctgtcacctacccacatccgctggctgtgacgcttgtcaaagtgttctctatcggctgcatgcctagaccaccaaagcgttctgacc

SEQ ID NO: 11576 - DNA, 2300 bp, Homo sapien
gctcgtcttgaactcctgacctcaagcaatccaccttcctccacctcccaaagtgctgggattacaggcgtgaaccaccacacctggcctaaaatcagacatttttatgtatagattttttttcttaatgactgcagttggtaaatccaggttttgcaaatgttctcatgtaaataattgtggatatgatctataacagaactttgtgacttagatcatcagtttttctaggtttcttgaagtggacccaaaacagtttgagtaacatcttggccctgcctataaagattctctgtgaggacatgataataaaaaagaataacgactaaacactgagtgctaactatgtgctaggcatgcttctaatcactttacacgcattcactcattctaacctcacaaccctatggcaggtaatgtaattatcaccatttttcaggtgagaaaatcaaagccaagaaatgttaagttgcttgtcccagacttcttaatcactataaaatggaagaaaaagaatttgaaccctgaaaggctggcttcaggaatatgtcctgtctaacttttaaaatggactgttcgttgattatcaaacatatgctcaatctctctttttttttttttttttttttgaggtggagttttgctcttgttgtccagctggagtgcaatggcgcgatctcagctcactgcaacctctgcctcctgggttcaagtgattctcctgccttaccctcctgagtagctgggattacaggcacccgccaccacgcctggctaatttttgcatttttagtagatggggtttcaccatgttgaccaggctggtctcaaactcctgacctcaggtgatccacccgcctcagcctcccaaagtgctgggattagaggcatgagccaccgcgcccgacctcagtctctcaattggtaagacagagtgtctatacttcagaatcttgtcaggaaattctccctgcatgttttaaagtgtgatgtcaagatacaatcatcattgacaattttctgaagaataggaagtgtatccatatccttgactcaagccagtttcattgtttgggactacagtgtcttagttccctttggaactaagcttttgtttagcttttaatatttaattcaaacatcaactttccttcctggattgcacccttctcccaccaccggatccctaggttcggggggtgtctaccccaacacactcccattgtttgtctgtgggaagagctccccaagggcaatggctgccccgacttatttgtctgtatcgccagctcctaagcaagggctcagtaaatggccatggaagtcaggaagaaagaagaaaggagagagggaaggaagttaggaaagagaaaaatttaagaatgaaaaaacagaaagagatggaaagaaggaaagaagggaggaagggagagaaagaaagagaaaggaagagagggagggcgggagggaggaggacagggaaggaaagagaaagaatgaaaaagggagagagaaagaaaaaagggagagagggagggaggaaggaaggaaggaaggaaggaaggaaggaaggaaggaaggaaggaaggaaggagagaatctattaacttagagaatggcttcatcacaatggtctgtatgggtaaatattgcccatggttttcagatcatctcatacgcctggatgtaggagacactctcccctcccacacacattctgattaaatttttggtttatagagcaaagaattcagaaacttatattaaagatgaagatcttaagaagatgagattcccctccgtgcccttctgtgcacacacagagatccaaagccttttccatagctgcctgacaggtttcactgctgccccgaagaagtccttgagacttgcagcaggagaaggatctctgtataatctttgtttgcctaataataggtctttaagggtttttaaaaattggtttcctttggggatcatttaaatttcccatttccttgtaaatatttttggtaaaaacatcctcttggatttcagaggaagttaaaatagaaaaagcttgaaagcattcacaaagcaatgtgctctcaaaacacagccattcatttgaagttgtcttttagtctgaatccaaatcctccagtcaatacaaaccataatatgctgctcggtctctgtggatccattctgcctcaagctatgagcttcaaaattctcaaagagttggacttcaatgctgtttcttatattttataatactatttaatctgcctgaaggtgtaggatgtaatgtcatgata

SEQ ID NO: 11577 - DNA, 2300 bp, Homo sapien
ttccctttccactgaaacaccataggcaaaagtgacaagtggttttgtgctacctgacttagtgaacagtccccattctttatcttgtttgttttctctgcacctttttcatagttgctcagttccttctttgtgaaatactttattctttcggcttccatagccccattcttgcctagatttctctgcctgttccacgattcgtctccatgtctcctcatgggctggtatctccagcattctgtacttggcacttaccccttttcacatcacagtctttccctgaaccaactggtggctccataatgggattccctgacccagaatcagttcttctgatgtcccatgtgcctatgggacatcttctcctttctcctggtggctcgcaggtatggagacctcaattatgtctacaactaaacctctcacccccacctcccccgcagctcccttctgtattttctccactgaaccatgaaccatatttgtttgtctacccactcagtctgccaagcaagttatgagtgttcctgagtcatcttggatggcgctcttccctctgtactcctcatcactcaatcttgttgacactctttctgaactgccatgagtcattctcacctctccaggcccacactactcttcccagtttagaccctcatcacctcttccatccactagcctgactggtcttcctgccccagggctcaccccttctaatatgactccccagctgattttcctaaaagataagcctgattgtttctttacccctttaaaacccttcacgggctcctcattacttgcagaatgaaatctgtgtatcttatcatgacacaaaaggtatcctaggatcttcagcccatcacctgccatgctgcaccttggaatactctgctggatcatagcaagcatgcatggcagtgttcttccacccaggatgccttttttgcttaattagcctggagaattccttttaattactttttaaaaaaactctttcctcccccaatagaccaggcctgagagtcactctctcattcttggtggcgtgcttccattgttgcatttactgcgcagaattggagtttgtatccatgtccctgctgagctgtgagcgctttgagaataaacacagattcttattcatcctcactgttgttgttatattataaccatgattggctaccgtttattgaatgccaggagaaaaaaaaccctgaagtttggagatattaggaaaattgctcaaagatgtattgccatttagaggcagagttataatttaatcccctttttttaaatgatccaaaacacatgttcttatcaaaatgatgcactacaacttagaggtttcctggtaatactcctactagtagtagttattataactatcactgtgaatcatgcattatactaaattctttatataacaatcagtttctgaagatggagaattgatttttttttgaatttttaacggtttgatataaaaagttatttttaaaaatgtaaaataacaaaagatatttactaaagatattcatacatttgacaggagtatagttaagcttaggtggaccagatgacccacaatatcccttaccacataagattttataattctacaaatatttttcctcttttgattttaacaaatcttttcttaaatttattttattaacatatcgtcctggcagtagcttcatatggttataaccatgttttcttcttctttttctttcctatttgaaggaaaaaaaagacacccaatgctttctgtgtgttttcatatgtaaccttctacatagcagatgctgctaaattgctggggatataatgagaattaaaaaggaaatacaattctttttctcatggagctgaaaatctagtaggggagacacacattacccaaacgatccctcagtgaccatgtaattataaactgaatcaaatgctctctaataaaggactactgtactctgaaactgtataacaaagaacgtgatctctgctctgggtcagggagcatgtccctgaggaaatgggcgggggctgaggcttggtgagtgaggcggaatactcaagcctggtgccggggaggagagcctggcagacagagctctgggtagagtctgggtagagggacctgtggtgggagaaagagagaagatcagagtggaggggagaagcagggttggggccttgaaggtactgctgagcatgtgggtccttatccttaccctgcattgcccgcaggcctgacctttgcttcattcttcatggctgccaagtgagag

SEQ ID NO: 11578 - DNA, 2300 bp, Homo sapien
tcaaatagtaattggatcagaaataggcagattattcaggaaggaatatggcatagaaataatagtggaaatatgctggagggcaaaaaaacagatgataaaacactttaaaaaggcaagccatacaaaagaatagaggatgctttgtagtcattgctcaaaggtgactgatttgcatagcaaggagaatgagaaggaagaggttaggaagatacttttttttttttttttttttttttttgtatttttagtagagacgggatttcaccgtgttagccaggatagtctcgatctcctgacttcatgatccgcccgcctcggcctcccaaagtgctgggattacaggtgtgagccactgcgcccagccagggagatacttcttaaactcagtttttaagtttagtttaccagtgaacctaacatgatacatcaggacaagctggggttcagagcagaacagtagggtaaccatgtctgcattgtcacccttgtacccattcacgaaagccatgggaccattaagcacagagaagcccactacctgccagccgctgcacggctgcaacaagagtaggacttacttcgtgttctcagagcacagattacaacattcgggtagacattgaagagagacagatttggggctcaataggaagaaaagcttttttaaagggctgtcaaaacaacatgaagaaaaacagaatagatacgttgccatgcactgaactgctggtcctgaagggtggagcatgggctaaacattatctctagaaatagacaggaacattgttttgagtgtggagcgtgtcctgctggtctacagtgattcttccaatctaagttttgatgattctatgtccagcttcctctcttctccagtcaccttgtcgcctctaatttcactgggcacccatttggttaaaaaaaaaaagtgacaaagggaaattaagaaattcttcacattgaaccagagtgtttctgcctaaagatagtgacacagagggttagcacgagatttatcacagcagactgattgataggttttagacctttccttacttttggcaacaagtgaaacctggaagctcataacaaaactgcaagaacctttaagtggacaaataataacccgtgtccttgttctctcatttatgcccagatttgtggcctcaggagccagaagtacaccttgatctttatgtttaccttgagacagcaatgaagggatgaaggaatgaatgagtttatatttcaattaggcgtgagagatggaggtggtttaaaaaaaaataaaagacaagatagcagttttgactgggataacagcatcctttcatagaatagcctctagacctggaagctggaagggacctacagggaaaatgtgttgaacaaatgccctctgcgtagtgcattagtatgagtacaccagcaagatcaagatcgtcaggatgccccatctgctgctatcttgactttaggcctgtgccacgcaccgttttgccatgactttccgcatagcaccaggccaaaaagaactgcagagttttgagggcaaggccggtttccagcccagaatctgcaatgatccctccttgacaagtcaaacagagtcacccaaacaagcgtggcacgcaaacctttagagttcagcaaaccgagggctgagttaccaaaccgtgtcctttcagggcatgcaaaaggcttttcctgctctgcttctacaaggtagtcaggaagccaagctatttgccttgggtagggctgggtgggggtggtgaggtgggggcgcagcaggttgtccacacccggttgccagtctgaacctgagccgctccaacaagcgagcccttctccgcggccctttggctcaggggagcgcaggccggccttcctcccgcacgcgggcgcgggccagctgcagatggagaacccggggggcgaccgcgagccctctgaggcccctcaagggacagggcatgggtgtgaggggtcgcgtgcgccccctggcgccgggtccgctgggcggggtggtgggcggggacggtgggcggaggcggaggcgggaggcggagccccggggttgggagtgcgggggtcgcggcgcagagtgggagccggagagcgagcgcggctgcagccggcggcatggctagcacggcttcggagatcatcgccttcatggtctccatctcaggctgggtactggtgtcctccacgctgcccaccgactactggaaggtgtctaccatcgacggcacggtcatcacaaccgccacctattgggccaacctgtggaa

SEQ ID NO: 11579 - DNA, 2300 bp, Homo sapien
gcacagtgaactctgataatgggtggacagcggtggcatttggagaagtcagaaagacaagcccagtgagtgccagtaggcaggcatcatcactttgtggacaagtccccagactttggaagcaggcagtccggattcacagcccacccctaagctgtgggcttaggggctttgcctgccaagtgcagagaacagctgtggctactgcagtggcctttgtgatggtccagaaaggtacaagccactgagtaagctctggccagtgttggcttctaaggtaggcacgatgaagtccagccaaagtcagctaggggcaaaagggcagggctagttagaggaccaagatcctttcttctggagacaatggcaggaaactgacaaggatttttttgaaagcctcccacaagttcatgggagactcagacctctgagtgttttgactgtcaccctgcatctcagctcaggacaggatctgggacgtttgaagtctagactggtggcttacaaagcacaagcagggcaggtccttccctcctgatgtgggacatcagcctgcttgttttgggagctggggtttggccagcctcacttccccagcccttgttatgggagccacgttcaggagtctccccttctaccagaactcttcctctgtacacagagggaaacacatcagaacctggcagtttatcctgactctagagaaataagtcataggagtatccctgttataaaataataaatatgtgtgagattatttcatgaaagttttattaaaagtttccttgtgaccttattttgatcacaagtaaataaaatacagtgtgactttttaaaatctgaaattagttatcctccttaaatctgttttcagcagttcaaactagtaatatagcctatttgtataatttttaaaaatcttgatgctctataacaaatttgaaaagcatatttttggtggtcagcagttgtggtacctgctggacttaaatgcttcttcatggctatgtccacacttcagcagttaggtgattttactcagtcataggctgtattccagaagttaacttgaaagtagtttaagatgcgtttctcccatacagccaatgttacatacattgactaggttgctggctaagctgtaagaacctatttatatatacctaagcctgtctgtctgtctgtctgtctatctatctatctatctatctatctatctatctatctatcatctatctatctatctctatcatctctctctctctctatcatttgtctatctgaaatagagtactagaaatactttaatgaataaaaaaccagaccctttaaagtaagaagcattaaatctgagataccacacatgtggatccctgcccagcctcctggtgagcactcggtaactgttggccatttttaccctggctcatcacccactcccaggtctggtggtagaatgaaatgacctcccccttggaggtaaaagtggagagctggtggggggaagtgcactgtatcagtctccaagatgaaggtgagtgaaccatgcaccaactttgctggttgcatttcatcccatatctaatgcctgaccaccatcattaaaccttcacctaaaacctgaccttcaccatgaaggaaatttccttcagttggtaggatagggcttggttttatacctgctgctggcaggcttccttgtgtatgcatataacatttctctgggaatagtcacccaaagacctcatctcccctgagtgcggttgccattctggggtgagattgggaagagtccttcctcatctgcccagctgtggggctagggcattctccagccccagaactaggtcgtgaaatgcatccatgcaggtgtcgaagaatggctctcattcttgctgctgacctctcgcctgtcgttccccttttatattctgggtcttaccacttgaaaaccgtggggttagcacccagaacaagtgggaatcccaggaccttgggaatttttaatgtttttgtagttgaaatattttcattaattttctgtttagccacttgattgaaatactttataagtaatgaagatcttttgcagttgtgcccttgtgtcttaaaaggctaccgtgtactaggttgatgaatgagaaactttaacttaattatttaaaactataatttctgtagagtgtagttaatggaaagtacatagaaatcgaagatatgatgaaaaggtgaccatctatgactgattgcctcaacgttttttcctcagtaaattcttgctattcaggcatgactaaaat

SEQ ID NO: 11580 - DNA, 2300 bp, Homo sapien
ttcttatctggttaggttagccttgaactgtaaactcctccctgagttttggaactttccattgtccagtgggaagggaaagaagcagacccagaaaggctaagaacctttgccaggctccctcctcaacccaggcccaggtggggtctctaaagcaagcaagttatggctaagtgagcccctctcccttgtgggaacagccctggtccatacagccccagcctcatgcatagatgatacctgagctgcttctttagaaagcagccaatcaatcagtgtccttctaagaattctaagctccctggttagacttgacctgagtcttctttggggaaaacggagaaaggaagggagctgagcgaaggtccttgagctccctctaggggccaacaagttttataaacgaaaatagagatttttggaattcacctgagggctttcctaaaactctttaaactctagcgtgagatttggcgaatggcccatgaaccaagtccagcataccacctgtttttgaatggcctctgacataagaatagtttttacatttttactttttatttttttcaagacagagtctctctctgttgcccagtctggagtgtagtggcacaatctcagctcactgcaacctctgcctcctgggttcaagtgattctcgtgcttcagcctcctgagtagctggcgttacaggcacatgccaccacacccagctaatttttgtatttttagtagagacggtttcaccatgttggccaggatggtgtcgaactcctggcctcaagtgatcctcccacttgggcctcccaaagtgctgggattacatttgtgggccactgtgcccagccagtttttaaatttttaaaacattggaaaaaaagaagactattttgtgacacaggaaaatttcattaaagttcacatttcagtgtcatgagtgaagttttattgaaacacagccatgtttggtaatttacgctctgtctgtggcatttttgtgtgggagcagtagagttgaatgttttgtctgagactttgtgttacgaatctgcatgacttataactgttgctattgaccttggctacctggctgtggtagtgtttgtcaggtttctccactgaagattttctcttttttcctcctttccctgctgtcctttctgaaatgaagtcactatgagcagcctacactgaggagaggagacgtgcgctcccccatacttttgtttttgaagttaatgtgttaccttctgtggttttctgagggtttttgccatgagtaacattgggaataatatgaaaagaaaagggtaaaattaaaaacgttatgtccccagtggatttactgatgtggtccctggacagtgttggcctctcactaaactagcttaagaaccaggtgcattcagttcttctgtttctggtacctattaagtgcccataaaaaattttaagccccagctgggcctggtggctcacacctgtaatcccagcactttgggaggctgaggtaggcagattgttgtgtgagcccaggagtttgagaccagcctgggcaacatggcaaaaccctgtctctacaaaaaaaatacaaaaattatctgggtgtggtggtgcacgcctgtagtcccagctacctaggaggctgaggtggaaggattgcttgaacccagggggttgaggctgcagtgagccatgatcatatcactgcactctagcctgggcaacagaatgagaccctgtctccaaaaaaaaaaaaaaaattagactcgtttaagattagaaagttagattttccttccccttttttcaccctgtacatattctgataggaagaccagcaagcagtagaaacaaaccagtaaaaccacagggaagcagaagcaggagaagcgtccaagagcgtccaggagcgtccaagagggcagtcagatttaaaacacagctatgtgctccctgattttattctctgtttccatcttatgaaagtctaactgtagtactgagcttgaattttatcttatagcaactgtcagaaatccagaagtccaatatgcagatcaagtccaacataggcacattaaaagatgcacacgagtttaaagaagaccgttctccatatccccaggatttccataatgtcatgcagcttcttgatagtcaggtacgtgcaagtgggtgacagctgcagtggatgccttcctttttcttagtgaagtaatttacagtgagtgtcatctgcagaaaaagtgtttgtcttttttagtaaccctgaaggtgactagctgttatttttctcc

SEQ ID NO: 11581 - DNA, 2300 bp, Homo sapien
acccacatctcctgtaattcagtgcctaactttctaccaacaaagatccgtgcctttcatcctgaagtgggcataacggaaagagacgcagaaacctacgtgggtttaaatcctagagggctttggtgaaaagtccctaatctcggttttccacgtcactcaaatgcagggccacattagatagccttttcaaggtccttcgcatctgcagacttctgcgattaaaacgcatctctttttggaagataattcacctgaagctcctctgggaaattagcttgctgagggccagaccaacaaccgggtaggagcgaatctggtttctctttgaaaagccttcctagggttagcatccagggccagcaacggagcgcgcccccgaaccacgtgtctgcgccagctgccggattggctgagcgcattttagcgctgcggtctagacgctcgcggtcccgcccagttgccagaggagccgggacaccgagggaagaggccggagggagatcgcggaggggagggggcgggaggggggtggggtatcctgagtcgtccgtggtccggagtctggaaggccctagagcggcgccagtcgacccgcctcgccacaacttgcccagaccagacacgtttcatcctgcgccctgcaagaaggagccggcctgcctctctccgctttgctgctcctcggcctccgcgggcccggcccgcgtcagcagcgaccctggggtctgggtcccctgtgtcgcccccgcccgcctgcagcgcccggcacccgcccaggagcgcgcagctggggtgagccgagaccggggatgcgccaggcgcccacaggaggtggctgacggggcatcccgatacccgcgaagccggccctcctgcctctccaggctgcgagccgagcctctgcagatccagctggagtagccgccgctgcccccactgcctgtttgccttccaaggaagggcgccgaggttcccctggaacccgcgtctctcggcttttgtctgctggttcggctgcccggcggtgccatgcgcctgggacttgaggcgccgcgcaaggctgggggccctgcccgggatgggggagggagggaacgggaaagcatgcccccttctttcctgttccggccatcttgtgaccgagatccacgcaaggggaaaggggtggtcagcggcacgacgccccacgatggagtgtggcggccaacggagatgggtacctcgggcccgcaggcctctgcgcccagatctcagcgggggcgcgcgggccacccccacgttcagctctgaagcccttggcccagatcatgggttaatcgttctaacaggccagaggcagcaaaaataggagggataaagggccaggagctgatgtttccttaactaagcgcctaagtcattcgatcgttcttcattcacgtgtccattcagcaaattctgaacgccttctccgtgcctgtcctctgctaggttctagggacgtatacttgagcaagagagaccacagctcttgttcccgctgatcctgcagcccagtggatggagtccagaatctacagacctgccaggtcggtgtcttgatgctcttaaacagatggaggaagctaagtcttagagctgacaatttgttctagatcagggagcaagtaagtgacagaatcaaactttgaaactatttatgtctttagcactttttatgcctggttgcagggaataaaggccaattaacttggacatatggtttatttgaaaccatatgaagtgcgtgttttatttcctggatgtttttgcatgggtttatttctagttaacaatatcttgaaagtgctaaatatatttgatattacaactttgcttccagttactctgaattgtattttcctttcttctgttcacatatttggatgttaggaaagaaaaaaaaattcctgatgtctggtccaagcaggaattccccggtggattggggaatgtctggcttttcctcagcttattgatctctgtggtaaccactggaggcccccagaagacccatagaaatgagaggcctgaggtctacaagtcgctgctagaaatattttagcctctccaaagcccagaatgcagccccgacccaagtttgtaaggtaaataccatggccctgtaaaacttgttggtaaagctgatggctaaaatccccctccatctgtttctaccttcagcattttgagtatgtatccttttggaaagacaggtgaagtattacatattttggggagttctttggttcgtacttttatcaaaatgttatatttag

SEQ ID NO: 11582 - DNA, 2300 bp, Homo sapien
ggtctcaaactgttgacctgaggtgatctgcccaccttggcctcccaaagttttgggattacaggtttgagccacctcacctggcctattattctttaaaccatgtatataaaaccaaggttaggtatctgaaatgggaatatgaggcaaaataattaatatgtattgaatcagacaacacatgtgatttctgcccttctttatttatcgccttcatactaaaggacattagccaggtaatatcaataactattttcaaatgagagaaacagaaacaatcatttgaaataaattcagctacaatgcttttgtttatttactgtacaaaatgattaatgttcaccagtattattatttcattctttaggatcatttctgtcttcaaaaagcaaatatttatttgaggacttactaaatgctcaaaatgctggaatacttgaggttcttatagtctgaccgacgagagagataccttaatcattaaaaatatgtataccattatacaattggtaaaagtggtttgtgcatagatcaagaatgcatcatggctgctaagtcatgccaaagtcaattgattcttcttattccaattctacacctgtagggtaatatactgacagtggggatgggaaatacatgtaactcaaatggtatgtcaacaaataatattaattaagcaatcatctctctctctctctcacacacacacacagacagctaccgagtttgcaaaaaccggattttgcagagcaatggtcctatctatctcatattgtctgaaattcctttctttttttttctttctttctttttcttttcttttcttttttcttttttttttttttgaaacggagcctcgctctctcgcccaggctggagtgcagtggcgcgatctcggctcactgcaagctccgcctcccaggttcacgccattctcctgcctcagcctcccgagtagctgggactacaggtgcccaccaccatgcccggctaattttttgtatttttaatagagacggcgtttcaccgtgttagccatgatggtctcgatttcctgacctcgtgatacacccgcctcggactcccaaagtgctgggattacaggcgtcagccactgcgctcggcctattgtctgaaatttctatctagaaatctttccccatagtacttagaggatttttatagagatcttgaattttctttcaaaataattttaaaattagaccaatttaaaatcccatcatggtcatcttggccttatggcttcaaataaaactaaagcaaggaattcaacataaatacatatttagctgttgctatgtttgaagccttgtgctaaagtatggtacaaagttgattctgtcagggagaagcacaaggaaaggcacttttacaacggcatgttggtccagtaaaagttctgcagctactcctctctaatttaaaaacatatatatatatattatatatatatatatatatagctgcattagacacttaggttttgcaaaagatgccttcatttctcatgatggtatatacatacgttctggattacttgttacttaaaaatactgacttttgtcccacgtgttccaattttaggttacataaatgagcacactactccggacccacatctcctgtaattcagtgcctaactttctaccaacaaagatccgtgcctttcatcctgaagtgggcataacggaaagagacgcagaaacctacgtgggtttaaatcctagagggctttggtgaaaagtccctaatctcggttttccacgtcactcaaatgcagggccacattagatagccttttcaaggtccttcgcatctgcagacttctgcgattaaaacgcatctctttttggaagataattcacctgaagctcctctgggaaattagcttgctgagggccagaccaacaaccgggtaggagcgaatctggtttctctttgaaaagccttcctagggttagcatccagggccagcaacggagcgcgcccccgaaccacgtgtctgcgccagctgccggattggctgagcgcattttagcgctgcggtctagacgctcgcggtcccgcccagttgccagaggagccgggacaccgagggaagaggccggagggagatcgcggaggggagggggcgggaggggggtggggtatcctgagtcgtccgtggtccggagtctggaaggccctagagcggcgccagtcgacccgcctcgccacaacttgcccagaccagacacgtttcatcctgcgccctgcaagaaggagccggcctgcctctc

SEQ ID NO: 11583 - DNA, 2300 bp, Homo sapien
tccatagagtctgacgaatgcaaacatatttacagtaacttttcttacactcactagattactttgattttcggttttattggcaagagtgattcgtgaaaaccatgactagatgaacattggaggaaacattcccaagcattaatcacttaattttagttttgtacatttttttctgtctaatgttacctttgttgtaaaattatctttttttaaggaatgctttgtaaagcttagttctaatattacagaattcatagttatgtaattaatctcaaaatcactcaccattgaagacccttgctatttttatttcctataacacgaagtctattatctccttaataatttttaatttccatccttagaacttcttcagctctgctactttttccttaaggccagggtcataggcagcacactggtgataactcactgtctagaaatattgcattttgtttacaaagttattttctatgttcagcattttgctggctgccttgggtacagtacctcaattgaatgtctacacctgcatatttgtggacattgaaatcatctaccatttttcagagacactaccttgtgatataaaaaaacagaagccaaaaaaaaaaaaatcccaaggaatttctgaaggagcctctcttcactactctgctcttgttagaataatgagtaacactggtataacattctacaatttacaagaatatttatctgcttcatgaaacctcaaaacaaacctttgagactatcaggatcctaaccactttacagatgaagataacttacataatagttatggggtttcctggatctgactcctttattcttcacattacattatgttgccttccccacaactaatcaaggactccgttttttcttttttctttctcgaaaccatttcctccatattagttccctttggaatagaagcctttttaaaagtccaccttagtatatcttcagggaatcacaaattcactatgctatttataattcatgagtttctctaatggtatcaaggcagcaaatacaggtgaagtaataattatccacctgatagtacttaacacacataccccgtgtaaaaatactgctggtgtacagtgtgtgtgttggtgacgccggaggaagtggccgtgaacaggcttaatgccgcattgagtaacttcaacctcatcttgctcaggttcatatctctcctgaatttcccctggtaagcgcaagattcaggatccgttctcacagttttttgtttaccagttgatgttggctgcattcaggaacgccttgctctcttaagccacagtgccttcctggtctcttcttcacagggtcttccacaatcgctctttttcctgggcacggtggtttgctgaaagtcggggtggggggcggggcgttcccaagtttccaggccaattacctacctgccttagagcaattacgcacttctctctggtagtccctgaaatgttctaatcatcagatcgccccagcttctcctgaccgtttcttgcttacggctcagttcagacagtatttgttccgggacgctcagcgggaggcggtttttaccggctcactcgagaccccaattccaggcgccctgcagcttccctcagactccccgggaccgtgtttggccttcccattcgtacgctgcggctgcgctttcctctcgtaacaccacgctggcgaacctggaaaggatcaaatagtcccactcgccaacctagcgcggcgggaccggcccaaaagggcctttgcagcctgcgcatgcggactcggcggccgccaccgactccccgtctgcttccctccgggcggcagccgcggtttggagcttgctgacagctctgcgaccggcgggcgcagcctcgtctcgtgcttccacgttatcctatcagggacggggcggggcggcggcctccgcagcctatcagcgcgaaccacgaccccggcgagcccgggaggaaagccgccagaaagaaggcgattggatggcggcggcgctctggggcgtagcgtcgcccgggccccgcccaccgctgccttcctctgctgggctccagagccactgaggcctgagcgagagccgacggcgggcgggcgcagctgctgccggagcgccggcgcgtgctggtgggccacacacctttcctcctcttcactcgcgagccctcggacatggtggcccccggctccgtgaccagccggctgggctcggtattccccttcctgctagtcctggtggatctgcagtacgaaggtgagtcctgccctgcccc

SEQ ID NO: 11584 - DNA, 2300 bp, Homo sapien
aagatatggcttacagaaaggctcctttctttcctttttctgttacctgtactaagtccctgctattttacacagacaatggtcctaaagaagacactctggcactcctctgagaaatgtcaccagtgcctcctacacagaaaagctctcaaatgtggttttcttatggaaaataccacaggagggaaatgaagagttaagagtccttacagactcatatacagaacagcaattctaaaaagtagtgggaaaagcaatcattcaaaattgtgcatctctgtaacttaaaaaaaaaaatcaccattaaacagaacataggcaactttctcttaagtgtccaaaataaattattaatgataactggagataaatactacagatgagggatggtggggtgcgggggcaggaggaatgaagcttttgaaaatgcaaaagaactagaatatatgacccatattaaagtggtacagaccttcaaattccaatcccctagatttttctgggggcagcctcactgtcaaattctttgtcccaatgttgccacactacgtgttctgatttggggttcaaaaaatatggttaccaggggaagcaaaagcaaaagcccattgctatgggtgacacctaaaaactggggagtactactttaaaaaaaaaagttgagaactttcagaagaattcactataaacaattcccaatttttagttcctcgctccctttgaatggaatactcaaaggtttaatttgacctccttgacaactagccctttttatggggatgaaaatagatcagtgcatgtgatgtgtcattacactcgaatatttcgcacagtaaccgcgccagaagcattcgttaaatcggcactatcaactttaattcttactcctccccgctgccatctaagataggacagccctctattttcgctattctggagtagccaacattccagtctgcaggactgaagtgaaatttaatcgttcgtatctttttaagggaacctttttacagcgaacttggaaaagtaatgccagccatacgttgaatgacaccatgttgggagttgtaaaaccacaaactcagtgcctggccgtccgggagatggaattccaacagcggctcctcattgcaccaaactaacaatttctctacacgacagtgcatcttaatggggatggttacacactttttaaatagtcaacactgtcccctccaactcccagccggacatgacactccttccccacccaagaactccagagcgaaggaagtcttttggccaccttagtgcctcctcccagccagcaccaatgactgacagtgtccccaggcgcccagcgagggtcccaagcgaggccaggacccaaaggctgcccaagtctccgcgtcccaggacttcctgaagtcgtagcccggtgcccccgcaccccgcctcctccgactcctgcggcccggttccttagtccaaacccgctgtcccggccccgcggcccgccagtcccctcgattcttccccagacaaacccggaaccgggcgcgggctcaggcccaagccaggccgcgggctcccccagcgctcgccccacctcccgagccgctccgggacaggcgcccgggcgcagacgggaaagcgcggggggcctggtccgggagcccacttcctggccggggcagggcaggactcaccttcgtactgcagatccaccaggactagcaggaaggggaataccgagcccagccggctggtcacggagccgggggccaccatgtccgagggctcgcgagtgaagaggaggaaaggtgtgtggcccaccagcacgcgccggcgctccggcagcagctgcgcccgcccgccgtcggctctcgctcaggcctcagtggctctggagcccagcagaggaaggcagcggtgggcggggcccgggcgacgctacgccccagagcgccgccgccatccaatcgccttctttctggcggctttcctcccgggctcgccggggtcgtggttcgcgctgataggctgcggaggccgccgccccgccccgtccctgataggataacgtggaagcacgagacgaggctgcgcccgccggtcgcagagctgtcagcaagctccaaaccgcggctgccgcccggagggaagcagacggggagtcggtggcggccgccgagtccgcatgcgcaggctgcaaaggcccttttgggccggtcccgccgcgctaggttggcgagtgggactatttgatcctttccaggttcgccagcgtggtgttacgagaggaaagcgcagccgcagcg

SEQ ID NO: 11585 - DNA, 2300 bp, Homo sapien
attgtagactcttggaagtttctcttgaattatttttttccaaataatttcattgggtagttatcaagcttgggtggcttcttctggagtgagatttaggggcctgaatctcaataaatacctattatcaaccctgaacctcaccctccttgtggcaaatttctctagtctgtttcttcagggtgggaatgggagagcctggatttgaatgtcaggcacaactcttgataaccgaaaagtaagtagctcctcaagcccacccaccctcctctgcccaaagaaaacattccccctgcccctataccttagatattatctggttcttaattttctgatttctttctagaaatgagaaagaagtttgacgacggagaagatcctttggatgcagagagccagcaaggaggcggcggcaaccctttccacagaagctggaactcatggcaagggttcaatcccttcagctcaggcggaccatttagatttaaattccacttcaattaaaccaactgtttttctgctcttcttaatttttttaaagattaaaaacaaagaaatcttgttccgggaccctaatgaaaaaaaatttcaaatcttttcagtttgtccatgaccaaagagttgctttaataggaaaaaatctgttcttatccctgtcagatttatggttaatgggtttgcaacggcaaggaggcaaggaatggttctatttctgacagagcagcctgcatctgctttatgctgtctggagggaagtggtctgaggcaggctcacccgtggaagtgctcacgtattctgtattatttttctacactggagctgagattcttctcttcacagccttgcagagtaagtcagtgcctacaagtgtaagaaggagctgtaatcttcatgaggatggttatacttcagtattcttaaagagaacatgaacatttttgagctgtatgttcttagggacaactgtgcttcgatgtggtcagtctcgtcacttgtgagtagctgtgaaatctttagtgtgcatgtgtttgcacctctgtggtctgtcaacgtggctgtcactgaaggagcaagagaccatcttttaggaaccctgccaccaaataataatatatccaggcttagactttggattaatgttaaatgtacatttttttggttcagtacctgaagaagaatactgaaacttgaatctataaattcctatggacccttttaatattaaacacaacaaattaaaagttgttataggtaaaataagttcagataaaatagtggtggtatttaaaataatattgctgaagtgcagattgaaatactttttaaacaactgaagttctgagtttttatagggaatttcatgtaacaagactggtttagaaacgtaaagttgcgcagtcaacataaataaatacagaatgccatgttctccacttctaagtaaagacagtgggcagcttctgtttctccttctatcaaggcttcaccctatcttaaaggtctgtggtgcctcccacgtgggacctgtctgctggtatgtgttaaacagcagaccggcccttctaccagatcttgatgcctctgattttctcctgcctacaagaaaatacaggcaaggttagtcaggtctggctatatttccactgttgtttcatttaataagatggcatctcctcttgagatatgttcttcttaccttttaagaagatactatttaagaagtgaactattcagtctttgtatactgaatgctttttccctaaaaaatgttaatcaagaatattgaatatttatggcactcttgatgctgcatttgaaagctgaaggaattactttagatagataggaattgctacctttattctggaaaggttttgtttctgcctcaaagcattttgaagtgttttaaccattaaagggtctaatttttttttcttaatgaaatcaagcattttaattcactgtgggaggcatcctgaccacggacatccataacagcaaagcacaaatcgttttcgtctgtagtcatatcctgaaacataggtggacaaatttttaactgagagacaaaaatcacatagttgaattgagcagaacacttaagtgctttctgcatctatttaggagtctatttcttaccaataaacttgacaacgcatttggaaaactagtgaacaccttacagctttcattttgctttaatgtttcaattcaagccggtgtaaaaataatttccaaggcatttctgtttattctttagtaatctcactactggctatgtcagcaatatctttttcaa

SEQ ID NO: 11586 - DNA, 2300 bp, Homo sapien
catggggtagcagggagtagggaacaaaagcagggtcttttttttgttttatagtcagatctggattcaaattccagttgcaccattaattacattacactgtgagacctgatttcttcatttggacaatgagaatgataataatctgtcttacaggattgttggggtgattaaatatgctcctatatttaaagcacatagaaggaacccaaacacagagtaaattttcagtaaatattaactgctattttctctcaatatttgaagggcatcatgaaaaataatgggcatttgtagacttaatttgtgttacactagctaaaagttagcataaaatcaaaactagttgatcaaacttctgtgagtagagagacatttttagctcagtatgtggatgaaaatctgacagagttttctgcaattttcatgacctgtcaaatgaagtaatgcatttctgttacagcaattattctatgtaactgaaaaatcacatttctcaaatgttatgaagaagatttaagcaacataattttcaagtttattgttcttttacccaacttggacattatgtgattttatgctatttaagttactttattccacaaattttcagctttaaatagaaccaagacacagaaacattaggtttctcctgtttgatgctgtgcttaatgtaagcaaaatacagccagttttctggtaaatttaatcagtaaagatagccaatgtagttaaccccttaaaacaatacttttaagattttatttccttattctaatgttactaacaaaactgcccctgtcgctagaggtagtatagataagattcaactgttttccaagactgctgattcattgttcagaaatgtaacattgaatgtgctttcaaagttgctttaaaaattatatcacgtcttaagacaatgaaatgtttatatgagtacttttagtattatagtgcccatttttgtgtttttaagagcccgtgttttatatttaaggtgaaacatgatatttatttagttgagatgccaaaatcccagttagtcacctttgatatgagaaaatgggatagaaagattcaagaactatgcttcagtaatttttagaaaagatgaactgtaggagcaggtgaaggggaagtgagaaaatctggctacagccattacattctggtctttttaccaagaaaaaaataatctggttgacgtgttttctgattatcattaaatataattgttttgtacataggattatgtcagtctacagtagggttttgtgtacgtggtgttagaatgattgttatgtactaatttcctcagaaagtgctcatggtagtagagtcagtagtggttgtgatgggagagccattctgagaaattaggtatgtggcaatttggcagcttctaactttgtagttactggtttaaagttaatataggtgaccttgctaggctcctaaccatttatacagtatcagttaaaagaagactggttggtattattatagtaagtatgtgatttttatgtgatttttctcttgggttttgctattttatggctttcttataaagtaattcatgtctatatagtgtagagtacaatttatagatgaaggtgaaagaaaattgaaattaaaagatttttaaaaatatagaccattgctttcaaaattgaattcagattgaaatggtatttggaagcatcatgatttatgtttcaaatcacgatttatgatttatgtttcaaatcatgatttatgatttatgtttcaaagtaaaactttctaatggaaataatttgctaattttttatattgtcactttgattttggtgtttatacaaatgttatttgtaatatcaaagtgagaaagtatatcttgtttcctagcgtatttagtaaatggcaggattaatagctaccatatctttaatctctaattcatttttgcttaataaagaaatatctatttgatgaggaaatgtttttcctaaactgatatcttctagaagatatatgataatataactgtttttattttaagttcttaggacctttagatgaagatttttatgcagaagatttttacttgttggaaaagataacatttagtaatttaggagagaaaattaaaggcattgttgaaaatatgggaatcaacgcaaataagtgagtatataagttctaagagcaattcattttgggtttggtattttgagtctaatgtttttaagattagaaaatgtttcaaatatatagacaagtaaaggtataataaaagacatatataaagaatataa

SEQ ID NO: 11587 - DNA, 2300 bp, Homo sapien
tatttaatgtgccttttatatggccaattatttcttaaagatttgcagtccattggatatgctgacatgtaagacattcactgtcaatattttatttccttaatcccacaatctcaataaaaatttcggtctaaatatgagtggaaatggggagttaattaaagcaaataattgtgaaagattcgtaatgtatttttctcgtatacactatggatagaaatgaagtgcatttgccttagctttctacattctttccataaagcaagggttcttcaatcttcatggagtccccaaataacatgtgaatgtgaagtattgtgctaggtactgcacgggatgccaaagatgaacaaggcatgagttctgggggaatatactatctctcacaggagaaataagtaagtagcgtactcaagtattaaagtgagaacttaagtgctatatggcagttacaataaagaggaaatttaaagtaaggatagatcataccaagtaggataaatcaggaaatgaaggctaaactttggaagtgagaaattattctggaaattcgtggaactgcttagcggaatagggttttctaaggaagggtactgactaagcaaatgaaacgaaaaaagggaatgactatgtttccgcaacttcaagagatccagcttccctgcagggcaaaggagtaacaggagagaaaaaaagcaatgaatccgtgcatccgctaaactcttttaccatatattttactctgacaaaacaactatcacgtattggccttttgtttgtttgtttttttgagacacggtctccctctttcgcccaggttggagggcagtggcgcaatcaccgttttctgcagcctctacctcctcggcttaagctaccttcccgcctcgaccttccaaagtgctgggactacaggcgtgagccaccatgctcaggcttattggcacttttctgtgcacttttaaatgtaatcctctaaatcactcttctccacctttcctgtgcataggaatcacctgtggttcccgttaaattggagatcttgattcattaggtctggggcggggcctgagcttctgcatttccattgagctcacagctgaagcctaccctggaccacaccttccaatggaaaaggctccagtgtgatttctagccactagtattatctgcgaacttgggagaaataaaatgcaagttctcggcccccgcaagggctctactgaatccgaaacactgtggggaggcccaccactctgcagtgttttaacaagcaagtggttaaagtttgagagccacccgtaagtcacgggtttcctaacatgattggacactggaatcacctgcggattttttttttttttttttttttgagacggagtctcgctctgttgcccaggctggagtgcagtggcgggatctcggctcactgcaagctccgcctcctgggttcacgccattctcctgcctcagcctcccaagtagctgggactacaggcgcccgccactacgcccggctaattttttgtatttttagtagagacggggtttcaccgttttagccaggatggtctcgatctcctgacctcgtgatccgcccgcctcggcctcccaaagtgctgggattacaggcgtgagccaccgcgcccggcctgcggattttaactaatactactgatgccgcatctcaccccccctcccgagattctcaggtacggggcgtggccttggcggcggccttataaaagctctcccaggtgattccaacctgtagtaacacttgagaactgcgtgaggtggggacttcaactttaactggacttattttcctcctatgtaaaaggtggacaatatgcaagtggtcctgactttgcttccagattttggcaactccagagccctagttcggtctggagagccagcttcccgccccgtgtcctaaggcctctgtccgagaacccaaagtcctgggaatggacccgcgggagcggacccgcgggagcatctgtgacgccgctcagcaacccggcgccgccccggcggctccgacgtggcccagtgtccggctggcgtgggctctccaggccgcacccactaaaccgcgccggagcgggacacgcatgcgccggtctggacccggcacccagtaacggactcgagctcctcccaccggaagtgggcagccgcgcagcgggaagagccggccgaagcgtggcggccacagactgtgggtaccgggtccgagggactcgcgcttttctctccgtgccatggcgccagcgaaagccacgaacgtggtg

SEQ ID NO: 11588 - DNA, 2300 bp, Homo sapien
aaataagctttaaagaagctgattcatctcacccaacaccttttctactgatatagcctcctacatattaggaaaggcaagggttggagttgtttaaagagttgaaaacgggaaaggaaatagaggagggaagttttattgagaagaattccacctgtctaaacaaggaaaatagtatcctatgggcaaactttagcatccctgaaagagccctggatcttcactgatggctgcagaggggacaccctgataaatagatgacatcgacagagtgtctcaggaagaaacaagtgcatggattcataaaaaggccagatgggacggtgggctgctatgaaatattatagcacacctgtggaatacggtagtgtagctgggagggacacattggtctgggccagggaatcacactgcattgtcctcacacattgcctttaacacattgccactctccactcggaaaataggtcgagcaggtctagggactgtggtagggcagttacaacaatttgatcgtatatcttttcactatctgaaaaacagaagttgttattgagcaaagatttagttctggggtaatactaaatgcaacatctagatgtttgaaaaataaagtttccaaaaaacatctgcatacaaattagggcttatgaaatataggcaagcttaagtgttatcttccaccattgttgggaaggaataaatcttgaacatttaggagttcaacgtctattagtagaatgatttttttaggaggtgatccctaaactcctttttatgttctaagtactgcatggttgagggctggactgtctagtgctgaaagaaagtgtgtattgaacatagagcctgatacacagttaggcgcttaatggttaattgatgctggttgaatacagttgtatagttggacgcaccaagtttgttattaagggaggaccaccataaaactcgaacaccagttagaatgtcttgggtagaaattcacagcagtctggagccacgttcccctgctgagaagggaactgccaacccgtgtaaagtctggtctagtgagtgttcccgggagtgtgcaggtgttattcctgaaaataaggccggccactaccagacagagaagctgcccattttaaggtgtcagatcaacgccagcgacgcttacctcggggcctcctctcgccccacctttgcctttctgccaaatctctccttgctcccggccgaagggattcccacccccagctgcctcctccgagccccgcggagcagcggactcctcccctggaaactcctccggggctgggggaggctttggcgcatgctccgtacctagggcaggtttttgctgcgggtagcagggctcctgtcacaccggctggcgggttgtggcggtgccagcctgtgtgtgcgagtgtgtctgcgtgcctgcgcctgggcggacagcccggagcggcagtgcgactcgccgggagaggcgtctccgcagaggcgcctcgcccgctgccgctgcgctgcgggggccgctctgcaaacttgcggcgagcgccgtcagccctcgcggctccacagccccgcgacctgccggcaaaggcgccgggcgcgcgtgccgggcgcggtgcccgcggccggccggggcggcgggagcgggccgcgccttcgcccttggccggcgccctggcgagcctcatgcagccccggcgctcgcggccgcagctacccggctgcccggctgcgcgcggcaggtccaggacccgaaccccgctccccagcgcctgagcgcctgcaagccgccggcgggatgccgcgcgtcgcctgagagagccgcgccggggcgggagcagggagcgggccggcccgggcgcacccgggagcgcagggcgccccacgccgcagccgcagccgagcgcgccggcgcccgcctcccccgcccggctcgcaggccccggctcctcaagccccgagggccgcggggccgccagccagccacacgcctcggcgtcaggggcatggaggaacggcgggctccgagccgcgccccggagtccgcgaaacttccgagcgggcgcccgtccgccctgccgccgccgccgccgccgcttcgcctgccggcctgagagcgggaccatggatgaaaggttcaacaagtggctgctgacgccggtgctcactctcctcttcgtggtcatcatgtaccagtacgtgtccccctcctgcaccagctcctgcaccaacttcggggagcagccccgcgcgggggaggccggcccgcccgccgtcccgggtcccgcccgccgggctca

SEQ ID NO: 11589 - DNA, 2300 bp, Homo sapien
aaataggaaattcaacccataatgagcagaaaaaagtaaaacaatagaaactatgcagaaataatattgtatacattgaattgtatcccccactgcaccaaatttgtatgttgaggtcctaaattgcaatacccagaatggaatcttatttggaaatagagtaattgcaaaagtaattagctaagttaagatgagttttagggtagctcctaaagcaatatcactggtatcctttaaaaagggataaatttggacacagagaaaaatatgtataagggaagatgatgtgaagagacacagaaagaagattaccaactgcaagccaaagagagaggcttagaattgatccttccctcatagtccttaaaaggagctcaccctgccaacatcttgatttcatactctggcctctcaaactataagataatacatttattttgtttaagctcattttgtggactttgctatggcggccctagataactattgcagacatcaataataatattagtaaagaatgacataaatataaacagtagactagaaaaggtagaggaaaacatgcacatgataaacagacttttagaaaatatctttagaagatccaatttgaagtaatattgatgaaaacaacaatatttgagaccaaaaaatacatgaagggaattaataacagattctacctacagaagaagattagtgaacttgaaaacacagcaataataacaacctgaaatccaacacagagaaaaaaagacaaaaacaacaaaacaaaaaaccaacccaaaccaaaaagaacagtatttgtgagttttggaacaggttttagtagcctaacacaagaaattgatgtcctagaagaagagattaagagaaaaataaatatttgaagaaataatggcccaacattttccaagaagcttaataaattccaagtaaaagaaacatgaagaaaattacatcagggtatatctgatatggtttggctgtgtccccagccaaatctcatcttgaattgtagctctcattgatacaggagctagaaagaaattatttaggcagatagtgagggtaaaggagtcctcggcaaggcttctctttaaaaaaaaaaaaagcggcccccaaatcatttcttttctaataaacagcagcctgaaaaatcgagctgcagacataggtaagcaagctggaagcttgcatgggtgaatgccagcagctgtgcaaaaagaaaagggctacctggaagcctggtatgttcaacatggaagcttcatcttcccttttctttgtcaccatgtgtacagtaaaggaacaggcaaaatggtgccagccaagtacagaacccatctgcataatcaaagattagggtagggtggccagcttcttcatgcactatgcaaatggcacacctggtctggccaatcttttgtgccctatgtaaatcagacaccacctcctcaagctcatctataaaaccttctacatttcattgaggaagcagcaacccattttctctgggatccctctctgtgcagagagctcctctctttctttcacctattaaacctttgctcttaaccttactccttgtgtgtctgcatcattgatttccttggtgagaggcaaccaacctcaggtattaccccagacgaatgatgctgcttcaccataatccccacatgtcatgggagaaacagggtgggaggtaattgaatcatgggggcttttctttcccatgctggtctcatgatagtgagtaagtctaacaagatctgatgatttgataaagggcagttccccttcacatgctgtcttggctgccgccatgtaagatgtgcctttgctcctcctttgccttccaccatgattgttagcttccccagccatgtggaactggagtccactaaacctctttttaaaaaatgaattaaccagtcttgggtatttcttcatagaaatgtgaaaatggactaatacaataaattggtaccaagtagtggggcactgctgtaaagatacctgaaaatgtggaagtgactttggaactgggtaacaggcagaggttggaagagtttggtgggctcagaagaagacaggaagatgtgggaaactttggaacttcctagagacttgttgaatggctttgacccaaatgctgatagttatatagacaataaagtcccgactgaggtggtgtcagatggagatgaggaacttgttgggaactggaacaaaggtgactcttgttatgctttagcaaagagactggcagcattttgcccctgtctttgagatctgcg

SEQ ID NO: 11590 - DNA, 2300 bp, Homo sapien
agtacaaattttgctgcaagctcttcactacttaaatcactttgtaaataacagatgtacatcatgatcagtaaccaacctaatcacttcttttaaagtgtactggtgatcggtcactgttgcatttgttatttgttcagtttccacacagacaacaaaggcatgtagttgtgttccctctttgtctcccagtgatagacctacgagacattttataaaaataggcaatcaagagagggaattggccaacaaagctgtccaacaaaaaatgaaaattgatagcattggatgtgaaattcaaatcaaacataaatggattcatagaagcaatagccggccatgggaatgttgatgctgctgccattgagagactcagtatgcagccagaggagcttagtgaaggcgagcttgtcagcctaaatgagaggaatggttgtgaagaaaagaatgaagatgtcatagaggaagtgaagctggtaagaagaaaacttcacattataggaattctcagagatacttcaagacatcgaagacacaaagaatacaacggtgcaagctgatctaaatttagaaaggagtatgacaatcggataaagcattgaaaagatgctggctccatgtcgtcagttttatgatgagaagaaggtaagcactgcctattctctctttttctatggaaattaacttttatttctataacatataaaaggtataaataggacttatataaaaccaataattgcacacacaaacgggaattatgtgaaattaggttatttatatatctctttaagccagagggaggaggaagaacaggatgaggtccagtaggcccaccgttaagttctccttagcttctgtgttcagtgaaggtagcttgccaggcagtgcctcaggatgacagtgtggggaaggggagtggagagtgtgggaggagtgatggtgacgagttgtgaggcttctgggcacggctgtgcgggaggcacttgaggggaagcatgactgagatggaaacagtcttgtccacacccagcaggtgggacttgtcagtgggagatgagccaagggtcttcgcagctcccagttggctctccttaacatgcttatctaatatggtgtagcataggcagggatgagaggtcagtccacagaagggacatcaaagggagcagccgccacaggtgcctcgcccaatgctggcagttatgtgcacaagggctgtggctgaacggtgctgacagcagagctcacagaactcttgctttctcaagtttcagacacattctgggaagggcaaactggtctatgagtcacataatacgcagaggggtgctgataatccaaaaaacttagcaaaacacctttcgtgcccatgatccaggcttcagggagccaagaagaaagcccaaagccctgcctaggcctgcagggctcgcgttcactgggaatcctccccaaagcctctcctgccacctgttttttttgttttgttttttggttgtttttttttttgagacaaagtctcgctctgcccaggctggagtgcagtggcacgatctcgcctcactgcaacctccagcaccggggttccagacattctcgtgcctcaaccccgcgaatacctgggatgacaggcgcgctactgaaccggtacatttttgtattgtagagccaagatttcgccacgttggccaggctggtctcgacctcctggcctggtctcgacctcctggcctcaagccatccacccgcatctgcttcccaaaatgctggcattacaggtgtgggccaccgcacccggaccatagttttgttctgccatcttgagaacaagctgccgtcgttatttcgtggctgaaatgggatctgctcgtgattcaccgtcattccgggaatgatcacagacattttcctaggaccttcagatcccacttcacctgtttcacaggaaacgacagccagctcctgccgtgtgtgagccttccctaccagactccggccatgatggggcagacgccgcggtcataaactgtaaacttggttcccctgaggttagatctaagtttgccagtatacctttctccttcacgagataaatcagttggatcagtggagataaggcagttggatgatttgctcttttcccgctttctagctgtaagaagaaatgtcttctgattttcttctttttccaagtatatacagtaagtggagcaggggccccaatccattcctttttttatccctgattatatgacatcttactgtgacacttcaaggggcaggactatgcttaaaag

SEQ ID NO: 11591 - DNA, 2300 bp, Homo sapien
taattctgtgtcctcctttgaaaagtgaatacataggactgaattttttaaaacgtcagtttaaaaaattatagtaaaatacacgtaaaaataaatgtactatcttaaccatactgaagtgtggttcagtggcattattattgtgcaacaatattgttatgcaaccaccccaccacccatccacagaactcttttcatctaccaaaattgaatttcatactcattaaacaatagctcctcattccctctccccacaattcctggcaaccattattctaatttctgtctccataactttgacaactcaggcacctcatataagcagaatcgtacagtatttgtgcttttgtggctggcttcttttgtttagcataatgtcctcagggttcctccatgttgcagtatgtgtcagaatttccttcatttttaaaactgaataatgttccatggaatgtatacatcacattttcttcatccattgataggcacttgggctgcatccacattttggctattgtgaataatgctgctatgaacatgggtgtgcaagtatccgtttgagtctcagctttcaattctttggggtatattcccagaagcagaattgctggcttgtgtcataattctatttttaatttttagaggaaccattatacttttttttttccatagcacctgcacaattttaactttacaggactggatatttttaaatgtcctttccatgtctagagttctaggacccagtacttgtttttcaaataacctctttaagtcatttcctcgttagctggaaatcctgctcaccatggaaaaacactgggatgtcttttacttcagaaagccttcatttgggtttagtcccctcccagccccttatttacaagtggcaagccctaatcatgtttttaatttatttcttgttttcctataagacatcagctcctggaagcaaagattatgtattattcttcaatatctccacggtgcttgacacagaataatcaaacagcaaatgtctgatcaatgcataggtgggaacaaaacagggtcaactatttccagatgaagaattgaaaaaatgattaaacatagtaaaattagagaacattttttctcctaatgcaaaatattttcctggagaggctggaattcaaataatcaaaatgataagcatgataataaaaatgcctaactagggctatcccaaccatcagccagggcggaatctttccacctgggccctggtgggacacctaacctaacattcttgctcctgctggctggcattcccagaggatgggctatacatggtgtttgatgcccatcaacatggaagtgcagaagagacattcaatgcccgtccatggaagagcgaagaggggcattctccaagcacccccattcgctaatacagtgaactctttgatgctggaagagatcttgaagttcaacggttcgggaggcgctagtatactggacgatgtggctgaggttcagagaagagaaaaggcgaatcctaagttatgtagcaagaaggcaacctactccctagatctggagatacagacaaacgctctttgcagggatagaaactatttttaagccaccttgctaagcgctggagggcagggttgtaattggatacagggaaatgacaacgcttcagtaagtcgcctccatcccacgctaaataagaggcactggacgcctgggcgacagagcgagactccttctcaaaagaaaaaaaaaaaaaagaggcactgggctgtaggagagtggtgaaatttctggaccaagacaaggcggccacaaccctcctggggcaacaaccctcccgccgggctggttttttggaacctctgcaaacactttctcctgggtcagtttcccgccaaaccgggatggaggatgtccagaggtcccgggagtggaagccgctgtccctgtgtctactgggaagtgggcgaggcgggatgctgctggccaggctgctcggggcgaggacccgagaacacgcacttgctcgctgggcctcggaggggtgggaggggcggggcggtgcgcagcctccccgggacaggtctgcggtccgggaccaactaggctgcacaggcacgctgggcgcatgtccgcctcgccggggctgccaggtgagccgcgcgtgatcggggagcggggcccaccggccggagggagcgggtataggggaccctgccctgacccggagggagacgggaggtgcccgaggagcaggggaaagagcacccccgcacgtccctgcagcaggcagggtcgga

SEQ ID NO: 11592 - DNA, 2300 bp, Homo sapien
attttgtgtgcattatcttaattaatatacgacacaagccttgatttctgagatggaaaaatcaactcaggcaagctaactacagaagactacattgttaagggtttcaaagcgtctggtacaataaacaatacagaatgctttcacaggagaacatcagagagggtaatgtggccacagaagacaagacagaataaagggaaaggtaagctgaggtctaaagattgagtaaggcagaaataagcatgactccatcaggaagttcacttgggaaaacagtggagaaaaagttgagttgaaagggagagcccagattatgaaggcccttgaaagtctataattcagattttatagagagaaaggtttgaatgtgaaaggaacatgactttacatgattttaaaaaacccgtctggcaacaagggagcttgaagatgaggaggcctgagttccagagactgccttgttagcatttgtgttttccaggtaataggtcagagttctggcctacctgggagggaaaatcaacaaggcttagtttcattggttgagaatgggggaatgtgtcaaagataactgaagtttcaggaatgggattcatggaatgatagtttcaaagacagcagagggagatgaggaagaggagaatcacaaatctgtttaagtatattaataattaaaagtagtttgtatctgtttgaccacagaactaatttaaatttccagaagtattacagtagatgaaagcctgcaagttaggatatgtgatagaattacatggggaagacaaagaatgtaagtataaaaactgaggggaataaagcatggtagttattgaagaaagtagcctagaaattatatgaaatattatgtttttaagatgcaatggcaaaataaaaagaaagcattccattgcattctgttgcttcattacagatgcgctgaacagttgcttataaaaatcgtgcattgggttcaacctttcagatgaataaaggctttgttctgtcttggtctcatcatgtaatcatcatactttttttttctcaaaatgtggtatttaggggaggaaaatgtatgcttgttgtgtttgctcaatgccatatgtttttgagtttttgttttcaaggcatacagaaatgctgtagactgggaaataaataaataaataaataaataaataacccttcctaaactttctcttcttctgctttatctcaggaaactccagcacctcctagaacatcttttgtggaatggcacctcatgggggcccttggatcatgtaccccttgtattcaacagtaaacatcttcctataatcattgcttcattaacgataatgtgagccaatgcacagtatttatcaaatggcatctaagatggttaaagcacacctaatcctctcgtgggtgcctgccaagagtagaaaagggtagtgtatagatatcaattttattgtccagcattccctaatcgaagtcccaagtggtctgaaaacttagacgaaagataaatgggccgcagtaattaaccactgcaataacagatgttatacaggaaacctgtgtgtgccagagctataagcatgttttgattttgaatacgcacttgggctagcacattcttcctcaataatggaaatatgtaaatgttttgtaaggtattaactgccatggcagacgttgaattatttttcctttaaaaaacatatacatatgctttgtcagatagtccaaggacttcagtttcatgtacaacctggatttctttggaatctgcggagtttcacattttcccaagtgttcacggtgaagctcctggcttcgagctggctgtcttcaagggtgttttcttgagctacccctctctctgctctgccaattatgtgccactttgtcttggtgctatgattgctttcttctgagagggaaattcctctttcatcagtatggatgcactgtttttacacactgcaagtgctgtgttactgtgtcagtcatcctattagggccagtttcagacgagtagggctgacgagctggctggggattggctggccccggctgggagggatttgtcggaaggaagggctgcagcttacagcaacagagtttagactgtctttgcttcatcatctgaaggtaaaattttccagatacggcagacggctttcagagtacaataaacagggaatgagaactatttacatggaagtttctttctcatgatgcggtggagaagcctcggccacttggttctgccagatgttcctggggttactgtaaatgggaaggacagg

SEQ ID NO: 11593 - DNA, 2300 bp, Homo sapien
ctgaggtgaggagtttgaaaacagcctggccaagatggtgaaaccccacctctactaaaaatacaaaaattatctgggcatggtggtgggcaccagtaatcccagctactcgggaagctgaggcaggagaatcacttgaactcaggaggcagaggttgcagtgacccaagatcacaccactgcactccagcctgggcaacaagagtgaaactccgtctcaaaaaaaagaaaaaaaattaaaaaacttaaaaagccctaatgcaaggaagctcgtctggcttgatttacccagagttaaataaacttaattgatttggggtcatactttttaagggaacacttgtgaaccacttaaaaattattgggccgggcacggtggctcacgcctgtaatcccagcactttggaaggttgaggtgggcagatcacctgaggtcaagagttcgaaaccagcctggtcaacatggtgaaaccatgaaaccctgtctctactaaaaatacaaaaattagccaggcgtggtgtcagacacctgtagtctcagctactcaggaggctgaggcacaagaactgcttgaacccaggaggcagaggttgcagtgagccgagttcatgctactgcactctagcctgggtgacagggtccagtgtgggtgacagagaaagactccatttcaaaaaaaaaaaaattattgctctctgaacttatttgttacctgccaatttaaaataatctacttccagtcttcattaagttcttcttaggtataaattttttagaaagacatcaaggctcagcaggtatgtaaggtcatttgtggcatatcctatttatgaaaataatcaacttctggactttagtcctttattcatgcttgtcccagtaactggaatttaatgtttaatgatttcataacccttgaaaaagttaaaagaaactgaaggtgcttattttagacatctgaacttactgactatatttttgttgtagccatgtgttttaactccagcattccatactacagagcgtttttagattatgactcagttaaaaactaaactgaactcaactaaaactaatttacattcctgcacttagtcatcagttaaattggtcaataaatatttcttgagggtctaatatacgccgtagactaaggcactgggaatacagaaatgaaaactacaaagaatagtctttgccctgtgaatgttgcagtgtaaataggaagataaacattaggtaagtcatggtggagaggaagtattaagatacctgagaaaaaatatcaagaggatcctacctacccatctccaagtccacatctctgtaaactaggaagaacataaagaagaaagagcccacacttcattcaaaatgacaatatctttattacataggagggacacatcccaaataattgtttatagcattcccaacaataaaatcaatggcctaaatgtgaaattaattggaagccacagtcctaatacactgttttggcgattaagcacattagatgggattgtttcagaaggcctaattattgtgtctgccacactcatctgtttgagtcattcctaacttttggactgctgcctagacaattctgcaatacggtttccgttgcatattcttttttttatttaatgcataacttttctcactatactcaaagctcaaagctctaaactgtgcttttgcaaattctagataagagttcaatagttcgttgaagtggtgattccattgagtttgtgtaaaggttaatatttcatttctgttttgcaggtttatcatttaaaagtgcctgtgtgaagtcacttttgctggaaaactgcagcttgggagctttctttgtattcacatcccactcttctgtcaagtacactttaccctgaccttatgagtggatgaagatacctcagttgtctgactttgccaattgcttaatttcagaatttaaaaaggggaaagaaaaacatcctgctaaaatatgaacatctgagtgtcttattttccaacatcgtcaatagctgtgagcgtcagcattaaatattctcccaaggagtgccatgatattgaagtcactttattaataacagctgtatctgcaaaacagtcaagagactcggacgttgaaagccagagatgacactgagcatgcttttattgcggcctaccatctttaagtgggacatattgattgatgagtgattgcctgtccatacactctctcatcatcctgttccttggattggacttcactaagcaatttatcactcaccttcagacttacatg

SEQ ID NO: 11594 - DNA, 2300 bp, Homo sapien
ttttgtttggtgaattatcaatctgtctcaacacaaaaagaaggaagactatacaatccttttaaatgcttcttttatttcattggttgtacattgggtgagtgaactgaatattacaaccaaaacatagtattgatacaaattagactcctgtttacactgtaaggtaatgaatgagggaattctttaagtgttacagaaagatttagtagaaatgttaccagtggtatggctgaaagaatatttcggtgaagtgctgttatatcctgaaaaccaagagtgaaatgtagttcccatacaagtggagagttagtctcttaactacagtatttgttgaactgatatcttcatgtcttggatattggtgatttttgttttttaattaaacaaagcatttaagatttattcatcatagtcagacttctgaatataaacaaacttttggcaaataatatttatacagaaaaatagttttagatcctctcaaatcccagaattattctataaaattacattataaataaataaaaagcaaaatctgttgtacatatatttgtacatctatgcatttgccttgcctcctccttattgtaaatggcatatttatgactctttgcatattgtaatcacaattctggaaaatggatatcatagtaaaaaatacagtcttctatatttgcttggggttacaggtgatgtttttgatgctccattattaaagggctgaaaatagttgtgtgctaataattttaaaaatcaaaatcatgaaacaaaagaaaaaaaagaaagacaatgttacaacaattaatctacaaaaatatttcagtgattcccataatttaccttttagtaatgtatactatgttttcaatgagtttaaatgaattaacaaagaaaaaaacagaaaaaagaaaacaagtttgaatgttttaggcaagttgtagcgtaactacattgttatagttgagaaaattacaaatatcaataatacataaagatgaaactaccaaagtaatacaagttagatacaatacttttccacaaattaaaacaaatgcaacgatacaagcactatgtaagaatacatttagcgtgtgactttcttttagatagggttatcagatctacgatataagataaatagatagtaattcgactttgaccaacatgaattaaaatgcagatttctttttttcctcaaacaaataatgatacggttggtgcatctagttttcagaacaggcgatgatcccaaatttaaaatattttacattcaatctcaaaagtcaaaatacttcaatcactaatatgttcacaaagaaaatggatgtttgaaacaattacacataatattcatttataacagctgttttgttttttaaacaataatttaaaaactatgtaggtactgtataggctatgtgcaacatataaaatgtgaaatatgaaatatttggtacgatagtgcttaaaataaactttaaaacaaactttctgaacaaaatttaattgtatcgctattaccttgaagatcaaccaagtatttaaaaaagtaaacaacattaaaatatgtttcatccatatatagtatatatatgtatgtgtatatataatatgtatgtacttgtattaaagttttttatacttttgagacataaaatatgctttaaggtgaaagaattaaaagaactatttttttccatgctgtagtcagttacaaccctttaatccaacttttgaaatgcaaaacagtaatggattttttaaaaagtgaaactatctactttttgtttacatagtaatttagattaaagtcacagtcaaatttgcagtgactaaactcaaacttacttaaattagaatattatacagatctcctcacctacagcttccttgtttgactaggtttttagttaagaagagttattctgtaacaggcaactggatggtgagtttgaaagactaatctcttagattagactgttggcatgggcctctcaatcttgtcaagctggatgaagtctggcaaaatctaggcacttctacaaagtctctcttataaaacaactttaaaaatatacttgtaaaataataccttcaagactttgtttggtggggtatgaagctcataccgtgcaaagtttctttttcaatctatttaatgttaatctagaatcacatgattcaacgtggcatctccaggcaaaccaaacaccacactttgatgtgtccccagtacttgtgcttgaatttccattcaaattttagacctgcaggacaggtatcggttttacttcacc

SEQ ID NO: 11595 - DNA, 2300 bp, Homo sapien
tttctatgctatatcataaccactcaggaggcctgaagctttaaatctgccatggagaaaactcatgtttctgccttggcccacagagaaggcaatttctgctaatctcagtgtgacaaggagtgttcccacccaaaaggccaatagcaccttccttgacaaatatggtgggtctcaaaaggctgaagaaggagcttctgttgctccttctgcccacacaccacctcttaggaggagactgcttactgacagaatagcagggaccctcatcaccctctctttgctgaattcctgttctattcttgagccacctagctaggacctctgcatagaatagaactcaccattctatctctttctgcagcctcaggtctgattcatgttatcccatcaagctcttacagaagcctctattataccttaatgggtcctttttaaaatctaatctattcatgaaactgacattttgtttcccatttagttactgatgccattgatcccatatcttttcattatcagtctgagatgtgaagaagagggctgagtggtgggctttattttcacttctaattttaaagaatactaaaaatacttctcaaattaccatttttaattgtttttcttgctgctaaaaagccaaagccaaaagcaaaaactatcagttttccattcgaagacccgagtttggtcttctttgaagttaacaaatactgtatgtgtgaaggtgaaaactattttgtttggtgaattatcaatctgtctcaacacaaaaagaaggaagactatacaatccttttaaatgcttcttttatttcattggttgtacattgggtgagtgaactgaatattacaaccaaaacatagtattgatacaaattagactcctgtttacactgtaaggtaatgaatgagggaattctttaagtgttacagaaagatttagtagaaatgttaccagtggtatggctgaaagaatatttcggtgaagtgctgttatatcctgaaaaccaagagtgaaatgtagttcccatacaagtggagagttagtctcttaactacagtatttgttgaactgatatcttcatgtcttggatattggtgatttttgttttttaattaaacaaagcatttaagatttattcatcatagtcagacttctgaatataaacaaacttttggcaaataatatttatacagaaaaatagttttagatcctctcaaatcccagaattattctataaaattacattataaataaataaaaagcaaaatctgttgtacatatatttgtacatctatgcatttgccttgcctcctccttattgtaaatggcatatttatgactctttgcatattgtaatcacaattctggaaaatggatatcatagtaaaaaatacagtcttctatatttgcttggggttacaggtgatgtttttgatgctccattattaaagggctgaaaatagttgtgtgctaataattttaaaaatcaaaatcatgaaacaaaagaaaaaaaagaaagacaatgttacaacaattaatctacaaaaatatttcagtgattcccataatttaccttttagtaatgtatactatgttttcaatgagtttaaatgaattaacaaagaaaaaaacagaaaaaagaaaacaagtttgaatgttttaggcaagttgtagcgtaactacattgttatagttgagaaaattacaaatatcaataatacataaagatgaaactaccaaagtaatacaagttagatacaatacttttccacaaattaaaacaaatgcaacgatacaagcactatgtaagaatacatttagcgtgtgactttcttttagatagggttatcagatctacgatataagataaatagatagtaattcgactttgaccaacatgaattaaaatgcagatttctttttttcctcaaacaaataatgatacggttggtgcatctagttttcagaacaggcgatgatcccaaatttaaaatattttacattcaatctcaaaagtcaaaatacttcaatcactaatatgttcacaaagaaaatggatgtttgaaacaattacacataatattcatttataacagctgttttgttttttaaacaataatttaaaaactatgtaggtactgtataggctatgtgcaacatataaaatgtgaaatatgaaatatttggtacgatagtgcttaaaataaactttaaaacaaactttctgaacaaaatttaattgtatcgctattaccttgaagatcaaccaagtatttaaaaaagtaaacaacattaa

SEQ ID NO: 11596 - DNA, 2300 bp, Homo sapien
ttatattttactacatacacatttttaaattcagaggacatttgtccttgataattttaaatgaaaacttggtgtgtgttcattacagcaaggtaatgcaaatataagttatccattctaatataacgaagctatagggaaataagaaactactaaatttgagtagtctttgtagtagtttgactatcgacagaaaagatggtgaaagaatacctggcttttaactcagaccaaaatcccctctgcatgatgaccttgtgggaaagaggaacggggagaggtatgccaggctctaacaacagaactacagaaacgtgttattcgcaggaaatgtgcgacagtaacgaacaggtgagactagtttgagaaggacatagtttaaagaaagtaaactgaataaccagttactgcaaaaaataatgcaggaaagcttggggatgtatcgtctcctaaatttgacgttatgggtgggagaggatgtgtaactaagatgcaatgctagcgacagaacgctaagttttaaaactcaatagtgaaagaaaaaaaataatgttttgggaggaacgcctggaagacccatgcaactgctgcacgatgtttccttaaggaccggaacatttctcaccctgaagacaaaagtccctgtgttctcgattcagcccacatccctcagcaccatttccatgcccatcatttaggcagaatgccacggaggcgacgtgaaaagtggaattcatcattctggcttgcaacgcatcttgttcttttgccagaacagggcacagcaactggctcctcaatctctgcccctcccaaaccccagcagccggtccctgtctccatcccgccggcctcggtggcaaggggctcgcgagctctggttggcttggccgaagcttccgtcactcgccagctcacctacgattggttggcagagcgtgcgcgaagagccccgcctggcaaggcactgggaggtgggcttgcggatcctacgactagcgtttttctcgattggttgaaggagtaaaggcacgtggtatgggggcgctctcttattggtcgtgaatggtaccttgtggtacagagacgtgatgtggttggctagaatgaatcccagcttcccactagatgcccctagctggctgttgctatgaggagtccagggccttccggctgccgttcgggattccgctctccaggttttcaactcacccgtggctgacagggcgtgggaagagctcgacttcagttcggcaccgaaaggggcgggtctagaagaaatgtgggcgggtccagagggttggtgggcgggaccccggcgacgtcagcgggcttggacccgacttccgtggtgtgtggccgcctctgactcgcccctctggcgcgctgctagaggggggcgtcaccctcccatcaatgtcctaacgctccaaagcttcattttgttgcgtttacacaacttcagtcagaagcctgtaggtgccccccccttaaagcttcacatgctaatacaagataaaaccaaagctctaggagtgctgacagactgggtggcatcggacaaaggccctcgcggcccctcttgggccttgggcatctctccttcactccccgcctcaggataaagcttggaggtagctctagcccctctaccatctcatcccttccgaattcttaatgtctcgggagtctcaggttgacgctgctcctggcttgggcgggaactgcgcatgctcggtacacaggccctggggtctgactgggcgcgctgggttcggcgctgctcggcggtcgcggtgcttgtttatctccgcgcgggcagaagcttccgagccccgcaaagcctctcgggagcgctcgcggcccgtcgcctagggggcgggggcggggctgcgccgcgggctccgccccggccgccggaccccgcccctggccgcgctgcggctggggctcgggcgcgcgctcgagcgctgggggtagcggcggcggcggcggcggcggcgggcggggatctgggcgtggaggcgcgaggggcggggcgggcggcactgcgggcccgcggctcgggcggcaccagcggctcccggtctctctctctgctcgccctcagtcccacccggtgcctacggggccgcatcgccgcccggctcggcccggcccatgcccagggccgctgctccctcagttgccgccgccgccgccggcgcccagggggccgccgcggctgtgaggtgggggcggcagcgggaggcggcggggcgggccgccggggccggggctgggggcgcagcgcggccggc

SEQ ID NO: 11597 - DNA, 2300 bp, Homo sapien
gcatgcagtgagccatgattgcatcactggactccagggtgggtaacagtgcaagactgtctctaaaaaaagaactaaaaaataaacaaatacgtaactaaataaaatgttcttcatacattttgcagtaaccttgtaaccattcaatcgctgattctgaatctatgtaaattctggtatcagacccttggtaagatgcttgagcaaaatgccatgaagacacctgcccacaagccaaaatgttagaagtcaggtgcagtagcgagctcctgcagtcccaaccacttgggaggctgaggcaggaggatctcttgagcccatagttcgagaccagcctgggtaacataatgagacccctgtctcaaaaacaaaaaaagaaccagtgacataggatgaggacgaagaagcaaggaatagtgctgaagaactttcaggatatgcggggtgacactagaaagtgcttagacatcacacgttaccaagaaaaaaatgtgacctatacaaaggagtctgcccatgtcctatgaaacaatttaaaaatcaaaaataggccgggtgcgttggctcatgcctgtaatcccagcactttgggaggccaaggtgggcagattacgaagtcaggagatcgagaccatcctggctaacatggtgaaaccccgtctctactaaaaatataaaaattagccgagcatggtggcgcgtgcctgtaatcccagctacttgggaggctgaggcagaagaatcgcttgaaccagagaggcagaggttgcagtgagctgagatcacaccagcctgggcaacagagagagactctgtatcaaaaaaaaaagaaataaataattacaaaaatggagtttggctttaattaatgatctgaattaataaaaacaacaaaatgctaggccagcgcaggggatcatgcctgtaatcccagcactttgagaggccgaggcagatggatcacttgaggtcaggagttcaagaccagcctggccaacgtggtgaaaccccatctgtactaaaatacaaaaattattcgggcatggtggtgggcacctgtaatcccagctacttgggaggctgaggcaggagaatttcttgaacccgggaggtggaggttgcagtgagccgagatcacgccactgcactccagcctgggcaacagagtgagaatctgtctcaaaaaaaaaagaaaagctaaatgtacaaagctagggcattgagatccatgagaatacagggcaaaattgatgttaatctgtcatataaaaatttaattacatcccataaatatctgcaattttttattgtttattttttgagacaaggtctcactctgttgcccaggctggagtgcagtggtgcaatcacagctcactgcagcttcaacctcccccggctcagatgatcctcccacttcagcttcctgagcagctgggactacaggtgtgcactgccacacgcatctaatatttgcatttttcatagagatggggttttgccatgttgccaagactggtcttgaactcctgagctcaaatgatcctcccacctcggcctcccaaagtgctggaattacaggcatgagccaccccgcccagccaatatttataattattacatgtcaactaaaataaaagaaaaagtaatttaatcacaaacccagttgacataaacgtatgtaatatggaatttcctgttgtttccatacaaatttatctttgtctatttgagagatcaatttctcttttcagtattgagtagtgaatagaatcaaaatctgtgggtaaagaagctactcagacagtttcaaaactgaatttgatgacacatttgtacccaatctgagtggcccccagcaacatgggttttgagttctcaaaggccaatagatagctccctttcctttccacagctttgggagcttgggctaccctgtaacgtctaaatgcctgtgcagtgtgggcctgtgaagctggcagggtgggcagtgtaaatgcccactagcaggagccagctgacctcctgcgtgtcacaatagcagccaggtgtctccacggtgacgtctctgagccaggaggtcagaactgtgggattgatgacctcccacaactggagcagccgggaacagctctgaccacagtaagtcatcccaaaacctcacattcagatgaaaccatttaagaatttcatctgcactgaggaacaatttagcgtgatactggagggaaagagtttccctgtgagatccaggaggtccctttagctcgtctcctgacgtcaccacagtcatacccaag

SEQ ID NO: 11598 - DNA, 2300 bp, Homo sapien
ccaccttgcccggcctgtaattcttaaaaccttaataaccttggctgatgatgaaacctcctcagaatccagataccccaacgacccacaaaaaaaaaaaaaaatcaaaatcaaacaaaaaaaagctgccccaaagtaatgtgcatagtggtttgtctagaagaaataacgtggcataagaatgaaaacttgtcacatctaagaaatataaattcaacaaagataggtctgcagacctcctgtagagaacccatcattgtcatggcccaaaactttctaagagaattttctctaggaaccaattagaatcctttagaaaaaaatcttggctggccatcccaattgcacgtggatcccagggctcagcccagattctaaacacagtggccaagatttaaaatcattcaccaaagagcaaatgttttgactttcaaagagcagaactgcagcagaatagccaacaggaaattaaattccctaagttaaatactatgtactgccagcggtgtagaactactcttccatctcacccagtatgaaacctcctcactagagatgtagtgtccctttggggcagaaatgaattgtttttgtagctgggcgcagtggctcatgcctgtaatcctagcactttgggaggccgaggcggggggagggcggggggggctggtatcgcctgaggtcaggagttcgagaccaactgggccaacttggtgaaaccccgtttctactaaaaatacaaaaaagttagctgggcatggtggaacatgcctgtaatcccaggtatttgggaggctgaggcatgagaattgtttgaacccgggaggcagaggttgcactaaaccgagatcgcgccactgcactccagcctaggcgacagagcaaggcttccactgacacccttagcccaatgtattggatacaacagggtctcaacaaaagtaccctctgatttgtacactgctctctgcctttggcagccccaggagttaaagaacatcgcgtgtattatctgcgcattagaatgctgaaattgaaattacgcctctaggttcctagactgagattgagataatcagccctgtaaaccagggctcctttaggaagaaaggtgtctctcttgacgttccccaatcattgcgagaacagaatccctaaacaagggattcaagggaacagtcacagatcctggggtgggggcatgtttgctacgtgtacatccgaagacgaccgcgggctggggacgggcggcctggcgggacagccccgggctgagtaacccctcttccgggcaagccccaggcgtgagtcactggagagcgcgacgggaggaaggggcgccctgagtccacagccctgggggaggtcggagggtctgaaagcgagaagtccgtgagtagaaggtacgtaggaagtgggtctaaagggactgccttcctgggggtgggtgaagggctggatcccagggagcgagggaccaaaggggtggggcctgctccagcggccacggggaggggccgggggtcgctagaaggaggccgaccagcccgcggcgccgaaatctcccgcgctcagcagctggcccctcctccccggccaggcctcaggccccttgccgcggccgggcccgccggccggctcctcccgctgtccccgcgacgcagccctggccccagcccaggcctcgacctcgacctcaaccccgaccccgaccccgatcccagccctggcccggctgcgaagccgccagcctacccaaccggcgtacagccggcggcccccgatgcgcggccactgacggcaccgcagggtgcgtggccaatcagcgcggcccccgaggaggcgtcctcggccccgcccccctgcgcccaaggccagtgaggcgccggcgccggcggccgcggcggggtgagaggccgcgaggccccgccccgtcctcccctttcccctttgccccgcccttcccgcgcggccccccgcaagccccgcgccgccgctggtgccggtccccgcgctgggcccgcccccgcccctcccgcggcccgcgagcgcgcctcacggctcctgtctcccctccctccttctctctcacgcctagcgcaatggcggcggccgcggcggagcagcaacagttctacctgctcctgggaaacctgctcagccccgacaatgtggtccggaaacaggcagaggtaaccgagttcgccgccccagtcttcgcgccctggccggcgcgccgaccctttaccgacgccagccgcaccgggcctcggccggtccgcggcggccgcgcaggctgg

SEQ ID NO: 11599 - DNA, 2300 bp, Homo sapien
gagacactagcctcaacaatatgcaacgccagcttgcccttgaagtgatcgtcaccctctctgagactgcagctgctatgttaagaaaacataccaatattgttgcacagactagtaagtcaatggtcttcagatagtttatgtgtattgtggccaaatttttggataaatttgctgagggttgtgtgatttctcagattgttgagaatataatgaatatccttttagaatcagatgaatttgggaaaatgcatctcaatacatgcaagcgtggacccccacattgtggttatgcctttaagactttgcagacaccctgaaatctggtgttaaaaataacatttctagagtggagtgtgacagactctatcatttatatgttaatattgggcacagttaatagagtcaaaaacaattcagcggggatatatagatgcacagtagcgaactacaaaccaaaatagcatgtcttgcttaccagtgaagccaagattagaagaacaaggtctaacactagtcatggctctgttcactatattacattgcttttgttttatagaccctcgttgcagcagaaacttaaatggctattgtgctatggaaatactactttaagtttcattgtgctgggataaggacttgagaactaacctgatcattttctggcctagccatttcttaatgagctaatgagtacttgaacacttaatttagagggtaaatacgtcaccagatttattttgtagtggtacctaccttttgtcttacactgaggtagtggttggaattttagaaacattcccatttaagtcaggaacaagaaaaatatctcctttatcactgttcatgttgtactgactgccccagctgatgcattaagagataaaaataagttataagcattagaaacaatggctgggtgcagtggctcatgcctgtaatcccaacactttgggaggccgaggcgggcagatcacctgaagtcaggagttcaagaccagcctggctaacatgctaaaaccccgtttctactaaaaatacaaaaaattagccagatgtggtggtgcacaccggtaatcccagctactcgggaggctgaggcaggagaattgcttgaacccgggaggtggaggttgcagtgagcccagaccatgccattgcactccagcctgggcaacaagagcgaaactcgtctcaaaaaaaagaattagaaaacaaaaatattgcttatttgtaggctatgtggttattgtctacaaaaagttttaaagactcaacagataaactgctaatcaaagggttaagcaagatccttagatatgagaacattttattgtaagtgttccattattcataataatcatttagaaaattttataggcatgagttatagtaactgggaataaatcaaaagatgtacaagacatatgggaaagttgaataacatattgaaagactaatagaagaacaaattatcagttctcaaattaatctagggttatgatagaacaatcctgaaattcttctgaaagaacatagggcctggagtagccaagacaattttgacgaataaagtggagatcttgtttcatcaactctgtgaatttagaatgcattgatgatgcaggtgttgacaatggatcggatggaacaaagggtagagtgtaggagaagatccgctcacatgggaacaaagccatttttaaaaagataattgatcaaaagttcttggggccaggcatactggctcaggcctgtaattccagcaatttggaaagccaaggtgggtaaattatgtgagctgctgagtttgagaccagcctgggcgacatgacgaaaccctttctctgccaaaaatacaaaaattagtcgggcatggtggcacacgcctgtggttccagctactcaggaggctgagatggaggattgcttgagcccaagaggtcaaggctgccgtgagccaagattgcaccattgcactccggcctgggtgacggagtgagaccctgtctcaaaaaaaaaaaaaaaaagtttctgggatatctttctttcattctttctttctttgttttttttttttttgtttgtttaataggtttatggggaacaggtggtgtttggtttagtggtgatttctgtgattttggtgcacccattacgggagcagtgtacactgtacccattgtgtagtcttttatccctcactcccctcccaccctttcccctgagtccccaaagtccgttgtatcattcttacacctttgcatcctcatagctcagctcccacttatgagttgaga

SEQ ID NO: 11600 - DNA, 2300 bp, Homo sapien
tttttttaagtctaaaaacctgttctgaagataatttatagtttcatttttatagtattgtctttacatagtaaagataatgcacatgaaatacactactgatcctccagttctaagccaggataagtccaaatgcttttatgcccacattcctttggctttcagagaagacaatagaattgagtttcacatagctatgcatagtttttggcagtgcagtttgcacccctttaagggtgaataaactcacagtggggaagattatacattctctgcacccttttcagttttctatgttctgttcattgataggtttgaagactgtatttctaggaaatgaaatacatgaggctctttcaatactgcttttactggagtgttgaaagtgtcagaagctatttctgagaacagtttttagccagtagcgggtgggggtggtcttgaaaaataagattcaggctgggcacagtggctcacgcctgtaatcttagcattttgggaggcccaggcgggcgcatcacaaagtcaggagatcaagacaatcctggctaacatggtgaaaccccgtctctactaaaactacaaaaaaattagccaggcgtggtggcgggcacctgtagtcccagctactcgggaggctgaggtaggagaatagcatgaagctgggaggcggagcttgcagtgagccgagatcgtgccactgcgctccagcctgggtgacagagcgagactctgtctcaaaaaaaaaaaagaaaaataagaatcaggcatgactttctaaactatggtggatcatgataaaaacatttactcttttttcttttctaagctgcagagtttttaacccctaatttcaattccacatttaaagacagcttgaattctttctcagtcttagtttaataataatatggttagaagtatgtctgtagagtatactatttcttttgtgtttcagatatattgagtacataattctgtttatgtgtttagcaatgcagttgcaggcgagagtgctctagatcgaatggcttgcggacttggtggaaagctcgttctgccgatgatcaaggaacacattatgcaaatgcttcaaaatcgtaagctgtgtccttcaaatgctagaagagtgaagttgtgccctttctaaagcttaaattctaagatatgtttagactgttaaaaattaatctttgtctttttatcatccatatttaacccaattcatttattttaccgataaaattgtcaatcccaaagaaaatgtacagatttacttcctagccaaaagtatttagatttgaatttgaaaatgatgttattatttgaatttttatggaatattagaatgtttgaatcatatactcttctttcacccaatatcttttatttttaaaagaagaaactctatctaatgttatcaaaagagaaaccacttctttctttctgtttttgcccctgacggaggtgatggtggaagcccacctgccctggagggcagctgttgttgttgacacaggatttcgccatgttgcccaggctggtctcaaactcctggcctcaagcagtcctcctgcttcagcctcccagagtgcttagattataggcatgagctaccacacctggccatccttcctttttatttctatgaatatttcagttacctttgtacctgtaatatatatatcaatcccaaagtttattgttgtatgtgttttattttcatttgtgttttttaattataaagttaatgtgttcttttgttaaattaaaattcagaagtattaagttagaaatttgtttgttttttggtggaatctcgctctgttgcccagggtaatgtgatctcagctcaccgcagcctccacccactggattcaagcgattctcctgccctagcctcctgagtagctgggactacaggcacatgccaccacgcccagctatttcgagacagaatcccactctgtcaaacaggctggagtgcagtggtgcaatcttggctcactacaatgttcacctcccagtttcaagcaattctcctgtctctgcctcccaagtagctgggattacaggcatacaccaccacacccagctaatttttgtacttttagtggagatggagtttctccatgttggccaggctggtctcaaactcctaacctcaagtgatccgcccaccctggcctcccaaaatgctgggattacaggcatgagccactgcacccggcctaatttttgtatttttagtagagacggggtttcgccatgttggccaggctggtcttgaactcctgact

SEQ ID NO: 11601 - DNA, 2300 bp, Homo sapien
attccttttacggtatcctatagtggtatcctttacagaagacagcttttacccaacaaagacttaacttcccaggatgccagaggacaaagcgggattgcttttaagaggaagttatcaagaccttattttataaatgagattagatagggaaaggcaatttaatctttattaaaaactgaaaaggccagcataggaagaggtcctcggtggtctttttcagggaaatacttcagttgcttttattagaaacagatagtacctaaggttttgaggtaggtacagcttaaggcatgctaatggtcatgggtccttccatagtcatttttgtattttggtttacatttgagcaataggcagcccttcactgctgctggactcattcctgccactattacaggtgacagaggagacaggaggtatgtcttttctatttttatacatgctttatatttaacacaagctcttgggtatcttagataaacagaagttgcctagcactccttttagtgcattgaaccctttaacatttaagcaaaataataaacagtcttttgaggttccttaacaatgaaacgtgttcgagtggcagcagcggaatccatgcctcttctcctggagtgtgcaagagtccgtggtcctgagtatctcacacagatgtggcattttatgtgtgatgctctaattaaggccattggtacagaaccagattcagacgtcctctcagaaataatgcattcttttgcaaaggtgaatatttttctcttaaaaaatatgtataaggttgtatgttcatttattagtcttgctaaaagtaaaaaaaaaaaatttgagacagggtattgctctgtcacccaggctggagtgcagtggcgcaatcgcagctcactgcaacctccacctcctgggttcaagcaattctcatgcctcatccttccaagtagttgggattataggcatgcaccaccacacctggctactttttgtatttttagtagatgttcctcaggtctcaaactcctggcctcaggtgatccacctcggcctcccagagtgctgggattgcagatgtaaggcagctaaataaatttttatatgctatagtgtatgatttgttaaaaaataaaaatgttaaattttttgttttaatattttggtattattatgtttgttttaaagagggtaaatttgccttggaagggcagtataggtagagggaatgatatgggcagcagcatggaagcatgcattctttggaaaaagagaagaaattctgaatactctagtattttagtcttgcacttaataatccaactatagaagcttgggtatcatctccagtttctgttctttacactttcctcaattcttctcttttttttttttttcattgccccatctctttttcatgccattgaaatagcctcacttgggctactccagatgtctcctttcttttcctctcagttcattctcctttcctcaagcactgccttcctcttcattgagtcacttcctttctcatacagtgtcactcccattttgcacaactctagtttgctccaatcttgattgaagatttacagtttctcagcatctttatatgtccttatttacactcctgtaattcagaattgcttctgattttccaaagacagcatgcttccatacctttgcctatattttatttcttctacctctaatgcccttccttcagtgttcttgtatgttgtgtgtacggagtatggatatagcaattgtgttccttaggagctggttgtgtgtgtgtgtgtgtgtgtgtgtgtgttttccatctttgaatcctcagtaccaagcatgatgcctggcacctaggtatgctcagtagtgttcaaaagaaaatatttttttctaactccaatctctaaaatgctgtcattctaacaaatacaagctaagcatatgtaaataatcttccaggatactgaactgtgttcatttttccatatgattcttagtggagtttaactttggactccaaacaccccaaatcttatggattgctttctttcctcaacctcattagtgcattgaagtaatgggagatggatgccttaataatgaacactttgaagaactgggaggtatattgaaagcaaagcttgaagaacattttaaaaatcaagaattacgacaaggtaagttttccatgcttttatttctgaatataatccttgaccatcttggcaatcatttaaaacatttatttgggtgtgttttagttaaaagacaagatgaagactatgatgaacaggtcgaag

SEQ ID NO: 11602 - DNA, 2300 bp, Homo sapien
tactttctatcaggttaggtaccaaccgcggaatgttggtgagagctgggaggaaacgtaggaagttctctagtgtgaccccaccgctttacagcctctctaactagattcccagaactgccccttctcccctctcttttcccccattaactctctccccatgggctcctgccctcagcctgcaaacctcagaacggctcctttaaaagtcaccttcacaaatgttgataatgttgagataaggcaacatgggatattatgtattatcatattgattaatatgatcaatatattatgtgttatgatcataaatagttttaagatcacaactaaatctaattctagacatacaaagactatgaaagaaatgctgtaacatgtagaaaatgtcggtcttgcaaagagagtgactgggaaaatgtcacttttctaattttctgcgctttctatgattttttgcttttattatttttatgattttttttttgagatggagtctcactttgttgcccaggctggagtgcaatggcacgatctcggctcactgcaacctctgcctcccgggttcaagcaattctcatgcctcagcctcccgagtagctgggattgcaggcgcgcaccaccacgcccagctaatttttgtattttcagtagagacgaggtttccccatgctggccaggctggtttacaagttcctgacctcaggtgatccacctgcctcagcctcccaaagtattgggattacaggagtgagccaccgcgcccggcctaattttttccttttagttgggaggtatgacatagcactttgctactacgtgtagtccttggaccagcaagtaacacctgagagcttgttagaaacagtctcagacttactgaatcagaatctgcattccaacaagattccctggtgattcaggtatacactagagtttaaaaagccgcctacagcaactgttctcaaacctggctacacactggaatcacctgcggaactttactgatgcctgggttagaatctttatatatttggctggggtgcaaccagggtgttgttttttaatcgcagatgattccatgagtttgagacccactgtcctaacactgtgatcctccaagtgtgatcccaggaccagagcaacatcactatctgggaatttgttagaaatgcaaactctcaggccccaccccaaacctactgaatcggcagctctggggatggagcctgacagtcctttatccctgcaggcgattcagatgcttgctaaggtttcattaggtaggtcggggatgcggcccaagaatgttcatttcttgacgtttccaggggctgctggtggtggtcgtggtctgagaaccacacttagagaatcacgagcagaaaaaaatctgatctgtgacacacagctggttgggctgacagagcaaagcctcaaacccaccatttcttctcttcaaccacagaccaccaaatctgcaagtattacatctctgctcctccccaggagctgcccacaagcaccccctacttccaagacccctgttcttgtctcaacccgcccttctatcagggtccctacactccacttctgcccagctcctgtccagctgtgagttcacttgaggcctctcccgtgaaatctgccctctcggtctgaggtcagggaactcctgtaagacgcaaaaggcccacggttctgagccagtggcctccgaaggccggaatccgctagccccgggtctggcagaacgtcacttgctgcgccctaggcctcttcccgccacgcttagagagagggactggaggctcagaagggggaagagaaggtaacgcggcagctgctgggtggggacggtgactgtgcccctagatcgctgcctcctgggtcctgaatcttgctccccgctccgtagagttcccgaaaccccgaaggctctcaagcaccgcaagccactcctaacctcccccacgccattccccaagggcactgtcccccgaggctgggcgggcgggaactgtcatgggattcgctcgggcggagggcgctgggccaggacgtgggcgggcgcggggtggccgccgctcccccaagcttaagtcccgcgcagcccggggtggtgccggaagcccgtgcctgtggctccgggggaggggagggctcggtgggtccctgaagactgtcctccccgcgcgacgtcgcaggcgaagcagccccaggcaggacctcaaaaagcgacctgcagagtccgagcccctgaccgcccgcctgccgctcccggcttcgccgtgcacacg

SEQ ID NO: 11603 - DNA, 2300 bp, Homo sapien
accaccacgcccagctaatttttgtattttcagtagagacgaggtttccccatgctggccaggctggtttacaagttcctgacctcaggtgatccacctgcctcagcctcccaaagtattgggattacaggagtgagccaccgcgcccggcctaattttttccttttagttgggaggtatgacatagcactttgctactacgtgtagtccttggaccagcaagtaacacctgagagcttgttagaaacagtctcagacttactgaatcagaatctgcattccaacaagattccctggtgattcaggtatacactagagtttaaaaagccgcctacagcaactgttctcaaacctggctacacactggaatcacctgcggaactttactgatgcctgggttagaatctttatatatttggctggggtgcaaccagggtgttgttttttaatcgcagatgattccatgagtttgagacccactgtcctaacactgtgatcctccaagtgtgatcccaggaccagagcaacatcactatctgggaatttgttagaaatgcaaactctcaggccccaccccaaacctactgaatcggcagctctggggatggagcctgacagtcctttatccctgcaggcgattcagatgcttgctaaggtttcattaggtaggtcggggatgcggcccaagaatgttcatttcttgacgtttccaggggctgctggtggtggtcgtggtctgagaaccacacttagagaatcacgagcagaaaaaaatctgatctgtgacacacagctggttgggctgacagagcaaagcctcaaacccaccatttcttctcttcaaccacagaccaccaaatctgcaagtattacatctctgctcctccccaggagctgcccacaagcaccccctacttccaagacccctgttcttgtctcaacccgcccttctatcagggtccctacactccacttctgcccagctcctgtccagctgtgagttcacttgaggcctctcccgtgaaatctgccctctcggtctgaggtcagggaactcctgtaagacgcaaaaggcccacggttctgagccagtggcctccgaaggccggaatccgctagccccgggtctggcagaacgtcacttgctgcgccctaggcctcttcccgccacgcttagagagagggactggaggctcagaagggggaagagaaggtaacgcggcagctgctgggtggggacggtgactgtgcccctagatcgctgcctcctgggtcctgaatcttgctccccgctccgtagagttcccgaaaccccgaaggctctcaagcaccgcaagccactcctaacctcccccacgccattccccaagggcactgtcccccgaggctgggcgggcgggaactgtcatgggattcgctcgggcggagggcgctgggccaggacgtgggcgggcgcggggtggccgccgctcccccaagcttaagtcccgcgcagcccggggtggtgccggaagcccgtgcctgtggctccgggggaggggagggctcggtgggtccctgaagactgtcctccccgcgcgacgtcgcaggcgaagcagccccaggcaggacctcaaaaagcgacctgcagagtccgagcccctgaccgcccgcctgccgctcccggcttcgccgtgcacacgtctcccgctctccccggttcgtttttcgccacagctgctggattcgcgtctcgccagtggcgctccccgcgctgcattaggtagcgccgcgcggagcccggccctggccggaagcccaagagaggcgcagatccccggcggcgcgctgggctcgggaggcccctgggcgcacctgcccgggcggagcggagcggggcggggcgggcgcagggcgcgggcccggacgctggagggggctgtggctctcccgcgtccccgctgctcgggctgcgcggcgcccgcctccccccgccgaggggccggcccagacccggggaggggcggtggccactgcacttcccgctcgccggcctcagaggcggcgggtccggcgcgggcgcagcggtgcgggcgctcggctggggcgcggggcggggacgcggccgctgcccgctttgcgccgctcctccctgcgcgagtagcgctggccccggcgtcgaggcggccatggcgacccggagcccgctccccacccaccccgcctgctccgccctcccctccgccccgcgccacctttgatggctcggacctcagccggccaccgccagccctgctcgcgcgcccgcgccgccgccgccc

SEQ ID NO: 11604 - DNA, 2300 bp, Homo sapien
ctcttgtgttgtgggagagacccagttaccagagataactgaatcatgggggcagtttcccccatactgttcttgtggtagtgaataaatcccatgagatctgatggttttataagggcaaacccctttcacttggttctcattctgttctcgtctgctgccatgcgagacatgcctttcaccttctaccatggattgtgagacctccctagccacatggaaatgtaagtccattaagcctttttcttttgtaaattacccagtctcaggtgtgtctttatcagcagcgtgaaaacggactaatatggacaccaacatctgggggtctccaagaaaaaagatgggttccaactgaatcacacaaaggacagtccagtgtacaagcccaacaataccgatggattccagccagcttttaggcacctcactctgaagtataaacagctggagataaccaagtattttagaaaagcttccaacatgaaagatgggatgataacagttgaagaaaaatctagaattactatcctaagagaaaactgacaaatgatgaattgttctttacactgtaagcttattcatcacatttccaacagctgaggatgccttggtgtctaggaagagagacccacacaacttctccctcatcccacagcagccagtgttttgggggcactacaagtgagctgaatctcatcttccattctagtaagtaaagagatagaacctaaattagaaaaagaaattgcatgtaacactttatgacatgcactggctaaataagaactagaatccatttacattatataaatgaattatttcacaacttgaagataaactcaagaaaaaaaagggttaaaaatatttgaaggcggggtgcagtggctcacgcctgtaataccaacattttaggaggccaaggtgggtggatcacctgaggtcaggagttccacaccagcctggccaacatggtgaaaccctgtcgctactaaaaacacagaagttagctgggtgtggtggcacacacctgtaatcccagctactcaggaggctgaggcaggagaattgcttgaacccgggaggcagaggttgcagtgagccgggatcatgtaactgcactccagcctgggcgacagagcgagactctttctcaaaaaaaaaaaaaaaaaaaaaaaattaaaaatgattatcttaggtaccaggaattggcgtgtggaggggccaggcaggggacagccaatttccattacaataagtgcttgataatatttttttaaatgtttacatgtgttacttttatttcaaaatgaaagccagctacacacccacaggtgcagtgtgatatgacagtcttttaataaaggctatattaaaagaatagacacaaaagtgttgacagtggttatctttgaggggagggattataggcgtcttactttttgcttgtatctgtttttgttttctgcactgcgcgtgtgttgcttttaaatacgcatttcaagcgcctgtgttttaggatgagcaccaccggttcgctatggcctggaatgattccacccgtggccttttaggaatctgttgaaaaatgagtgtgcactgagggagctgaggagcaagtgaagatgactctctcaaggaatccatctgagggccaggaggcaggtcaagggagggaagggcgggagaagcctttttttttggtttttttttttttaatttgagacagggtctcgctctgtcacccaggctagagtacagtggcgtgatctcggctcactacaacctctgcctcctgggttcaagcgattcttctgcctcagcctccctagtagctgggacttcaggcgcacgccaccacacccaggtaatttttgtatttttagtaaggatggagtttcgctatgttggccaggctggtcttaaactgctgacctcgggtgattctcccacctcggcctcccagtgtcccgggattacaagagtgagtcaccgcgcctggcctagcagaagcttttctttcacttgcttttgctttttagaactgggagggcccacgccccacgtgcagcgacgcaagggcgacgcaagggtgacgcacgccacggccgttgggagcctgagactcaaacatggcagcgccaccttctccaggaaggacggccgaccaagcagaccaggtatgcaccttcctcttcaaaaagcctggacggaaaggggctgcaggcctcagaaagcgcccggcctgcgaccccgagcacggagagagcagcagcagcggggacgagggcgacacagtggct

SEQ ID NO: 11605 - DNA, 2300 bp, Homo sapien
atcccggagaccccggaagcacacccaggaggctgttttctaggggaagccactgctggtttttaagcagaagtgacgccagctgatttgtgtgttaaagaaggatttcctcaaaagaatagtcagcattgaggtcatggaggggagccacgggcactgcaggcagagaggaaatggaggcgacatgcatggctgggagcagggcatgcaggggagggcacaggggcactgatgtggcaatggttacctccccctgggaggagccaggagcaagggagaggctgaaaacacctgagaaaggtgctgggcacatcagggtcagacagcggagaacgtgggggagacccggaagacagagggggggcgtcgcctggtaccggggccacaagtcttcaatctgagctacgtcataccccacaaagccacatcctacatcctttcttgggatcactgattcttgtccaagcctctacgagtaacagtagcaaggcacaggatttcagaagacaacccacctaccagggtatatgcaatggtgatgtccctgacatcccctggggcagctgtcactctgctgcaggggccccacccaagctcctctcaagccgaacagaaccagcctctgcacgtgctctgcccactggggcgggcactagccacatgtggctagtaagttaattaaaattaaatacaattaagaattcagttgctcagtcaatccagaaccacatttccagtggctactgaaacagcagaagcccagaacatttccatcatcacagcagttccaccattcagcactgctgtaaaactgtaatatgtgtggaatttgtttcaaatggcatatgcaagggggagcaaatttttaattgcattaataaaaagaaatttcacttcacaatcattattatttcaacattctcagtgaagagaatcaatgtggaaaacaaaagtaaccaccacttcaacattctcttgaatctacaaaattttcaaagtaatgtaatggaagaaataaatgttaatactggcacatttcatgagcaattttttctattgtacttagaaatttactatttatttagcatgctgcctatctggattaaaaaacattaaaatgggccgggcacgttggctcacgcctgtaatcccagcactttgggaggccgaggcgggcagataacgaggtcaggagatcaagaccatcctggccaacacagtgaaaccccatttctactaaaaatacaaaaaaaaaaaaaaaattagcagggcgtggtggcaggtgcctgtagtcccagctactcaggaggctgaggcaggagaatggcatgaacccgggaggcggaggttgcagtgagccgagatcgcaccactgcactccagcctgggcaacagagggagactctgtctcaaaataaataaataaataaataacattaaaatgataagaaaaacaatgcagcctcgtcacagcaggtatcaaaacaccttcataagtgttcataattaatattaataaatttatgacatagtccatgaaaccacaaggtagaaatgtagaagtgaagaagtgaaaaatctaccattttcccagctagcaggtcttatgggtctttacacaggtttactgatgagtagtggttattatgccaatcaatatacactccgaaccagaaaacgaaggatgttctccagggaggacacagacaacactcagacacagctctggatctcaaccctgtttgcacattagggtcatctggtgagttacacaacacactcactcacacacttgcaacactgtctcacacacattctcacacatatacacaatgctcacacaagcacactcacacacatatgcaacgtgcacacaaacacgcacttaaacacaatatactctcgcattcacactcacacacatatacacacacttgcagtatactctcacacacacacacatacatacacacattcacaaaatatacacatacacacacaacacacacatacaacatgttctcacacatacactcacacacaacacaaagacacacagaacatacacacacacacacacactcactcactcatacacacaccctggatattaaagtctcactgtggaccggtagaagaaaacacagctcttttgaatagtcacagtaatacttccccttaagctccatttaaaacaatagcttgttaaataacagatcaccagattttgaccatttaaaacaatagcttgttaaataacagatcaccagattttgaccatttaaaacaatagcttgtta

SEQ ID NO: 11606 - DNA, 2300 bp, Homo sapien
gtggatcatattgttatgttttaagaagtacaattctgcctctcagaatctcttggtgaaactgaaatcctattgagtgtggatgcagggaagagcaacaccttgaaataggcactgttgtcaccagtaggtcaacaaactaaatgcctgcctttgaattgtgtacagcgcagagaaggactgttttccagcatggttgctcttggttggtgtacagacacagtcttaccattcacactctggtgaacagtgtcctctgttgggaatagtgatacttggatgtttctctgagccagaaaaaagaaaatgtaaggagagagagattgacttctttttaaatcttgcccaccagtgtcactgcctttcacccagcattcctgcattttagattaaagagcctggttttcacttgaagtttctctgccttagctgcacgttgcaattttctgagatattttaaaaattagtgatgccgggaccctgaccctagggattttgatctcattggtcttgagtgctccttgggcttcccagctgtttgtactgggcagccagggtcacttcttacccaggctgtctcgaatctagtggaatacagtaaaagtgttagctaaatttttggcttgcttgcagagtaagaaaaacatcacaaacaaactgctttttcttgatgcctgtgatttgtacttttcagccttaggtacttttttttttgaaaaaaaaaaaaaaaaaaagataaattgtagaataaaatttttagatcctaagtaactacaaaattattgaaaagagtcctaacaaggatagctccctgatgtgccaccataccagggcctcactgggctcatcacgcgacccgatcacaagggaagcaccaggcgtgcttaggacactgagtagaatttggcagcagcatagaaaatggaggaggatcggctcgtctcattgacaaatgatatctgtccacatgaatgtccagaagtcggttttaaagagtctgaacacttaatccatttttatacagactttttttgttttgttttcctaatcatttgattcagtgcctgattgaatcaagctgattgttggatcgtttgagagttgttcattgaagtagtctatttacgccttgctttgaatttatatatttaaccagaatcacagaatttttaaactggaagggacctcagaggttcttctgggcaaaccttcatttcttctgaaaaagttaagtgactttgcataactaatacagctattgcatgacaaagctgaaactgtaacctcgtctctaggcttcacttttttaatctctgtgatatcttggtgcaataggagctttttgattcaatattttaattttggagagtcatatgaattaataattcaaatcggatgtggagactagtgatcaagtagacttaggcaattacaggccataataggtgggaagaactacttctttttatatggtgagggttttgcagttataacacatttttgcataatctgttcagacataggaaaaatgtcaatttgctatgagtgttcagtgaagtgtgagttaaacagagccaagtgtggaatcctgtggtttatctgtgaaagtggtttgttcaaatgaattttctttttccctctaattatacagcagtctggtaatgaaatacgattgagcactaggtatgaacttacacagcgtatgacaggaatcgtcaaatgtaagcatccccgagcaaaacacgcttcaatcattattttgttttgctttttcctacagcagtgatttttatctaagtattttaagagcagttgatcaatggcagtatactcagttgtgtattgatgagatttttcactttaagagttgctcatagagtttttccctcactggctttgtaccaggcaagcaacttaatttctgcttcttggccagtattcacaaaagcagcaatcctggtgtaattaatggtgcttacagtttgtttaaaggctgtttatcatacatcctgatgtgctgcgaatagtcactacttgcctcaagaggagcttgtcctatgctaataaagattctataacattggccaaagggtccgtttatacattctttgagcctggtggagcacgtttgctgaggtgatgtggtctcctcagtgtcactgtgaagagctcagtcaggaaaagccagcagcatctaccctgccaccctccaaaccttctgactttggggagactccagtcccccaggtctttacccagcctgcagatctcattctagcttaacaagggcatgcgtgtgc

SEQ ID NO: 11607 - DNA, 2300 bp, Homo sapien
aaataagtggagcaaatatcaatgtgtaagtctaattttaaaagaatgcatataaagactgagaagatcatgattcttacacaaaaactccagagcatgtcaccaaaaaccaagaatgggttcagcctccctggagagatgtgaataaaacgggaaatcatatcccttttacttacgatcaattgtcaaaaagtgaacattgatccatacatgatgacacagtaagattccagggatgcatatgcattcccgatgtgagggcaggaaacccattttggccataaaaatagtgatgcagtccaagaatctatttcctagaactgcttccgaaatatggtccaaagcaggaacaacgtgtctgcacaaagatgtctctcgggattttcgtaattacactaatttggaaacaactctgatgcccaacagtacagaatcagttaagtaaattatacaaactgaaataacagactaaaaatggtaattatctgtatttacatatatatattaaagcaatattaaaaatatgtacaagtttaaaagtacatacaaaattacagattgggcatcccttatctgaaatgcttctggctttggatctgggaatatccgcattatacttaccagtgtgcagccccaaatccgaaatctgacatgccccagagagcagttcctttgagccccatgctggcgctcaaaagtttcagattggggatttgggatattcagcctgtatatgtgcactatataagtatatttacatgaacaacttctgtatcctaaattaagtactatagaaattctaaaaaatcttctttgcactataaggtagataagagaattcagtaagtttatgacctggtatgacaacagaaggcaatgcacccaaagatgctgatgagatttgggctacagtggtgggatcatgggtaatttctgtgtcttccaaaaattctacaagattgtcttcagaagacaacaaagggtgagaacggggtcccctcatgaccacaattccctcaaccattttacaacagactccaaatcacaggtccaggagagatggctgaggatgtctttgaccaggcttatctcaaacgttccaatctagagctcctcttttcaggcatttgaaatacttggcatctctcccagagaacaaatggttacataaggtcctcccaaaagcacacattagccacggagcctaagactcaactatcaagaaatacaaatgactaaatcacgggatgagttgatgtcacacaaaagaatccaaacattaattccagctgagacagaaaggctctgaaaatgcttcagaggagaggcggctctcatttttcctacagccatccactgaaacaacatgtttggagcaaaactggcaggaagtctaagccatggccaccgtggttttggcagccatcggggtgaacgctcagtgggagcttcaggagcagggaaggaagaagtgggtaccacagccaagcctgcagagagatgataagcacctcaagaggcagctcatctgaggacagaggaggaaagagggcactcctcatcacagacaaaggaaagagagcaccaacttggcttcccccatgcatcactgcaaagtaaagttttaaacacaacacagacatcaggtagctacagacccgcccgagggtaaatagggtcaaccccagccacgatgcccagtgagcacgtaaaatgtgctgcgtctgaatggagatgtgctaagtgtaaaacacacaccaactccaaagacggtccctccaaaaatgtaaaataccttattgatgattgttgttattaatgttgaaataatactttggatctggcaggttaaaaaatgtattgttgaaactaatttcacttctttttgctttttaaaaatatggctactagaaaatgtaaaattctctttttgtttggtttttagagacaggttctcactctgttgcccagcctggagtgcaaacgtgatcacagccatagccgcgaactcctcagctcgaacaattctgcagcctcagcctcccaagtagctagggccacaggtacaagccaccatgcctagctaaattttttttttttggtagagacagggtcttgctattttgcccaggctggtctcaaactcttggcctcaagcgatcctcctgcctgggcctcccaaagcattgggattacaggcatgagccaccacatccagcagaaaacataaaattctgtgtgtggcccacgctgtacttctactggccagcactggtacagatcaacttgccttaacaact

SEQ ID NO: 11608 - DNA, 2300 bp, Homo sapien
gcaggaagaattctgggtagctgggaccgtcattgcaggctacgtgtttctttatatttttgagtttattgtaatgtcaaacacttgttatgcattggtgtttgaattctcctttggtactttccctgttgcattttgggccatgtgggtttatgggataacaccacttgagcttgacttggtggaatagaggttttagggttgggggaagagatctgcaatgggcttttgggaagtgtcataaaagaagctagagacaagacctagttagaggggaggctgcctttaccatcacatttctgtttgtctcccgccttcctgactctgtgctctggagatctggagacctggagacctgcctcaggatatcccgtcctggctgggaatgaagccagggagtgtggtagtctaattttgggctctgtttcctcatctgcagacactgggcatacttgtcttttaagttatttgcagtctgtaattgatttggctcagctggccctaagatacggtattccttgtgtaaagtcagagaaatcagagccaaagataattagagctggaaaggccttcagaggtggctagcccttatctttctttctctaggctagaaaaccatggcccagagaagctgagtgatttccttttcttctactatcaacactaggacaaatactcagattccaggcaagtgtgaagcgttggccctgtgccaggagcccgcaggcctgtcttgctaatttgctcaggctttcaaagcttttgcagccctttggctgttgagctgggatttagggccagagtttcctcattcctggtctaccgttagcttccctgcacctgacggttgtcctcttaagtacttctcccccattttcttaccggattccctctctccagtggtgtgttctccttctacagagggtatttcagatatttattcaatagttcagccattttacaaagttgaggagggagaatcgggtggagcagacacagtggcactgccttgctggaggcatcctcgctggctctcccgcccagctgcacatttacagaggcctagtgtcggccagcaccgtcctttgcactcaggcctctgctcacaggtcagcacgccctttgcatgtgtccagtgaggttcccctgaaagcctgagcaaattagcaagacgggcctgcgggctcctggcccagggtcaccgtttcacacttgcctggaatctgagagtattaggtcacatcttcaaaagactgtatttgtcctagcattgaattcttactcacggccaccgtatttattgggtagttcagcaggagaaattcttgcctaacacgtgtccgtggttttagtgcatttttagtgcttcgccgatgctcacctctgtactcatatgtattaaatgattgaatttgaattggtgccggtagctgtgccccactttgacatagatccggaagcttagccagggtccacaagtctgtcctttgtgtttgagtgggaaattgcactgtgtgattgataacggaggagctgcttcggctacgggagacattgccctgtgagctcggcagggcagtccttgtcctcccctcctgtgctcgcatcagctgctgccaggagcctcgttttggttttgtggtcctgcaccttccttcgttagcactgctgtgttcctcacctgtggatgttcacggttgcctatgaatctgggcggtgattccatttgttctcattgcagccgttccagttattaggaatccagctgtctgaaaagctgtatccttcctgacgacctgtattttatttccttgtcacctttgcatcctagcacagggtccgtgagaacgttgctctttttgtctgacagttcagacccgtcgggctctagagaattgactgatgtgtttggagttagttcctagtcgtttctggagtggtgactggtttagatttttgccttttgaaaagctactagacgtaaaacttaattggtgttttggcgagtccttttgtctgtggcagttcatctttagagaagtaaattaatttgtaggtaagctttttctccttttttgattggctatctaaaacatatatttgaatcaaacttttaaaacagagatacagaaaactcttcatgaaaagatttttttgtcttcctttctttgtatgtttgatatacagataactgttaacagtattctgatttccattattcacatttctgtagtgacaaggatcaagtatctgcaggcatttctttgtcccgggaaaagcagattttttcaaggaaatga

SEQ ID NO: 11609 - DNA, 2300 bp, Homo sapien
ggcacagcgtctgactcaagggtctgcgtgccctgcctgctttggggctgggtgtggacgggctgccagctcttgattcagagagcctcagctcaacaagaattgtgggacaggaagagtggggcggccacagagactcctcttcaaagagggcagggatggaggcatctcacaacagatgggctgcagcagttctgacctagagtcaagcatgggccgtcggggcctccgctggggcagtgcccagcttctagcatcagtttctgtattagttgcctattgttgagtagcaagccaaccaaaaccgagtggccaaaacagcaggctcacgatttctcgtgattctgtggattgagcagttttgctggccttttctgggctctctgcagtcagctaatggcatggttgaggccaggtggcccaggatgacttgaggcacatcctgggagctcagctggcgtcgaggaagtgggcggatgtcattgtctttctgaccacaccattttcgattgccagctctccactgcctcatggtcacgtccctctggagggagctctgcaagtcctcttggggccttgcttagattatgttcatcagaacacagagcaagactagcccaggttcaagggccagggcggcagccactgtctcttgctgggaggagtgcccaagtcacattcataggggtgtggacccagagaggtgggatttatgggtggttatttttgtaacagtctcccacagggtcctcaacaatgtggtaagggtttggataaattcttgtcgcctgtttttaaaattaagtctcagaaaggaaaggccactcttagtatgggagcgggacagtttactggagggggtgatgagttgacctaacatgatggtgttttagtggcatgttggggctgcttggcctcctgtcccagcctgtgccgagtggtggttctccaggtgtggtccctggaccagcagcatctccctcaccccgggattccaattcttgggcccacccccggttgactgaatcagaaattcttcgtaggatggggctctgtggcctaacaagccttccaggggagtgtgaggctcacccaggtctgagaatcactgctcccgggaatgacagtgctaaccggctctcctgacctcaggaaggcaggctgttagcacccctctcgcccttgtcagcaggaagggctttccccttccctccaggaccccctgtctgtgtgtaggataggctttgaggtgtctgacctgggtcctgttcgagccagggtgagtctggggttttcttattgctcaggggatgtttactgaccacagtcccatgccacttatcatacctgggcacaggggtgtagaggtgcgtgagacacagcccctgactcttcagcttgcagctgagcaaaggagacagcgcagagcagagggctactgtgggaggacagtccagcaggggaagtggcaaattccgtgcacacatgttgagctagagatgtctgggtagaaagagagaatgcttgggaagcagctggtctggggggttcctgttcagaaggaaggcctgagctagcgctttgaaagctgtcatgtacgtgagtctttaacacagcctttccttcaaggtggcaattgatcagaatccattggggtgttttaaaaacatggattattcacctcctcttctgaactcccatatatttctgcaagaatgtcagatgtcctaggtggttctgttcgggcaggtttgggaaacaagggccccagaccctgaaactaccgggcacccctggggagaaggagtagaggcccaggctgggacctagagtaagggccagccaaggtggagtctgcgtgaagatccttctggaactagagggactggaagaagccagcgggagtggggctgtggatgctaaaggactggaaagttacccagaggagggggagggcgtggttgacaaggctcagacacgacattgcagcactggtgaccggatccagagcggagccaggctgcagtggtggggaggaccgggcaggtccagatgactttgaagggactccagaggaaggagagagtggaggaggagggctttgggttagggagagtgctttcgtttgttttaaatgggagaaactggagcatgttgccaagggcagagagccagcagagaggggtgaatggaagaaggagcgagaagggggttactgacgaagccttatcctggaggagagaaggatggactccagagcccagctttggggactggccttgaataaaaggagggccact

SEQ ID NO: 11610 - DNA, 2300 bp, Homo sapien
gttatctacatggtctcaggatagtgtctccattggggcttgtattagcaacagcctaattgcaggaggcctcatgaccattgtcctaccccggggcactgatcggggtcttctctatttgttattactaaagggcataccttgggagagccacatgtgtattgaaggtcatatggtagatctagtcatttactctatttttttttttttttttttttttttgagacagagtctcactctgtcgcctgggctggagtgcagtggtatgatcttgggtcactgcaacctccacctctcaagttcaagtgattctcctgcctcagcctcccgagtagctgggattacaggtgcctgccaccatgcctggctaatttttgtaattttagtagagacaaagtttcgccatgttggccagggtggtctcgaactcctgacctcaggtaatccacccacctcagcctcccacagtgctgggattacaggtgtgagccaccgtgcccagccatttgttctattttcatgtagaaagatgtgacacgagggagaataatagtgaagtgtacgcatcatcagctgtgtgatttgagggtaaacccttgagatgagacagtttcttgtcacttgatgatttattttcctatctcagcctttagttggaatttactgggtgtgcctgtcacttgtgattcagctgcttctttatgtagcattggcagttgtggcttagaaaggacaacacagctgaggctgcaggtcacaccataatgggaacaggggagcacttactatgtccagttttaaaaaaaactttgtttttgccccaggaaaataaaaaattgtcttattttagccccaggagaataagaaaacatcttatttttagccccaggaactataatatgtatgcatttttctgtattttttacaggtgagtaaactaaggcctagagaggcaaataacttgtaagaggtggaggtggatttgaagccacatgcacctggccgtagactccacgttcttctcttcatgtggtgtcagctcctccagtagatttgctgctggagcgggaagttagagtctctctgagttcttaagggagagaggggagggcttggtggcccagctgcataaatagcctcatctaccatgagggtttagcagtagtttgctctgtgtggataagaactacagtgtgggatcagtttactggagatgagaaggtgaatgaggctgtgatattgaagtataggaaaggtgcttgcacatcatgtattttctcagtttgctcctttggtcacaaagagttggtaataaggcgaagtttactaaattgatggctgaatacaactgggagccttgcagagaaaaccatttcacagctattgattttactcttaatcttgcctccccagcccatggcgtgtcattacaggaatcctggacaagaggtgtctcagtacaaatactggaaaaccagctgactgcaaacaacctattgactttttatcatagttggtcattaattttgttttaaagaaatagggtctcattctgtcgcttaggctggagtgcagcgatgtggtaatggctaactatagcctcgaactggtgggctcaagcagtcctcacgccacagcctcccgagtagctgggactataggcgtgtgccaccgtgcccggctcattgtttaaatttttggtggagatggggtctcattatgtttcccagactggtctctaactcctggcctcaaacgattctcccaccttggcctcccaaagtgcttaggttgacaggtgtgagccactgggcctggccacaattttaatataaattttaacataaaagttaccccttaaaacaattagatagctgggcgcggtggctcacgcctgtaatcccagcactttgggaggccgaggcgggtggatcacgaggtcaggagatcgagaccatcctggctaacatggtgaaaccctgtctctactaaaaatacaaaaaaattagctgagtgtggtggcacatgcctgtaatcccagctactcgggaggctgaggcaggagaattgcttgaacctgggaagcggaggttgcggtgagccgagatggtgccattgcactccatcctgggcaacaagagtgaaactccatctcaaaaacaaacaaacaaacaaaaaaaaacaacaattagatatggaaggaagggggaacacagatgttcagggcctcagagattcaggtgtgagtaactggagtccacatgacaaacacaaggagttcatgtgttctggcctttttt

SEQ ID NO: 11611 - DNA, 2300 bp, Homo sapien
tgacctacacacctctaaattcataccaaagcggctttagaaaataccaagaaaccacatctgattgttacccagcagtcagcagaagtttaggttttgaatgcatgctaaattcaacgctccttaaatgagagtcgacaaaagaatattcttcaagcatcttcccagtcactcttaagataataacttaactgttgctgcttaaatgtatatttatttactgcttaaacatatatacacacatatatatactgcttatatatacacacacacacacacacacacatatacacacacacacacttggactaaaattctagctgccattaaagtggtaactttgagttcctatttttccagaattcaaacctgaacagtgaaatccagttttctttttacggtttcaaaaaaagaagggagagggatgatctcactggaagaggcgagcagaccccagaggcagtcccaggtctgggctctgtgcttctcagccctcaagacacagggaaggagcctgttggtacctgtaaatcaaccagtaatctacttggatgcttttggttttcttcaaacacttaacgttcactcagctaaactggcagagcaaactttcatgacatatcctaactgcatcctaagatttccatcctaagcattttgccaccatttctgcgcctacaaagtttacaagagttagccaaggacggtagctttgtttttcaaagggctaaaagcaacgacaacgaaaacaacaacaacaaaaaacctttaacttatacatgtaaatttgaaattcaactcctctcccactccccaaaaagtcactggtaggccaaggtgtcaccaagtaccgaaagagaggtttactgggcgaagaattcctgtaaatgcaaccaagtctcaaagtgaaagtccagggtcccggggccgggcccgggaccctggtgcgcggctgtccgagggattcctccttccagaaggtttgcaactcgcactttcccccggtccgcaggtgcacgggggctccgggcaaagccactgcaagtggaactcgcggttaccttcctccactccaccctgcctactccgctcgggcccggacgagtccaggcgcgctccccgtccccgccctgcccaggtctcccgcccgcctgcccgggggtgggggacgagcctgggggacgcgtcctggggccctccgccaacccggccaccacgcagggccccgggacccggcgggggcctccaagggcatcactccacctcacttctcccggggacagggccacccagggcctgcagctccggaagagtgttggggcgaggggagcgcggaggactaggcgcccgcacccccacatccggacccaggccgcggttcctacggctcctgcacgcacacgccggagacctcggccgccggagccggcagggacgcccagggactcggactcggacccccggccgagccgggcgcgcggggagccaggctccggcgcgaccccggccggctgagcgtagggggacgccgtgtggataccgccaagttgctgcttccgccccggtcgcgcatcccggccccgcggcccgcgcccgcctacctgcatgccgggcaggcccgactgcaccggggagtgagccatggcgctcaggacggccacttcctgggacgggacggccgggccgcgacgatccgcgcggggcggcgaggcccgcgggccgcgcgcagccctcgggcggcggggccggccggagcccgaggccaccccagccctggcgggtcccggccgggcggcgggggctcagcggcgggtggcgggccgcgtctccatgcacggcgccagggaggagctgctgggggcgcagggcctcgcgcgcactgccgccgccgccgctgctgccgctactgctgggctggagccgggcggcctgggcccgcgcgcgctggccgctggagccggagtgggcgcgcacagcccgccgagcccgcgagcgccgagcgcgtcccgccccggcccggcccccgcgcccgcccccacggcccggccggggaccccgccccgcgcttccgggagggggaggggagaggccggtggccgcgcgggagccctaggccgcagccgccgcctgtcggcccggcccgggtcccagctgctcctgcggcgctcccacgcccccgcgggcgggcggcggggccgggagggggcctcggctggggcgggcgccgggagggaccgagtcggggccggaggctggccgcgtgcccaccgggccggcgccggggcgagcctgggccgcgg

SEQ ID NO: 11612 - DNA, 2300 bp, Homo sapien
tattgccctggctctgctgaccctagaagaatatttttactgtcccttttctatgcttagacatgtttagatccacaaatatttaccattgtgttatagttgcctccagtattgagttcagtcacatgctgttcaggtttgtggtccaggtgcaatacgtcataccatatagcctaggtgtgtagtaggctatgccatctaggtttctggaagtacactctatgatgctcacgtgacaaaatcaactaagaacacatttctcagaatgtatacccattgttaagcaatacatgactgtgtgtctgtaggccatatatattaatatatatatagtcatttgagatcagtctatatacagtgttttgtaccctgtattttctttaataatatataatgaatacattttccccattactaggtactgaaagacataattttaaatgactacatagtactcgtatgaaaatgctattatttacttaacctctgtgagactttttggctgttccgtttccccaggattctaaacatcactgtgtcttcttacatgcattcttccacacttcttggttgttgccttaggatatgttactttaggtagaattcctgggctgcgctgaagaatagaaacattttaaagattcacattcttgcttgttttgctgttcgcctctttaggtaccatattttttaggtgtacaaaatttatacacctgattttaagttcctgggtatcagggttcatacttctcttaattttgtatttccttgcagtcctacttacgggtggcagggctcctcaagggatgggtgtaccaatgacaaccatgaaagtattctaaggtattccctaggactccgagaaaaaacatgcatctttccaaagggaaagaagggattagatgttagcatcctactccatgtcagatccagagcacccgggggaactgaagttcgtggatggaatacaatgacacctcagaaaagaaatactcctttggtggaggcctttaaacttttgggggctcattttgtctgcctaactcgcccagccagggcgcaaaatggccacttaggagcatgagtgaggtgccagcgtccctacaatctaaggagcagggagtcatcactggggtggctgccgctctacctgtttgcgactgtaataaaacaccttctggaggccgagggacccgcttcatcctgacttttcccctcagtagctagagagaaggcggctgaaaagaggagacagaactggtgctgagtgggcctggagcttccgaggcaagggaaagagggagagggctgcagttcaaagtccagacgcgctttccttccattctcttcccttcctccctgccctctgcgccccattttccccttatcgtgggtgggggcttctgatttgctgcggatcccagagatggtggggttcagcctccgcactgcttagctaagttcccagcccagcagtcccagccgggctgttttcggtaaccaaagcactaggaattaacctctctctcggcctcttccctttcggtttccttcttgggttggctggaaacttcacccagacaccgaagcagctctgcccggccttttggcacaggccaccggccgaggccccacggggcgctctccttccccaggtgcccccgactccgatcctgccctcaggggctcgcccgggacgcgttttcccagaggccgccggggcggggtgggctggctggcgggaagagggggccgcggcccaggctcgccccggcgccggcccggtgggcacgcggccagcctccggccccgactcggtccctcccggcgcccgccccagccgaggccccctcccggccccgccgcccgcccgcgggggcgtgggagcgccgcaggagcagctgggacccgggccgggccgacaggcggcggctgcggcctagggctcccgcgcggccaccggcctctcccctccccctcccggaagcgcggggcggggtccccggccgggccgtgggggcgggcgcgggggccgggccggggcgggacgcgctcggcgctcgcgggctcggcgggctgtgcgcgcccactccggctccagcggccagcgcgcgcgggcccaggccgcccggctccagcccagcagtagcggcagcagcggcggcggcggcagtgcgcgcgaggccctgcgcccccagcagctcctccctggcgccgtgcatggagacgcggcccgccacccgccgctgagcccccgccgcccggccgggacccgccagggctggggtggcctcgggctc

SEQ ID NO: 11613 - DNA, 2300 bp, Homo sapien
agtgagaacatgcagtatttggttttctgtccctgtgatagtttgctgagaatgatggtttctagcttcatccatgtccctgcaaagcacgtgaactcatccttttttatggctgcatagtattccatggtgtatatgtgccacaatttcttaatccgatctatcactgatggacatttgagctggtttccaagacattgctattgtgaatagtgcctcagtaaacatatgtgtgcacgtgtctttatagtagcatgatttataatcctttgggtgtatacccagtaatgggatcgctgagtcaaatggtatttctagttctagatccttgaggaattgccacactgtcttccacaatggttgaactaatttccactcccaccaacagtgtaaaagtgttcctattcctccatatcctctccagcatttgttgtttcctgactttttaatgatcgccattctaactggcatgagatggtatctgattgtggttttgatttgcatttctctgatgaccagtgatgatgagcattttttcgtgtgtctgttggctgcataaatgtcttcttttgagaagggtctgttcatatcctttgcccactttttgatggggttgtttgatttttttcttgtaaatttgtttaagttctttgtagattctagatattagtcctttgtcagatgggtagattgcaaacattttctcccattctgtaggttgcctgttcactctgatggtagtttcttttgctgtgcagaagctttttagtttaattaggtcccatttgtctattttggcttttgttgccattgctcttggtgttttagacatgaagtccttgcccatgcctatgtcctgaatggtattgcctaggttttcttctagggtttttatgattttaggtcttacatttaagtctttaatccatcttgaattaatttttgtataaggtgtaaggaagggattcagtttcagctttctacatatggctagccagttttcccagcaccatttattaaatagggaatccatttcccatggcttgtttttgtcaggtttgtcaaagatcagatagttgtagatgtgtggtgttatttctgaggcctctgttctgttccattggtctatatatctgttttggtaccagtgccatgctgttttgcttactgtagccttgtagtatagtttgaagtcaggtagcatgatgcctccagctttgttctttttgcttaggattgtcttggctatgggggctcttttttggttccgtatgaactttaaagtagttttttccaattctgcgaagaaaggcattggtagcttgatgggcatagcattgaatctataaattaccttgagcagtatgactattttcacgatattgattcctcctatccatgagcatagaatattcttccatttggttgtgtcctcttaaagaaaggatgattcttaaagaaaggaaatgtagaatcccccagaaatgctttcaaaggttgaatctcaaaataaagccacacacacactctcacacacactctcacacacacatcacacatacattctcacatgcaaactatatacatattctcacacatgctcacactcaatcctcattcacacacacacactcacacacaatcctcactcacacccacacacacattctctctcacacacacacacacacacacagctgaccactgtcccaccgtgttttgcctccccacccagaagcgtgcgttcctcccacagtggtttccaaagtgtcgttctggatccagcagcatcaacctccccttagacttcttagaaatgcacattctggggccccagccccgacctcctgagtcagctggccggggggtggggcctgggaatccgcgtttagactggctctcccccggcctgccacgcgctcccgtcggggcccacccgcacctgggccggggctggtgtccacgcgcgacggctcgggagcacggacctctgctccccgcagcaccgccccccgggtggagccggcggccccgcctcgcagagctggggctgtacctggggcaacggggccgggcctggacgtcaggtcggaggagtagcacctgccaggagcacgtcccgccggcaggtcgcaggagccctgggagccgccgccatgggtacgctcggcgggtggggggccggccgggctaaagactcggagctacgcggggcgggggccggcaccgagggccgggaggcgcgaagggtacgcggcggcgggaagcggggcgacccgaaggcccacgggggccgggag

SEQ ID NO: 11614 - DNA, 2300 bp, Homo sapien
tggccgaccatggacataatcctctcatgaaaaaagtttttgatgtctacctgtgttttcttcaaaaacatcagtctgaaacggctttaaaaaatgtcttcactgccttaaggtccttaatttataaggtaagttgcttcatgggcagtggttagatgttttccttcttcccccggaattgaagggtacattaccgagcactgacctgtctgtggtttatctgctgcttcctctcatcctgtctagtttccctcaacattctatgaagggagagcggacatgtgtgcggctctgtgttacgagattctcaagtgctgtaactccaagctgagctccatcaggacggaggcctcccagctgctctacttcctgatgaggaacaactttgattacactggaaagaagtcctttgtccggacacatttgcaagtgcgtgtggtttagctttccaatacagatttactctgtagaatcctgctgtatcaggaaaactttgagtatcacattaaccaatttaccttgtcataaagatactgcaagatctggaaaactgggaagccacgtttgctggcttggtttatttcatgttccattactataagatatgggcctgagatgcgtttctgttggtaaattgacatttaaatattgaatcaatattggactgactaaaattccattgaatcaagaagtgttagaacctatgtgaggatgcttaatagtaaacattttaggtaaggaacaagaagcccaacctaagtggttcttttctgtcctctatctgctgacacatctgctatctctgcagaattaaagcatcctaaattctctgctctgagagccagccaagataatgaccaaacttgtgtatttttgtaaactctctttttctacaaacacatggtaggtgtcccttttccatctctgtatttaaccctttttttaaaaaacaatatttattgtccacataggattcgtggatacaaccatgaacaaaacaaccctctcccagccctcatggagtgtagtctaatggaggtcacagacaagctctggaactctgagagtacaagtgtgaccactgttattgtagaggaacttgagtgtatcaggaggggcacctagaggatgtgaaggatgcataggggctcatggttgaagatcagtgagcatgttccaggccacagtgaactacggggaagcacccatctggggaactagagatgttccttactgcggagtttagaatatgggtgagaaggagttgaggaggacccatggtggcatatccaaatcattgcatatttggacagatcttctggactcctgtgttgatgatgggtcaagggtagtctagacctcagctagggagaccattgtcaaagctaggtcagagaggatggtatcctagaccagggatggtgaggtaagaaggaagaggagattgagttgacaacatttggtgactgattgtaactgggtgtggtgaaggaaaaggaaaataaagatggcctccatgctttagctcaagcaactgggtaaaggcagtgctattcattgagccaaaaaaagacagagccccctgtggcatagttaatctatccatgttctgataaagtattgcaaaggacagtctacccatagcatatttaatacatttaagttcaaactgaaaactgagaaataaatcatgtctccctcttggttagagaaggtaataggtaagtaactatccaagtggatgggcttatctcattttctttctccctttgctctcctgatcagcattttgctttgcaaacagtgttttttaaggatagcagaatcactttctgtaattattcttaaaggggaagaaaatacctcagacattgtttcctacacggagcgacccctgctcaaagcaccccccaacccccactttgctgggtccttaggcacatcctaactgaacgcagaagcccagcctgggcagtcatttgaaggtaaattgatttgctcatgtttgtgtgtccctaaggtcatcatatctgtcagccagctgatagcagacgttgttggcattgggggaaccagattccagcagtccctgtccatcatcaacaactgtgccaacagtgaccggcttattaaggtgggtagcctggcccatgttagtttcaccctgagactctgcatcagcacctgaggtgcttgtggacaggcagcaaacagaggaagccatgtgtcctttcctcttccacccttgttttagcacaccagcttctcctctgatgtgaaggacttaaccaaaaggatac

SEQ ID NO: 11615 - DNA, 2300 bp, Homo sapien
tagagaggaaaaggaggagaaattgaactgaagtagagaaacatgggaaaggtggagaaacattagaaacatgggccagttcagacagcagaacttggaagcttgggaatttttgtagaaaccgtatctcctggatagcctcagcaaagagtgctaagaaatgaaagctcacctccagattcacccaaaccttaatccagtcataattaggaatgtaaattcattggaggaaagcaaggctttcaaactacagctcctgagaaaatggcattcatagataaaacttgtaagcagttccccaaacactggaaatcttttttttttttttttttggttgagaattagatcatggttgagaactaattctcatggttgagaattagatcatattcatttaattagtcccactttctgctcattaaattgctcccctttcacatgacggaattcaatatggtaccttagtatttcatgatagaaagatcactgtgaattccaggtgttctgccagctgtgatagattcacaattcactggacctaaaaaaaaacaaaaacttactccttgaggaaaaatttccctccaacaacaagacaaggtagatcttgctctgaaactatgaccgcaaccataatttgctatgtagcaaaattatatggacataagttacccctgttccgttggccaaattgtaagattggtttgagatactggcctcttgacatttttttttattaatgtcaaatctgcctacttgtgcagaatgcacacacctatcgttccccaacagagctttgttcagacagcttgtctgtattggaaggtggtggtgtgtcatttagtgttgtgcacattagacacgaagttcatcctggctgcttgctgggccacacctctagctgctgtgtatattctacagttgatgggagttgtagccaaccaggcttccaaagtgtttaatttgtgtgaattttctactgacatgaggaaatcttgaatgactagaagcaaattgtagtcttcttgttttctttgataagtaaaatccacgaatgtcaaaaccctactagatgccacctactgagctagaccaaagtatgcgtcagatggtttctacacttgatctcatgtcttcacagtcgctgttcaaggtcagttttagggtcatcattttacagatgaggatgctgagactcagtttacctgtgcaaattcatgcctatgataagtggtacctgaccaaagcctgtacactttccaccttaccaaactctctgattattcatagcttagcagagtgccttagaggcctggggagatcacttttcccttttcgaagacctgtttcatataccttacttgagtactttttcccatctataattatcgcatacctgtgatggcacttctctgttggaattaagatgtcacaaatggcacctctgtatcagctgctggtggacagtaaaaatgagtacatattaataaatagaagcccagtcagtactaagcaagtgttcctttcaactctgttagtttgctgggaggttcatccccaaaacataaatgtattgatagatttgcttgttctacaaaagaattctgtactttcctagaggattcaaggcagagtttgtttaaagtataagttgtcttaatacttagaaaatgtaattcttgagcctgaaattgtgtgaaacctactagaggtgactggtatgtctaacaaagccgtcaatgtgtgttttaagaaccagctcctggccgaccatggacataatcctctcatgaaaaaagtttttgatgtctacctgtgttttcttcaaaaacatcagtctgaaacggctttaaaaaatgtcttcactgccttaaggtccttaatttataaggtaagttgcttcatgggcagtggttagatgttttccttcttcccccggaattgaagggtacattaccgagcactgacctgtctgtggtttatctgctgcttcctctcatcctgtctagtttccctcaacattctatgaagggagagcggacatgtgtgcggctctgtgttacgagattctcaagtgctgtaactccaagctgagctccatcaggacggaggcctcccagctgctctacttcctgatgaggaacaactttgattacactggaaagaagtcctttgtccggacacatttgcaagtgcgtgtggtttagctttccaatacagatttactctgtagaatcctgctgtatcaggaaaactttgagtatcacattaaccaatttaccttgtcataaagatactgcaag

SEQ ID NO: 11616 - DNA, 2300 bp, Homo sapien
atctttgcatttccctaataatttttcatcttgcctgcagagtctgcctgcaccagttccagtacatggggaagcgatacatagccaggtactgtggggcgttttcattcgaaacgtgttgttttctgtgatgcctggctctgattgtgtgggattggtcatcagtggcggttggcagttggggttcatggaagcggccatggggactgatggcaggcccttggattgccaccgcagagcctggcagtgtctttggtctgcattcctaccggcgaagtctcatttcacctcacgtgttatctcttggaaagcattcctttagcgggctgtgtctacccttccatcctctcgtccaaactccccctccttctctgttctgtctccttcccatcctcttctccccagttcttcttcctatgttccttcctcagtggtttctcttcctctgtttgactttccaaggtcattttgactgttcctgctcccaactacaaagatactaaaatctcacctaaccactcttcttctttcttaatgaaagaatgttttcagtccatcccaaatttgtgtggacttccacaaaccttctctaaaatggagccttttctcttcctactcttgactagttggtaaacgctccatgttcttggccagaactccctggtgagtagcgtcactcccactttcctgtgcagaaccagcctcctagaaactccttgcagctgtgtggctggacacgccttctttgggggcgtttcttcgcagcacctcttgtccttaccaagttcttcctcctgccccactgccattcagattgtctgtttgtttttttctgtgttgtgagccattctgtgttattgtattagtggggtcttggtctaagtattatatttttttactgttgtttttaacagctttattataagtaaacatgttttaagaaaaacttaaaaatgtaattgtcattgaggtttgtttctctatatatcgacaattttgtcttatagtgatgaaataggccagagatttttagtagacttcctctttgtgaagattttctttttctgttaacattgttcttttctggggatatttgagaaattttcagaattacattttatgttaagaagtaaacatgtatgttttctttttaaaagaagcaaatttagaatttttgcattttcctcctattaatattttctatttttcattgaaatgtggtagcacttaaagttctctaatcttaactgttttattttttatcacaacagtaattttatatttgagttttggagtactaaatgcaagtatatacaaggtgtccttataccagcaacgtcttctaccttgacttggattctccctgactttgtcccatgaagatgggcaaacagtaaattctgtcacagaaaggcactgtgctgggctagcttcactttttgcagtgacacctacgtcacaagatggcatttggagaatattgtgccaagtagaataaaatgcctcacagcttaaaacagtgaatgtgagaagctgaagatttctgtcccaacaaaatgttttagaatcgggttttgtgaaatggttaacgtatttttttcagtggatataaatttaacttcttaaaagaaaatcttcctacttcataagcaccctgtatatatttgcatataaaagtgtggactgccttaaaaatagatgggccaaggaaaacaggagtggagatgatgtgactttgctccatgcactgtggaaagatatgctctgctctatacaaaaattgccatggttctctgctgcatgtgaaaaagatcctgaactagactgtgaaccttgtacatgtttgccatccacggtggtcgagtttgatgaacactgtgccttcttattgtcactttgaagtcacccagcagcatgcagtcgatgatagtccatgcatgtccctgttctcctacacacaataacacagtgagggggacggttggctccgggacaggggacaggtgtcattgcagccctggtctcattttcatctgctctggtgatggtacacagcaggaagttagctgtttgattgctaacccaaatcactcttctgttttctctacttgactgctgacaagtttaacaaagtgtgtggctcttctccttcctgcttgggtaagaataaaggtgttaaaactcatataatcccttcctttgcatgtttgttctctgtgtcttccaatgcattttttaattaaaaaaaatacatgtcttttgctttttcagaacatatataatccaaaaagattagtgac

SEQ ID NO: 11617 - DNA, 2300 bp, Homo sapien
aaagttgctataattttaaaatataagaagtaaaagtgaaatcttatgtagcatctttatctcattttggtttgtcagtataagtttctgatttcctttaagctctttacttttagaaacgtgaatttacaatcccttatccaaaactgctggggccagatgattttccaaattcagaactttttggatttctgaaaaatttacatatagactgtatcccattacatcccagcagcatctctctataataaaaaaaaaaaaaagaatttctgcagaactattattgttcataataattgaataaatcataactaaaagtagctttatgtctattattttgggtcatattttggtgccaaatgtatttgcatgaactcaggaggaaagctggttttcagagtttcatgcattttggaactacagatgagagactgtgggcctggccctcagtggacgcttggctcatagtctcctgacctctgctgagttaaaggcgggagttatgtggtgaaacgagattcaacaccagaggagctcactagacattgttttaactacctcattaaatacatgattaaaaaaaaatgttgttagatatatatttttaaaaactacacacttggtgtgtataatccatatatttgagccaaaagagagagctccttatatagatgtaaatgaggatgaataagtaacttggaacagtgtgcatggtcttgaacatgttttctcgggcacactgccgtggagtgaatcactacctctgagtcgatggacgatcctgtcggtcgtgggcctctgcgctgtgttgctttagccagccaccaccacactgacagctacacaggatggggcttccctcacaggttaataaatttctctgggtttgaaggcactttccagaggactcccaaaaaccattctgaatgaatgaggatgtgacttatgctggtactagacataatgtttattgaatttgttattgttaacagataaataacgtcccgaaaataattttatctttgcatttccctaataatttttcatcttgcctgcagagtctgcctgcaccagttccagtacatggggaagcgatacatagccaggtactgtggggcgttttcattcgaaacgtgttgttttctgtgatgcctggctctgattgtgtgggattggtcatcagtggcggttggcagttggggttcatggaagcggccatggggactgatggcaggcccttggattgccaccgcagagcctggcagtgtctttggtctgcattcctaccggcgaagtctcatttcacctcacgtgttatctcttggaaagcattcctttagcgggctgtgtctacccttccatcctctcgtccaaactccccctccttctctgttctgtctccttcccatcctcttctccccagttcttcttcctatgttccttcctcagtggtttctcttcctctgtttgactttccaaggtcattttgactgttcctgctcccaactacaaagatactaaaatctcacctaaccactcttcttctttcttaatgaaagaatgttttcagtccatcccaaatttgtgtggacttccacaaaccttctctaaaatggagccttttctcttcctactcttgactagttggtaaacgctccatgttcttggccagaactccctggtgagtagcgtcactcccactttcctgtgcagaaccagcctcctagaaactccttgcagctgtgtggctggacacgccttctttgggggcgtttcttcgcagcacctcttgtccttaccaagttcttcctcctgccccactgccattcagattgtctgtttgtttttttctgtgttgtgagccattctgtgttattgtattagtggggtcttggtctaagtattatatttttttactgttgtttttaacagctttattataagtaaacatgttttaagaaaaacttaaaaatgtaattgtcattgaggtttgtttctctatatatcgacaattttgtcttatagtgatgaaataggccagagatttttagtagacttcctctttgtgaagattttctttttctgttaacattgttcttttctggggatatttgagaaattttcagaattacattttatgttaagaagtaaacatgtatgttttctttttaaaagaagcaaatttagaatttttgcattttcctcctattaatattttctatttttcattgaaatgtggtagcacttaaagttctctaatcttaactgttttattttttatcacaacagtaattttatat

SEQ ID NO: 11618 - DNA, 2300 bp, Homo sapien
gatgtttgaaaattgggagagatttattgaaagacattctcaagttcacaaagaacatctaatttacctgttaaaataaccatcagaaaacaacaggtatcactgcagttgcctgggagtcagtgataattcccgactagcccaggctcaggctcaaatacaaaccttttccatttaactctaacgataagtacttttctgtttcctcacaaacctcataaccatacgtatgtgtgtttatatgtctatattttttatttgcttttaagaagtttttgtttatcattgtaaaatatacataatataaaatttaccattttaaccatttttaagtgtacggttcagtggcattaaatacattctcattgttgtacaaccattaccaccatccatttccagaacttcttcattttcccacacggaaactttgtatcaaatgataaccttcctttccttcttcccccatcccctagtaacctctgttctactctgtgaacctgcctattttaggaacctcataaatgtggaatcatacagtatttgtcctttgtttctggcttcttaaacttaacatgttttcaaggtcaatccatgttgtagcatgtgtcagaatttccttcctttctgtggctgaatattccattgtatgtatatactacattttatatatccttgtaaatctgttgatggacacttggttggatacttgatggacattggttttgttgttcatgatcataattttcaagctctgtattttttcagttcatccattgagtaggtataccatcatgtctttttttttttgtcttttttttttttttttttttgaggcagagtcttgctctgtcgcccaggctggagtgcagtggtgcaatctcggctcactgcaagctccgcctcctgggttcacaccattctcctgcctcagcctcagcctcccgagtagctgggaccacaggtgcccactaccacacctggctaatttttttgtattttttgtagagacggggtctcactgggttagccaggatggtctcgatctcctgacctggtgagccgccagcctcggcctcccaaagtgctggaattacaggcgtgagccaccgtgcccggcccatgtctttgaccattgttataaactatgtgtgtaactactataaaccatagaaaccgattatataatagcaacactattgtgagtaaataagtgtatatagcttttccatattttattccgtttcctttggatgcatttatgatgtttttttaaaataagagcataacttatttatatgtttacattttcttttaaagaagcttgacttctcatcagctgagccagaagtgaagtcatttgaagagaagtttggaaaaaggatccttgtcaagtgcaatgatttatctttcaatttgcaatgctgtgttgccgaaaatgaagaaggacccactacaaatgtaatttttcattttaaaaataaacattaaaaaaaaaataggcagaggtttcagatgtacctttacagtgcagcctggataagaaatcctagtccctggtatcaaagaggtgcagtgtttggatcaggatatggaggttgttagcctgcaaggacaggatgttcgtgatggaagatgagggtggcaggtttgtgctcagctttccaggagacagagttcatcttagatgcttcagggaacgcaactgtgttttctatggaacatacattacgtagcaaaacacataaaggtaaaataattgttttgtttgtttcctaaaatgttttataagctaattctctgtatgcagaaggatgagactgtttagtagtaatttatggcaacagtcctaaataggtcttgtcatttctcttttgatagcaacattcttttgtccctgtttgagccatggtgatcattggattgttttgttttgttcaggttgaacctttctttgttactctatccctgtttgacataaaatacaaccggaagatttctgccgatttccacgtagacctgaaccatttctcagtgaggcaaatgctcgccaccacgtccccggcgctgatgaatggcagtgggcagagcccatctgtcctcaagggcatccttcatgaagccgccatgcagtatccgaagcaggtggggagtatgagcccagcattcccactactcagactcactttgcatgctacctaaatgcaccaaaaatgctcaaattagaccttgtaatgcacaagtggggtcattagactcttaattaatagtatttattattagacagtaaaagcaagctgaga

SEQ ID NO: 11619 - DNA, 2300 bp, Homo sapien
tttttttttttttgtatgtgcgattccttataattataaatatatgaacataataaactgtaattattttccccattttgcctaaggtattaaaatcttggccaggcgcagtggctcacgcctgtaatcccagtactttgggaggccgaggcgggtggatcacgaggtcaggagttcgagaccagcctgaccaacattgtgaaaccctgtctctactaaaaatacaaaaagtagccaggcgtcgtggtgttcgcctgtaatcccagctactcgggaggctgaggtaggagaatcgcttgaacccgggaggcagaggttgcagtgagccaagattgcaccactgcactccagcctgggtaacagagcaagattccgtcttaaaaaaaaataaataaataaataaaaatctgggctccattcataaatgcatttataatatacaaatttatgctggtttatttagtttttaattgggcaggtacattttatacttcagaatagttttaatgtcctgcaggagacttggtggtacaatttcagttctagagcttgttgaaaaaccgctgtagctctttgaagagaataggatcacacccacaagaccacgtcgtacatagtcaggcctgactacttagctgtgccagtggacctaggggcagtagtgggaaaatccaaaactatggattattctgaaatctgactggttttggaatgaaattttgagtgtgaatgtatgatactcaaaatgtgaaaatgctttgagaaatctaaaaaaatcattttcaaggataaaatagcattttaaaatattcttaactacagagtaaaaaaatcaaaaagtttgccagctccaaaatctgactttgcgcttagcccttctctgccatttattccacctctcagaataattttaaaaacttacattaccttcacatcacacatcacacccttgccagtaaagtgcttattgtagagcctggcacaaaataagcacttgctgctgttgtaattcttactttcatgagtttggaggtggaggggagtttgcttcagaagaccttcaggcatggcctgtgacacagatagaaaggttgacagtagaaacgatgaagtgaaagaagcagaatagagacgttgttcatgttagttacagccagagccaaataaactagataaggcataaatacatttatcgacctatgttttcattgattcactcatgctttttttccacccacactgaagtctgcacataaatagtcaagtgctgactggacagaagatcatttgaactaagctgattttaactaaaattctttagcttttgattttgactcattcatatttgaagatctggtggatgtggcattataatcttaggctttatgcactattggaggatcttcatgggtggatgaacgacggacaccaggctggcccattgaatctgtcatgtggcgaggtagtttgaatgcagtctgtgtaggtgaggtcactaatagaatccttggcagtggaagactacattaaacattctgtacacacacacagatgaaaatgtcatggtgctaatattaattggaatgcatatgtttcttcctaattatttcactcttttccttatgaatggaaagaaaaactgagggcagatttatatggtaatattaactaacagagctagctagttctaatattagtaaataccatgaaggcgtctttaagttcacgcatcctattcacttttatgtcatagtagaggccacatggctttttaagaaccaggtgcttactctgaaatagtccattgttaagtaaatgtcacaaggttaggtgaagttgtctccttgtaaaacctgctctcagatcattaatgatgataacttaaagtgatactacccccaagggtaatgtttcagtggttcaaagtctcaagcttcacaggaatctctggtggtggaatttcaggcattagctcgttgatgggaaaaaatttttttgatgtttctatgggtatgccttcacaaactttcccaagtgttttccaaaaatcacgtctttctgttttttattttctatttttaaaatcccccttcaatagtgcatcaaaacctataactctgactggcatcttgtgaactataaatatgaagattactcaggagagtttcgacagcttccgaagtgagtaagctatattatacacatagggaaaagtctttgtacttgaaatgcttggggggaggtatgtaacttcatatgcaatcagagtaattgaggaaaatatttttagatggtttatg

SEQ ID NO: 11620 - DNA, 2300 bp, Homo sapien
gaacacagtggctcacacctctagttcctgctacttgaggggcttaggcaggaagatccttgactccaggaggtcaagactgcagtgagccatgatcgagcccctgcactcagcctggactacagagcaagaccctgtctcaaacaacaacaataacaaatagaatagcatttctcttattaatgcccagacattctgatggcttaatggcgatggggatttgaggaagaactggactatttagaacttcctgaaccatctcaaaaaggtttctgagttgttggttgggctgtcctttactaaggctcagttagtctgttttgtgcttgtggcttcatcctttctttgatttgtaggacattcctaagtttttactttactataatttcgactctataggtaagtgagagttttttcttactgggttttttctgttgtaactttacaaagaaagatttttaaaatttatagataatattattttggaacacagatttggtagggggacttctattaaccctgaaagactacccaaggttgagagattgggtagtttaaaaaaaattatagaagccattaatttatttgatggactcattgatcctttgagatcgttacataattgatattcacactcagaagggttcctggtgttcaagtggcagagacccagcttcagcttcactcttgaagtagagcagctgcagcaggtgctaggagagggaggcggctgtgcgaggactgggtggcatctcagttctccccactgcctcctctgagccctcctggctgcgttcctttgtctggaaagtgggagacttttacctgtgacttgtataatagtttatgttatttccctgggtagagttcctctggcacctattgttgctacatgataactactctcgttgttgactgactgaatactgctgctgctgctgccgccgctgctgctactactactactactactactactactactactactactactactactattgctgctgctactgctgttactgctactgctacggctgctgctgctgctgctgcttgttgtctactgttactaaatcttccctgatgtccaggaaatactcagagtaactaggaaaagctctgcggtatccatgaagtacagagtaatatttgatcccccctttaatgttcatttctacataacttttagacaaatcccttaatacctctgttttaatttttcccaagaggtaaaaaagactccactgttaaatgtgaggaaataataaaaatacagacttttaggaacacatattttgggtgctactaaaccaccattgaaccgtaggttggtgatccagctattttcccgtgcttttgtgcatctctctcttaattttattaatttgtcatttatgatgtctgctcttcttgccttcccagctagatgtgaagttctttgaagggagagatactctaccttatacttttagtatgatcctctcagcacctagtactgggggtaccttctgatacccacacatctggacttaaagtaatattctgtttaataaatgcatttactatgatatgtggtatcccatgaaaatgttttgatgacctcatctttctggcatcaaatagtacataaattaagtgtttcatgctgtggtctgtcatgcggggtgaaactcatttcctccacctgtatccacgaggtgcaggctatgggaacatacttgctggtagctcttccctgctttaatcatcagccaggcatttggtttttaaccataacacaaatgaaagcattccaaaactggaagaattttagaacaagcagacaaccttgctgtctcttaagctccacgagcttcagatttaaggtaattatgaaggagtctaactgtgactggttttcttttaaacactgcagtattttgattccgattgatttggcccacgctgtgtggaacagacacaataaagccggtctttatcagagaggcagtacactgtgtattgttcagcttggagtttgttttcctttggccagcaagtaggagcctccccttttgcatggagtagtaacacccctggaggctggcctttgctgtcatgccttcccaccccacaggctctgcagacccagccagcggggctgaccacttgtgcctgggaagccagtttcctttccttccttggaccactggcatgcctgtgccttgcacggccagggactcgcagctgttccagttgcagactttctgacttgcgttttcagccgagaatgcaggctgataaatgcaggacaa

SEQ ID NO: 11621 - DNA, 2300 bp, Homo sapien
gctggctttgaatgtggcccaacaaaaattcgtaaactttcttaaaacattatgagattttttgtgattttttttaaagctcatcagctatcattagtgttagtatattttatgtgtggcccgagacaattattcttcttccagtgtggtccagggaagtcaaaagattggacactcctgatttagactcttgttttaaacacgaatggagggttctaaaagtaaatcaaacagcatataccagcagcttccaatttgcttggttatttctaattctcggtaaagttcaaacgtaatcttttgtatctcaaataatattccctggcttctgcaggcaggatgtctaaaatatgtcataacaataacaaattaattttacatttccaggtactctctttatttctgttgaatgaactattgcttttaaagctatttctcttgctgtataggagtcaggttaattggtagattttctgaattctcaaaactgacatttaacttatgtgtttagtgttttatagtctccaatattcagtttctgggtaggtgagtttctagttgtttatctgtcagcattgtgatttcgcatgaagattctcctagtgtcacaacttgggtgtaatcttgaaccctatagctctgttttcacagaatcaccctttggaagtggaatgctctagaccccagagggtcatcctgttttttgcatgtggccaacatctccccatctttgatcttgtacagctatcagacacactttgcataaaaatacaggagagagaataagcctagatttttggttttctgtggggcccaatggctaaactactcatagaaaacagacattatgggatcacgtgcccggatggtattccctacaggtatgattttactacatgcgtgggtttacacagcccccaggtactcagtcagttaattcactctaactttcacatctatagagagaaatgaaattatctgttgccttgtgaaataaggaataatatcagagcagattttaaaagattgatcacttttttcctagttacatattgtggctgggaaaagttttcctgtatgtgcagcatggtctttttatatagttagcctttcattgttgaagaaggaaaatggcaagagtcaacttggtatcatatcattgacaagcttccctgttagccattcccagagattcacgtgaggtagtgtagtgtcactgagttcagtctacagtagaaggagttggattacttacacaccaaacataatcatgctgactgtgagacctcagcatgtatttcccattgcatactggagtgctgcttcagaaggcatgcatctagccagactgggtagccctttattcatgttctcatttgcatctttgggtaccagagacgggagaatccttttaagcagtgcaatcttgctagccctctctagcaaagagtagaggtgggctgaagtcaagatcgacacagcaatgttgtgttcccttgtggtttgctgtcagcaagctgttatccatacgtgcaaaagattgtttgaagtgggcttgcatgtgtttccatagcagcagtcatcttagagatttcactcgttttttggacttttttttttcctttgcttctctgtttcccgctgatgcaggattaaataaacagcatatttaggtcaaggaaagagatgtttgctaatatagatgctaggctaagcattctgggagagcgatttcttgcagcagatgaacattctttgtgcctcccagcagcatctgcagcagtgtggctgtctggcactgtctttttcattttgggcaggttctgagattcagaacaatcccaagcaaatcacaggagccggcagttttccagtagagccacatgtaaatctcctgcttatttgttctttggtattaagagtgaagcaatcagctagaaaaacgatactttaaaggtttggtgcatccgaggtgtgtcatcttgtgtttgcaccacccctcctgttttacactcggagtctggattttttgtcaggctgttgagcaggagcggattctagtacggcagctcagagcttcccttctgttccagtaccggtgactgcttgtcacgaagatggtacagtgggagcctgtttcggaagagccaaggaagaggatgtggaaatggagtagagattgctaaaaaactgaacatccacaccttggggatgggttgcactactagtgtgattctgtttaaaggcatccgcaccgtttttgaaagaaactgtgcttatatgtgcaaacagcaaggaga

SEQ ID NO: 11622 - DNA, 2300 bp, Homo sapien
agggagtcagaagcctaaagggaggctctaactcatgattctcagaagacaactgttgtcaacagttcaaatgagaactgaacggccacactcctgcagctgaaaggagtcaatgcgagctgagttgctctcaccgaacagagtgcgttccccggggaggcagggaaaggccggcttgcacctgctctgtcacccagctccactcttaggacagaagaggtctggaaaatgtctgggccattccctcatttcacggaggaggaaatgggttagtgtgtaattgtttttatcatcacccttgttttatctttcaatctgccaggctcactcaatgctacatcctgcagtccccacccactggagaaacaatccgatcctgcaagtaattattgagtgcggacggcatacctcacctccagacctgcccattaaacccagaacggaggtgttttgctctctgcgctagatcggtattttcccctaccactttaagattacgcttcaggccagtgttaggctttctggtggggtgggacgcaacaggcggcctcctccaccgcagcgatggcggctatgaaacctctgggtatttgggcgggaggcgcggcaggtattctcccaaaactgggttttcaagaccaccactctctgcggaggccgacccggcaggtaaggaactgtccatcggaaggcaacgggcgtggcgtgagcagcccgaccaatcagcagagccgccgttcagtcaggctccccgcccggggtacccgcccagtccccaaccactgagcatgcgccgcgggcctggcgcaaatccccgcctggcgcgccctctccgcggccctgtgagggttaggctgcgccgggcttcctcagagagacagaaacggagccggggcgggagcgggcccttagggacaggaaagcggttagggtattggggggaaagtccctcacagggtggctgtcgctagcggccgccagctctgcgtcacggtgggctcgcaagccggcgcatcgcagtttccctggtaccccgcctggcggtccggcgcggaggggcggcagaccggctaaatcggccccagtgagggccgccgtgtcacctgagccccttccaggccgttgtcctcaggttacaggcgacataaccgaggctccgaagtattgcccacgtccaaggtgacgcagctggccgtcccggcgggccggagtctgggagtctcccacgcctggcccggcccaaccgtcatcgtcccgccgcgagctccgtgcctccggggactgaacggtggggaggccgaggcgccacacgagcgcgcggcgccccgcgccaggttccgagcagggacgctccgtccaggtccgcctggccggccgcgggttccgatcggtgccacataaataaaggctactttcctgagacctctgtccccgcagaggccccgggcgcagagggggggcgtggtgcaccgagctccgaccctgccggtgacttcggggtcccctcgagcgcagccgggctccctgggcaggaaaccctgctccgaaaccgcgcatcgtccagcctcggctgtgcgccctcttggtggcgtgcgcagtcccctcctccggtcttcggacgtgcggcccggggcggaggcggccccgaccccccaccttccccagtgagggtcccgcgcggcacgccgcccctgccagtccggccgcctagctccagcgccgggccgcgccgacctgcctggcccgccgtcccgccgcggcggcccctcctccgccgtccgggcgccccgccccgcccgcgccgcgccggacaccccgccccgaggaggcggcccggcgagtggtcgccgagggaggctggtggcatgggggagccgccgccgccacacgcacggtcgcccggagcgagcccgggcgctgctgcgatcgcggggggccgcggacgccgaggggggcgccttggggcgtgacacggtgcagagggcgcggcctgggctgcggcggccggactcgcggcgagcagcggggggagcaggcggcggcggcgccgggagcggcgggcggagcgggccgggcgccgagggcgcacctggcggccgcgcggccgggccgggccgcgggagcaggcggaggcggaggcggcgggggcaggaggatgtcgcagccgccgctgctccccgcctcggcggagactcggaagttcacccgggcgctgagtaagccgggcacggcggccgagctgcggcagagcgtgtctgaggtggtgcgcggctccgtgctcctggtgagtgcgggacgac

SEQ ID NO: 11623 - DNA, 2300 bp, Homo sapien
tgaacattttggactgttacactaaagtttactggtgtattttatggttcaaattaatcttttacccacataagatttcataacattatgcatcggtcaactggaaaatccagttatgtagctctgtacagtggaaaatccagttacgtagctctgtacagttgtccaattgtacaatggaaaactccactatatacttgagagagtagaaaataaaactaatgtcttagcattattatgaaaatagttttggactttgcatccccttaatgggtcagggtgtagtccatcaacagcttctgcaaacataaaggaccttttgactgtcgttttcctgaaaaataactcgaacgaacctaaaggtaaatgtaaaatgtacttcaagactgtgaaaatgggctgggcccagaggctcacgcctgtaatcccaacactttgggaggccaaggcgggcggatcacgaggtcaggagttcgagaccagcctgaccaacatggtgaaacctcatctctactaaaaatacaaaaaatagccagggtggtgtcaggtgcctgtagtcccagctacttgggaggctgaggcaggagaatcgcttgaaccggggaggcagaggtatcagtgagccgagatcgcgccactgcactccagctggggagagcgagactccgtctcaaaacaaacgaacaaaacaagactgtgaaaatgaactttacgaataaagcctaaagaagcaaataaaagtcatacttttgccttctataatcagtgttaacattttggcccactggaacctctctttgagggtagggactgtgttgatctacgaatcacagatttagcacactggctggcacttatgagcactgaaaatgcttttttttttttagtactccatagcctatccctttcatttagctgggtagtgtggtcaattttccccataacatgcgttctcacataattgcatgtatttctggggtacagtgtgatggttccatacatatacacattgtgcaaccatctaatcagggtaattagcacatccatcaccaaaacacttgtcatttctttgtggtgagaatattcaaaatcctctcttctagctattttgaagttaacattatcgttgagtatagtcatccaaacgtgcaagagaataccaaaacttattccttctaactataactttgtgtctgttgaccaacctctccccatcttcctccccactaactctcctctgtacaagaataaccactcttttactccctactttcacgagatcaacttaaaaaaaaactttttaaaacgactgcatgatatgttttcaggctcacacatttaaaaaccgtgactttggcaaagagtaacttcattctgctggggaaaaaaatttaaatggcctgagtccggaagctcgccagggcagaagcgcagggtcgctccgccgggctcgccgggccggggaccccccagccacccgccaccacggcggggagggcagggtgctgactccagggaccacgacagtcggccccggtggtggggattccgcgcgggacccacgcgggaacaaagaggcggctggacggcccagctctccgcacccggaaggacctgttccacctctccggctcccgtacccctctatccgcatctgagtgaccagatcccactgcagtcaacagcccgcggggtagccagcttcgagggaccgcccggaaagacacaacgcgcgtggaaggcgccgggcgtccagtctcgggagagattagaagtggcgctcctgcccagcgccggcaatccaggggaatccgcggccatcgcggatccaccaggggtgaggcggcactgagcacaagtgtgaggctctcgggagctacgcctccgcttccccagtgccacccgtttttacctcaggcggttctgaccgccatcgtttcaacctggagaggtgagccctcccctaccgacgcacttcccttccccggcaggaaggagggcgctgacccagcgggcgcacgcccctgactgcgcatgcgccgggtgcgccgttcgtcagcggcgagtggcctcgcggcgccggattcgtcgctccgccaagagtgcgcctgcgcggtcgctggggctcgcacttcagcttcccctcccccggcgccctctggggctccgagcccggcgggaccatgttcaccagcaccggctccagtgggctctgtgagtaccggcctccgccatcctggctgccccctacacgccaccctaggcacctctttgaggaggctggggcagcggggaccctc

SEQ ID NO: 11624 - DNA, 2300 bp, Homo sapien
acctagcccagttcatcgcccagaggagatgcccaaaatgtttgtaaaatgagcatgtaagacacagccttctgaggaacggccatcccaacaactcttacactgcagaagcacttaattttagaaacaggccaagacagctgcagaggggctccagacctacgcctctccctgggcaacagtttggttcctagaattcaacactcaccaccatgtgccatagataacaaaatattatcttccccacagttgccctgtatcaaatttgaatacacttggccaatataatctcatggctaatacagtacagcaaccaataagatttctcttgccctttatttttttatatgtactttggccagcaaggatagatcaaaatgctaaagaacaattgaaattgaagaattccaccattaatttcataaccagtagttcctggctcactgtgtgatcccaggaaaaccacattgccttcttgaactgtcagcttcagctacagtcctaatgctctttatctaaagggtagtttggggaagattacttagtagttgtaacatactccgggaccaatccatgaaagatgccataaatcaaattaattatgaaacaaaggaaatcataaatattgaaaccacttcaaaacctgagaagttgagaagtgaggaagatttaaaattatgcctgtggcgctgatactaactcactgtcagactataagacgagacacacattctcagaagattcatgacattcccaacagatcttttttttttttttttttttttgagatggagtctcgctttgtcgcccaggccaaagtgcagtggcgcaatctcggctcgctgcaagctccgcctcccgggttcacgccattctcctgcctcagcctcccgagtagctgggaatacaggcacccgccaccacgcccagctaattttttgtgtttttagtagagagacggggtttcaccgtgttagccaggatggtctcgatctcctgacctcgtgatccgcccacctcggcctcccaaagtgctgggattacaggcgtgagccaccgcgcccggccaacagatctttaatatttggaaatgtcagatgtttctgtcctccagcagcattaacttcacatggagtatgaacagtgacaagcaattgcaaaattagagctgttctccgttgctgtacccgtgcctaactgttaacacgcagtctaccttaccgaaagtcaattccacacactcagtgagaaaagccgtttaactggctgtaaaaatactccgccccctacctgctgaccaccgctaacacgccaggaaaacagcaacatccagcagcacagctgcgctccctcgccacgacttcctaacttccctccacttgaaagcactctcatcagtgtgtgtttgtctaaaaactcttcttggagactgaagaagaaacacatccaagtgaaactgagaggtcagcttctaaagcggaggctgaactttgcaagtgggggcggggggagttagttcggtcccccaagcctaaaagaatggggcatggtaagggggacggccccttccttcagcgcggcacacgctccgcaaagggcctggggccggcccacgagaacaccagggcacctgcccacttgcagcggccccaagagactcctgggcagagcacctggggataccaggtggggtcggggcgggcggcggggctttgtccccattcgcccctccaggccgaaatgggggcggtttccgctgacccccaagaccgggaactagcagggttcggacgcgggtctggagggtcggccccaccacctccggcaaacccgagggtccccgctgccccagcctcctcaaagaggtgcctagggtggcgtgtagggggcagccaggatggcggaggccggtactcacagagcccactggagccggtgctggtgaacatggtcccgccgggctcggagccccagagggcgccgggggaggggaagctgaagtgcgagccccagcgaccgcgcaggcgcactcttggcggagcgacgaatccggcgccgcgaggccactcgccgctgacgaacggcgcacccggcgcatgcgcagtcaggggcgtgcgcccgctgggtcagcgccctccttcctgccggggaagggaagtgcgtcggtaggggagggctcacctctccaggttgaaacgatggcggtcagaaccgcctgaggtaaaaacgggtggcactggggaagcggaggcgtagctcccgagagcctcacacttgtgctcagtgccgcctcacccctg

SEQ ID NO: 11625 - DNA, 2300 bp, Homo sapien
ttttttttttcaactttttttttttttattgatcattcttgggtgtttctcgcacagggggatttggcagggtcataggacaatagtggagggaaggtcagcagataaacaagtgaacaaaggtctctggttttcctaggcagaggaccctgcggccttccgcagtgtttgtgtccctgggtacttgagattagggagtggtgatgactcttaaggagcatgctgccttcaagcatctgtttaacaaagcacatcttgcaccgcccttaatccatttaaccctgagtggacacagcacatgtttcagagagcacagggttgggggtaaggtcacagatcaacaggatcccaaggcagaagaatttttcttagtacagaacaaaatgaaaagtctcccatgtctacttctttctacacagagacggcaaccatccgatttctcaatcttttccccacctttcccccccttctattccacaaaaccgccattgtcatcatggcccgttctcaatgagctgctgggcacacctcccagacggggtggtggccgggcagaggtgcccctcacctcccggacggggcggctggccgggcggggggctgacccccccacctccctcccggacggggcggctgtccgggcagaggggctcctcacttcccagtaggggcggccgggcagaggcgcccctcacctcccagacggggcggctggccgggcggggggctgacccccccacctccctccccgacggggcggctggccgggcggggggctgccccccccacctccctcccggacggggcggctgtccgggcagaggggctcctcacttcccagtaggggcggccgggcagaggcgcccctcacctcccagacggggtggctggccaggcggggggctgacccccccacctccctcccggacggggcggctggccgggcggggggctgaccccccccacctccctccccgacggggcggctggcctggccggggctgacccccacctctctcccggacggggtggctgccgggcggagacgctcctcacttcccagacggggtggctgccgggcggaggggctcctcacttctcagacggggcggccgggcagagacgctcctcacctcccagacggggcggcggggcagaggtgctccccacatctcagacgatgggcggccgggtagagacgctcctcacttcctagatgggatggcggccgggaagaggcgctcctcacttcctagatgggatggcggccgggcagagacgctcctcactttccagactgggcagccagcaaaattttaacttttatatctgttttaccacaataaaaatacaaagaaaagttggaattaatatttgttttacctatctcataaggtcattgtgaaggggaaataagattaggatgtttgagatgtcattgggattatctttaaaaatctgaaaaatgtttaagcagactcaaaaataggcctttgagtagctcttttttttttttttttttttttgtatgtccccttatatgttttttatgcagccagaagttgggtgaaacaatgatttaaataaactaatatttcaaacctagtcatatttagcagcagttgccataaattactttgcatagttgctatgaagtaagttgatgattaaaattaagctcagaaatgcatatttttgagtttatacctaagttgtttttcagttacaactttgtcttattcaataacataaaaatgaacatttgttagcctttcattctagtttacgtatataattttaaaaaatcttactaaacgtgatcctgaaatttcttataggcagttttctgttatcttaatgagaatatgttttcttataagcacaaaaaaattcaagtacctttcgtgccactgttgggaggaatttttactatgagagacttgagctcagagaacatacatatatagttttcctttggtgtgtgcattatgattttgtttaggacattaaaaataggcagtgtaaacataacaaatttgctaaggaagagacccgaacaaattttactcttgtttattgttcttttttaaatccccatctagatttggaggttgatatgtggaagaataatttgccttgatttgaaagatactttctgcagtagtctgcttatttataattttaggatatttgaaagaagatatggaagcagaaaatttgcagtaagtttttatgtattttgtctttgctacttaggctgtagaaaaaaattttgtttaaatggattttattttgttaaa

SEQ ID NO: 11626 - DNA, 2300 bp, Homo sapien
cccatctcataagctggtcaaagtgtccctgcctgctgactcaaggcccagacatttatccattcctcccccaacctctccatttcttcacctacttgttcagtcagaaattcaaccaatattaaatgcctcttctctacacacatatgcaacacatgccaactctcaaggaatgcaatttagtggaggagaaaaagcaagtaaatatgcagtaacaatgcaaacatgtgccactacagggataggtaccaagtgctaaggaaacctgcagggatgaacaaccagcccagcttcggagggcagagaaaccagcccagcttcggatggcagagaaagcttcctgaaaaaggtagctacaagaacaaagagcagcaggccatgccatcaggtgggagacagtggtgaggaatgccacagtgggtggaacagcatgtgagaggcaggaagagcaaatgtagccagtccagagggctggaatggagagcaagatgaggaaaaagtgagagctcaccccaacctgaagccaggcctatggagagccctcaggtgctcctggatgcctcctctaagagtctggcaattcagaaacaagaatgcccctgtgcaccgtgaagaattcaagtcttgatgaaaggactcttctagacacatgccatcaatgtatctgttgattttagcagcaatggggaagctaatcaatacttaattttagaaaagtcctaagctatgtgaataaggcaaaggacagattaggtctgcatgcaggcagatttctgtccagctgaaacatcaaactcctgtgtgatgaatgaaatataacatcacatataaaaaactgatgaatgtgattcagccataagaagtcctatctagtggacagatcaatataattacctcataagaagttattacagcgggagaaactggacctggctttaccttgagttcttaagcaagtaactggccttcaatttcttcatccacacaagaaatagttgctatggttgtctccaacacttctaaaacccatcattctggcaggttgtaacaatcaaaagtattttatcaccaaaggcaaggatttaagtaacttttctaagccacagatttactatggttttgtctgagaaaaaaaaaaaaaaggatggaccccaaactgtctaaaattcaaaaaaacaaatacatttaagttcatgaaccctttaaaaagttgacaaaccatgcataaccaaacataaagataattaaaattttaggataagcaaatgagagataattttttttaagaaatgagaaagtaaaacaaaattaacctaacaaggcaggcagcgattcgttgctcacttccctttctgctggtttcatttcccttcttaggtgaaaacactcttaatatgtaaatcagtccactaaagacttcagagtcctttctgctaagatttgcagaaatttttatgcaaaagaaattatttctagacttccacgcactagaaaagcagacttacaaaatacagcaaactaaagtggataaatgtatgtggcaaagcagaagcaattaatcaaggatcctacttttaagcatttagaaatgtttaaatagtaaaaagtggaaatgtggatattctatgatttttaataacttggtagtaaaaagtgagactccatttaggagtacctactaagtgccaggtactattaagcacttgggatctttctggtttagggcccctacaatcctactggatatagtattatctctatttcaactgtacagaaatgaagtaggaacaaagggttagtcagagtgggtaggtaactagacaaagtcacatagcttataaagcaaagaagctagactttaaacccccttttactcaatatcaaatcttctctttccatagatgatgcagacttcaagcatcaaagtacacaaactgaagaaactttatcctttgtatataattatcttaaatatatgccatcatttcaaggggagcttatgctaagtgtgacttcataaacaaatcatttgtgaaagagaaaaaccacatccagggtaaagtcataaggtgaaaaagcctatttcagagagcacttcctgaaagagacaaagcagcaattaaagtcagcccagcaccaactccgacgccaagcgttacactggaaactactttttaaagcaacaaaagagtctaaaacaaaatacaacatttcttaaatacactgtttccagaaagagctattttaacagaagcaactcaaagatatcccttcgacagaagtggaagtgctgaaaaatg

SEQ ID NO: 11627 - DNA, 2300 bp, Homo sapien
catccatgttgttctatctgccctgtgtatcatcaattgtgattgtgacttgcactccactctatgcctacaccacaagtgacttattcatgctatagttgaacattcaggttgttcctaatttggagttgttgtaaataatgttaccgtgaacattcttgtccatgtctcctggtacgcagcatgtgtttttactggttatagacctaggagtggactctgagtcatggagtgttggtatcttcattttaatacttaaactgttttccatatttaaactcccaccagcaatgttccttgttactcgataccctcatcactcaacatccttgccagcactttgcactgtccgtctttttcatcgtaggcattctggcgaatggataataccctgctgtggttttaattttcattttcccaattattaataaaaagttgagcagatttacatgttgctgaccatttggatctactcattcttaagtgcttgttcaagtcttttggccatggaatggcagagatcccagacaccacaattacatgtacgagctgccaggatccagctataaaacctttccttgagaatatcaactcattagcaagaaacagggagataaaaagatggtctattccctcaggagattgtttgctataagtcaaattaccatttatgatgattctctattaagtagggccaacttcaacaaaaattactaaaacgaagtataatattataatgcaaaatacagaaagaacatacaatctgagagtcatgagtaaatatttctgggtcacaccatgtaaactacatactttgcagtcagcatgaaggttaagttagctcaagcatgtgaggctctcagaatcatgcctgacagtcacctctgattacctttcataatttagttaagaataatggcagatataataaaaaatcctaagtaacttgtcttaaaccaacaaccctcaaccttatagatacatgtttacttttactatacaaatggctgtgtactaaaatcctcaaccacacacactattatataggtttatgtttaaataacctgataacacatctcttgttcctttaccttccacaagtccttttttttttttttttttttttttttttttgagagggagttctgctctgttgcccaggctggagttcagcctcagctcactgcattcttggctcactgcaacctccatctcccgggttcaagcgattctcctgcctcagcctcctgagtagctgggattataggcacgcaccaccatgcccagctaatttttgtatttttagtagagacagggttttgccatgttggccaggctagtctcgaactcctgacctcaggtgatccacccgcctcagcctcccaaagtgctgggattacaggcatgagccaccgtgcccagccctcctctttcttctgaaatgcacttcctcatattactaggtgttaactatacagtggttcccccttattctcagaggatacattccaagacccccagtggatgcctgaaactgcagatagtaccaaaccctatacttactatttttttcctgtacatacatacctatgataaagtttaacttatacattaggctcagtacctttgtgttttgggaccattattaattaaataagggttactggaacacaagcactgtgacactgtgacagtaaacctgatcaccaaggtggctatgaaagtgactaatgagtgggaatgtctacagtgtggagacactgggcaaagggaggactcatgtcctggggaggaaggagcgggacagtgagagatttcatcctgctgctcagaatggcatgcaacagaaaacttatgaattgtttatttctggaatttttccatttaatattttcagaccatatttgactgaaggtaactgaaggtaactgaagcctcagacagcaaaattgcggataaggggactactgtatacccatctccatttgcacctctggtaactgtgagatcagaatgtgcagcagaaggctgtgtgcctcacaataaccatggagttctgctcaatctgctgccttggcgactctggatctctcttccaatagtaaaatgtcacactgcaaactctgggcctggggtcccatgggacttcagtggttccaggactgatttcactgccatcacttatatatggttagatatggattcaacttgtttgctgtgaggttaagtgtctgaatgtctacatgtctatacatctttaaaactacacacaaaaattgctaaagacaagaaatttggga

SEQ ID NO: 11628 - DNA, 2300 bp, Homo sapien
tagatgtgtgatcatccatagactcagggccatttatttatttatttatttatctatcgagacagagtctcgcatggtcgcccaggctagagtgcagtggcgcaatctcggctcactgcaacctccgcctcccaggttcaagggattctcctgcctcaccctcttgagtagctgggattataggtgagtgccaccgtgcctggctaacttttatatttttagtagagatggggtttcaccatgttggccaggctggtctcgaactcctgatctcaggtgatccgcctgcctcggcctcccaaagtgctgggattacaggagtgagccaccacacccagcctgattcagggtctttatgtaaaatatccataacatatctgttggattcaccctctggtacgtcagtggccagagagatgggagaagaatgatgggagacagttttttagcacttataatgagaggcaatgttgtaaggacttggcagtagtaatactccccattttacaggtaaagcagctgaagccagatattaggtaacttgtgtgtgggggggccacacagcttgtaaatttcatttgatcctgatttcagagcccttgctcttattacactatattgtactcagagtgacaccaaaaaaacaaaataccacgcccccctcccccaacacacacacaaacacacatatataaaaccctcactgccctttaaaggaagtctcttcacagcttctattttgccaagtttctgttaccaccattcccaacctggacataaatgttgccaaagcactgcatagaattcattgtgattttttcccctcaggcacatagaaaagatacgtttagtctaagtaaacacaagtataaaccacacaacagacttttttttcacttatctaattagtagtatttagcatttaaaaagcaaagattggtactctttgctggcgggagggtaaattggtaaaatgtttttgtagaccaaaaagtaccgttttatatctaaagctttagaaaatataccctttgccctaggaattctacccctgagattctatcctgagaaataatcttatatttctaataattcctatagcataggaatattctatattaaaataactttgttccttttccttcatactaagttatcctgaaatattggcattatttgcatagttttgcttgatactgtcttttgtcattgtgagtttatacagtagtacatgaagtgagccctattttttgacaaagatatttctggtggacccatcgctttcagtcaactttataagaactaactagacctaccagtcagcagagagagtaaacttacattattaatataatttttgttagaagtgatggtagcttgttcttaaatagattgttttcctttttaccttttaccttaaaacttaggcttttaaagtttttctttaaaaagtttgttgaaaaagcaaaagatcttgtacttacatatcagtgactcgttcgggtctctgtgtagtagctgtgagtagttgtccaaactgaagtaagttttaactgtggcatgttgttttaagagaggctgtgcagacctccttttatggtggtgactttttttttctctgtcaccctgtgactgagcatgtaatgagcagttagcctcgtgtacgtgtgtgcactttgtgtttttttttgttttaaatgggaagtgaaattttttatagtgattaaaaaaaactatccaaaagccccttggaatttatgaattgttgatatctgtggaactttataaatttttctgtaaaggtttaagtatcaaaaaattctttgaaagagactgaagcaataaaccttaaccaaaaaaaagaccaagttactgatgattttatattgattttgcatgtaaaagtatgggtttttaaatgttttaaggaaaatagtgtcaactttgacagtgctttttacctggaaacttggtatcagggagtagtttacacattccaccttatccacagcttatgagaaagaaacaggtttctgtggcgtgggggtgagtgacagtccaggatgtggagtggactggattagtcgccgttttcagtcgagaggctgcctgagtcagaggctgtgtgagtacttgaataacagggaaacagttgaagggaggcccattatagataaaatccagcctcttcagcacagggtgaaagagactcatgccattcacctcatagttgtagttgactcagtttaaaccaactaacgtgtctgtcagaatgcagtttatttgtaggctaaattacc

SEQ ID NO: 11629 - DNA, 2300 bp, Homo sapien
ttcaacagcaataaaaacaaggtttgtgagctcatgaaatgatctaatatacagcttcagcggcctcttacaggataatgaccccatcacctcttcttcatctgcctgactactctgatatcaaaaaaaaggggctgggcacggtggctcacacctgtaatcccagcactttgggaggccaatgcaggcagatcatgaggtcaagagattgagaccatcctggccaacatggtgaaaccttgtctctactaaaaatacaaaaattagctgggcatggtggcatatgcctgtagtcccagctactcgggaggctgaggcaggagaattgcttgaagccgggaggtggaggttgcagtgagccgacagcacacccctgcactccagcctggtgagagcgagactctgtctcaaaaaaaaaaaagaaggttgggaggacagatccagtttgtcagaggaattacttgaactagctgagtccttcactatataaaaatgttttacttaatataactatttcaaaattaacaggcaaaaccccaccagaatggtctttcaacaaactgaaaaatttatcaacagtgtcttcttcaagtactctgcagcctaagttttaaatgaactagttctagaatatgatgtcatgtttatccaccaagtcataaaatctctgtattaccccctcatagaatttttgtactaggaattaccttggagatcatttagttcaatacctttattttatacacagtgaggtggcggcccaaagaattcagctgacttgcttgatgctctttcttgtgtctgacaatgttcctccatactcacagcactttagacgttagaagaacctaatgacatctgtgggaggcaaaagctactcgactatttttacagaatcctggagcagaaaggcttctgagatcacagagttacaaattcctaccaaatgattcaattctgtttacatcatccctcaaaatcatcaagtttactcaagcatctaaataagaaacagcatattccatttttcaaaataatcacaacttttgggaatgactctcatcttttgatccaaaagctatgtccagtaacttcttactgaccctcccgctagtctctggagttaggaagactgacacaagcaatgtaaacacttttctatgagagtttccacaagcataaggataatgaccctatgcctacaaagcatacacatccccagcttatttaatcagttctcctaagacctgctatccaggcccctcactgccacaggtgttatctatgtcttcgtaaaaagcagcacccagaagtggctgggaatggccagatcagtcctgactaagtgtaaacatcacctctcctgatctgagtgctacatatctggtaatttagcctacaaataaactgcattctgacagacacgttagttggtttaaactgagtcaactacaactatgaggtgaatggcatgagtctctttcaccctgtgctgaagaggctggattttatctataatgggcctcccttcaactgtttccctgttattcaagtactcacacagcctctgactcaggcagcctctcgactgaaaacggcgactaatccagtccactccacatcctggactgtcactcacccccacgccacagaaacctgtttctttctcataagctgtggataaggtggaatgtgtaaactactccctgataccaagtttccaggtaaaaagcactgtcaaagttgacactattttccttaaaacatttaaaaacccatacttttacatgcaaaatcaatataaaatcatcagtaacttggtcttttttttggttaaggtttattgcttcagtctctttcaaagaattttttgatacttaaacctttacagaaaaatttataaagttccacagatatcaacaattcataaattccaaggggcttttggatagttttttttaatcactataaaaaatttcacttcccatttaaaacaaaaaaaaacacaaagtgcacacacgtacacgaggctaactgctcattacatgctcagtcacagggtgacagagaaaaaaaaagtcaccaccataaaaggaggtctgcacagcctctcttaaaacaacatgccacagttaaaacttacttcagtttggacaactactcacagctactacacagagacccgaacgagtcactgatatgtaagtacaagatcttttgctttttcaacaaactttttaaagaaaaactttaaaagcctaagttttaaggtaaaaggtaaaaaggaaaacaatctattt

SEQ ID NO: 11630 - DNA, 2300 bp, Homo sapien
tgtaaactgtggtcattaaaatttctaccagtattttttttagtttacgttgaaatgtaacctcaaaaaagaactctgctttaggttatttagttataacatcactatttgtactttattactaaatgtaaacagaagaacttctatgaattaagcgcctccaagggcatgttctgtggtaagagacctctggtgcgattggctccccaaatagggttctataatcaccaagagagcaggccatattttgagctacatatgaaaccatgtgttttaatcccattaaaaatgataaaaaggaagggggctttttaaaacaaaaggcaagttctgctgtatggttttactgttttaaaggaaaattcatttcttctgcaaatatttattgaaaccttactctatgccaggcacaattctagacagtgggaataaaacaaaacagaccaaaatccccatctatgtgaagcttccattctacttttaagatagataggcagtgatgagaaggctgtaagtgctgtgggggaggacagtcaggaagagagtagagaatgcagagggggaaggctgtgagggcgggaggtgcggtttgaaatggggcagtcagggaggacctctctgagaaggtgctgtcctgcggagcacaggatcagaatggggatggagattcagggcctgggacgtctttgtcatgactgtaggtggggaggcattggaagatttatgcccaggagtgactaactcatacttttccatgaaaagaaggcccagctgttttaatcagttgtgcttgggtttataattggacaaaagcagttcttctgtgtagtatttaaaaactgctttgttaattttaaaaaatccaaccaatattgaatatggatcatgtataagaatctgcatttggcaaacctagataaaatatgatgctttctctcagaattaataatctaatgggaggtttttgagaactctgtatagtcaattcaaatgtgagtcatacagttgttctagaataaggattattttgtggccctaaatgtagtgagctcctaaactgtgccaagcattgtgccaggtgctaggagaaccaggactgcctcttcttccctgtcctggggtgctcagcctgggaagaaggactgatacgtgaggaattctagactgggcaagtgggggtaggaacccgctgtgccgtgcacctccgtctgccacccagtccctgccatccttctcactggatggctagccaggtgtatctcacatctctgtgtccccagtcctgacacagtgcctgcacttaggccttactggctggagttttccctgttctagcatttgctgcgtttgtgttgatagcagttgatgcggctgccatttatcacatttgttttgtgtgtgttgtattttggtttggttttgtttttaacagtagaattgagaggacagtgcattttttaaaataacgtagtctctatcaaggatgagaaattgcgcaagaggccaggagggtcctgtgtttccacaaaaatggcaccaaggacagttctttgtagaagtgaaacatatgttttgcatttttctcgtgataatgaaataattcttttttttctggtgccattttcccaaaagtgggaaaataaaacacagactgagtaattaagccaagtgtttaatggaaaacaggtgcaagcttgtgcccaaaccactctactcattcatattacctgcctagcacttgtaggaatgtaagatttccgtcctgtgatgagttccttgaggtcaaggactgcttctttctcttggacgtagttgtagctcctgtgctgggcatcttaccgtgacatccttggcacgcatttgattcactgattcattgcagtggtgaaactgacatagcttgggggccacgaggagagccaccagctgccaggaggagtcagagaagtcttgtgggaagagctgagcagtgttgcacaagctgagtttcctaggcaggaaagtggaaagcagaacctgcgtcagtggagagtcaaagcagccagcgtgttcagggagcagctgtgtggatttttgagagggccttgtgtgtgttgggccagatgaggggaagcagagaggaggacagtggtggcagactccagtgatgaaagcgaactggggagctttgccatcacatctttatgaagcattttatctttggatactggagcctatggaaggaagggtttttttgttttgttttttatttttttttgtttttgtttgtttgtttgttttttgagacggagtctcgctct

SEQ ID NO: 11631 - DNA, 2300 bp, Homo sapien
actgacatagcttgggggccacgaggagagccaccagctgccaggaggagtcagagaagtcttgtgggaagagctgagcagtgttgcacaagctgagtttcctaggcaggaaagtggaaagcagaacctgcgtcagtggagagtcaaagcagccagcgtgttcagggagcagctgtgtggatttttgagagggccttgtgtgtgttgggccagatgaggggaagcagagaggaggacagtggtggcagactccagtgatgaaagcgaactggggagctttgccatcacatctttatgaagcattttatctttggatactggagcctatggaaggaagggtttttttgttttgttttttatttttttttgtttttgtttgtttgtttgttttttgagacggagtctcgctctgtcgcccaggctggagtgcagtggcgcgatcttggctcactgcaagctctgcctcctggattcacgccattctcctgcctcagcctcccgagtagtagctgggactacaggtgcccaccaccaagcccggctaattttatgtatttttagtagagacggggtttcaccgtgttagccaggatggtctccatctcctgacctcatgatccgcccgcctcggcctcccaaagtgctgggattacaggcgtgagacactacgcccggccggaaggaagggtttttaagcaagggagtgttgtgatcagagttgtattttaggaagagagtactgccaacaatgttaagaaatggattagagagaagcaagactgtaagtagaaagacacataagacttttgaatctgtcaaggtgaaggtgtcaaattgacattcagaaccaggtgaggggtgggcaggcagttttaggtctcacttcattttcttagcccaagctatagaaagggttgagattgtatgaggagatgagagagcaagaagaaaaggctataatggaaccatggagaagccagaagagtggtgtaagaaatcactgggcaaccactgagaagcagggtttcagacaaagggaggaaggaatgtgaggaagggagggccagaggtgaaccgtgccagtgccatggcgacagatcactggacagggcttgagatgaggcttttggatttgactgaagaattctaatgtttgctgctttcgatttgtctagtttctctcattagattttagtaatacctgggaagaaaacatagcctccacttttctcacacttagtaggtgctgaaccacttctttgcagtggtttcaggagggtcaataaggatagaatgattagagttttcataaagtgttctataagtacaaattattttggacatgaatcatatttgaaaatcaatatgtatatctaagaccatgctttcagactgaaataaaattataagcagtgttacttcaaagatacatctgccatttgtgtttaaaattcactattatagtgatttttttttatttgtttgcatagcctggcacctgtgtttgctctgtttgtaccattttactgctccataccaagagtccaagtggcacaaattctgggtccgttgtccatcacaaacaagacattgatttatatattgggactgcaggtacagtatgcatttttatgttcacttttctttaaccagatcttttttttttttttttttggtctttttctcatttgatctccttgaaaacaatggtttttttccccccataatcttggcttcatgatctatatcaaatgtttaaaggaagtgttacagaacaagaacatcaaggtatagaagatactagaatactttcatagtctttagaaatctgataagagctttcactgtaatttgtatctgtggaaaatattttcatttcattgtacaattgcatgtgcgtactttttaacaatcatagtatgaagtggaaacaaatgagaacaatcaaaaagtagaaagtagaaaatcagtgtcaaaattaatttattgaatacagtgtcgcaaataaagctctgaagaagaaacccggtgtgctctaccaacccgagctttggggttttcaagaagcattgtcagcttgattatttccttgtttgtgaagctgtgatggtagcgtcaccatttgctaaatggtttgctgtgaagactactagagtactactgtccaggttacatttgaaaagcttctttgccaatcctcagcgaatgtcaattgctccctgctgggctccaggtctgtggtaggagaatgattttcagttttctatctgtactacctgtcacttttcttttactctcac

SEQ ID NO: 11632 - DNA, 2300 bp, Homo sapien
cggcatcagcaaaaacccggagaagcggagcctttctcaaagaaaatgacctccagactcatgctaccatctcgaccggtgcaagtatcacgcatgcgcagggccggccgcccggccgcacctcgccaactcctactcggacacgtcatctaggtcggcctgggtctggtgggaggggccgggggcggggctcgtacgcggggcgaagtggtccccctacttccggatccggcctcacctggccaacgcctcattcggggttccttggttacgtggctgcggtgtctacccggtgctggggcgtggcggagagagaccgccccgccctccacgcaggccacaaaatggaggccctgccctgtgggcttttgtggcctgggcgctgtcgtgccgaaagacgaaagtgacaattccagttgcaaactggaaagaaatggagtttttccttcattctccccatgatcgtgacggtccttttctcaaagtactaatacttttaatgggactgtaaaacttgagggatatgactctctcctctcctctgcttcagattgcatttgccaactctgatttaccgccaatactatggtgctgtcatattcatagagacagaaagtagagcagtggttgtagagagagtctgcagaaggagggatggggatttactgtttaatggcatacggtttcagtatgggttggtgaaaaagttgggatgaatggtgatgactgcacaacaatgcaaatatgctaatgtcacagaagtgtacacttaaaaatggttagacggtaagttttctattatgtatattttaccacaatttttttttaaatgcaacagagtctcgctgttgcctaggctggagtgcagtggcaggatctcagctcactgcaacctccgccttccaggttcaagcgattcttgtgcctcagcctcccaagtaactgggattacaggtgccagccaccacgcccagctaatttttgtatgtttagtagagatggggtttcaccatgttggccaggctaggctgttctcgaactcctgaactcaggtgatccgcctgccttggtctcccccagtgccgagattacacgcgtgagccaccacgccgggccccacagttttttgtttttgtcttttaaattttttttaacagcatttgtgtctttttttctttttcttttgtttttgaaacagaatctcactctgtcaccaagctggagtgcagtggcgccatcttggctcactgcaacctctgactccctggttcaagcaattctcctgcctcagcctctccagtagctggggttacaggcacgcaccaccccgcccagctaatttttgtatttttagtagagatggggtttcaccatattggccagggtggtctccatctcctgaccccgtgatccaccttgccttcccaaagtgctgggattacaggtgtgagccactgcacccaacctaaatggcatttgtttcttccactcctctctgccagaataatttggacagccttttctgagtttcccatgacgacttctgtataagattgtcggatatagcaaataaaagtacagtatacccaggtaaattttaatttcagatgatcaatgaataattttttagtataagtacattccaactattacatgggacataagggtattttatctgatcaccctacttttgtgtcaagttaaaattattagcaaaagtgcttccgtttttaggaagtgcacactgtactctagtagttaggcaggagaacagggtctgcgagcagggaacctaaggccgtttcacactgacttcctagagccatttggaaaggaaaaccctaactttccactcctaagtaacaaaaggcccagaggccactccctttgcaaacccccaccttttctgtgccgcagctggaaaattgaaagtgcctctgattggttgctttctgcaactaatcagatgtttgcatagagtgtaactttgtaacttcacttcagcctctgattggttgctgtccccaaccaatcagactgattgtgggccaaggcttcgtttgaatagaagtgcaactttgtaacttcactttagcctctgattgcaggccaccacttcatttacatggggtgagcaccaagtaagtggccaatgggaaacatctagagggtatttggacccgagaagattctgtatctggggcccttgagctgctgctcagcctgctcccacactgtgaagtgtactttcactttcaataaatctctgctttccttgcttcattctttcctagctttac

SEQ ID NO: 11633 - DNA, 2300 bp, Homo sapien
ttggaccagagtggtagctgtgggcatggaaagtactgaaaggatttagcccatagtttagcagcccaaccaacgggacctgctgaaggactggaggtaggtagtgaggaaatgagaaatttaggttcttctccagggttggggcctgaaaagagatgggcagcgatgccgtttcctggaaaactgggagaggaaatgtttgggatgagggcagtgagatataatgaaggtcaagttttttttttgtttttttttttttttttttgagacggagtcgtgctcagtcgcccaggctggagtgcagtggcgcgatctcggcttaccgcaagctccgcctcccgggttcacgccattctcctgcctcagcctcccaagtagctgggactacaggagcccgccaccacgctcggctaatttttttgtatttttagtagagacggggtttcaccgtgttagccaggatggtctcgatcttctgacctcgtgatccgcccatctcggcctcccaaagtgctgggattacaggcgtgagccaccgcgccggccgaaggtcaagtttcagtggtgctaggaaaagaagatagtgagcaaaaatgttaatttttgtttcctcctcttaatatttggagaaaacgtctgcttccttttgttatattggaaatctccatgacttccaaatacagaatattttacaatttttccctatcccaaagttcagcgaatatgttgatttatttgagggagaggacatgaaagggaagccacctaggcacaattttctgctcaggccctaccagattagtttttgttatcaaaaaaaaaaaaaaaagtgccattccttgggccaagctatgtgctcagcactttccctccatttttgatttaatcttcacaacaaccttaagatgaacgttcttttctacttcccagttctcttgattaacttggctaccccactatatggatcaatttgcagggtcctaggtccctttgaaaatctgatgaaagttataaaccttacctgggaaaaaagtacaaacacccgcaagaacttgaaataggagttcactggccctcaactttctgagcttactatttcacaaacctgcctattcttgaattctgagctggaggtcatgattctctcttatgtactttaagatgatgcactcttccgaagtttttgattgaactctagtggctaactgaattgactttttcagatcactaaaaagcttctccttgaaaaatactcagaagatgcaacacacacacacacacacgtgtgtgcacttacacacgcggacaccgtctcacatcatcagtgggaaaagtgatagaatcttgctaaaggctgatcataccatattaatccgattcgccagaactactttcttcactgagctctcaggtatgctcgggtcttcctttaaagaaaataaatgtcaacgctacactctatcctactcccattttcctcctcaccccatttccactctcccttaaagagatgtgtgcacacaatcactgcccaatgcaagaatgcaccactgcatccaatgcttggaaattgtccgtgaagatgcctttgagtagctgtctatttgaggatttgtggctaattcctccccatttgtttccttagcctgctcccaaccaggtgtctccagaactttttctctccgccaccaactccgcctccagacagaccgcaggtgctttctgtcatagggactggcgtgccgcggacagtgtgacaaagaaactgtatgatggatatgagaacttcgtaagacccagcagcaaacggggagcggctggcgagcgctccacagcccccaagcgtgggagctctagatcggaatttgtaatttggaattggaacgtgagcgccggaacagctctcccagcaaccacctctcccagcaaccacctcagctggcgcgcggaaaacccggaaagtggatttcgcccccgctccctcccggaaactcctcctggtgcctgcgaccgttctcactgagcatgtgcagacggcggtgcgcatgctctgttgcggtccgcttcggtttctgttgcgggacccggggtgtctcctagcgcaaccggaactagccttctgggggccggcttcctttatctctggcggccttgtagtcgtctccgagactccccacccctccttccctcttgaccccctaggtttgattgccctttccccgaaacaactatcatgagcgcgaggctgccggtgttgtctccacctcggtggccgcggctgttgctgctgtcgctgctcc

SEQ ID NO: 11634 - DNA, 2300 bp, Homo sapien
ggagacgagaggaaggaagagcctttcacagaaacccttatgctgataaacctttattcagactcaggaatggcagtttctttaagataatagattacagctgctatgtttattatttgttatagttattgtgtgccaattatggaccagcttctgcgtgtactgttttctattttattatgatatcattcagttcccacattcaaaattattacttgcccaagagcacttaataaaagtagacctaggatttgaagtgaacccagcattctgatgatacattctttctaaggagaattggaagctgcttcatcagatcaggaagggttgacaaataaggtacatttaatgggtattagatattagatgaaatgccaaacgtagatggataaaaactaataacatgtagataagaaaatgagggaggaaagggtgtgaaaaccccccgtgggctatgtactgaaatggaataagagtgatagtaattggtttaaatgacaccaagttttataaacagaagattaacatggtttctggaaaagaagttttcctggtctctagagttactggaagatttgctgtagttttagaaggagccaatgagtttgatttctaaagttttgacaacattgttttttaaaggttaaaatggaatttaaaggaagtgtggcttgggttggcttaagggctgagtgaggtggagtgagagaaatccatggggagtgctgacagtggagatttccaggactggtgcttgaggctaatttgggttttaaatttagaaaagagaatgcacatgaaatactttaatttgctagtggtacaaatctctgtatgtagcataatgtaaagctaatgaaaatatattttcagaagctctcttcaagttatatgagacagcaaaaagtaaattaatttgctcaaggacaaattgagaaagtatatctgaagagaaacagttaccatgtttttgagatgatgagctccaagctgtcagtttagaacataggaaggaaataaagaactgtccatgaagaatttaagcttctgggtagaaaggctaatgaaagtaacagtgttattctatacttacatgaaactttaacatgtaaatcttaaactttgctgtaattctctatgacatgccttttaagaaggatatgagaatagggcaaggtcctgagaagagcagctggcatgatcaaggagataggtgattcagaagattgagactcaaaggagataggagagagtgcagaaaatgagaataatgttttccctcaatcttagactcttagagccaaaagttgtcccatgaaacttcagagaggacatcataagctaagcaaaaatttgtattacttcatcaattgggtagaaatgggagaaacatttaccctaaatttatatgccctgagacagtgtcctaaaatttttcacatggcctcaggctttcaaactttatgccttgtgttcgaccctctgagatttgaattcaaataatagtgaaaaatacctggaaaacagtgctgaaggaagtactagaattctaatccagcttactgcttgtttttatagggccttcaggctaagaattatttttacatttttaagtggttggagaaaacaaatcaaaagaaggataatatttagggatgagtgaaaattacatgagaataaaatatcagtgccgtaagtgaaagttttattgggctacagccatgctcacttgtggatgtagtgtctacggctgcttttgcactacggcagtggcagagacccaatgtcctgtaaagcctaagacattactctctggccctttacaggaaaagtttgccagcctcttggatagactaataaaattagcgtcatttttccaggaaaagaaaagattgtagtggctagaggaaaaatgttaaatagatgaagaaacactgtatacagtcatgaaccgcataacgttttggtcaacgacagaccagtggccttataagatgataatggagctaaaaattcctattgcctagtgacatcatagccattgtaacatcacagtgtaattaccttatttttaaaaaatttagcatagcctaagtttacagtgtgtaagtctacagttgtgtacagtagtgtcctaggccttcacattcattcaccgctcactcacccagagcagcttccagccttgcaagttctattcatggtaagtgccctatgcaggtgtaacattttctccttttagactgcattttgattgtacctattctatgtttagatgtgtttagctacacaaataccat

SEQ ID NO: 11635 - DNA, 2300 bp, Homo sapien
cttctggggagataaaaattgcctatacttactctgttagcttcgaggtgagtctgttgttatctttagtataactctgaaattgattttaaatttgtactacttaaactaattaaaatgttactgattatgcttgtcaaataaagaagctattaatgagctgatttttaggatagtttgtcggtgtaccaagcaacataatcactcttgtaactgagtcttagtttaaatgagaatatagaggaagttgaagacttgagcctgatttagtgttaagcataagagatacatataagacaaaagtagaaaacaggcctagaggacgggatggaaatgccagagatatattcagaaaccatttgggaaatcaacaccgtactttaaaggatttaagtgtgaactttaaatggagagcttccaattggtagattgtcttagaaaattgaagggagtgttttcattaacgaagtttcttaaaatgcaaattcattgttatgagaatcttagtattctacctttattttttcaccatttttaaaatcaagatttaattatgaactttaaatgaagagtttccgattgggagattgtcttagaaaattgaagggagtatttttattagcgaagtttcttaaaatgcaagtttatcattaaaatgcaagaatcttaggcagtgttccaactctattttttaaaacttttggcaatccaatatagttgtgatgtttaatatccccgtataatgtttcattttgcaaacctggtgcagtaaatagtatatatttctagatattaagagctcagtgtgcctggaatgactggtctggttagctgcccccggcataaagaaaagaataattattccattccattccattattttcttaaaaaaaaaaaaaaaacctacatataggtctaaatgttgacatctaaacatctagttataatttaaagcaatacttttagtaggtattactaggaattcttttttttttttttttttggttgcataatcttactctgatttcccctagactttagtaaatctgaaactctccaaatctcaggactaaccaaagttagataatttagaaattgcagttgttgactcaatggaaggacaagctttgaatgggatttttttttgttcttaatgtgctgtcagcagatgtttacttaaagagattttttaatctcctctaggaagatgataagatcagatgggcgtctagatgggactatattctggagtctatgcctcatacccacattcagtggtttaggtaagagtacagagttagcctgcttttgctttctacttttctaccctctgtccctttgaacatctcatttactctcaaatcctctctactttattcaaaagtctggccttgggttcaaatcctggctttcagccactgattgtgagtcacagcaggtcccttaatttctcagcgtctgtttctttatctagaaatacccaccttatgggattgttgtgaggattaaaggacatcatgggacagaatatttgaggacattgtctggcacataagagtgttcagaaacagaagccgctgttgttgctatgactttattattatccccttcaaacatgattcaaaacttttatctagagttgttcatgttgccataactctccttttcctattgctgtctgatctttttgacactcactaatttactgagtaaagttgttcttcagtaaatttcttgagggcacaagccagtcctttgttgtggcagtgatttgggcacagtagttatttcataatattgaccatgtaccaaaaaattctagttctaaacagactatgaaactgtattatgataagtatataatgttatttatctactggagggaaacatgaaagaacacagttcattgaatttgttggatttcagatagctttcattttgattttgatcaagactgttttaatgttactcaataaacagtttttaaaagagttttactgttcctaggattaagctacagattactcatgatgtgcttatttctacagcattatgaattccctggtcattgttctcttcttatctggaatggtagctatgattatgttacggacactgcacaaagatattgctagatataatcagatggactctacggtaagtggaaacattttagtctttagtctgccaaggacactgtttattgttattttgcaaaaaggtaaaataatagctttagaatctgcttttaaaacattcttcaaaaaacaaaaacaaaaacaaaaaaattcttctcaaaa

SEQ ID NO: 11636 - DNA, 2300 bp, Homo sapien
gttgcagtgagccgagatcgtgccattgcactccagcctgggcaagaagagcgaaactccgtctaaaaaaacaaaacaaaacacgtgtctggctgtgacgtacaggtgcccgtctgtatgcacgcgggccttccggttctgctcccgagagggacgctgtcctggagcttcctcccccagcccccagtctcatctgaaaaacatcgtttcgggagaagtcagtcaccctgtggtttatttccaccccagtgtgaattttttttttcttttcaaactctatcaatcagggcagttttttaaaccatgtgagtaacagtggaacgagaagcttctttttatattaaaaacaaaaaatcagaaaatgagtgtggacaggtggggaggacaggtccttctcagcacactcaatgtagctccctggagggggctgtgtcctccactcaccgggaagcagggcgatgtctcattggctggctctggcgcagccagcctgggctggtttgaagtcaacgcccttttgttgggttggggttagggatagggttaggaatctccccaacctgtgctcaggtagggcggggccgagcgcatccgcgcctcaggtgcatcccatgcaggctccaggttccagcaatgcccctacaacatcctcctgtgtccccaggatggccccgggaggcaaaggcgcctcctcatgctggctcaagggcggcattggtggaggctgctctggggaggggcccaacctggcaccccagcgcccaggggttgcctcgccctgttttcctgggcaatcctggtccaggttattacggtcacatagaaacggaaggagatgcagcctattttcaaagcgctgaagaatctgtgaaatctgcttttatcccttcttacatttacattcagatatttcatctttaggttgctatagtgacatgtgaataaatatatgtgaagttctgtgggcaaggaacaagcggtggaaagggaattgggtagagatgccacttacaataagcctggactacctgtgaccttcatcattttctagtcacacagacacagtggtttggcattggcaatatttatgttgattttaccagatttgctataatatttagattttctatacattataaagagtaacatatttttctttattttccccaatcataatgggaccatatgggcaggacagaaattgttagagggcgtgactcactggcagagaggagagtgtctccccctaatcttgctcccaggcagctcagcaggagtagttcattttgagggtgcaagttgctgattgggggagggggagcctaaatcccttccaatcagaggaaaggatggttttactgtggaaatcagtttggaggttgacctcatagactgggagctgctggttgagaagcccacctccactggtttgctgctgagcgtttgaaaacaccaatcaaacacaggagaggacgcagcagttgaagggtgacctaagacaaagtgtggggaggccaacggagggcagtgaactggtctcctttatgaagtcatctgcctgactccctgccatcgtgcctcttgctctctgaaaaagccaagtggcctctttttttttcttcggactctcgctctgttgcccaggctggagtggagtggcctgatctccgctcactgcaacctctgcctcccgggttcaagcgattctcctgcctcagctgcctgagttagctgggattacaggcacccatcaccacacccggctaattttttttgtatttttagtagagacggggtttcatcatcttggccaggctggtcttgatctcctgacctcaggtgatccgcctgcctcggcctcccaaagtgctaaaattacaggcgtgagccaccgcgcccagctgaaaaagccaagtggcctcttgattgaagcgggcagagctcaaggcaaggccctcagttcctatgacttgttttctggtctgcactgggtggaacaggaagccaacagtactattgtctgtgaatgccccagaagcccctaagggcaaaggttcccagtggatgggatgccatgggggacattccagaactctctgtgggcggtttgagaccagcctgggcaatatagcaaccgtcctgctggcacacaaaccctcctgcctctaaacagaatttgatgggccccttggcaaaggcaggttttagaaactcctcgggggctggagcgcaaggagagtctgagccaggccaagcctccctgggggaacatggctgaaggaagacctacagacatctcc

SEQ ID NO: 11637 - DNA, 2300 bp, Homo sapien
cagaccgtgtgaggctttaagggtcatggggaagaactcggattttattctaaagccactaaagggttttaagaagggaagcgatgcaatgacaataataatgaggaatagttaacactactgagaacttgcttagattttaagtgtgcagtctctctctatgtatatgtaaactcagtctatcattataacaagcctatgaggtgatgaggtatttatacccccattttatagatgaggaaacagagagcttaagaaacttgaccaaagtcacacagcaagtcaactctggaactaggagctgcgtcatgcttttaaaaggtcagccaggttttatggcaaacgggtgattgtaggagggaagaatgggagcaaggaggctttgaaataatccaggtaaaggatgatgatgtccagaatcagacttgagtgaggtgagtgcagccccagcctgggatgcaaaatttaaggagaagtctcagtaattactgcactccagcctgggcgacagagcgagactccatctcagaaaaaaaaaaaaaaaaaaagataagtaatattggcctggcatggtggctcatgcctgtaagcccagcactttgggaggctgacgcggatggatcacttgaggccacgagttcgagaccagcctagccaacatggtgaaaccctatctctactaaaaatacaaaacaattagttggaagtggtggcacttgcctgtagtcccagctactcaggaggctgaggggtgagaatcactcaagcctaggaggtggaggttacagtgtgtgagctgagatcgtgccactgcactacagcctgggcgacagagcaagactgtctcaaaaaaaaaaaaaaagtaatattctaaactaaaaaccaagataatggaaaaatcccattatgaacaaaatatcaaaattttaattaaagacaggattggtgttactgaaattgcctttgcctcaggcttcagtatggctggaccgggcactggctgggactaaggtggtgacaagaaagtgaccaaattggagtagacaggcgaggcctgaggtggagcaggcgtgggagctgggggagggcaccaaggggttgagcagtctcccctgttggtatcgaatataacaataattcttaggctcagcagaagtttagcatccatgttcccagtcacctggacttttccaaatcttggaaccccctctggctgaaaaggcttttgtttgtttaaacggccactttttgcatccaagagcacaagtcagcttccactggaaggttctgagaaacggtttcaggtttaagtctagagcatgaatggaacggagtcacagctgaaaaagaaacatgccgagtgccaaggaaaagacatggttaaggggtaacatgggcccgggtaggtgaaggtcggcaggtggaggccggctggatcagggaaggtgaaagaagaggcaggggcagggcccagcctgttttaacgcctcggcgttctcaccgctgcagaacggctgcagggggcagagtaaagagctgctgtcagtttccctgcccagagagtgccaacagctgctctgacctattgcaggcatgtgtgttccaggatgcagccttcctgcactttgaccactctagattaattgctaaccaagatatgcacatgatggggctcacaaagtattaggcggtattttaacaacaaaagctgcgaagaaatccctagaaatgttggctcttctggctgggaaaacgcagtctgtcaacagttgcctcaaaaactcagaagctcagagagttggattcggtcaccagagaggcccctcaaagaggccccaaccattcagatcctctgctctgtcccccatgacagcggggacgaaggtcctaagccctggccgggagggcagttgacctcgggactcgccgcggggcggagcgggtgctgggaggaaggagggcgtggctggcggggtgtggctggcgggacggggcggggcgaagacagagcgaggcggggcctgggacggggggggggtcggtgtcgccgtgggggcgtggaatgtggggtgggcgtggctaaaggcaaagggcggggcgcgcgcgtcgggaagatggcgctacgtctgctgcggagggcggcgcgcggagctgcggcggcggcgctgctgaggctgtgagtgcaggtccccgttccccgccttcccggcccggctcgccgcgggtcggctcctgttgcagccccgcgggccgggcgcggcctccccaagccctcacgggaacccagccggacggaagca

SEQ ID NO: 11638 - DNA, 2300 bp, Homo sapien
aaaaatgaaaacgtatgtccaaccaaaaacttgtacacaaatgttcatagtgaaattataatggccataaagtggatatcccccaaaaaatatccatcattggaatggataatggggtatattcctacaattgaacattactgggccagaaaaaggaatgaagtactaatgcatgctacaacatggacaaaccttgaaaacattatgcagagtgaaggaagccagagataaaagggcatatttatatagtcccatttataggaaatgtcccgaacagacaaatctatagatttagaaagtagattagtggttgtcaggagaaaggaagaggggtgcatagggagtgaaccccaatgggtatggggtttcttttagggtaaggaaaatgttctagaattagatagtgatgatcattacacaactttgtgaagagactgaaaaccactgacgtgtgtcctttaaaaatgtgaactttatggctggaggcggtagctcacacctgtaatcccagcactttgggagggtgaggcgggtggatcataaggtcaggagatcaagaccatcctggctaacatggtgaaaccccgtctctactaaaagttcaaaaaaattaaccgggcgtgatggcgggtgcctgtagtctcagctactagggaggctgaggccggggaatggcgtgaacccgggaggcggagcttgcagtgagccgagatcatgccactgcactccagcctgggtgactgagcaagactgtctcaaaaaaacaaacaaaaaaaaaaaaacaaaaaaaacaaatgtgaactttatgagagctgaactatgtctcaataaagcgacaatttttaaatgcaatgggaggtcagtgtggggagtaattgtgactaaggggcagggctggcatatgtaatgcgtctgctggcattaagcacaacttgtggattctaagcactttcttaaaatgaaagaatgagtgaagaaaacaaatcactggatttactgttcacttccaggctatcatatccatcctggctatgaaggatgtacactgagtttctacgttctgaaactgttattacttaggcacagtccacagaaagatcagtctgaaaactcagggaccgggagctccgtgcaacatggctttcaagatcctagaaactctcgctctgtgttcccaccaccctgggctgtttcttcatcccatgggtccttctgtatttatttgtcctttgcactgtgatgatttggaggcagtgactacgccttttatctctgtatccctagaaccagcagcacatagaagggacttgccaggtgactgcggaagaagggaggaagtcgctattagcttatgaggagcttatagtctaagtttcaagctttctcatttctccattttcttatcacgtacagtgattacactaaaaatactctggtaccctagtgctggttttttgttttttgttttttggttttttttttaggtcaaaatgggtcacacagtggcaatttcatatgactcaatctaacacaaagtcactagaaagaatgtctttcgggtcccatttcatgatacaaaatggtttttaaacgtcgttccctgaagatcctttggggagcaccaacagagagataatggggagtgattctgatccccaactgtccccttcccccccaaatttttagagtttctatgtaagagttggtttgaacaaaagacttgtgtctaaaaattagtttgtaactaatttatttatagtatttataactctagataacttagatattgattaagaaaatatcccccaaaacatgttctttagatcaaggaaataaaaagtaatgcttaagctttttgtttcagttcattggaaagctacagtgcttacacatttttatgctgtctaccatcagtgcatctagggaagggcatctatggatgaggctaccatgtgggaaattcttgagtgggcagtgagagagggttagcaactcaaagcaagtaatccaagggttaatcaggagagacactcaatccagaaagtgctcattaacccaagcctttctgcatagtgtccctaccaccctgctgcctctaactaaacaaaacacggtaggtctcagtgtgagagagcgcttttgttcacataggaggctgacagctatttgcgatgaggggtttttgtttgtttgtttgttattcaaataacttttttccccctgaggaaactgaaagggaaaatgtcagaagtatgtgattaatgattttttaaaatagatgggatctccccggttgaatt

SEQ ID NO: 11639 - DNA, 2300 bp, Homo sapien
taatgtccttgctgagaaaggaacaccagtagtagcattacaagcgggcgcattaaatattgaatgacacgggaaaaagagcttgtcgaggggcactcagccttaaagtctttcttcaactttgtcttcggtggctgctggactatttaagatggtattaattaaggcagcttcggatgctgcccagccggccggcccctcggccgcgctcggtcaatgggcctgtgcccccgcgctctgctcacgcgttggctgagccgagtgcaaatgtcacttctcatttggaggctgaagagaagtgcccatcctacattaagggcagcagggatgcagtcagcagcaggcgttaaaggaatacgagggactgcggtgaggggagggaaggcgggaacaaaatgggaacagctgcccggggcggggtcgagagagtgccccaagcacagcttttggcacattttggagagcgccgctggcaaaccggggccaagcgggactcgctgggttggaagaccccctctctttcgtcgttcctgcgtggggaaaatgaaaactctagctctgcacaaatccattaggcaggctggcggggcgttattttacaaagggactcgcttctacaaagaaagacaaaagcttggtgcaaacaggcgtcttgactgacttccacctctccctacggtccccttcacagatcacaaacaaataaagcccaaaggacctcagccaaggatctccagatccaattttacagatggcgaaactgagacctcaagcaagactcaaattgatttttgtcaatattccccgaagtcagaggttgagaccctctttgagaccaaagatccaggcgggagtggagttctctttaaagtcgccaacaaccacgccaaaatgtccctttcccctgccccccattgcaagtgtttgattcaaagtcaaatggaaattggtttcagcagttgaaaattcctaacataaaaaaaggaatgaagcttactgccaactgactgtggcataaatgaaatgcatgctctgagaaactctgttaactatcagttcttgatgaagagagacaagatttggctgggcagagggggcagggcatcccggcagattgatttctgcagccagaagcccaacaggcgcccccgtctccctatgtggcgtttcacctggatgtgggccttctcttttaccacacgaccccttgtaggtggggggagatgcagtaaaatgccctccccacccccacccccgtgtgtgtgtgtgtgtgtgtgtgtgtgtgtgtgtgtgtgtgtgtggttagcacccttagcttttgatccatttgcaatgtctgattctccatcttaaaatgtgtccattcagggctccctctggccttttggataaggggcgggtcatgtttccaccaagagccatgttgcaggagaactagtccctacccttcctgcagagactggaatctgagcgcaatgggtggccggagagctcgcattcagacagccctgagatgcgggcctggggccctacgccccattggcagctggaggcgtcgctctggggccaaggaacgcctggccgggtcaggacgcgggcagaggtgggcggtggggcagcgagagagggccgcgccagagcagcccactcccgcacagcctaggactggagttcccaggcccaaccgcctacctgagtgatctgttttgcacatctttcctcattcctcttctctgctgtccctacctcctctacttttttgcatgaacagggcccaggccaggataacggatgcagaaagatggccttttggcccggaacgcactctctctcgtacgcatacacccacctccctaccaccccccccacacacacgctcacgcgcaattcaacccccccagcccagccccagccagtgcactgggcacacgctcgggatccaggcaccttgccaagagctcgcgagcaccctgcgtggcacactggttggagttcctgcacgaagtggcgggggtggagtgaggagggaggggtgggcggcggtgcacgccgccgactgctggcggtgagcacaagttcagtgctcaacttcccgctcttaacgagacccgggatccctttggagaggccctcgggagctggcgacagggctgggagtggcgtgggtaagctggccggcgcggggcgcgggcggcggggcacaagggcgctacaagaagagggcgcgagggtgcccgcggccagccgggcgctccgagaagtcagcgcgagcagctgtgacttcacctattagccccgat

SEQ ID NO: 11640 - DNA, 2300 bp, Homo sapien
cgctccaccgggtggggcccacgcggccgccgggagggggcaggaaatgcaaccgtccgcgagacgcagagccaaaaacccaaatgaccgcgggtcccctcgccgcctggggtcccccgcgccccccccgaccccacgcacgcgcgcgtgccccgggaagccaccggggacagtgcgcagggcgtggcctgtcccgccgggggcccggatcggcttctgcgcccgcagctcccggcagccgcctagggaaggccgctcccctcgcgaggcctgggcaggcgggaagggccctaggccgcgcgcggccccgcgcttgggagttccctttcggggccgggctggggagcggcttcacggtccctggatcctgccctgccgagaagtgctgggcacaggagcgagcagccggcttagcgggccagggcgtttttacgagagcctcctgggaagtttcttcctggaaaaatcattaaggcggactgatcccgattagagagaaaaggggctcctgggaaaacgtgctccccaccggccatcaggcggcccgcaggagccaagccaaggctcccgcctcgggccaccccgacgctgctgcccccgcagagccccgagcgcccccggcccgagcgtgggacccggcggctacctcctggccgcagcagcgccgataaatctgccaagtgattactgaacgtaaactccagttacttaagtgtcctccgaggggtaatcgtatctgtccctataaatcccgactgcgttcgcgctcatcagcgcttccgcccgacgcgctggtccgctcaaagggggcacacgacccacaggagccatccaccgcctcgcgccgcagccgccctcctcagcgctgtgggatccccagaggcagggcttgaggtggggtgggagggtccccacgacgccggtggctccccaccaattccacgacagggtaggcctcaccgatggtgggaggctcgggtcctcctacaactagaaccttctctagaaaggcagatgtcaactccagcaccctccagggcgagtgtgatactgcgtgtgagagggcgcgtggggcgtgtaaatgatgtgagtgtgaggacacacaggtgtcgcgggaatggggtgcacgcgcaggaggatatgagtgtgtaaagttgtgggagacgcacgcagaagaaggtgtgcgtgaagagtgtgtcacggtgggcgagtgcgagtggtctccggggttccgaaagcgcattcctgtcttcccggaggggtcccttcccctcccggaaggcctgcctcgggcggcccaaatccggcagcaaatcccacgcccggtcctcggagcgcggagactgcgcggggcctacgacccggtgggaagagaggcgcttgccggggcggcccggcctctctttccatcgccctcccagacttcccagggccgggcgggtggggactgccgaccgtcctgggcgccttcctgctccagctgctgctgcgtctgctccgaggtggcggcggcggcggctggcgcgcgttgcgggtcccggccgaggggctgcgggcgcgctggagactccgccgtgtgggaacccaacgcggggcctgtgtgtgctatcgaattacttattcatagaaaaaaaaaagggggggagagaaaaaaaaagaagtcacatgtccgggttatacgtatgcgaagagaagcagcagaaggagaaaaaaattaaggcgagcaggaggaggaggagaagcagcggcggaagcggcggcggcgcaggagctggtggcggcggcggcggcgcggccggggacagacacccacctgtatgagtacgcttgtggatcttgaggttctcggagcgcgcgaagaccttgccgcagccggggaaagggcagggaaagggcttctcgccggtgtgcacgcggatgtggttgatgagcttgtatttggccttgaagggcttgccctcgcgcggacagtcctcccagaagcagacgtggctgctctgctcggggcctcccacgtgctccaccgtgacgtgattcaccagctcgtgcatggtgccgaaagttttggagcagggcttggcgccgccggccgggggcggtggcggcggcggcggcggcggcggcggcggcggcggcagcccggccagctcgtcggggtcgatccacttgcagatgagctcctgcttgattggctgccgcatgtagcgcaggaaggccccagccgcccctgggaggtgggggtggtgctggtgcgggtgctgcgcgggcgccggcggcggcggcggcgccgggggcggcgc

SEQ ID NO: 11641 - DNA, 2300 bp, Homo sapien
attaaaccattaaatttcagcaattcaataaaacaaagcagttataattttgacgaaaagctattttgaagggggtggaggtacccattttattgcacaataaaaatgctcaacagtccatattaaaggctagcttgtgtttattttcttctttctttattcattttgttttgttttgtttttacttataacctgcaggattgaacccaaagctgccattactgcaagaattaatgcttattgccaagaaattcaaataaaggaaactcattggaaatgttcagagaggaaacgatgacagtgataattccaaatatgatgctttctccataaactatccatagagatggcacagctctcgatcaacctttgcctggttggcttgaaatgttttaagtctttgacataaaaattgtgaaaggactcgtcgtttccaaagtgagatgaagattttgttactgctgtttattaaaattttttcgttgtgtttccacacatgcctttaattccccatatttgaacttcattgcaacttaaagaaaaagtccatttgaaatttgatggtagcattgtctttgtttgcttgtcagttttataaaagaaatgacattcctaagtctcataccgaagccccctgttaaacatcgttcacaccaatgtgaatggcactatcgaatcaactcttttcagaatatttctgattacttcccacggccatctccccaataacggctttgtgcagtctacttttacttggactgcaaatgaattaagttggaaacatattttattgtatccccaaagaaaaagatcacattctaatcattatcactttttttttttttacaagtaatgttacggatgacagcaaaatacaaattttaaaatcctggctttaatatttgagcattttgtaacatcacaaatttcaaaaatgctttcttttaaaatctgaaaaggacacttttggggcagtaaaatccttaatttggggggagggtcccacatttctccgcccaccaaaaagtgatgcagggaatttctatttttaaaaaatcgatttgataccaaacctctggaaagggatgggattcgcttttttaaaagccagtttttatggttttcaaataagacatcttagaggtagactggtttatgagaaaacgataaaaaggtgaaagattattctatcagtaaataaaaagcaaagatatttcttgatttcaaaataatattttattggatcagttctaattgtggatcagtcaaagaaactgaggcatacatgtggactgtggactgggatctggaccggaaggagaaattctacttaaaggacggtgcttatttagcggcttctctctgcagagatgccgtttggcctgccccgccactgtatctccgaaaggcaaaagttagaatcgctgcccgatctcctctcccccgcccctactgtagatctaattggaagtggcagatctagaaccgatgagtagtgagattacacttccatccaactcctttgaaccatgttgaaaaggactctccatgagataaaaagtcgaggtaaaacggttcctttgggggaaagacttattttgacttcacctggtgtttcgcggagccaaatcactcaagttgtcttgcaaccaatagactttatcttcttcactccgtctactgtctatgcgccctaggtgagcgctaggcaggttgggtgtccaaacaagaagtttctagcatcaccactacaggtaggacgggctattcacccttctctcccaaacagcagcccagggctcttccaccccacaagagaggtggaggtagaggcagaaagtacttgggtgccagaaggcacacagagaagtgaggccaaggtttttgaaactgggactgcccctcgggggtcctcagcccctcaccaccccgcgccctctgcccgcgtgccggcgcgcgctccgcgaggtgcgtcaaggaagagcggggcgctgcgcgcgcaggccaggctcaaactttctgcaagtgcaacttgggcatccccggggaggcggggacgtgtggctccagcggaggagggggcgcgaagcgaaagcgcaggcggccgcaagcacgggggcgaatccccgctgggtcgagggcctgaacgggagccaatcgagcagccgaggctactgccaatcacgcggctccctccaatcccacccgtgccatttccaaaatctcggtcccactgtgcagctcaaatgtggtgttcactctgccaatcgctggaggatagagtgggaacaggaataagc

SEQ ID NO: 11642 - DNA, 2300 bp, Homo sapien
acgcaagcggcgggtggggagctcagcgcgccgaggggcggacggggacgccgcggggggcggggaaggcggtgtctgggtgggcgtccggagggtgggaagaaggggcatgcctggctttctctgtgcccacggtcctgcacctgtggtttcaatgccacagagcaagtttacaaaggcggggtgaaagtagggagcgtgccaagcgggcagcagaccagccccccgccgctccttgtggcgcgctcccggcgaggccccgggcctgaaatgtccccgcgcgcagagcctcctgccaggcgacccagctgttagccacctctcgagcggcctggagtgctcgggccaggcgtccccggggttttcggtgtccgctgggagctgctcagatcccggggaagtcggtggcctacgcagaaagactggagcgctgggttgcctcccattcctgacccggctgagggcgccctgaccccgcggcccgggcccgcgtccgagccacgctggacgcccggctcccgggagcgccgcggtcggccaggactagaagccgcggcgccgaggtctcgggagaagcgcggcaggatggcaggccgggcccacgggcacgttcggcggctgcctgagccggcagcagctcagggagcgcgaggactgaggggcgggcccggcagcggggcgggggcgcgggactgactaggccgcggcggccaatcgcggcgccgggagggcgggcggggcgggagccgccgttaaaggggcggtttgaccgggggggcccggcctcgagctggagggagggagggaggccggggcgggagactagggggtgcggggggaggggagaggaaaaggaggagacaaaaaataaaaaataaaaggctgccgctgcagcgttggcggcgcccatcgaaatcaacggaggcggtggcgaacgcagcccaccgcagccgagacctgggagcccgcctgggcctcacactccctcgggtcgcggactgcgctgggtccacgcggcgcggtcactagttccgggcccagcgcccaggcccgaccggcgggagggaggaggcgagcgagagatcacttttttattgttgttattgtttttcagcccagcctccccctcctcccctccccctgctcgctttctcccctcccacatccccctcccccctactcccccgcctcctcctccggcacaacttaaagaaagggggagcggcgcggctgctgccttcatctggggaaattcgtggccactgcaagtttactacgcgaggcgcagccaatgccaagcgccgaggccgaggagggctaaacactgcggccgcggctccgaacaataaccgccgcgcgcggggcggcgcgagtagggccgcgggggagggagctgtcgccgcagagcgccgcggagaggacgcctggactccgcctgccgccccggcgcccccgccgcggtcaggtggagccgctggtgcgctggccccgggtgccgagcgcggagctcgcctcggtcctctcctcgcccgtctgcctggcgtgcgcacggccgccgcggttgtgactgcattctaccggcgctgctcggtgcggccgggctccgggtccgctgggcgtgcgagtgagtgtgtgcgtgcgcgcgcgggtgcgcgcaggggtgggggctgcggcgcggcgctcgccccccggtagcccccctctcctctcggctccccacacctccctccggctccctcctcccgcccgccctcccctgccctgcccgcccgcccccgccgcagctcctttaatacactttggttctccgcctggctttggactcttctcctcctccacctcctcctcctcctcccgcgccgccgcctcctcctcctcttcctctccgcgccttcgctacgcgcccggccgcccgaggcagatccaggcggcggcggaggcggcgggcgcaggagagcggctcccagggctgaagtggccgccaccaccgccgcctgcgcctggagcccggtggccgccggacgcaccgcgcggatcgggagcgggagtcgaggcggcgcggaggcgcagggctcgcaggggcgggcgggcgcgctggccatgctcctggacgcgggtccgcagttcccggccatcggggtgggcagcttcgcgcgccaccatcaccactccgccgcggcggcggcggcggctgccgccgagatgcaggaccgtgaactgagcctggcggcggcgcagaacggcttcgttgactccgccgccgcgcacatgggagccttcaagctcaacccgggcgcgca

SEQ ID NO: 11643 - DNA, 2300 bp, Homo sapien
gacaactttacctccactgtagtgtccacattctggcaaactggaaagaggagaagggcaagtggaaagcaagcctttccctttaaaggtataacccaaaagttgtctatgtcacttgtgcttatgtcccattggccaaaacttagtaaccaaatcttggtaagcacccttgctgcagtgggagttgggaaatgtagatctttgtttaggtaagaaagaagagggcatggagggcacagtccttacattccagaccttagtcatggcgctacacctcgttgtaagggaggctagctattgcagcctttcgctgggtggccatgtacccagctagatctcaggggcactcttactaaagtaatgcatggagaatggatagcatgagaagcagtttctgctacaagtgcctttcataaaaagaactcctataagaaaaacaaacagggcctaaggaaaactaatccaaagggtaaaacatggggaaaagacaaaaaacaaaagaaaaaagaaaagcaagtttcccaggtagaaaatgaatgaagactgaggtacataagtgagaagtcctgtaaaattgataatccttttcattttgtcacaaaagtccctacttacattctaaaattccattaaatgtcacctttctgatatccccattttatttctctctctttgggcatttaccatgctgtagtgtactctaggccattcctagctttgtaactctctcaaggtgactctgcaggagatgcaaagtagttaagaggagaacccccaatactgatgtgtttataggtgaggtggtctgatgtcttagatttgctttaaaatattcctgcacaaaataaaaaggggaatagatgaaacaagattgacaaaatgttgattcattgacgcggtgtaatgggtatctgggtgatcatagtacaattttatctcttttgtatatattttaaaatttccataatatagcaaaacatgagcccagtccctcaaggcagccagatttgggttcaaaccctagtttgaccttttactcgctgagtgactttaccctgctacagcttcagtttctccaaatggaaataatatatactccattaaggttcttgtaaactctcaagtaagagggaatctgaggctctagcacacggcccggcccttaatagttgtactaatttttattttatttttcgaaacggagtttgctctgtcacccaggctggagtgtagtggcatgatccggctcactgcaacctccacctccagggttcaagcaattctcctgcctcagcctcctcccgagtaactgggattacaggagtgcgccaccacgcccagctaatttttgtattttttagtagagacggggtttcggcatgttgtccaggctggtctccaactcctgacctcaggttatcctcccgcctcggcctcccagagtgctgggattacaggcgtgagccactgcgcctggccagtagttgtactaacaagggtttctgcttgcgagcaacaaagactgactctagttgtggctaatttctttcacacacacatattaagtgccagaggtaggacttgagctcggatctctgatttccagacctagaactttttatgtgttattacagtcgttaaaaaccttacctggatttgtgctttgcaatttacgctttcgaacatgcaggaatgtagtttgggcatttgtctggaacttcggattctcgggactccagggtggccaaggcgcggaggtgactcaatgacattgaccggcctggatgcacgtgggttgctgagccgatgctgggaaggtacggggtttgcccggtgcaggccgccggaactcacgcacgcccctgtctctctcactcctggggtcggctctggccggtggcctccagctcagctagcggccggacgcgcagcccgccgactagccctccaggtcctagcgcgactcccggatcccggatccggcggatctggccgaccactcaccctcccctttccgcaagttagggggcggggcatcgggtttctggctcgtgatttgccggagctcctgcgctccccttctccaccccctccggctgtgtgagaggtcagcagaggggcggtctgcggggacaacaatggcggggttctgggtcgggacagcaccgctggtcgctgccggacggcgtgggcggtggccgccgcagcagctgatgctgagcgcggcgctgcggaccctgaaggtgaggagcaacggggcctcgcgggtccgggcttcactgggcttctagccgtgccgc

SEQ ID NO: 11644 - DNA, 2300 bp, Homo sapien
aaaactctgcacctttatttctgcatatccatatgaaaatgcttaggtaagtttggaaggacacatgcaaaactgatcatggctggataacaggaaatgggactaggagcctttaaaacggggcagggaataatggttatctggtatctatactgcttaagctttttttctttttaaccaaaggagtaactcatacattacttgggtaattacaataaaattgaaaaatgtaagaacatctaaatgacttgctttatatgcatagtgtcatcatttagtggcctgtgttgagcagtgatagctgctgctggggctctggtagggctttaagatcccatgacttttggtggctctccatattttgtggaattggcattagctgttcatatggtttggaaacacttttttaaaaatattgatttcagtggagattatttcccaaccctattcctagaatttcactctgttattgcttcagaaagatgtattcagaaatatatgcctgtgtatttatgacttcatcactagactttgaatgcatgtgtgatagctttctctttagtaagtggaaattaatcttaaagattgcaagctagagctgagcccacactcttactggtattttcttgtttcctcccctaacctaacttgtcatagtttttcttaggtagtattatttatttctttttttactacgtagtgacattcttcaaatgtatactttcactctggcttgtccgtaattggctggaaattgtgatggatctatatagttttttttgtgtttttaataaaatctgtataacataaagtttactattttgctcattttatttcatttatttaattattattttatatttttacagatggggtcacactgtgttgcccaggttggactcgaactcctgggcttgagtgatcctcctgcctcagcctcctaagccgtggggactacaggaactgggccactgcacacggcagttttagtctttttattttttattttttgagacagggtctcactctgttagccaggatggagtgcagtggtggaatcacagctcactgccaccttagcctccacttgggaagcctcttgggtctgccactgcttgtcagaaactttttactctgaattatgtcatatctcaggtgtttttacctagttattttgcacattacccttctcaaaggcatttgttcaagtttttcctaagctaatgaaggaaaacaaacctgagtcatctcttggctgtcactctgcctctcctactctttacatccagccatatgtacagtcctcaccccacccaccccacccctactctactttttcctctgctttattccgcagtcctttcatttgtggtctggtacccaccagctacactgacatgactcttgctaaggttttgcttgaatacttgatgtctcctttctctctgtcattcctccccttctcccttgatgcttctactaaggggtcagtggtatgagaagatagttctcctcctgctggttttcattattttgttgtttactgtatcgtcaggaatgcatgcttgcaagacaaagactaaaacaaaaaacaaaaaacccaaacagcaaaaaaaccccaaaacacctttgttttggttccgagatcgattcagtattagttcccttttgtgaaatgaaaacaggattgtagaaaatgggctgggaattttgcaactggcaaaaacgtattctctttttttcctgtagtttaaaattttaccactttgaaaatcatgtaagttatcttagaagaaaaatagtagtccactaattctaccatccaaaataaccatgaataaatatgtcttggtgctacacatgtagtttttcaaaatggaatcaaagcgaatctttaaaaaaaatcattttgttttctatgatcaaattgcctttctgggaaaggacatgccagaatgttagttttttaaaacttataaaagtatctttagatactttgaatgaaatagaaagagttctattctttttttttttagaaataggattttatctggttgtttgattttttttttttttttcagttattcaaatgaagattgatgcagttggctttcctttaaccttttagtctttcagggtaattttctttctttttttttttgagactcccaacaagtttattattttttaaattgtggtaaaatgcttataaggaaacttgccatcttaactatttttaagtgtacagttcagtggcattaagtacattcacattgttgtgcagccatcactataatcta

SEQ ID NO: 11645 - DNA, 2300 bp, Homo sapien
gaagcacaccaccacagcctgctaattaaaataaaaaaaaaatgtagaaacaaggtgccactatgttgcctgggctggtgttgaactcctaggctcaagtgatcctcctgcctctgtctcccaaagtgctgggattacaggtatggccactgtgcccagccatatatgtatatatatatattttttaatgaagccacaagcattctgcctctgtgctttttatttatttatttatttatttttgagacggaggttcgctctggttgcccaggcaggagtgcaatggcacaatctcggctcaccgcaacctctgccccccaggttcaagtgattctcatgtctcagcctcccgagtagctgggattacaggcatgcgccaccatgcacggctaattttgcatttttagtagagacagggtttctccatgttggttgggctggtcttgaagtcccgacctcaggtgatccacccgcctcggcttcccaaagtgctaggatttacaggtgtgagccggccgaccctatatattttttaaaagcttttaagaaacacagtaatctttgagttgagattttgaaaaaaattgcaaaaatattgcacattagcattttaaagttagtggaggctgggcatagtggctcacacctgtaatcccaataccttggaggctgaggctggagggtcgcatgagctcaggagtttgagaccagcctgggcaacaacatagtggtatcctgtatctacaagttttgtttttttgttttgttttttttttgttttttttttttaattagctggtgtggtggtgcatacctataatccagctactcaggaggctaaggcaggaggatcacttgagcccaggagtttgagcctgcagtgagctaggatcgcatcactgcactgcaatctgggcagcagagcgagaccctccctcacaaataaagttagtggaaagtgctatagtaaacttttcccagttttcccctaatctgttttaccatgggccactcccttacccccacttttattttttttcacattagctattaacatgccctgaaagtaatgttccttagaattccatcaggcaacactactctagatcagatctgcaaactacaccccaccaactgtttttgaaaataaagttttggctgggtgcggtggctcacgcctgtaatcccagcactttgggaggccgaggcaggcggatcaccaggtcaggagatcgagaccatcctggctaacatggtgaaaccccgtctctactaaaaatacaaaaaaaaattagccaggcgtggtggcgagcacctgtagtcccagctactcgggaggctgaggcaggagaatggcgtgaacccgggaggcggagcttgcagtgagccgagattgcaccactgcactccagcctgggcgacagagcgagactccgtctcaaaaaaaaaaaagttttatcggaacacagccatgctcattcctgtatgtactgtcagtggctgctttcacgtgactgaagcggaactgacagtgtaacatgcaaaacaggtaagaaaagattgaccatctagcccattgtagaagaaagtttgcccacctctgacctagatgattagtcataggtagttgcatttgcaaattgactaattttctttttacactccagcatgaatacatgcaattgaacagctaatataggtgtgtgtatgtgtgtgcacatatgtatactaaaatattgtaaaatgtcaagtgttgcaaataacattgttaactgaaagtgacggaatggccggccaaatttatatttattgtgtcaaaaacaaaatgtaccagacaattaagataattttacccaggccactgcagtaggggtaacgtttattaatgagaaatgtctcagagagaggaagaactagggttttataaatgcaggtgaacaagggaggggtccaagaattacggggttcatgaagaagagtggaagtctatggggaaggttgctttgcctccagccatttcctgggttaagaaagaggaggaagattctgtaactgtttctgtgttctaggagcacggggctcagggaaagttcagcattgtcagttgtcaacaaaatcagtaagtgttattaaataccccatggtgtgtggttctggcactgaaatggggctgtttcctaaggctctgtccatggccacctctgtctatttctgcattctgtcttgcattgcttctgttgcctatatcctggtcagcacagtttatggtgaatcattgcttattgaaatagagacggcaa

SEQ ID NO: 11646 - DNA, 2300 bp, Homo sapien
attacaatcctagaaactaagcgaaatgcaaaacaaacaaaaaaaacaaacttgaagcaatttttaatttcaaggaaaacataaagttgtccaagaaaggaaatgtaatcatagtatgctctgtgtcttagccaagagccgtgtttgcatggttctaatgccgaaatagatctgggtctgacccaaaactatgatgagtctgttgggaggatggcgggatgtggtaggagagccaagggtcaggcttctacagtgatgacagcagcggcacacgctacatgtcagcagatcacacaggaccacgtgtgttggtacccaccgcggtctctgaggcaggctgctactgtgacttcagtttacagttgaggaagctgaggcacagagaggttatatgatctgcctaaagtcacacagttaaagtctgtgctttagaaccactatgctcacccactttttgagtagaagggcaagatatgatttaagacatcaagaagtagcagcgtaagtaacaatatggagataaatgctgaacacaacagttaaaagccttaaaagtgttgcctccagggagtggaaaggggtaggaaacttcatttttcttacaaagcaatctattgacattttggacacatgccattttaaaaaactgcatcagggaaagccaggcaggcacctggcagtggagagctggtctgcagtgtgactacggccctgcccggctggctggtcctagatcgccaccagcctgggactcggcttcctcacctgcaggtgctggaccaaacagtttccaagttctcttctggcccttcatgttccagcaacaaacaagaccagtgatttagagagcacgtgtgctataacgacaaccagacagagtgatgtgacagactgagtaggccctgcctactactcctgcaccctccaggtcaggcgctggtcggggcaggagccacctggatgaggggagagagggtgcaggagatgaggtgggagagttaagtctgcagcaggagattgacaaggaccctctgggtggtgcactgggggcaggatccaggggaacaaagacaacagggatgcaggcaggcattggaggaggagagcaggttgggagacgtggcaggggaagtgctgatgggtctcgctgggggctgggatgcaggtgtggggagggacatgaatccttccaaatgctgagtccccaaggcagctgcacagcaggatccaaaccatcatcgccccccaggtgctcgtcttttgggatagctccttgcccgctgttgtagacagctgcttccatccagtgccctctccagacaccagcgctgctctcagctggtgccttttgtcattttcacgtacaccccagcagccgagtcctggcaattttaggcctgagcacttgcctcttctcttcctcagtaccgtcctaccccaggttctccttaattcacatctcaactttcctatcccagcatgccccccaggtctaatctgtgtccccacactgggaagggtgtcccagggctatcacatggccaggcccacagggcgcacgtatctggctagccttgtgtttttcccacggccacacctttcctagtgcaatgtgcctgaaatctggggaatactgttgttgcacaggctggtgatagaaccaagaggcagcagacgtgcctcttgagcaaaatgaggcctagaaccccccagagcagctcttgtttgctgagaagaaaacagaagtcccatgagttcagtgtgacttcttcagtttcttcagggtccacttgtccacatgattggtggcaagtgtggtgtccggggccatttctggcgggtcacgagccgctgctgtttcctggatagccgcatttgttttcctgcacctgcagtcccgtctgcaaagcccatctcaacgagtcgccccacaggctgtcacctcatggcgggggcacacagggcagcggagcgaggggccggggagagcggcccccacccctttaatgttcatttccatttttgtttgagtcactttcacacaaatcacttctgtctttatgtaacagtctgtggcccagacccaggcaagtggtaaatatttaccttcacgctggagccaagatcgctgcggggagtcccgtgaagcaccactgccctctaagaccttggaaggggaaacaccagaaggtgtgggtgctgagctccgctgcgtcagactgccaggacctgagtggaactcagtgctgaaacctgggttctcactgcagctggatagcaggtggttacaaaattatatg

SEQ ID NO: 11647 - DNA, 2300 bp, Homo sapien
atcagctgtttctccaaggagccctggttagctgttttaaagtgaaaaatggtacttaaaggccataatctggccctaataaggtgctcattgctgttggattggcagttgtttttaagccatttcaacagacagagacagggaaaaccattgttcaagataaaatatttcatgagcgcatactggtaacatccaagtctttttctggactacaacgtttttgcttaatgtcatagaacttatatccatacccctttcttccactccagaaatctcagttcagaacaacccagcataatttattatttgctttagccctcaccccacagagtcactgccacaggggtgtggggattgggaggaagaccatggagataaagtgtcatttttgctacatcgtatcaagcacacatactgtctacatgacttctctcttttgctgttgatcttgattacctgactgaaatagtgattggcaggtttctccactgtaaagtcacactttccccctcccttcatactgtgctctgaaaggaagtcacagtgagcagcctgcacttctgaagggaggagttatttaggcttcatctccttaaggggaaagtgtctacatatgttatttggaattcttccgtgcaggagggttatctgttttcttgcatttatttactcagccatttatatcattatggactcacagatacttatattatactttaggttctaatccaatactccttattttgttctccagttgttcctgctttggccattgggagcctgttccattgtctcttgtgtcctttcaacttgtcccatctttgtgggctggtgggtttgtttatttttgagcacttccttgctttccaatattgctagatgccctagattgatcttgtgtatttcctgcttcagtcttaggttcagccgtttctctggggaaccctggtcccctctgttggagatggtgttagaaaccacaagctggatgctggtgtgctcatttcgactgtggtggcattgcttttaggtcctctcagctgatggagcaaggaaatgtctgtgtgtactgacctgtgtatatacacatatcactaaatacttctgtatggaaccatttgtttctgtgagtccacactggtgtctccagccctaatcctttaccccgtggatcactcttgcgttttccctgctgtctctcacctcccattccaacagtgagaaacgtggctcccattgcctgtggcacatttgcctacttgttcagtacatatgtgtgtatcacagtgttggaattgccatctcgccctatgggaaccacttaaacaacgagagcccggtttttatgaatatacacagttccttttgcctttagtcttgtaactgtagactgggccaacaggtgaaagtttctttgggcaggctgaaatgagatcctactaccttgagaacatcttaacagtcagatctacagggtgcagatttcatagcttccccctggcagttcttccatcacttgtgagccctggctgttttattctgcctaagccaaggcagcctttgctatcctgacttgacacagaagagttacttagtaactgtgttcatttgctagggcttccatagcaaattaccacaaactgggaagcttaagacaacaaaaatttattctctgctcacagaatccaaaaccagaaatcaaggtgctgtcagggctgccctccctccaaaggctgtatggaaagtccttccctacctttttcagcttctggcggctccaggcgttctgcggcaagtggtcgcacacctcccggctctgctgtgtcttcacatggccccctcctcggtgtctgtcttctgtccctcataaggatatttgccattggattcagggcccgtgtagattgcccaggatgatctcatctcagcttccctaattaatcacatgtgcaaagtccctttgccgtgcgaggtgccatagtcaaaagttccagggattagggcatggacatgtttgctggggacctttgttctgtcagcctcactttgtgatgcagcagcagtcgcaggatcagagcagatccccaggcatttttggcagagtaagaccaggtgccaatccccgaggtgtgtttctgctgctcttatacaccgaggcagacccatcaggtctagacccagcaggcccctctttcctcagcgctgaagggagggggctttgggctgacaggagacctaagttccacgtgtgaattccatcagcagaacggtgctcagaaccttctgattcactctgtagg

SEQ ID NO: 11648 - DNA, 2300 bp, Homo sapien
cttgaactggcatcactcattagaatgtccatctctgggccccacccccagacttgctgacactgagttgacccccagagtcaggacacctccagtgtggctggagattgtgcatttctaaatacccaggtgctgccagtgctgctggactgggaccacatttcaaaaactgctcttcaaactgtgagttgttttccaagaagttaaactgaaggcttcatcccacagagcctattctatgttagattgggcttccccagccttatctgggatgcaacttaacacttgtcttggctaggcactgtggctcatacctgtaatcccatcgctttgggaggccaaggcgggtggatcgcctgagctcaggagttcaagaccaccctgggcaacatggtgaaatcctgtctctaccaaaaaatacaagaaactagccgggcgtgatggtgggtgcctgaggtcccagctactcagaaggctgaggtgggaggatcactcgagcctgggaaacaggggttgcaatgagccaataacatgctactgtactccaacctaggtgacagagtgagaacccatctcaaaacaaacaaaaaattcgtctagtctgcgtcatctttaattttcctttatcagaagaattatttatctatttgtctcactttcctttgctgacatgattttcccccctcaaaaaagagatgaaagtggaatcattctttcgcttcaaaaagttaagaattactgctgtctttaaaaatattaatatgaggccgggcgcggtggctcacgcctgtaatcccagcactttgggaggccgaggcaggcggatcacgaggtcaggagatcgagaccatcctggctaaaatggtgaaaccccgtctctactaaacatacaaaaaattagccgggcgtagtggcgggcgcctgtagtcccagctacttgggaggctgaggcaggagaatggcgtgaacccgggaggcggagcttgcagtgaaccagatcccgccactgcactccagcctaggcgacagagcgagactccgtctcaaaaaaaaaaaaaaaaaaaaaaaaaatattaatatgagctagacaaggttttttaatacatttcaatttaattatgaagtgtccaagacaagaaaaaactgtgaaaaccaacgacttatgtacctgatggtttagatttcttttggaattgtacatctgttcaaaatacaattacatctgcattgttggaaacgtttggataaaaaccagtttatataaaggtttcaatcagtccacatccatgagaaagtagaaagggcaggaaatgattaagggggattattgctaatctgataaacacagatttgtgtctttcggagagacagaagtgtcactctctccatagctgtaccattcctaccacctggcccccaagtggcattgctttaacccattgtctctagggaaaatgttctctttcgattttggttctcagtcctataatttctggggcttaaattagtcctggagctagggaagaggtgatgtcatccttccattgtctccttcggccacagtttcattttaagagtattggtaagtaagtgggcagtgtgactagatggcggtctggactcggtatcagggctgtgtgcatgcccagctggggggccttggtggtgtgtgatgtgatagatacacacatggttggcatccccaagtgtgtctgcgcttgggttcatttgtgtgtgcatgtgtgtccatttgatgtggcgtgtccccaagcttgtggagtcgtctgtgagtctgttttgtggggtgtggcccaggtgtgtcagggtccaccatgcagtcggggcttgagcctgagtgcccaggtgtgttagggtggatgtgacttctgtggggcgtccccaggtgtgtgaagctggttgcgctgtgtctgcggcggggcgtctccggcgggcatcggcgtgggtgggtctggctgttaggcggccagttgtgcgagcggccacgtgtgtgcgagggcgccgcaggggctggcgggcctcgcgttccgcctgcagggggcgccgccgggggcggcctgggagcagaggcgcgggcccggccctgcatttccgccctggccctgccctccccgacagccccggctgccggcaggtgaggcgctgagcccgggcgggggtcggggctgcgcctgctccgccccccaggcggggtgtcctggcgcccgcgggaacctggggcgtcgctccctgcgcggcgtccgggtcgaggccgcagcactcggcgtccccgcgggtgaggg

SEQ ID NO: 11649 - DNA, 2300 bp, Homo sapien
tgctttccattattagaagaaaatatagaaattaaggttgtgaacagaggtagagaaatggaaagatatggaattttttttcccttttttttttttttgagacagagcctcactctgtcaccctggctggagggagggcagtggcgtgattacagctccctgcagcctcaacgatcctcccacctcagcctcccaagtagctggtatagtgtaggtgtgtgccaccaccccagctaattttctaaaattttttgtggagatggggtctccctgtgttggccaggctggtctcaaactcctagccttggggttacaggcatgagccgtcacgcctggccaagttgtgggattagaatgatcatatagaaatagcttggaaaggaaagaacaattaaagctgtctggggcttgatacaagtcaaggcaaaaattagtgttttattaggttgtatctattaagattaagctagcaaagagatggtatagggagaattaccatagaaagatacttgaatttcatgagttaatttttttttaatttgctctaaaacagtgtttttcaaccttggcactattaatgttttacagcagacagttctttcttgtgggggctgttctgggtttgtgggatgtttagtggcgtccctggtctccacctactagatgccagtgggacctctcaattgtgacaacctaaaatgtctccagacagtgccaaacacccccctggagggcaaaatcgtccctgagaactgctggttttagaacctttccctaatacgaagtgtggtttgaggaccaggagcatcagcaatatctgggagagggttaggaattcaggatcccaggccccaccccctccccaggcctgctgagtcggaatttccatctacaaggtcctcgggaggctcctctgtgcagtactttattttttattttattttattttattttatttttatttttattcgagacggtttctctcttgtcgctctggctggagtgcagtggtgcaatctcagcttactacgacctccacctcccaggttcaagcaattctcctgcctcagcctcccgagtagctgggattacaggcacatgccaccacgtccagctaatttttgtatttttagtagagacagggttttaccatgttggccaggctggtctcgaactcctgacctcaggtgatccacccacctcagcctcccaaagtgctgggattacaggcgtgagccaccacgccaggcctcctctgtgccgtttttcaggagcaggagagagttcggttgaatttacatgaataaagatacagtgaaaggtagctattctcaaaaattggattaaaatggggccattttgatgatgcatttaagaaggaagggggcagtcttgtgtttggctcaggcctcttcaccacatgaacctgccaccccttggtaactgtcctgcagctcacaggaaaactgtgagaagacaatggctgctacgcagggagcatctgccttctagaaagtggttttcaaccaggcagaaacggtcttctgtgacccactaagatcatgtctcacatgggtgaataaaatcagaattctttgaactgattaacccagcactggcccatgtattagataattagtggctcccagcatttctgggagagggttaagtagggatgtcatccttgctctgaaaaccacaaattaccactgacttctgatgatgtgtgatctcctttgccgcaaagaagatcatattaaagagacccaagtcatttaggggcagctttaacaatatccactgagtatgtgcagactgctttatccagattgggcagggagttctgtcgatgacactgcctgcagcagtgacatttatagaaagtccatggcaggagagagaatagaatccagggcccatctctcctttcgcctgtaactacaggtttaattttaccggctagaaagtaactatcgtggtgctattggaaactgttaacataggtggactgctaattgaagttatttgttgttcccctcatgggtcatggacagagctgtaaattgatagaggtggccgtcctccacaccacggccctgcctggcaaaggcctgctctcatcaatgtgtggtttccaaagtcaccctgtccatctccattccagccagctggaaggggaaaccaagtgggaatgtgtgcccaagttttacaaccaaacatccaaaatggtacgtgtcgcttctcccacattccataaggctagaactcagccccgcaacctagtttaactgcaggggagg

SEQ ID NO: 11650 - DNA, 2300 bp, Homo sapien
gcgcctcccggccgggcgcaataactcacgcctgtaatcccagcactttgggaggccaaggtaggcggatcatgaggtcaggagatggagaccatcctggctaacacggtgaaaccccgtctctactaaaaatacaaaaaattagctgggcatggtggcgggcgcctgtagtcccagctactcgggagcctgaggcaggagaatggtgaacccaggaggcggaacttgcagtgacccgagatcgtgccactgcactccagcctgggcgacagagtgagactctgtctcaaaaagaaaaaaaaaaaaaaaaaaagagcgcctcccacccccaggccagaacgcactggctgttttcaggacaggaaggccttccatcctggggtgttgctgattctatctcaagtattcacaagtatttttctatccctccttgcagggtctgcaggacacacacaaacacttgttaatttccccagcaggcagtttaatgagagtcacggtgtatttgttacactatccagttgtctggcacattttgtggcacagtggctgatcagccacccacttgactactgcatcaaagccccattggaaattccatccccctctaagctgaccaggtttggctgacccaagtaccacaaacattaattaaatgatttctgtagtcccagcattataccaagtgatttttaacatgcttagtttttaacatagtcttttaatatacacacatggttaaaataatgtaaagagtactgaaggttatgtaatgaaaagtaagattaaaagtaagactttctccctcctctaccccaattcttcattttagaacttctcagaaactagtcaatttcttatgtgttgtcatagagatatattttgcatttgcaagcattctttatgagtttttctcacaaatggccaggtgttcctatgtaattttttcctttcgaatatatcctgaggtcggtaacgttgcccccacgttataggtgagttccttgagaccgtgaaagtcacttgctcagtgtcacgcagtgagtggcagagctggcattcagatgcttacatagagccataggcattcagaccgggagttccaggtgtaagtggaattgaaccgagtaatgccaggcgagctaacaattggattctccaagaaggttcgcttttgtcccacttgataccgatctcttttttatatgttggcttattcatttagatgaagagtggggacttcacaacggagaggagtatccatgcagcttccctctcctccctagtagtttagttctggcccccaaattgcacgcaccaccgacgagatagtgtacagccagaccctgctcgcagaaggccacttagggaccagtggtggttactggagctgccacccacctgagcttcttacagtgttcacacgtctggggatgttttggcttcttgttggtgctcgagcccccatgcagattggcagcccagcctggtccatgtctttacctgccccaggtgctaggtaggtgccagctctgtcagtagctgtgtatcctttggtaggggttggagctgttccacacagggagcagagcagacccatcctaagccacctggtgtccacagggcccaaactcctattccaggagtagtggagattctcagaggcattcccagcagctccatcatggcagcagcagtgaccattggggtcatcttgaaaccagatggactgtttgcagtctcagtgagagttctcaaaaagactcgtcagaatggtctagcaggtgactggtaggttgggaagaaggtacctgctgcgtggggactctggcatgagacgtctttgtggccagggcttcatgacagtgcctcccaaaggccctgggcacgttctcaggagagccttgagtggggacataggtaccatttagaaggtgttgtctaatgcactcttgcccacagagaagtgctgtctgaagcccaaaccctgtttttaagttatggttgtttaaggtatttgcttagaattttagttcctgatgctaaaaaactgagctgcattccatgacttttgcactgatcatttctcttaattggcaggtaacaaggagggagcgcattcttccaccttctgggtgctgctgagtatctttctgggagcagtggccatgctgtgcaaagagcaagggatcactgtgctggtgagagccgcaacatggctggggcctgctttttctgtgtgtccttttccctcctataaagacatctggggctggccctgcctctgtggcgttctccac

SEQ ID NO: 11651 - DNA, 2300 bp, Homo sapien
tttctgatataaaggatgtgtaataaacaatacacaagtaaaaggcagacactctttattgtcagttctatctacttgactgattctcacagaaagctttgcttcttttttgccaaaggcttgtatctgaatccatccaatgcttgtaactcaaccatgatgtgactagtgaaattacataccgatccactttttgccaacaaatttattgtccttaaatctgatatgtgatctgttaaactacttcttacccttgtataaactcattaaactgcaatcttgtttcagcactaaacacatttttaagtttaatctacattattaacatcttccccatcactttctgaagtctagagacaatcagcaaaacaaatcgatccctgattcatgattcataatgttggctaatttccatggtgtaaatacttcgaccatggcccattacagtctaccaacgagacatcactgagtgtgggccgggaaaacgcacgtgcagtaagcacattatgatacgtaatactggaaatggtaggaagtggacagacttcagagttatttaggaagtagaatcttggcgatttgttagatgccgaggtgaaggcagagtttgggaaacactggatagtggtgtcttcactatcacagggagacagggagttgaaagcaagcagggaaaggacgcattcagttttggatgggttccatttgaggtgcttgttaccaggagtagctgaataggaagctagataaacggatttggagctcagaggagcaaagattagagttgcaaatttgggatatattgatttaaatgttgacagcaggttaaatcattcagggaaaaattgtggagtaagaggaaaggtctgagaccttgaaaactctgttatttggtggtcacccagagtagacaagcacgccaagactggggacagacaggaaagtggagcacccccgccacaggaagacgtgttttaaggagaaagaaggaattttgctcagatcagttaacacgagaaaggagagtgtcctttgactttagtgatgtggatgctacttgcgacaattaaaaaggcaatttcaccgagtgtgaaaacgaacacgtggagttgagagaccacaaaactgggggcaggcgcctctttcaccaacttcagcgatggaaagtagaagagggtggcagcaagggtacgtggagtagagaatcttggaatgatgaaatgccgaggatacggattccagtccagagggagcaacggatcggattctgcgatactggaaaaacagaaggtgggggggggggctcggtgatggagggagcaggtgtgcagttttgccggtggaaagtggaagtttctcttttctcctgaagcaggcggcaaagacctctgagagtgggagtgtggtgggtgtgccgggcccctggatgggagtggaggtttggaaccaagtggcccgagcctgcggtgagtgggcccgccctgggtggctctggccgcagcagggtcgatggggcggcatggtctcggcgggaagaacacggcttcagtcagttctgttctaagaagcagaaggtggagatacgcatgttttaaacaactcctcccggacaggaagaagtggagttctggctgttctgcgaggacgccgcagtcccagcgtggagaccaccgcgcaggcgaagcgcgagacaggccagaaatagggtcccgcgcgcggaccccggaggaaaagcgagggctcactcggtttcccgcagccagcctcgcccgacccagctggggccgccccttcccgccccggccccgcctccgcctcagctccgcgcccacaacccggcttcctcctctcccgccgggtccgtctgtccctgcgcctccttcgccgccgactagcgccccctggcctgacgtcaccggcgcgtccgccaatgagctgaggagggacttggctgtggcctgaaagtgacgggagcagcagccaatggtcgggcggagggggcgggccgagactggtgctggggggcgcccgcgcgcgtggggagctgcgggaggcgcggcgcggggggggtcgggtgcgcggcgggcggcccctccccctgccaggtccgggcgggtgcctggagccgccagagtttccgcacccgggagggagatgcggccggggctcaggctccttgcaggtaacgcgcggggcggcccctgcagggccgagcgcgccgcggggcgagcggagttggacgcggagcgggcgcgggttccccgctgccgccgtgtcccgagccccgcacggcggcccgg

SEQ ID NO: 11652 - DNA, 2300 bp, Homo sapien
acccatgaaccacacgtgagctgcactcaccacttctcctacatccggagcgaaaacaacctcccttccttcttttctttcctctccccttctctttcttcttctctttctgcttccttgtccttctcctcattcctttgcaaaccatgaagagataaaactgtccatgatgagatgctcagttttttcaagacgaattgctgttccacctcttaaaaaaagatctcactgcagaactgtgcacccgcgtttataaatgttagataactatggaaatgatttaatcagttcatcaacacatttgttaagcacctgttttctgtaaggcactgagctagccaatgagggaaaaagacatgtgatagacatcggtttgcactttatttcctctcacacgtctgtcgtcagtgccttatgtacgtgtcacctagtctattaatccacacttccttactgagtgccaccatgttccaggcagcatgagaagcaaacagccttcaggaagcttccctcttctccacacactttctccttgttagtttgctcagactccataaccaagtaccacaggctgggagtcgtaaaaccacagaaacttactgtctctagtcctggaggctagagtttgaaatcaaggtgttggcagggctgttgtcctttcgagctctagggaagggtccttctttgcctcttccagcttgtggtggcccacagcactccccggcttgtagcagcatcactccaacctctgcctctatctttacgtgaccttccctctgtgtgtgtctgtgttcaaatttttctcttcttagaaggacagcagtcgtgttggataagggcccgccctcatccagtatagcctcattttaacttgattccatctgcaaagaccctatctccaaatgagggcgcattcgcaggttctgggggttaagacttcaacatgtcttcaatccgtccacaaaactcttctttcctccttctcttaccctctgatgaaactttcttctcttctactccattctttaccattcccttttctttttacacagctgtatcttactgtctcattcaccttcatcccagacgagcctctccttcatttccagcttcatatgagtccccatgtctctcccagtggtgatgctggctcccttggaggtggggcacagtagcccagaggggtatgaaggagagcgagagcgcaggtgaatgtctttagtgacactcatctcagcaattgttccctctcccattcactcagtgtcctgcaatcttgaatataccacccatagggaagcatgagggaaggaaagagctgagaaaggagaatgaagataaggatgaaattccctagataatcacagcaagcaattaatctaattaagctaatattattcaactaattttataatacctgccagaatgttatcagatttcgctgaagtgcagcagcatatttcaaaataagtagaaagggattacagatcctaactttggcaataagactttgaatccatggactctgtctcgcagtggggttattggctagtatatcattggtgcctgtggaatacttgagggattccagttagatcaatcagttgtatgacctgctgcatgtaactgctgatgaagaggctttatcgagctgagtcagcttctgatagctgagcctcaaaacctcaggtgtctctctcttccatcatttacgcaagagtgagaggttaggtcagaccctcattggcacaattgttttagctcagtggttgatgagctgatttccagtttctctctcccacaaacctgtgactcacccacaaaggaacattagtgggctttgcggccctgatttctggcatcctaggtgggaaaatgaagagagttaaatcatgatgacacattgcacaccagctctgcaggctgtgagccaactgtgagaggcaggcacagagagctggtgatatggtttggttctgtgtccccacccaaatctctgtcagattgtaatccccagtgttggaggagtggcctggtgggaggggatggaatcatgggggcggacttcctcctggctgttcctgtgatagggagtgagttctcgcaagacctggttgtttaaaagtgggcggcaccttccccttcgctcttcctcctgctcctgccctggtaagaagtgctgcttcccctttgctttctgccatgattgtacgtttcctgaggccttcccagccatgcttcctgtgtggcctgtggaacggtgagtcaattaaacctcttttcattataaattacccagt

SEQ ID NO: 11653 - DNA, 2300 bp, Homo sapien
gctagatggtattatttaatggaataataaaggaagcacttacttatgttactttatcactgccgttttaaagtaaatttgagaattgtattttaatataattggtttcctttgtaatacggtgtatttcattccgtgcatttaaagcattatttcaagaaatgtcccataagctccactgccacaggggtccatgccacagaaaaaaataagagcgactgactagcagtagctattttaatcacatagcagtacctacaaggagtgtgtgggatattgtgttgtgtctcaaatttcaggagaactcaggtgtacagaaatatgcttgtggccagaagctgaaaaaaaaaaaggatcagatcagcacaggaagaatctgggaaaagttctctcaagttatcaatttcacctcccactatccagttcttccaccaacaagctaaaaagcagaaaaacatgggacggagaaatgcatgtgaatcacaaaggaggtcatctctgtcagaatgtttctgagtctttcctcctagtggcaaatttttttggttgacatgaggcagataggcatactgttgtcattaataattaatattcagcctctttggaacacaccgatgtatctaataaaaatagacccaggcaaaatctgtgatggggctgtctctccccttcctatttattcccctagcccagtatatgataaaaacaaacagtgaagataaaagcaatgaagctttgatgggattcttgatgagtcagggaagagaggaagagaaaattcattttttttccctctgtggtgggaagagatttagcaaagagaagcccaatgtaccagtgctctcaagagcctccaggctgtgatttgggctctaggatggaactgagctcacagaagtgggtagctcacaggtgcaccagggtgcatgggtctgagccataacctggaatcctgtggctacacctgggtgcatcacactgccaagaggggctgtcttctcctctggtggtggactgctcagtccaggcatcctgggagctgccttattgccccatgaactgtaatgctgtgttggctttacctacaactgcatgggcctgctgtgtgtcaagggttaaatgggagtggatattcaaccctgggtttgtttggtagcctctgaaattaataaggaagaccaggcatggtggctcacacctgtaatcccagctctttgggaggctgaggcaggtggatcatttgaggttaggagtttaagaccagtttgaccaacatggtgaaaactcgtctctactaaaaatacaaaactagctgggcgtggtggcacacacctgtaatcccagctacttgggaggctgaggcagaagaaatgcttgaacccaggaggcggaggttgcagtgagctgacagcacgccattacactccagcctggtcaacaagagtgaagctccatctcaaaaaaagaaaaaattaattaataaggaagatacagaaggatgaatgagagaaacagagagggaagtgggatgcagggagtagggatgtgtgacgcacagccgagcatattaaccatcacctcggggggctaagtgtgaagaaagtatgggaggtgcggtcttccttctgcagagaaagtcgcgagccttttcctagcctggatcttttgctttacaggcacttagatggcacttactactataagagcctcacagatattaactcacttagtcattaaataaaggagttaccaggactatctatcatctttgttttacagacgagggaagggagacacagagaggtgacaggaccagcccaagacatgcgggtggcgaggggtggcgtcaaaacactagacttattagactgagtgatgtcctctctggattttgacgtatctaagggtgtaaatctcaggtgaatcagagctgcgattgcaggtgtgtttctcccaccagcatgctttcataccggtccgtggacatccggaagagcttgcagctggaggaactcctggcgagggagcagctggagtacaccatagaggaggaggtggccaagcagaccatccgcatgtggctcaagaagtgcctgaagcgcatcagagctgtgagtgaactgcacacatgcaggttgggtccccgccccgccccgccctgccccgcaggaggatgaaagaaaagagcttcgtgaacatgggattagctccttctgtgatcagccttctatccctttaaactatgtccactacctccacttacagtggtcagatcatgatgcagactttcactctagtcc

SEQ ID NO: 11654 - DNA, 2300 bp, Homo sapien
agtctcaggtatgtctttattagcagtgtgagaatggactaatacagtctcttaagaattatgctaaatctaccctgcctgtgctctataaatggaacaacaaagcctggatgacagaatagctgtttgcagcatggtttgctggatatttaagcccactcttgagacctactgctcagaaaaaaaagattgctttcaaagtagtactgctcattaacaatgcatctacctggtcacccaagagctgtatcaggagatgtataaggagattaacattgttttcatgcctgctaacacaacatccattctgtccatggatcaagaagtcatttcaactttcaagtcttattatttcagaaatagatttcataaggctaatagctgccatagatagtgattgctctgatggatctgggcaaagtatattgaaaaccttctggaaaggattcactattctacatgccattaagaacattcatggccaggcgcagtggctcacgcctgtaatcctagcactttgggaggtcaaggcgggtggatcacgaggtcaggagatcgagaccatcctggctaacatggtgaaaccttgtctgtactaaagatacaaaaaattagccgggcatggtggtgggcgcctgtagactcagctactcgggaggctgaggcaggagaatggcgtaagcccaggaggcggagcttgcagtgagcggagattgcaccactgcactccagcctgggcgacagagtgagactccgtctcaaaaaaaaaaaaaaaaaaaaacattcatgattcatggaaggaggtcaaaatatcatcaacattaacaggaatttggaagaagttgattccagccattatggatgactttgaggggttcaagacttcagtgaaggaggtcgctgcacatgtggttggtagaaatagcaagagaactagaattagaaatggaacctgaagacgcgactgaattgctgcagtctcctgatcaaacttgaaggaatgaagattgctccttatggatgatcagagtggtttcttgaaatggaatctactcttgcagaagatgctatgaacatagtcataatgacaacaaaggatttataatgttacataaaattactcgataaaccagcagcagggtttgagagggttgactccaaattcgaaagaagttctattgtgggtaaaatgctagcaaacagcatcacatgctgcagaaaaatctttcatgaaaggaagagtcaattgatatgataaacttccatgttgacttgttttaagaaatcgccacagccaccccaaccttcagcagccaccaccctgctcagtcagcagctgtcaacattgaggcaagaccctccaccaccagcagaagattacaactcactgaaggctcacatgattgttagcttttcttagcaataaaagtactttttattaaggtctgtacctttttggacataatgccattgtgcacttaataagccacagtatggtataaacatgagttgcatgtgcactgggaaaccaaaacatgcataggactttattgcaatattcactttatcacagcagtctggaactgaaactgcaatgtctccgaggtatacctgtagagtctatattcccaaatcttaacccattacttcagtcagagaaaaacttgcaaatgtctttttatttgattttctgcagtttgatcacagtggctacttatcacttggggctggtggtggtggcagaaagaatatctagtggagatcagttcattttcattgtgcttttaaaaatggcaataaccttgggattctacaagataacagcatagcataagtgaaatattcttctttatttctgctacagatgatgtacccaatgtatgtggcttttgaaagcttactttgaagttaattatatgctatatgtttaggaatctattcattaactatagtcagctaaaagaaatttgtattctctactcttatcctctccttcttccaccccaatgccccaaaggttcagcctccgttttgtactccagatgaatttacatactgggcaacagactgtggaaattatgctggggcacttatgtatttctgttcattttatgtcatcattgcctacatcatgctaaatctgcttgtaggtaagtgatgttagttgaatactttttactctttaaactcaggtacttagataattatgtattattttcaagcaattaccctggatttcttggggtgggtgtttcatggcattaattataaattgttgtctctcaatccagaagctgaaa

SEQ ID NO: 11655 - DNA, 2300 bp, Homo sapien
taggaaatttgttttggtttttgctctttggaaagcaagttggcaacatctggtaaatgtaaagatgcttaaattcctagaccccatcaattcttctcctagagatcaacaatggagaaaccctcatagatatttactgtgagacagtacatggatgcttattgcagcattggttatagtccataaatcaaaaatgaataacttcggatattcgtacagtggatggtgtttgtgagcagttaaacaaattagatttagtaatctagttgtatggaaagtatactgttcaatgcagatataaagaaacagcataaataatcacatgttggagtccatttctataaatattaaaaaattcagaacaaattcttacgtattgattcatgcgtaagcacaaaagtctgaaaacatagtaaggaggatgcacgcctgaagggtagtggttagctctgggtaaggaaagggagagtggggtttttgtctagtttttaaaattacacttcagcttttatgataaaatataatgcagtgcagtgcaatacaatataatataattttaatcatatgcattttaatcaagtactctattatacagaatatggaattccatttaggcagttatcacagcactactttcttaaaatgcaaactctatgactttgtatctctcaaaaacagttttgcaattgcacatattagacattttttaaagaaagacaacatacccttaactggaagccacagcattgacaagctataattttgctgctatgaaatgaaaggaaactaactactattagtgagtatccttttttgaaaatgtaattatgtagaaactcctctttacattttcccaaacctgaatattacacatctccaaagatacaagtcgaaggctgctgaattctctctgaaacacctggtcatcattttgggaactcctcccgagaccaactttgagcattctgaccatgtttctctcaccaccacggttggaagaacatggtcagtgcaagccctcacatcagtcctgtttgtctcggcaccccatctgccatgttcttggtgcaagcacatgacaaaaggccttttcctgctttcttttgtctgttaaggggacggctttgctgaccgtcgatcagagaagatgggaagacctgaagagccgactgaagatcgcacagcctcttcatcttccgcctcgcccgggtacccaaaatgctctgattttattcatgttgggcactagtgtgcacgattccccaggagtctcagatttaaattaaaataataatcgtgaggccgctgggaggttgtgcataaggtaatacagaaacaggctccaaaccacagatctctccataaggctattaaaatcaaccacccaaaggctgtgcttcagtgctctcagactaagccttaatgaaaaaatgaatttttaaataaaatatatttgctcttgccttttaaaaatataagtgaaatgtattaaactgacagaaattgaatgatgcacttctccttccaatatagacggcatcatgcactgtcgttttgaatattcagagccagccattgctgcaaaaacacctcacaatagacggaactgtttggggagaaaaatgtaatgggttttaagataagcatttaagaaaataaacgacaagaaagtaaatgtgacctgtgtctaaaatgcccttgcccaaacctttcttttctagataatgatggttttagagctaaaatgtatgacataacccagcatccattttttaagaggacaatcgcattactcgtcctggcccagtcggtgttgctctctgtcaaggtacttcgtttcaccctaagactccgggaatgaattttgtattcactgctacatccgagagtatcacaagctgctatatgcattcacggttatgttcttgggtgtaaaaattaagattcactgtcaatggcaaagtgggcagaagaggggcaagcctgtatgtgtccgatggacgtgggcaacgactcgtgtgctgtttctgttgcagtgggacgtcgaggacccggtgaccgtacctttggcaacaatgtcagttgttttcaccttcatctttgttctggaggtactgtaatgagtcagctagctctgggggaatctgtgcacagttttaaagtaaatcagcctccctctttgatgccacttactctcctctctgtgttccattgcctttgaagtttgcccttaggatatttcctacttaagcggttctgcttaactcgaacaaagacatcactttatccatcagattttt

SEQ ID NO: 11656 - DNA, 2300 bp, Homo sapien
aaaaggttggtaagaagaggaatcagacacatcctagtgcccacaaagtacaaagcaccattcctagtgctgtttttgttacccatatcctaatgaggatatccattcctaatgaggaaaacaggtgtagaaagattaaataatttgtccaaggtcacccacctaataagtggagaagcagggaactagtgtccaggcaccctggcttttcaccaagataccagactgcttcatgcaatcaaaggtgggctcaggtgggttcaggaagacaaattggaaaaggcagtgaggccaaatatgtcaagggacctttatacaatacactacaacacagcctttccaaataatgttctacataaaaaggtatggttatggaaagataatcgcaatgtagttttagctgaaaaaagtgggcgatggaagaatataaactttatgagctcagatacatataggaaaaaagactggaaggatatactccaaaacgttcattgtgtttgtctgtggcaattgtgggtaagttttcttccttttatttgtccaggctttataaattaaagatgtgttatttgcattaaaatattcttattttaaagaatcatgctggtaatccagaaagaagtaacgttggcattactaaactcatcgtagtaagaatggagacttgggccaagaaggacagggaaagcccagggaaccctaagcttgatgctgggcttctgctgggatgctggtccagggacagaaaggaggaggccaagaggagacatggcttagggtcaaagaggacgtgaagcagattaaaatggaatttttgttgaaatattcaaacagtgatcaagaattttaccatctacaccttgaacccagaaaagagatttaggttcaaaatatgaccatcatagccaaagaaacaaaaataaccaaagggagaataggaaatgagtcaaaaacttcctatagatgtttaatttttaaaacctttttaacagctttattgagatgtaatccacataccacacaatacacccacttcaagtgttcaattcaatggttttttagcgtattcatagagttgtatacacgacagccacttttagaacatttgtatctccttgaaaagaaaccctatgtctcttaactattacccccatccctttagcctccacctcaagacctaaacaacaactaatattctttttgtctctatagagttcactgttctggacttctatatgaataaaatcataacatatggtcttttgtgacttttttctcaattagcataatattttcaaggatcctccatgttgtagcacgtatcaggacttcatcccttcctatggctgaataatattcacttgtatggttggaccacattttgtttatctgtttgttcaaaaatggacatctggattgtttccaccttttggctattgtgaataatgcttatataaacattttatacaagtttctatagggacatatattttcatctctcttgggtagatacctaggagtggagttgctggctcatatggtaactctgtgttagtggtttgaggacctgctagaatgttttccaaagtggttgcaccattctacatccccaccagtatgtaagggttccagtatgaggattgcgattcctccacatcctcgccaatgcttgttgttatctgactttttggttatggctttctcagtgggtgtgaggtgatatatcattatggttttgatttgcattttccggatggcagatggcacatgatactgagcatcttgtcgtgtgctttttggccatttgcatatcttccttggagaagtgtctactcaggtcctttgctcatttaagtaatattctcagcatcgatttttaactgcctgtctccaaagtctttgttactatttgctgggtagctgtccacatcactgttgttagataaagggcttttgggattccgtgaaagaagaaagagtttcctatcctttatcttttctgagttcattttctgaccaggtttcccctctcctcttgtttttctactttaggaagattgcaatggcatattcagaattaatgtcagtgtgtcaaagaacttaaatttaaaattgaggcctggagagaaaaaacctggattttgggtgccccgtgtttggtaagtatatcataaaaaaatattctgaagaatggtgtgtttgtcagtataaggctttaaataagtatcatatggcatgtaactaaaagtagttttgctagagatgttaaaatgatcttaagtcatacagggcgaagcgct

SEQ ID NO: 11657 - DNA, 2300 bp, Homo sapien
ataaatgtgaaaataatatgtaaaaaatggcagaattgtgtgttcaggtgttgagcaaatagagtatcattagatttgcatatcataaaatcattgcattttcaacctgtgagctatctttcagagcaaggctttctcttcattttaccaatgaggaagttaggcccaaagatcactcaactacttcataacagtgtaacttctggcacacaggtcttttaatcccttgtgttattttcttgccacttatcaactatctcaagggaattcctgtcattcccagttggagaaaattttctggagaataatttttttttctcaccaaaatcattcacaccacaggtgttaggccacccaattgtcttcactcattagcaaatcagaaattaacacaagtccagttattgtccaaaaagaacatgtttttaaaagtcttcgtggtttaaacaagtggtaactggttaccagtaagctgcaagcttcagattgaggtttctgtaggtaataattccaaaaactgtgtgctttttttttttttttgaactgtggttttaaaaacaacacataacatttaccatctaaaccatttctaagtgtacagttcagtcgtgttaagtatgtttacattgttgtgcataattccagctttagttacttctctttatgactcatttttgcttgtaagcttatgttttcctatcttcctaaagttctacaaaatctccttggaacatatatttaatcattccaggagcctgagtggacaaatccttcccaaagggggtttattagaaaccttgtttaaattcaaaaccgacatcatgattgcctgtgtgtattaatctgttttcatgctgctagtaaagacatacctgagactgggcaatttacgaaagaaagaggtttagtgaacttacagttccacgtggctggagaggcctcacaatcatagcagacggtgaaaggcacgtcttatatggcagcagacaagagaagagagcttgtacagggaaactcccctttttaaaaccatcagatcttatgagactaattcacaatcacgagaaaagcacaagaaagacctgcccccatgattcaattacctcccaccgggtccctcccacgacacatgggaattcaagatgagatttgggtggggacaaagccaaaccatatcactgtgggtaggctggccttctgcttatggtgtcctgatagaagctctaccattatttttggaaaggagggaggaggcagaaggaggaggggcaagaggggagctttctgtttattttccagcccttcttcatagctgtgatacttctgctttgtaagtgttcttgacgcagagcgtaaagttcattttcctttataattatacgttatttgctgtattttgtgttttcattggtgttgcctttaaaataataaaagtaatgagcacttatgtgttattcatctcaagtgtacaaaccatgcatttatcttgggctcctttttttttcctagagcttgcacccgacagcgcatgctgagcggatcatttgaggggcagcccgcaaaggagaggtcaatcctcagcgtgcagcatcatatccgccaagagcgcaggtaaatacttgggaagacagggcttcagagactctaaaaaaggggggttttacaggaaatggtcgctgtacacagtcacggctgtcagccctggctgccagacaggcatggctgaggaatcgcgttctatttgctgtttgttacaataatgaaacacctaatcagatccaaagattcaaaaaaatctctacttcacaatccttttccttagagatggccaaattctcacctttaagatcagaaggaaaaattctgaattttgttagatgggatcaaagacatttggagagagtataagcttctgctatgaaaagaaatcataggcatttgtggcgttgtagcagaaaaagtgttttattttgattttatcatggtcactgcttgaaaggccagtttgatcttgagatgtattaaccagtgcctgtggttgttttaggtcactaagacatggatcaaacagccagaggatcagcaggggaaaatctcttgaaactttgactcaagatgtaagttttaagcaatgctttggatttcagaaacgtgattatgaaaatgtatttaaatgactgcttagacaatgcccagtgtctttctgctgcattcccatgtctccttaagacttcataccagagggaatcaggaaactcaggatatgaattatgtagccaagtatcagaagtaactgttaa

SEQ ID NO: 11658 - DNA, 2300 bp, Homo sapien
tgtataattcaggggattaaagagaaattgaacgtttttgcatttcctttacttatttcatacaaataagtgaccttgggagaacacttttactgaaaattaaattgattcttttgattttggtctattgaaaaaaaaatttaagagagaaaattagtctgctactgatcaaagtcaatatatgccccagggatcctttatgccacaattagagagtataggatgtatcaacagagggtttttattaataactggtgactggcaatgctggttttgtcttttatccttaaaatgaggcttccagaattttgacagaaactttacaaggtcctataacaggtttgcatctccactgatgtctatattctcagaatgagctattcaggaagaatatgcttgattcaccccaaaaagagtttttgcagtttattctaaagaaaatcagaatcctgtaaatggacagctgagatgagcaatttgcagttggcatctttgtcaaaggagctttatgtaaatgtgcaccttaattttgtcatttaaaaatacatataggaggcagaagctgggggattgcctgagctcaggagttcaaaaccaccctggacaacaagctgaaaccctctgtctagtaaaaaaaaaaatacaaaaattagttgggcattgtggcgggtgcctgtagtcccagctactcgggaggctgagacaggaaaattgcttgaacccgggaggtggaggttggagtgagtggagatcacgcccctacactccagcctgggcgacagagcaggactctatctccccccaaaaataaataaataataaaaatacatatagggactgtgatttttggcaactgtctctcaccacctcactcattttatagaaggcaagtttattttccacaaaggatctaccaccactactaccagggatttgaaactctaattacaaatcctaggtaatgggatctttgcatcatctcattcgtatttccatcagcagttaccccttcgaatacagggtcagactaacaggaggacataaataagggtgacaaaggaaacatttatttctgtaaaacagcgacctcaggtaggaatgaaacagtgagcacttgtagttagtatcattatttagaaaaacaaaaatgtttaattttgccctattcctaccatacacacatacacacacactcgctcctaagaactagaaagaaaaatatgttagtgggaaaatacgtgaaagtgggaaatgtcttccagctgggtgtaatattgacacataggtaatatgtgatgatacctaggagataataggtacctaggagataataacctaggtatctaattcaatggatttcagatttagtgggcctgtagcatcttgaatttcatcacttgggtctttaatccaaaagaaactacttgttcccttcataatacgtacataaaatttctgctgagcaggttaattgctgcctagttaaaataattacacaaagtgtattaagcaatgtggcaatcttctaccattaaaataacaccagttctttccctatgccacacgcacacttcttattttatggatcctgagaatatttttattaggtcagtgctcctgttcagccttgagggtaagataccatggtagtccaagccagggagtggaagactgtccactaaataaaaataaaaatttgcaacctatagtaaaaacacaccagacacaatgcttttaaattctgattttcattttctcccagatctaatagatatttatcaatataatggggataaaatactaaagtatttctcttgtggagaagaatatttgagcaattatatgcaaagcatatgcaagacagaaagtgcctgacatagcaagtagtcaataaactcaagttattatcattgttcttttttcattcatttaagctttcaatgttaaagaactataattgaaatgacttcattccaaatataaatccataagaagacaaatttttgataacataaaaatatacaaagctggagacatagagttctcaatgttccatattaaatgtctctgactcatctcccttctttgtcttgaagatgtttcatgaagatgctgctggaggttggcagctggtagctgtggatgtcaacaagccccagggacgcgccccagcctgcctccaggtgcagtacaatgacatttttaaaaatcgcccagcaaaggtctttgaattttatttcatccaagaaaatccacagctctttaagctctagatttgtccaaatttaaaatcctgaagt

SEQ ID NO: 11659 - DNA, 2300 bp, Homo sapien
caaagagtcccaaactccaattatataacataaattaattagtgcagcctactgcaaagcccatattcaaactcaatattcagagcaataacagcctggaaatacccagcatgtcttcaagccagttagcttgttttcttctgggaataggaggtgaatccgtccgttttcacacttctataaagaaatacctgacgacgctggctaatttataaaggaaagaggtttaattgactccattctgcatggctggggaggcctcaggaaacttacaatcatggtcgaagacaccttcttcacaaggcggcaggagaaagagtgtgtgaagtaggaactgtcaaacacttataaaaccatcagatcttgtgagaactcactccctatcatgagaacagcatgggggaaaccgccaccataattcaacccctctctccacacgtggggattgtggggattataattcaagatgaaattttggggggtgggaggacacagccaacccatatcaggagagttaggcagagatacctgcccaggtagataaaggagcacatagcgatggggataggtgctcaatacaggcaatcagattcggagctgctttgttctgagtttctgtgttttattctcttttccagtaaaaactgcatctgtgtgcgcgcgcacacacgtgcacacacacacacacacacacacacacacacacacactgcaaacatgttcttgtactccagtgaggactaagtggcacccattgtgcttggttaggtttctttctctagacccatggagcaccagataggagagccagtgaacccgcctgatgttaaaactgcagtgctacgttttcctgactcagcctcttttttttgcctgaagcgctcttttttttctgttacccgccttgagaaattctcctaatagtctgcagcttcagcatggtcaactctaaaccccttacacattgtagtcaaacagagcttattttaaatttcaagtttgcttggatggccttggtcaagttattacctgccttgaggctagcttttctcatttttctcatgcatgtgtaagaagatgagttttttgttttttgtttttttttggttagggctgttgtaaagatcaaataaaatatcattgctaagtgtcccaaacatagtatatgcccatagctgttagttcctcaccttcctttaagactcaatccaggtgctaatcaaatgggaagtctcacagtcgactcagggatcatcaggtaccacctgcctttataacaattcttctcacattgtattgcacttatttgctatttgtgtcctgagggctgacatataatagccccccttcaagtgactgctgagttgtggaaggcagtagcaatggccatagggaggtaacgtctatcacaggatgtagatgtttcagaattgtggaaatttaagcagttagcaggcatctcatctcccacctcaatgtaatttcatgaacaatttacttcagagtagctggaagaatttagataatcactgcattcataaaacaacatctccatttaggggaggttcttcccccattctttctgacctccctcccctcccaagttgggagatcaacttggggctactgttggaagtaagagacgtctgtgaatgtcgtattaaattaacactggggaaaccatggggaagatctgtgcatttcatctgtattactcagcagtgttctagcacaaagcacctctatgtggagacagctttaggtataagagcatacatctaaaaagattttcccaagaatatgtctgccctaagaagcaacccattttactctagctattctaaatagctagcctctaaactgcttttgaagtacataaaataatccattgctttgggagaaaaaaatcaagcttctgttggtattaatttatctcatccttttaaagtttctattttcatatgtttattatacactatggagtagaacacatatatgccttacaaataagtagatatatgtggggaactcaattttttgatgagggcaagatggtttagatgacaaatacaacttttccttttcccagactgtggttttgtgcttgctcaccaaagctaacctcagcatgctcaaaaggaagcagagttccagggtggaagcccagccagtcactgactttggtcctgatgagtctctgtcggataatgctgacatcctctggattaacaaaccagtaagtttcttctttgagtatggagaagcatatgtggatgtgagataaatgtgattgacaaatt

SEQ ID NO: 11660 - DNA, 2300 bp, Homo sapien
tcctatttttcctgataaaataaaattcttgtggttttcaaatgttggtaattgatcttaatttgtcaacaatatacattgagtcatacaaaacacacctgaattatattctcagtttatattgaacccacaggccagcaattgacttttactggattccagcaatgaatgtagttacagggccaattcaacctggaaaagatatttgttcatcctttctacttttgctttgaggatgcagtgagctataatcacatcaatgcactccaggctaggcaacggagataggccttgtctctaaaaataacaaagaaaacaaaagaagagagatactgagcaggtagaaggggtactatgatattttggatgtacctgttttttaaaatgattgtctactccaatacacagtgaatccctatgcattataggatgagtgtgctggattccatgacttccttgaagcccatgaattctctgagactgtctccatcatcattgggattgtttggctcatgagcatgaattatagagacttaacagaggtagttcaaccaaggacagagaaaggtctgaaatgcctgttgggtgaggagtggcactgagattagtaaaaaatcactgccttgaccacttcaaaacattataaataaatgtttaaatatttccttaatataatttactaacagataattcgaacgaatgtcaaggaataacacactatcattcagctaccatatatatatagctatatatttcagtttgtgaaataaactagtatttagaacaagcaattgaaagccgcaaataaagatgatgaaacaagttggtaaatactttttctaagcaaactggttgtagatttagcattgtttaaattactgtcaattttttcttatgaggagtgatttcatcatttgtttaaaacctggcttttgacacagtttttctgaagtctttagaaatttgaaaaattatctcgcatgactctgtatttcatgaaataccaatattttaacatttccctgtaaacaataaaacgtactaatatggattatgaatgtgaacaaattgtgaatggactttttaagaaagtagattaattaaatatctgtaaccagaaaatacatttttaaaatgtaggtttgtgtagttttacttctataccttgccacataacattttgtgatagacaaatgctctttgtttagaatttctcttgtagagaaagcttcattcagttgtttctttccctttatttatatgcctgtgtgcatgatgtctaaatcactggtcaggagttccctggggattttcgtatctgactacatggcaagattccagacccaaagtaaacctttcagagagtgggaatgagtgggaggatgtcgccctgggcatggtgcttaggaggccagatttccctaaacctgctctgctgggagccctaggaagcctcagatgcagtctgctgtccaggtatactcacagggtatggggtgggggactgtcaatttctgaatagactttgtctcatccacacgacaacatattttaattttaaaggcgaacgtcaacctatttagaaaactataagtgtgactgatgcattcattatttaataactccggggtgaaacttgaggtgaacggtttcaccctttcatactcaggaatggaactagtcctcggtaccgtgcacagtctgacctcacgctcgcacgctgggctcccggcctcctggcagtgcacttaagtgtaccccgcgtgtgcccggcggactcccgtgcacaccgccgccgtgctgttgagtacgaaagacccccgagaggagctcgcagatgagagcctagctgttgctgtgagactgactgcgggtggcagccggcaagaaggaactgccagtaccgaccctggcgctccccaccaactgcggcgcagcctcctctgcggtgcccgcccttcggcatcactgcagtccctgtagcaaagctaactttaaaaatttaaataaaataataattttttaaaggcccgaaaactccggctcccacccctcccccagcctgcccggcggcggcggcgctcagtgagtgacacggcgagcgtgagccgcggccccagccgggccgagcgcgctgcctgagctgagccgccgtaggtgaggggcccgcgtccccgcccgccctgggcgccgcgcctggcactgatcctgccggtcgcccactgtcgccgccgccgccgcccgcgggcaccatgacagctctgagcgctggggttacaggttggtcaccgccgccggtg

SEQ ID NO: 11661 - DNA, 2300 bp, Homo sapien
gctttggaatagatacttcccttctatcattaccacattctctgagtcactaggtttctagatgttgacaggaaagcctgttcctatgtccttgtactatcacacgtgggcaggataaaatgtaactctagaatttgtactaaaggtgggtggaaattccactcttagatccaggcaccctcaggcgtcagccctgagccctgtgctttgcaaacttctcaagctattattatgtaaaaatagatatcttgggatattattcaaatgcactctgtgattccttagagctggggttggggcctgagaagttgcatttccataagttcccaaatgatgctgatgttgctgcaggtccatggaccacgctttaagaacaactgacttagtaattcccattctgtctcttttagacaggcccttcccccacaggctgcagttcatgtgacttagggaacctgccaactcagaacctgtgtccttttttcctaagccgcactttggttatccaagaccccagaattacctgtccagacagcctcccaaaactgtgcatacctgtccccagtctgtccttgcaatagaagactccaccagtgtgtacacacctgtatctaagtgtggccagaaaatcagctatttgaaaaaggttaaattgtgtgggtaggggttggggggtggggggacacacagatgggcctcatgcaaaacctcccctattacagggtggagattggggtagaaacagaaatgtactatgattagaggaccttcatcgtcttcttgctccagcaggctagtgttgtggtggtcttacccttatacctacttatatataaaggacagggagaaatcccatcctattatggctcatccctgattttaaggatctgggaccacagatgattcttggatggttctatttcatgaggaaggattgcatgtacagtgctcttcttagggtgaatgaaaaatgttttcccccttccatataaccctctacacattttcccagatgaccataaatgtaggggatagtgtatgcactttggatttcagctgaaatacgactaacttcctctgtgaatttgagcaagtcagttgacctctttgccctcagtttctttatctttaaaatgggagtaagaatgtctccctgttctcttccatctccttcttatttctacccaatttaattcaatacttttttcagttttttgttcagatgctaccatctttgattagatcaagtgcctgtatctcatctggaagtaacttctcactgcacttgcaaccctttgttctttttttttgtggttttgtgttgattaatgtctttctagctcattggactctgagagagcagggatcatgtctccttagttctctgttatattcattctgtcttgcacaaaacctggcacctgatagatgctaaatccccatttgctaatgcataaataaatgtgtgattattgtcataattagagaaaacatactaaatgactggcacatagtaggtgcttagtaaatgacaccaattgtttttcagtgcaatttgtgctataaataaacatttaattttcttttctcacatttgatatatggggagaatggggtgaatttgagacaactacaatttaaactgtccaagtcaccaacaaattgtggtgtgataagctactggcctaaacagctggaagcatgacacgctttttaaagactaaagaaatgaaatatccagtttaaatcaaaggataataaatgcaagaaaaagttgtgtttgtcagatttccttgccccggccccaacccaaactccaaagagtgcatctactttaaaagcgtgtggtgaaagtaattccctacccaagtgttcccactactgtcactggcctcacccttctccacaactcagggattattttaaaggtttctttaatatcggccagtccaaatattctcttgtcaaatatttctgtggcccgtacttgaaatctgtgaacaggacactttttttttttttaatgtcaaaataaaccatctgcttgtacaactgtttctaattacttccctgcctagactctccactgaggggtttggcaccagcaccccgcccagagcagtgccgctgcccaaatcctcgcaggcagctcatcaacgcaattgcaactccggctggagccccggacctgcaagcctgggtgtccgtgggtccgtctgcccagccatctgctggtggcacctctccctcctgccgcctccctcggtgaaccccaccttgcagaagtgcagctcgcccgg

SEQ ID NO: 11662 - DNA, 2300 bp, Homo sapien
gtgtgtatatatatatatctatatatacacaaatacccagtggaatagtattcgtcctttaagaaggaaatcctttcatttgccacaacatggatgaacctggaggacattctgctaagtaaaataagccagacatagacaaaaaaacactgcacgatctcactcatatgtggaatctaaaaacgttgaactcttagaaatagagtagaagggtggttacccagggccaaggggtaggagaaatggggagactttgcatacaaactttcaaagttataagatgaatacgttctggagatctaatgtacagcatggttactatagtttgtaatactgtctacttgcattgtatgaggagagtacatcttagatattcccactgcacatagacacacacacaaagttaactgtgtgaggtgatggatatgtttattatcttggttgtggtaatcatttcacaatgcatatgcatatctaaacatcatgttacatactttaagaatctacaattttttggtcacttatacctcaataaatcttggggaagaaaagagcgacctcttctgaattctagatttcatgctttttgtcagttcatggcccccagtttgaccgtggttgtgagaccttaataaatagcgatccattaaatggttaatttaaaaaaatcctgctctgaataatattccattctttggatataccacagtttatttatccatagaggaatcttagatgcatattaccaactgaaaaaaaaactgaaaggactacatatactgtatgactccaactatataacattaaggaaaaggcaaaattatggaggacagtgaaaagatcaggttgtcagggattggggaaaggtgtgggagagggacggatgactaggcagatcacagagggttttcagggcagtgaaattactgtgtatgagtagtgaattcatgtcactatatgtttactcacactcatacaatgtacactaagagtggaccctaatgtcaactattcactttgggtaatagtgatgtgtcaatgtacgctcatcagttacagcaagtgtacttctctggtgggaattgttgataatggagaaggctatgcacgtgagggagaaggaggtatatggaatatctccgcatctctctcagttttgctgtgcacctaaaactgctctaaaaagaaaacagtcttaaaagaatatgtactctctctgatattgtttgttagcgtgctctataaatgttaattatgtctactgggctgttaatgtcaacttttctatatccatactgattttaatttcactaattgcattaattactgagaaaggagcgtttatatattaaaaagtagtctaaaaagcaaaaaaaaaaaaaaaaaaaaaatcctgcttcaaaaatacagttagtccttccctgtgactgccctccatgcaaattaattgccaaatccaccaaatactcctttccgttttttctttttttgttgttttttttgtttttttgttttttttgagacggagtctccctctgtcgctcaggctggagtgcagtggcatgaacttggcttgctgcaatgtctgcccccctgggttcaagtgactctcctgcctcagccccctaagtagctgggattacaggtgcacgccaccatgcctggctaattttcatatttttagtagagaccggggtttcaccatgttcgtcaggctggtctcaaactcctgacctcgtgatcttccctcctcgccctcccaaagtgctgggattatagacatgagccacagcgcccggcccaaatactcctttaaggccccagcaaaccaatacaatcacatgcacctggaatttgacagcttgaagtttatagccttactaaactgtttatcttatctgttgcttttctctacccctcaagatcaattcatataagtcagttatttaagaatttgagaaaaatgtgcgtttgccttaatatgttatattatgttcatcaagatcctgactcatttgtgacatttgctgttagaatgaaaactaattccaacttcattatctttatgtacatttttattttttgccactctcactgtgaaggtcatggacagtgtaattgcggaagatgtgactgcaaagcaggctggtatgggaagaagtgtgagcacccacagtcctgcacgctgtcagctgaggagagcatcaggaagtgccagggaagctcggatctgccttgctctgggaggggtaagtgaggtctctcagggcttcccacggcctctccatcacaattcaaat

SEQ ID NO: 11663 - DNA, 2300 bp, Homo sapien
ttttaacctgtcctagtggtgaatatacatggtttccttcgcatttatctgttctaatggcccagaaaaaataagaatccagacctctctcatgtaattgttaaggatattctgagccaagccagatttcacatgcatttccattccatccatcccagcattcacagtttccacagctacatattccattccctgcaataaaatacatataggtatcatgattatgatcaaaatgtgccaaatttaaacatgctattataaatcacaagtgtccacaatgaaatcatttcattcatccttggtagattttcttattgtgcaatgatgttattattacatcttattaagcagctgcgagacatctaatctttcaaacaattagtggcatttatttggtgccaccctttaccgatcagatagtcaccatcctgtatcactccagctaggcttttaggtgacaattttgttttcccttaaagagcaagttatatctgacttatgaataaatacagaaaaacataaggctctttgacataacatgaggcaggccaagtaatccgtgaagagagtcttacgtagtaaggatgggcagaaagcaaaggtctaacttaatgacacacaaagagtcatcttttaccttcagctagagctgaggagaagtatacatgtctctgtttcctcgtaacttggctaaacaaatgaatttataaccaattatgaggactcaataaattaggatagcagtggctatgacacggctgagccctctttatacctctcccccatacacacatccagttccctaaaagcaaccaacacatcaactagtggtacccagattctgtttaaaagaatatttcattccctataccatgttcaaagtaaaatggttgccaacaaaattcttttctgtgttcaatatacaactgcatacatgtgagtttgagggtggggaggttactttgtggaaggatcccaaataatcacaaaatttagcttcattctcttgtattcttctatgcctaggaataatgtgaggcttttgtgagggctttttcccaaatgcccacttcgcctttggtagatatttcatattcacggttggccctgttggtccagccacctaaagcattgcatgacgagtgtctcttggctctataacaaactgtggcatagagcaattagaaaaggttaatactgcacctgtacaaatgagaccatcatgtttgtcgcagtctctgtcatcacagtcacagaactccccagaaatataccactcttcagcagaacaaatgcacttcccacaatgacaagaacctgaaattacaaaggctattactcaccatcaccttataactaaaggtttccatctcgaatagaatatcgttgacacactgacaacaggcttctaataacccatcatccaaaggtaaaagtgtattgaatggctggtttctcagaggggagctttacttactgtaattcataaaggtcacccaggaaagccttcattatggatctagacagttgcaattagccttgaacaaatgtcccatggcccagtctggttgaaatgtcaatgagagcaggatggggttgattcttatagatggtcttccaaaaaagtattcaaaaatagattttttcctcctaaattgaatcatgtttttaaagtgcctgctctttaaaggaaatgaatagggaattgtattaaattaggttgcatttctaattaaaacaactactaaattattgtgcttataattttggattttcgtttacatgattttcttggagtaggagcacacctgcatattgggtggctaattaaagtgctaaaaatgcatacagtcactcagtatatttgccttgtgagactcatcctcaggaccctctgtcataaactgggatagctcaaattactcccaaagttcatattttatgaggctctggattcaactctttttccctccacttcacccatttctcctacctaactaaaaaacttcctctttggttatttaaaatatctttacttactgagtaaaaattttattaatgatatatttaaaataaaagaaaataaatgagatgatgaatggtatccaagacagaagttctctcagtctaaacagctttccatgacagactaaaaacccttacatggaaaaactgcctcaacgacagcaggaaagactttacaatgaaaaagaaacaaataaaaaggactttcttttccttctgtttccttgggttggttgttctttccaaacatgacttccatttactaaaagatggct

SEQ ID NO: 11664 - DNA, 2300 bp, Homo sapien
caaaaggagacttgttggtaaatgtggagtgaaggtaacaaacaacagcccagcagtggctgcttccatggagaagctgtggataagttgcttagagcagaaggtgcccagcctccctgtaatctgctgcacttccccccagttgcctggtggcgagtactctactgcctattcctgagacaaagagaaagtgtgttttggttgagaactgctcccagggctgcctgcgtagtgtgcttgccctctttccagctctaaagcagtcactggagaagaaggttgttgcaagtctcttgattaccaagtgagccatctctcccccttgcttcacactgaatttccagaagtctagttcgagcatttctttctctttagctgcctgagctgataggcaaagcagtgtaaagggaagaggagaaaagtaagaagcccggagccagagctgcacttggttctgccactctggtgtatcctagaaaccacggaactgtgttcatccaagcatgaagtgtttctctcccaacctccccccggctttttgtttttttcgggtgccctccactgccgccctttctcttggaccttcacattttcaggtatccaggagggaaccgctgtcgggacacagacagaaaatcaagggggaggagacgccggctgttgtatttgaatttcagacacagttcagatggctttgctccctgacagagcttctttgcccagggacaccagaagatgacagctcaaattggagtgtcctgtctggctgcttttcactgtccctggaatagtgtgacaccctcctctgccccttatatttctgccctgacttcttcaacattctcctgggcgtttatcctacccagctgctgttctgtagcagctactgcggctgtcatctcctcctcccagggctggggagcatatttgggagtggggtctttctatctcgcttaatcacaccttctctctttccattccctcctttttgctccgtgtagcctttcaaaatgacaaacctacccttcctgcagcagaagggagggtcctgcaagtttgggtggactaggtgaggagtggaggctcctccctccaacccggggttgggggtggcgacgggggggcgttggtgctggagggattagcagggagggcggaaaccacctcgccctccaaccgctgctgagagtttcagtgcaccggtaaccacgttaagaccgagaagccccaaccaagccgcggaaggctcgggaaccagcgagttgcatctaagaaaaagcgccccgatgttccttcaattccacctgctttggctcggcctcttagcaccccatccctgcaatccatcttagctttctttcttattatttttaaatcattattacctatacgttttgtttctttctgaagaggtacatcaggagggggaccacataggtggagggggtgtagtggggtgggaacggagcgtttgattagagatctcaggggagaagattggtctctccagatgctgatttccaaagcacttgacaatcaccggcagaagccgagagcgggcggcgccggcggcggcaccggcccgcgggcagctggagcccggcgctgagtcctgcccagcgcgacccggaccgacggacgcgcagagaccctgccgggacccgccctccagccggcgcccggggagccgccggccggctctacctcccgcccgggagccgggcagggcgagaaggcagcgcgagtggcggtggcgacccccgccggggttcctgcgacgagcggtgaccagcagcgcccgcagccgcggtcccgctctccactcggacgtggccaagcggcggcggccacgacgtccggcttcccgggatcgtccggctgcgccctgggcgcatctgcgcgcctggccccgcgccccgcggagagggcgatgggtcccggtcaggactgagccccccttcccctctccccagtcccgcctggcaccccctcctctgccccgagggcgagccacggtctgcgccgccgccttcccctccggtgcccccggctcgccgtcctcccgcgccctccctccccggacccgttcccggggccaccatggccgcggccatcgctagcggcttgatccgccagaagcggcaggcgcgggagcagcactgggaccggccgtctgccagcaggaggcggagcagccccagcaagaaccgcgggctctgcaacggcaacctggtggatatcttctccaaagtgcgcatcttcggcctcaagaagcgcaggttgcggcgccaaggtctgtg

SEQ ID NO: 11665 - DNA, 2300 bp, Homo sapien
catcgaacagacattgattgcacagcataaggagcacacaggaggcaaagctggtctgtcacatggcaattagtttgagacaccacacctgtattcccacagcacatctcattcccccatatctttggctaccacagaggaaagcagaatggatctgggcaatttattgtcttacttttgttgaggagagggagagcagcagaatgcatgctgttccactttttctgtgctgcagtgggcatattggtcattgctgggagcccttcaatgaaggacagtgacagaacaccaaaaagtgtcaggagcttccatgtggctgaaaaaccacattcaaaggacatcagccagtgttctagtgttaggctgtgacttgggcatgtaaatgggccaatgattccagttttgcatggaaaagacacatgattagtttttcagtgaggaagtagacaagttttactaatctgttgactgagaggttataatatactcatgatgaaatctctctggagcaagtcctgtgaaacagtgtaatgacttggcacaggatggctggattcgctttaaaaaattattattattcatgtttatttaggtccaaaggatccattatacttcagctttatatgctattaaatttagagatgacacaagtcaggacacatcttacatagttcctttcatgggacaaaagacctgatagaataaggtggcatttatgggcctttaatatcaacattacaaaagaaggggaattgcattttctttatatgtaagaaaataatgactaatttagagtaattctgaaatgaaatcatggcattattgtcaggattggtaaatcttttaagctattatcatttctgtcatgcagctgcattcaatgtcttaagtaggcaatgtgatattttcacaggaattatcaaataaactcagtatgttagcttctcagggactctggagctttgaatatagaggaggagaaggtccgatgaggggaaaaagaccttctgaaccccccgtggtcataattccagggaaagaaggagaagaaacttaaatatttattaactccttactggctgttaagatttttaatgtatttcattccctttaattttgaaagcaattctgtgagttgaatattatttcgatttttttgctaatgagaaaacaagctcagacaaggtgaacagaaactgacatattaaaacccctatcatgtaggtactgtgtaggaagttaagatgtattttctcatttaattatcaaaataagtattattttatgtacgtgaattaaaataggctagattatactttgttaacaaatagaccccgaatctcagtggcctagtaatataaaggtttatttttcgctcacacaaagtttactctgatgccaggggacttcccaagccagttcctcctgtggttccttggcagtcgaggccaagggaagggaattagcaccacgatgcggtcacactccctggaatgaggactccttgcttgttgccgcagggaaaagtaacaggagaagagtgcatgggttcttaaggcctcagcccggaacttaggcacgtcctcttccctcttagtccatcgtccggggtctagtcacatgggctcaccgcaccgtgggcaggctgggaattgcgagagagaagatggatagcagtgaccccaactgggtctgccatggcactgtcacccccattttaaaaatgagaagactgaagttcagagaggttagatcatgtatccttgatcacttccttggtgatctgtagacttagttcttgaaactagatctctctcagtccaaagaatctgtttttttgccctctactccatcttacccgacacacactccgagtaatttggtggtttggagttaggtgtggatctgtggtcgccagccttcaagatggctcctgtcatccttgcctcttggggttcatgcccttgttgttccctctgtcagtgaatagagctgacctgtgtaaccagtgtggtattgcagaagggacaaagtgtgacttctgggactaggtcataaaagacagtggtgttttcatgtgtcagtgctctctgttggatcacttgctctggggaaagccagctgccatcaggtggggacactagaggagccccagggagctcccatatggcaaggaactgagacctgctgccaacacccaggaccaatttgccatccatgagagtgggccgtctcgaaagtgggtgagtcaacccaggtcagccttcagatggctgagcccaggccaacatcttaacagc

SEQ ID NO: 11666 - DNA, 2300 bp, Homo sapien
aaagagaagcttgtctaagtctcctacttgctgttaaaagctacctcggcccctcaatataaacagtcagaagacagccaaccatgtctcaagaagatggaagtgttctgttggcaaatggccagaagactagctcaccagaactgtccaaatcaaaaacctgtaatcagaaaattccagactcctccttcaacttccttcccaaattcaaactggccactaagatggatggacttcacttcctctctagtgcctgtcactgccttattctggaccgctcaccactgctcactgctcttcctccctggtctttccaccttcaaccttgcccaacccagagctgttttccacgctgtagtcataatggttgtctaaagggtagatatgatcatgacacagaagagagctcacgatctgtgcctcactaccttgcaaccccactcactacctgccactccctagaaacaccctctatttctcagttgtacttgatattctcggtctgcaccacaatctttgacgcccccaaagcttaaagtatgcttctttctcttccttgacagcctaaccagtgcctttaccacgtggctaactcttagtcattcttcatgactcagtctgagttttattccctccagaaacctttccatgcccctcttccttggccctatagcaccttggtccacctacacagaattgttcaccacatcataattgatcctgtcttttgtctttcctgctaattccttgaaggaagaactcttcttcacccctgtatctccagcatcaacagttcaaacacagcagcactttttaagtgtttactaagttttgttttttgtttttttgagattgtagttactgaaaaagtgataaaaagcacgtggacctaaaagaaataattcataaatttcagagttgtaataaactctgaaaataatctttttcaacttcttaatttacaaatgaggtttataaaaaagatttaagaaagatttttcccaatagcatggatatgagagaaggaaaaataaactagtgaagataccctcccctaccccgaaaatcttaaaactgtctaaggaaaaggtatctggggaatataatggataaatggaatgccatctatttcagcaccaaccacacaattctatgaagcgcatgaggagctcttcctagtgtcaccagtaaaatacgcgtttcttcacccaaggctcaaagcttctacctgtgtttgtgcctacaattccaaaactggctcttggaacagtcgcttcctccactgggaaggagttgccacacctgtaaaaggaacaggttgtttgtgatcgctaaggtcaacctcttatctctgatggtctctgaatttagagtacaatttaaatatatagttaacatagtccgggagagatacagggaaggggtgagggaagtttacttacaatcaggactgggtgtgaacgttatgggaacctagaatattagagctggggctgatctgggattactctaatcaatatccttcttgtagtagccgaggggactgaagcccagaaaacttcaggacccgcccagggtctcccagtagctagtgtgtaagctgagaccagaacttggctcgttctctcccagtcctgagcttgggcagaatcaccagcaacgccagctcccttccctttccttcagatgggtctcgggtccagagctggcgcccgctagcgggaggccagaccgggagggccaaggcagccacctgtggctttcccatccctcaggtccagcagtgcacatggggtgcccccgcgtcaacgccggaggagtgaccttgcaaacccgcgccccgcgggcggcagagccggccgctcactgcccggtccccggccaccacggaagagcgaagatctctgccagggcaggagccctagccccgacccgcgccccaagtctctcccgcgcggcggcttccggccgccatggtttccatagcaacaacagcacaagctgccgggtcccagagacgccctagggtcagaggtcatctccgtggcaacggaaacttcccgcgctacggcggctccaacgggccgcttccgccgcattgcgtagcgaagcccccggcgagccgaggctgggagcgcggtgatggccggtccccgtgagcagagggcagcggcggcgggaccggggactctgggccaatgggtaaagccaggaggaagcccgtgcctggcccgttgggctccctcctcctcagagccgaagcagtccacactcggaacccagcttcacccggattaccg

SEQ ID NO: 11667 - DNA, 2300 bp, Homo sapien
tctatactatacttcacgtttcctacaatgaaccattcctttaaaatgttcgaacccagtcttccatgttttagcaacacaaacattggagacttttgtgaagtgtttttatacatatggtaacaaggacaacaaccaatgttttcactcctttgcacattttggcatcatacctcactcaaattgactcatacgccttctataaataccacgtagatgtctcaaaatggaagcatttattcaaaatagtgtcttttgccttaaggggaaacagttgggctgtttgaacagtctaacaggagctcttctcttcagtgttaaacaagtcattgcactgtgcctatttttaataaaacctttgagcccaactcagtattacctccaggagggactgtggaggtaatactatttacctcctgtaaatagggacagggaaacacctatttacacatctgcctgctcactgccatagtctgtgtggtgttccttaggacttgtgtaccaggtacaaggtttagttatgtgttgaacccgggtactgaagggcatggagttttctgagggagacttctcagctccccgtatacctctagagatgcaatagctcttttgtatcaagaccaactatgtcctgatgttttccctgtgtagttctctagctgccactattttttttactttggtcagaatgtaaaaggtaggatgatgaagagaagggaacaaaaggagggattcttagggacttcctaaacttgaaggcaaaaaggatgaatgtcgcagacatgttttatagggaacagtgaagttcttgtttgattagtctggtaacatcatgtaagaaagtcacccaacaactgctgggcaccactgcctttgtcactgtctcttgacaaaaactctgttcacgacacatggtaggttttcaatacactttaataaaatagtgaaaaataggtatctctaggatagtgaactatgggactacaaagggcaggacgatacattttacttggttaaattcgcttaatgcttactcctttctcaaagcgccaaccaagaatttggctactaaataaagaaaaaagctgttagtggctctttatccgccacgatagggtgctctgaaacccggtcctgcagacattcccttggcccacattttatagcttccttctcagtctcaaggcctgtagtctactgttcacactcgagcctctcgcaaaatacacaagctcaaaagctcatggcgttctccccatctggcattctcggccttagaatagcaaacgttagggcaccattaggttcatagttgccagacccttcattttcttttttaatctttaattttcttcttaacaaggaagacattccgcaaaaaataaactccctcttttgagctcctttctctgaagatggtaactggaactctcattagtaaagaacctcgagttccagttgctttggacggagtttctcgcttagtattttgctctttggcagtttgaaaagcagtaatcttccaacttcgcagctccctgcactcgcgcctaccaccctgatctatttggctttctcctttttggagccactttaaaaggtgcagggtgctgggccgctgtggcctcgggctgagaggcggggagttggtgtccgggaccagaaagtttggcagaagccacggctctgggcccaggccccgggcttccagagaagtgtgtcattatttgttttctgcaaagccgcgagcgggcccacgctgcagctctgcctccaggcgtggaacccctcggtaatccgggtgaagctgggttccgagtgtggactgcttcggctctgaggaggagggagcccaacgggccaggcacgggcttcctcctggctttacccattggcccagagtccccggtcccgccgccgctgccctctgctcacggggaccggccatcaccgcgctcccagcctcggctcgccgggggcttcgctacgcaatgcggcggaagcggcccgttggagccgccgtagcgcgggaagtttccgttgccacggagatgacctctgaccctagggcgtctctgggacccggcagcttgtgctgttgttgctatggaaaccatggcggccggaagccgccgcgcgggagagacttggggcgcgggtcggggctagggctcctgccctggcagagatcttcgctcttccgtggtggccggggaccgggcagtgagcggccggctctgccgcccgcggggcgcgggtttgcaaggtcactcctccggcgttgacgcgggggcacccca

SEQ ID NO: 11668 - DNA, 2300 bp, Homo sapien
cttacctagaattgactgatgtttcccagaaggtcaggatatcaatgctaattttagcatcctaactaatagaaaactctaaaagtggtaaagatgtttattccattttttgttttttgacaactgataatcaaggagttagtcgattttctttaaatcaacttttaaaatcaaatcagtcttttccatcaatcctcaactatataaatcgacatctaagtttatataccatgcagtagaggcagtagttttaatttttttgaaattatgaagaaacttctaaatatatatatttaaattagagttaaaatttttatgtcagtttacctataaaaatagaaataagctggcataagtttaattcatttacctacagagaatgggagtggtcagttttacttctttaaaatccttatctcaaaaatatgatgaaatgctaagttacttttgagtagcgggtactctggagtttgttatattattttttgtaattgtttgtatcactttgcacattgtattttcctccaagtagaataaaataaaataacagcttggtctgaaatcctttgatttttctgggcaagtaggaagctgggttatatgttggtgaaaatagaaaacttgcctgttttgttaggttggattagtgtaggtgagatgtgcagatgagaagtaaatgagggtgaatttaatgttagctcaattaatgagtgcagaaacatgcaaagaattagggcgtgatttaagcagggactttctgcacaattatttaaaggtaacgtgttgtctataaaaggcatacattttctcatgtatacatgaccctccccacaaaagtacagtttgccacctagattttagtggttgtccttttaagaggcggtttctggtaatatctgttatatatctagtttacatttttcaaacagcccctcaagtaggagtccaataataagaattaaaggaacttgagttttccttaatgttttaggtgcattatatgctgcttttgaaaatgtgaaggtggaactgattttggctgggtggagaagcattaaacccatttttctctttatttcccccccacctccaacctcccaacatgcattttctaaggtttactcattataatttttaatttttacttttcaaaattcacttttaatagaaggctgtcagattggctccaagagcaaacagcaggctgactggcgcttggcggaggagggagagggtcgcgcgttgggtctgggtttggggctggggctggagctggcgggtggggagacttcaggaggggccctagcagagagactgcagtgacactgccctccctgggctggttgaagcatctcactggtgacgggtctgaaagcacgtggctacgtcatggaaagccagtcttttcaatgcaaacttcaactcctcctcctcctccctctaatgcctgtaactcacatccgaggctgggcgaggaatccggaggggagattttcctcatgctcacggttgttggaaactggaagagtgagaggaaggaggaaggggatttgtggcgctctctacctactacaagactgacaaggggagggggcacctaaatttgcatcttttcttcgtggtgattgagaactgcaggttcaaaccgatcccactgagcactggcgattgattataaaaaaaaatcgacactgggagaagggaggctctgtcttcggctgtcagactcaatctcggaggtggtattggtgtgtgagtgtgtgtggtggtgtttttttttctttttttttcttttttctttctttctttcctctttttttttttttccttctctcctaggggctacacaatggcagtcttctctcagtaagatgaatcctgctttgccttctgcagatccacccatcctcatagcgatcaagtaaaaaggctatggttttctctttggggatcttttgtgcattactgttctccctgattagttttgatctcagttgggatctctttgcttttctgtttggcttcatgctgaaaaaggattttttctccaaccctttggtaataatccggtggtgatcgaggggggataaatcattcaccctggccgaaaacaaacaatcactgagaagtctcaaagaaatataccacgtgaggggaaaaaactgggagaagatccggaatattatcgtttttcctatggtaaaaccggtgcccctcttcaggagaactgatttcaaattattattatgcaaccacaaggatctcttctttctcagggtgtctaagctgctggattgctt

SEQ ID NO: 11669 - DNA, 2300 bp, Homo sapien
cggaggttacagttacccgagattgtgacattgcactccagcctgggccacagagtgagactctgtgtcaaaaaagaaaaagaaaaggaaaggaaaagaaaaatctaaagaacattgttacggcagtctaataaaaagtctgccacctaggtttcataataaactgttcattccccatttattcattgggtgatactctggcaaagtcatgcacatggtgtggtagaacatactggggagagattgtgagaagacaaatcccgtgttttcatcaacctgttttgtaatccatgacagtcagttaactttgtttcttcatctataaaatgaagtgattggactatggttcacttgaaactgggagccattctgttctatcactataagctctatactgaatgtcttctgcgagtttgttattctgttttcgtctgtgttaatttgaaattcttttctagaggtaatgtaaacagttgggaataagaagaaaaacattcaacttttctttttcctctgcactaaagagaacatgcttgtgtaagacttatggactgaataaatgatcaaggaatcagctgaaaccattgcacagccataagaataatttttgagacttaatggaggatctctgaaattctgtgggttggaaaccgcatgcataaggctttcctttataccaggtattcttaacttggtgtccatagacagaatccaaggggttcaaaaacttccgtagaaaaaagatacaaacctcttaatttttttcacatcaagtatgaatgtaggcaaaaaccagggtagttatgctgttatgtcaccaataaaaatcagttcatcgtagtgcagttttcaccgctatctccaaataattatattcttcactattttgaagttatggtagtttattagccttggccctagctcctgttatttaatgcaaaagaagtacacctgtaactatacacacacacgtaaagctcctgctatataacaaaattgcctttagtatttttgataactgcatttaaacataatttatttcctgggtaatcctatctatttcattgtatgcattttaaaacactgcttgagaaataggcctcaccagattgccaaaggggtcttcggcacaataaaaggctaagattaccctggcatgagcatagacataaagatcattagaggaccactatgcagcttgcagcaactgacggcaggcactgtgaatctggaaaactgaaaattatggctctataattgagtggacagccgtaaggagcaatcagaaacttcagtgtaagaggaaaaaaaaagatgtttttcagaaatcccggaagctaaggatcagcagaggataggaggggcccatttcagtctcgtgctttgttactggctacaaaggcgacggaatgaccaacaacccacttcctgttgactgaaactattgcctgtctccaccctattgctccccctcaccacctcacccccatcaaaggggcataacaacacaggggaacccaaagtctacaccccttaacctacgaccttccaaaatcatgtccggagctttcgccgacaccgcagactccttagcggctaagcgtgagtgcgccggctcccttgcctcgggtcagcagcaccccggggctggggctcctgcagcagccgcaccaaaaagtttcatccacaaccttaagtttggaaactatcgtttgccaagcgaagggttcccattattcctggctggcggtccatctccttgcccgtctctcggggagtgattcggtccgggacaccaggactctgcttggaggcctgctgttgcctaaaaaccccaagcgcgggcctcttcaaggccccaggttcgagatccgaaccctccagtaatgtcctcagactcctcccccttcactgcagcccgggcaatactcgggcctagctcctgagagcggcgccgttggcttacgtagcagcacgtgattggccaccgctccctggcaggccgggattggtggaagacgggccgaccccgcccctcgcccccgcctccggcccgaggccgcacgggtgtcctcgcgctgctagtccgcgcgcagcctggcagtttgccgcttcctcgtcctccatcctgcgtccatggccaccgctgcgactgaggagcccttcccttttcacggtctcctgccgaagaaggagaccggagccgcctccttcctctgccgctacccggagtatgatgggcggggggtgctcatcgcagtcctggacacgggggtcgacccgggggctccgggcatgca

SEQ ID NO: 11670 - DNA, 2300 bp, Homo sapien
atatatatatatatatatatatatatatatatatataaaagggaccacatatttaataagctttctggtgaagacgtgctacgtcattcaacattttcatgatttctttttaaacagaaagaattacagtgggaaaatcagtaatgtcctaatgtatacttgttaattagtagtgatatggaactggggaatcaccattctataacagcttatcctttattaaaatgtcttctgaaatgtccatattattacataatagtaaataatttgtccaaacaaaatacagatactaggaatcatctttctggagaaagatctaaagatcagtatttctcaactgggtgtcttgaccgtttgggggccacgtaatgggataaaaacagcatttttttaaaataggaaatgtcagttcatcagactcataaaattgtaatttcattttatgtattaatgtgtatatctttgggacattgtaaaaatagtttgcaagttactgctttagagaacaaggaataggtattctaggaatctattaaaaatagaaggcacttatcacgaaggccatagccaattatttttcttcttatttttgttgaccttttgcaagtttgggtagattttgtttgaattaggttgtatagttaggaaaacactgaatgaataggaaggcatttacttggtgattagtaaagcttcatttgaagaacttggcagctagagttatctctgctcgttcctttctgtcttcaatgcaagtacacaataaagctcttattttagaaataattagtattacagttttatagtcacattacaaagaaaaaaatacatgtataatttccggttgattaagataaatagcattttgtatataattcttaatagattttttcctctgggtttcagtgacttgatttgaaacggtatgtcaccctttttaaaattccttgtaaaatgcaataatatattttctgtttgtttgtatgtttttttaagagacagtctcactctacactccaggctagagtacagtggcatgatcgtagctcactgttgcctccagctcctgggctcaagtgatcctcccacctcagcctccctagagtggctgggactacaggcgtgtgccactatgcctggctaatttttactttttatagagagaggtcttactacgtatgttgcccaaggtggtctaaaactcccggcctcggacgatcctcctggctcagcctcccaaaatgctgaaattacagacatgagccactgcacccagcctgaatattgtcacttttaacagatcataaatagcattcaaatatgatataaattttaaaaatagtttatgtgaagcttttaaatttttgagtattcagttactaacaattttaagaactaaagaaattgccattttgaaccacaatttaacttatagtgcgttgtgttgcccaaagagtagttattggtttggcaggtgagtttgactttctgaataacactgttcagtttgaacactgttgaaatacttcatgaatagctggaatgccttttttctaaacttaacattaaatatatactgtagagaaatcttcatagcatttctgctctgaagattcttcttgactgtctttttaaaccataatcaagatttctcaagaataaaggtacaaaattatttctattaaattggtactatgttaaccccttgagaattgtcataaaaatattaatatttattggcacaaagaagaaattattgtgatacagcaagtgaaaatagcgccatttttcttttgattagaaattaaaactaccaggtttataatttttactaataaaaaattccctgtcctgaaacatcttgtaggattacactaacatttataattgttaatttgatatatttaacatgtaaaatgctgattacaaaaccttgatttttgtttcactaagataattcatcataaactttctttgtctctttttttgcttttaatgatagtctaaggttactaggatatcttttttcccacttttgataggtctttgttagaattaattgtaaatcctaaattaattttaatagattgttcattttaaattcaattctcttttctcttctgtactaaaacaatagcaaatacctctgagtctgaggaggaagtgcctcacaacacataggctgcctgcctaagagcagcatacctctctccctgatacggtgaggaggtgtgggaagctcagggagaaagactggagaccactcttctagcacactgggtggcagagaagctcaattc

SEQ ID NO: 11671 - DNA, 2300 bp, Homo sapien
agaagatcagctcagattttgcgcttaccttggctttgctcagggcagtgcctacccagagagtgaacctcaagaaggagaggagcaggacaggcagctgggtcctgaaagagctagcccaagcaatagacctgtttccttttcccagtctcatgtttcacgtgaggcctttgtttacaggttctggccccctgacctcagagggagaatgacagccagtggctacaaatggatttatatggttatctgacatcaaagtggttttctgtgctttaaatgagtcagtgtggagataggattattattttgtgttggaatactattagaactacaaccatagttcctgttgtttactgttacatcattttataccccgaaattgtgttggtgaaaatatttaaaatgggaatatttgtgtcgtatatgctcctaaaaatcctatttgcgggaggtgaggacttgcagtattatttttttactcaaccagagtaaagctttttcagtgaatgtctttttgggaacatttgtttcagttttacaaactttgttaattaaaatgaatatagtattttaatttagcaccattttaaatgcaaacctgaagatagaatttgaggaactgacttaataaataacgacttaattaaggacacccagttactgtgccaaaaacaaatctagcaggtatagcatgtgatttcatttcccaaataatgctttacctttcacaagtcaagacttatctgtgaataaaataaatacagttactctccatttctctgctgctgtcttcaaagcaaaacttctcaaaagaatcacagacatgttgacttccattctcttttcatctctgtctcctccagcctggactgctccactgtcccctgacactgttcttgtccgggggggtcagtaggctctgtgctgccgggttttcagttccttccttcttcgtcgtacactgcctctcagctaaatgggcagttgatcattttctctttcttcttggtggtttttcctcaaggcttccgtgatcccaggtgctttttgctttccttttctcactcacagagctgctttttccattcactatccctaactgaccttattcatccacatatttttcaacattgtcagcaacacattggttctacctttaaagaagatctcaaatctattcattttctcccatttctgcgacccatttttagtctaaggcagtgtagggtttcctaggtttgtttcctaacttgttgtcttcttgcctccacctttaccctctataatctattttccaaatagaatacaaaccaaaattttaatccatacaggaaccagagtcattaaacaaaaagcagaaatctttaatcatgtcactgtcttttgtaaaactcttctggtatgcttcttagtgcacttggaatacaatatatagtattttttcttttcttttttaaaccatattctgtcaagccctacttaagttggctgctgcctgctttctcagaagatacagctgtgcttgctttatacccagctcaggtctttacacttgctcatctgctccttgttcattgagggtcgtttgcgtaagatattacctcttcagagtggctttctataaccactttgtgtccatcggctccccctcgttacctgacagtcattctatccttttctgttttgttttcttcctatcagatgtcagcatctggtctgttctttacctattctagcattacctggcacatcgcggggactcagtaagtcctgttggttggactcagtaagtcctgttggttgaatgaaggcataagcgtccccttaaatttacttagagaatcttttcttagtttgaacttatttcatccccttctcagatttaaaatgtgaaaggtcagtgtacttttgtcatctgtctgccaagtaaagccaagaataccaaatatactcaaatggagaaaagtatgttcttatctcttttattttaaaggagatatttgaagtatcagtactcagcatcagtttgtgagaaaattactgtgaccagagattggaatttttggtgtattgtgacccttagaatctagaatacagtgtagtacaacttaggtgcagcccatgttacatgacatgtagctgttgaagatgattttgatgtatgtaaaattaagcatattaatctaagaatctctctccacattcgtaggatgtaatccctgttcattactacttaatacctccaccaacaaagactaagaatggcagcaaagataaggaaaaagattcagaaaaagaga

SEQ ID NO: 11672 - DNA, 2300 bp, Homo sapien
atgtatatcttaaagcagctatctaaaagatggctttgaagaaagtattaaaaaggaactgttttttaaattatttatttatttatttttattatactttaatttctggggtacacatgcagaatgtgcaggtttgttacataggtatacacgtgccatggtggtttgttgcacccatcaacccatcatctacattaggtatttctcctaatgctctccgtcccctaagtcccccaccccctgacaggcccaggtgtgtgatgttcccctccctgtgtccatgtgttctcattgttcgactcccacttatgagtgagaacatgtggtgtttggttttctgttcctgtgttagtttgctgagaatgatggtttccagcttcatccatgtccctgcaaaggacatgaactcatcctaaaaaggaactcttaataggatgctaggttaaagaggtacatgtttctatcaagtcacattttcagtaaaatagctttaaaaaagtttatacaaaaaaaataagcctagaagttgatacaaaaaaaaaagttggtgaggtttctttctctagatagtagaattaaaggagatcaacattttttccttcgtcctttgcttcattttaaagcttgtagaatgaacgcatatgtttgtctatgtgtgtgtctacatgcatataaatatacacacatatattcacgtacattgcaatcagtttttaaaaggtttttgtagaattgtactgatgactatctttttgctatttctcatagggactgatgacacctggaagaaataagttgcagagatgcagaatgcaatcatagaactagatgcatttggggaataagaaagcattagaacgatagagctggaacaaatgccggcttatccccagtcatttaagaaagtgggaaaggtgatttacatgggaccacagcacatctagatgaacatcctgagtgaaaagaaactgacataaagaacacaaaatagtgacaccagagaaacgagtaccgagggtgggtacaaaaacaaaaatgggcttttatatctactcaggttaaaacaccattcatccaactccctggttgaatgtagcctatcacaagtgattctttaattcccatttgtctgaggctttactttgtgtgacctatattctattttaagggtttctgagcttcacaaatgagcacatgatttttctccttcccttttgactatcccttatttcagttaaataaatcacaatggcttactttttcttggaagagtttttctgatttcctcttccctctgctctaaatcccccagattcaacgttaagcctttgactcccgtcccttctcatggatagatgctctcctttcttcctccccaaagcattcccttcctcttggtagatccttgtgttctttctggctgcctggatacgggtcctaggcagaggctgggtgggcatgtcctccctgtggctactggagtttggcaaatgagcacaaaatttgcaagtctgtgcaactgtccaacacccacttctttgaaaagtgaactggaagtctaacgtttcgaaccacatcgcagcaactggatgccacaggggcagcctctgttctgttccagtgatattcctgaaacttttgaagggaattccattgaatgttgctaggactgtgcgtgtgtgtgtgtgtgtgtgtgtgtgtgtgagagagagagagagagagagagagagaaagagagagaattctagcaaagtaatgtgtctatgaggactggtagataatgctaccctaaataacttgggcttccactggctggattttgttcatcaaatgctaatcctttcaggtgtagacctatataaaacactggggattaaagagtgcacagaagcctcacatctcttctgctgcataaggtaaagatacgtgtaacaattcaaaattattttgggcatactaacaaggagtcatttccaattctgtattaattacgaacatgcgatgtagatcatagatgtgctgaactagtaacagtcagtcagtagattatagtcgttcttttgtagattgcttttcaatgcacagctgtctttgggacagccggctatggacgtgtgtctgagctccgcgcagcagcctgggcgccggggggaaggactcagctccccgggtggctggttagaggctgagaagaagggggctccgcagaaagacagcaccgggggagtcctagaaggtaacctccttcttcatcacttcaacagttttcctcagttgttttcctggcgatgacatcttca

SEQ ID NO: 11673 - DNA, 2300 bp, Homo sapien
ttgatgggtgcagcaaaccaccatggcacatatatatctaggtaacaaacatgcacattctgcacatgtatcctggaacttaaagtaaaataaaaaaaattttaaaataaagttactataaatatccatgtgcagggtttttgtggacataaacttagggttccataagttttcagctcatttaggtaagtatcaaaaaccttgtttgctggattgtataataagagtacgtttatttagtttggtaagaaaccactgagctgggtcgggcgcagtggctctcgcctgtaatcccagcactttgggaggccgaggagggtggatcacaaggtcaggagattgagaccatcctggccaacatggtgaaaccccgtctctactaaaaacaccaaaaattagccaggtgtggtggtgggcacctgtaatcccagctactcaggaggctgagacaggagaatcgcttgaacccgggaggtggaggttgcagtgagttgagatcacaccattgcactccagcctgggcaacaagagcaaaactctgtctcaaaaaaaaaaaaaaagaagaaatcgccaaactgtcttccaaagttgctataaccatttttgcattctcaccagcaatgaaagagacttcctattgctttgtatcctcaccagcatttggtattgtcagtgttctggcttttggccattctaataggtatatagtggtgtcttgttttaatttgcattttcctgatgacatatgatgttgagcatcttttcatctgcttatttgccatctgtgtatcttgtttggggaggtttctgttcagatcttttgtccatttttgattgagttattcatttgcttatcgttgggttttaagaggttttttttgcatattttggataaaaatcctttatcagatatgtcttttgcaaatatattctcccagtctgtgatgtgtcttattctcttggtggtgtcttttgcagagcagaagtttaagctttaatgaagtccaggatatcaatgttttctttcatggctggtttgtttttatttgactcattgttttccttctcactgcccttgatgactaatagggacctctcctccactttctgtgccccagtattcattatgccatttctatggatcctacacaattgccatgggcatcaaatgagatggtgtttatagatggggtttttaaactgaaaagcagcagtacacctatcaggtgacattactagtctattgacagtacacacacacacacacacacacacacacacacaccacatgcacatatatatccacatgcttttatttctttcttctttggccagtggattgtattcattataccaattaaaaagagaccatcattcttttttttaaaaaaaaaggaaaaatgtaataaagagaccaatttttagtcaggtgcagtagtcacatctataatcccaaagacttgggaggttgaggcggaagaatcatttcagcccaggagatcaaggctgcaatgagccatgattgcgccactgcaaaccaggctgggcaacagcgcaagcaaaatcccaacctgttaaaaagagagaagacagagagagaccatttttttttttttttttgtattacagttgacaatagcatttgaaatctaagagataagaagctgtaaatgtcatctttcattccagagcttttagaaggttacctttctctgtctcagggagaagtgtatctatttcagtgccctctgtctctggaagggacaaaaattcttgcatgacccaggttcctcatgccacttcttgatctagctgtgcacttccttgtgaaatctagttttagcaagaagcttgctaagtcagtttagccagaacccttgatatctgatcatcttccatcttcctcatcttcagggtaagattcctcatcctccaccatcccctaggtgatgtctcataccccgacctgtcttcagcaagaatcctgttaggtcggtttagccagaatcctccttacccagatgttacctcatagtaattttctatccactgaccccctccctgctccttgactataagttcttacttgcccctgctgtggtagaacttgaccctgtcaacttgaaataatcgaaagaattagaacctagcttgaaagaagttatttaagctttgaaaagctgagaatatccatctgggaaacacagactccagagaaatgaggtgagcgctctgacgttaaaaattaagcttttgcttatataggcagaaaacagagaagtttagttggattgtaacat

SEQ ID NO: 11674 - DNA, 2300 bp, Homo sapien
tgaacatcagtcaacaaggggaaaaggcacaagaaggtgaggtggaaatagttgtacttctgagcaaaacttgtccttttgtcacttcttcagctttccttgagttagactcaataaaagaagaggaaggtgaaccacgaataacaagaagctttatgccacatcttgagatccaggaatcattgccttcaaggcaaacagcacctacaaagccaacagagagccttgtaaagaaagagaaacaactccttccacagaaagaagacagagtacaaacagtatccatgcatggcctgatgcaccccaatggtgccgttttcaaggcaaagacatcagcacctccacaagtgttcagcatcactgagcacagtcctctgagtaagagaaaggagccacagtggggcatgaaagagagagcaggacagaagcaggacaggacaggacgtcctcatgtgattctgacaaaaactcatccattcatgccttctctctctcaccatagattctctccttcacaaccaaagcttcctatatcatcaggtgcaggaaaaagcagacttgcaaattcaaatgaaggtattagctcacataaagtaatactaaaagcaaaccaacaaatgccatataaagaggcaaaggacagagtaaaaatagaaggcagggaaggtagaatactccccaaaaggatacatttgagggcagaggcactcccacttgcacttctatgcaatggaaagaactactctttgcacattgaagagcaaggggaaggagtacaggaaagcaaaaaggaacctggagtggttccgaggaaatctgcttcattccctcctcctccattttacctgaattgtgacactagaaggaatgaaaaggaaggcacattaggaaaaacacaattcagttttccaccactaaagattcaggattcatcagattcaggcaaaaaagcatatactgagtcactgcatggttacacattaagcaactcaaaaggaccagtgcaacccacagcacagggagaagagaaaggtggactcagaatagatatggaagacaaaatgctccccaaatgtacagacctgaaagcaaagcaattactactctcagatatactcaataccaaaaaattgcagtggaaaagtaaagaacaaaagagaaagattcaggaagataaaaataaacaagttaaaggactgccaagcattaatacttctttacttactccaccatatcttaagtttgatacaacagaaggacaggagaacgtgataagaattgcaaaagtgtctctcccacagtcacggtccaaggaatcatcagatgcagggagaatagcatgtccagaagcaacccatggagaactttcaagtgatgtaaagcaattaaaagcacacctgctacagaaagaagagaaggatagagaaaaagttgcggatatgaccagtgtactggatcccaacaaaatgtatttgaaggcaaagaaatcgcctgtcttacatacgcacagtttcagtgatcttcagtggaaaactagagagcaagaggaggaaaaggtccagaaagttaaaagtgggccaggtgtcatgttgtctaagagtccttctagatcctccccacttcaccttaatgtgaatacagggtttcaggaggaaagcataccaatattaacaagaccctcttttcccctagtaaaactccaggtatcaccagatactgagggaggcacatgtataaggccaattgctggtgatattttaatctatctacaaaaaggaaaacatgtgtcacagaacaaggaagaggatgacgtgcaaatagtaagcatcttaatattccccaaacatcaggaagagaaggtgcaggaatgtgaaggtgaaccaggtgtggttctgaccaaatctacttcattgccatctctatctcaactagaattggataaagaaacacatttaggtaatgaaatgctaagacttaaaagacctattttgcggagaatatcacacataggggagactgtacatagagagtccgtcgttggtgatatcccaaaagatgttaaaaatgaaaagcaacatatccctcaaaaagaagagaggaaccaaaaaaaaataatcgatatgagaggcacagatataactttgaagtcaaagaagtcacctcgttcctgtatgctccacagaacagaactgcatgtgaacattggagggcaaggacgaaaggaacatgaaggtcaagataaaccaccaggtatgattcaaagaaaaatgtgcatactcttttccaaacctttgccatct

SEQ ID NO: 11675 - DNA, 2300 bp, Homo sapien
atacacacataaatactatatataatatttatactatatatgtatacatagtatttatactatatatagtacggatatatattatatgtgtgtatatatacacatatgtatatgtgtgtgtgtgtatgtatatatatatatatatagagagagagagagagagagacggagtctcgctctgttgcccagcctggagtgcagtggtgcgctcttctcggctttgcaacctctgcctccagggttcaagcaattctcctgcctcagctcccgagtagctgggactacaggtgcctgccactacgcctgagtaatttttgtgtttttggtagatgccgggtttcaccgtgttggccaggctggtctccaactcctgacctcaggtgatccacccgccttggtctcccaaagtgctgggattacaggcatgcgccagggcacccggccactggctagctatatttatacctactccttcatcgtacgctaaataaggggtgggttattcacgaattttctagaaaaggggtggggagttccccggaactgagaattcttccgtttttaaaccatataaggtaaggtctgggcattgccatggcattcgtaaactgtcagagtgctggtggaagtgttgtagcatgttcatgtattataattagtgtataatgagcagtgagggcactagaggtcactttggtcaccatcctggttttagctggcttgggcctgtttctttagggcagttttggccgtttttttagggcatcctgttctgaccagatcctgttttgctcagcaggtggtgatcagtgcttggaaagtcctgctgatctcctacctcaactataactgtgcaaatacttttcagggggataatggaaatgttcttaaattatagtgatggttgcaaatggttttaaaattactgaaaatgattgaatggtacacttcaaatgagtgaattttatggcatgtaaagaaatgttttttaaaaacacagctaaaaaattaggagacaaagaagtattaagactttgtaatttggggaaacacttgtgataaatgacagcgactatgtggttttgtggaatgtatttccttgtatgtaccgtgacagaaaagagggcaggtgccaactgcactgggcttggggaagattcattcatttaagaaatttttttttttctgagcattattcatacacaagaggttcacggttaaaacaaaaatttacaaaaagcaaccctttcttcacctgggagcttatagcgcagtgaggagacacagatacatccatagctcgtgaggtgaccggggaaggacaggaagagcggggaggtgatcaggggaggcctcgctgtgaaaaccacgcgccctgtcgaccccgaggagacgcggcccacgctgggagggagcagccaggacaaaagccggtcgtcgtggggtcccgcctggtgagtgggggtgaggacagcgaagtgtgggctgccctgggcttccagggaaaggagccagatggagaggggagatgtgggggaccgatcgcgtgcaacagcctaggccactgccggccgctggctgtggcaatgagcgcggagcctttggaagatccaggggacaggcttccacagcatccacgtggctgcggcgtcgccgacaaggcccaggcgggggcaagatggtacgaagcgaccatttaagtgattgttacaatcatccccgcaaagataacagggggcttgaccccatgtagaagtgtgcgaagcggctggtttctgtcagcgtttgaccttaacgggagtaacgaatcgactatgggtgtgaggaagactggtcagagctgatcgcgcctcggaatggagtggtggctgggatgcggaaaggccccgagtggagcaatcctgggtgaggcggaaacgggggctgactttccagccgtccgcgtgctactgaggcggcggccaccctggcaccttcccctagctccgctagtccgcgcgtacagccctgggatgtggcgggctgggagacccacgctcccggcgtgctctgcggcccggcccgcgcacccggggggcgtggcctgcgcgcgcgtgcgtcgtagccgaacgctgtggcggggcaggcgaggcggtcgcttcgagcgcgctagtcagctccctgaagggagtgacggcggttgggtgcccgcggccacttttgccttcccgggtaagtgcggcggtggcggttggcgccgccggctgacgggcggcttcctgggagacggggagagcacccggcaggcccgcctgagacgt

SEQ ID NO: 11676 - DNA, 2300 bp, Homo sapien
ttgctcctctggtgctgagactttcacctggaagaccttttcgcctggagaagatgtgaatctgtgatgaaaaggcaatgggggagataaacagattttaacgaacaaacacacaaaggttatgctcttcagtctggaaacttgattattctcctccacattcttcctctaacatatgattgcttcttcttctcttatgcttttagtaccagaatgaatatgatggatcagagatttaaaaaaatgaggatgacaatggccaagataacatgaaacagtttcattaaacagtcacaatggagtatgttaagactattaatctatataagcacagaacatactcatgcattccatatggaaaaatattcttactaacttatttcatgctatcacatctggatatttgtgatcaaatgatgctcccaaagataatgatcttattttgaaaaatctctgccaatgaatctttacaatatcagtattataaatcacgctcaggcctggcactgtggcccatgcctactatctcaacatcttgggaggccaaggagggaagactgcttgaggccaggagttcgagatcagcctgggcaacaaggtgagatcctgtctctacaaataataataataataataaaaaacaaatagccaggcgaggtggcacacgcctgtagtcccaactactagggaggctgaggtgggaggatagcttcagcctgggaggttgagggtacagtgagctgtgattgcaccactgcactccagactaggctaggaagtgaaaccctgtcttaaaaaaaaaaaactcacgctcagccatgggcaaaagcaaagtagtaggtagtgtatcatcttttgccaaataacaaaatttacaacctgccttttacttgacaaccttttattccagtatttttttctgtatgaaatacacacagtcagcatccaccaataatagagacaatcatttcagaagtataggaattataaaaataagttttaagtatgatgttaaagtattaaattcattggaacaaaatatttgttacaatcatataggagattaatacttcgatactttccttccgaactctgaagtttcaaatagtacttcatttttctttttcagtttcaaaacatgcttacctgcagatgtctccttgaaaattgagggccgcaccagagaaagatgaagcccatcaagtctctaacaactaggtttaaatcccttataatagcttatgcgaaaagtagttagaaacagtatttccagcaaagtggagggactttgtcttgccctgataatgtgggaatctgaatcaaaattgctaggagattattttatatgttatatacaatacattatattgcatatattataattcggaacaatttctacagctacagagaaaaatgggtaaccaaatatcctggaatataaactgctgtggagaaacgagttcttggaaagaaaaatcttaaagggagaaacagatttaaccgccatccaaaataggtaaggagccgtttctcgacttacttattccctgatgtatccactgcctgaatatagaaatagcgggcgggaaggacgacgtctgcttttagcccgggtccccatatttcgctcttctccgggctcagctgcctttctccgccggtctcggcgagtgctggaactgtcgccagaaagaagcaataaagtagcaaagtgccaaacatttacaagacggactctcgaaatgatccaccgataaatgaagaagtgtaagaggtggacagaagcagccgagccttcggcagggacccgccggccgatcgcagcagccaacgcgactgcaaaggttgccgcccggcgtgcagggcaggcgcgcgggtctccgcgaccccaggacaatcaaagcccgtgccccggcgcgcccaggtgagggtcccctggcgttctgctgtcccggccgagaaccgcgctgctcctctctctcaggacaatgatgaacttgagttgctcctgccactggagcatcatttgggagcgaatccgtctcaggttccagccaaggtgtagggcgaggggattggcccgtgcgtcgggccaggctcagtaacgccttctccaagtggatggcggggtggacacgcgtcccggcgccccgggctccctgggatatgtagttcgcgacaggacgagcggaaatactgccaggattttaccacctctcgcccatttatttacttctcggtcaccgctttcgggggacagataaacaccacagatgcccatcaaaggggcgcacgggtct

SEQ ID NO: 11677 - DNA, 2300 bp, Homo sapien
agagtcatgattgttcaaagtcactgaacgaagtgttctgtaaaataaacgtccatttgtaaagccaatcttcatcgcctaggttgtagtcttttcaggttatattttgtctgtattctcaagtatcaagtttatgagagaaccaaacatctctaaaaacctcttcagtaaagccttttcgtataacaaaataccctgatcgatatcctgtatagaaggcaactgaggagcaggggcattccggtgacctcgtaagggtcgaatatgcgcgggagggcgaaaccagaggcgcatagcccccggccgagctaatgccacccttcccacccggtgtcctcccgcgccctccaggccccttcctccccttcagacctgcgggtccccagagccgaggcgccagcctgtcaaaagataccgggagtcctccgcgcctggcgccagcctccagcccgcgcccctggggaggccgggagcgtttccaccaccgtcctctgacaagctcgccgctcggccgggctccgaggccgccgggacggagtagacagtcgcgcaggccaagccccgccgcgcagaaccagtgcgcgcggaggcgacgcgggcagagaggaaggagcgcggctgcgctccctgcccgtggccaacccagcccgcgcctccgcgcgtgtcgcgggcaccccgagtccccagcccgcagagcccaagggccgccgaggcctcctcgcccctactccctcctctaccttccctcaccggccggaagacgaggctctccgccagggggagcgcgccgaggcccgggggtgaccgcctcgaacatgcttgccccgggccccggggacgctgttggtgttaaagggggcccacgggcaattgctgcatccgggctaagagctggggctccgattcgactgtttgagtaaacgagtcggtatcattaataatgacaattgcacaaaagaaaataggaaagaaaccccctttcctggcgccgaaccaggcccgccttggctcggagccaccggctcttctgggttttcggggcagctggcaagagggaggcaggcagaggaggcggctccgggtccgactgccaagctgaccagggcggtgagcccgtgactcctggcggcggcccagacccgggtgctggcgtgcaggggaaggcgacggccgctgcgcgctggttcccggaccctgcccagcgtggcgtggagaccgacggccgcacaggggtcaccggtatccacatggacacctcctaatcgagctttgttcaccagagggctaggcccttctttccctggcgcttctcttccccccgcgacacagctcttccccctactccttcccgggagagcgcgcacccatgcagtggcctccatctggacgccacggggctcggagaggcgatgacccctggcagcccaggccggtatcgaattaagtaaaaattttgaatgcccaggtggctgcgcgtagagcggcagcaggccgggctggcggcgcccaggtgcccagcggagggccaggcgctcagagcgcacagccggccgccacctcggcccctgccccccgccccggggtacctctggcctgtcgggtggggtcgggtcgctgcggccgcggcggaacccggctccggacctggatcacagcatccagcgcgcggccggcgaggcgcctcctgttaccctggggccggcgtccctcgtcccatcggagcgagcgaggatgctgcggtgcccggcgacaggtcgtcggatagcattgacagcaccttcctttcaaggtgctttatgcctgccctctccacgtgcggagggcagggtgaccaacgcaaaaacctgagctgcgcctccagacccgtgcgcccctttgatgggcatctgtggtgtttatctgtcccccgaaagcggtgaccgagaagtaaataaatgggcgagaggtggtaaaatcctggcagtatttccgctcgtcctgtcgcgaactacatatcccagggagcccggggcgccgggacgcgtgtccaccccgccatccacttggagaaggcgttactgagcctggcccgacgcacgggccaatcccctcgccctacaccttggctggaacctgagacggattcgctcccaaatgatgctccagtggcaggagcaactcaagttcatcattgtcctgagagagaggagcagcgcggttctcggccgggacagcagaacgccaggggaccctcacctgggcgcgccggggcacgggctttgattgtcctggggtcgcggagacccgcgcgcctgccctgc

SEQ ID NO: 11678 - DNA, 2300 bp, Homo sapien
gctggagccctgagaaacccgcataccctgcccgggcacctgcctggggttgtctgctgcgtgtcctgggatggttcaattcaccaaggacttcctctggtataaatcttcagcttccttgcatgccctcagttgctatttaagctttctgttttcttccctaaaggaatcagtttagacttgaaattcagtttttcctgaaactgatcagaagttagtgacaccttgattggatccgtttttctgtcaggtgatgaatctttggaaaatttactttctgtattctgtgtttatttaaatctgtggccgttattcatcatgtatcctttatgcctatgtacgtaaaaaatcttgctaatacattattttttagacaactttatggaggtataattcacacaccatataatttacccattaagttatgcaattcattggcttttagggtatttacaagttgtgtgttcattgccacaatcatttatagaatattatcattattacaaaaagaaactccatcacccccaaaccccaagccctaggaaaccatgaatctactttctgtctgcatagatttgcctgttctggacatgttatataaatagaataatacactatctggtcctttgtgacgatcttcttttactcactataatgttttcggggttcatccatgttgtagcatgggtcagtacttcatttctttttattgccaaataatattccattgtatggatataccacattttatttatacattcctcagttggtggacatttgggttgtttccattttttggccattatgaataatgctgctattaacatttgtgtgaagatgtattttcatctgtcacggatatataccttggcatgaaattgctggaccatatggtaactctgtttaattgttggaagaactgttttccaaagcaactggaccattttacatttccattagcaatgtatgagggttatgatttctccacgtcctcaccaacatttttgattatagccattctagcgtgtgtgaggtgttaatctcattgtggttttgatttgtatttccatgatggctaatgatactgagcatcttttcatgtgcttattggccatttatttttatttttgatacagtctcgctctgttgcccaggctagagtgtagtggcgcgatctcggctcactgcaacctctacctcccaggttcaagtgagtcttatgtctcagcctcctgagtagctgggactacaggcatgtgccaccatgcctggctaatttttgtatttttagaagggacggggtttcaccatgttggccaggctggtctcgaactcctgaccccaagtgatccacctgccttggcctcccaaagtgctggattacaggtgtgagtgactgcgcctggccttattggcaatttctgtactgattttggagaagacactattcagatactttgcccatttttaaaaattgggctatttgctggccgggcatggtggctcacatctgtaattccagcactttgggaggcagaggtgggcagatcacttgaggtcgggattttgagaccagcctgaccaagatggagaaaccccatctctactaaaaatacaaaattagccgggcgtggtggcgcatgcctgtaatcccagctacttgggaggctgaggcaggagaatcacttgaacccgggaggcggaggttgcggtgagccgagattgtgccattgcactccagcctgggcaacaagagtgaaactccatctcaaaaaaaaaaaaattgggctatttgctttttaattattttttaattatttgaaaataatttaatgcatattttagactaatttaaaaaataagatagtgattgtgactccagtcatatagtagttgtaaaattaatatagaatgaaggcatatgtatgcataaaacttgctatgctttttagtggctctttgtgtatctggtggattgttgatcattctttttccttcctcttaggagctcattttgcagctctcaagcttttatagcatgctgtaaacaattgtcaaagttgtttatcaagaaacagatagagttgcaacttgtttctagtaatagaaacttttacactgcattcaatgcctaacgttgcagaaacagaaaggtcaaatgattctggaaatggtgagcacaaatctgagagaaagtcacctgaagagaatctacaaggtgctgtaaaatctttctgcacaagtgcctcaggagcacccttgggtcccaaaggagatggtcattatccatggagttgtcc

SEQ ID NO: 11679 - DNA, 2300 bp, Homo sapien
actggagagctttagactagaggcttaagaggtcatttaggcaatatttacagaactgctaagtgccaggattgggggatgtagcagtcacgaaaatcgttcttcgtttcagtaagtttacagtttaccatggggaagagacaaatactgaacaggcagttatattactctcagtaaaataacaactgggaacagtttctggggattactttacatatggaggaaatgcaaaaaacactttgtcaggattattcctgtagcaaattagatgtgactaggtcaaccaaacatggccactgtgaaccatcttattgagcatagaagtggttttgctaaaaatggatttctccacggagcacggtggctcatgtctgtaactccagcactttgggagactgaggcaggaggattgtttgagaccagtttgggcaacaaagcaagaccctgtctcaaaaaaaaaaaaatcagggcgtggtggtgggggcctgtaatctcaactactcgggaggctgaggcaagagcatcacttgagcctgagaggtggaagttgcagtaagctgagactgcactactgcactctagcctgggcgacagagtgagaccctgtcaaaaaaataaaaaataaaaaaataaaaaaaatcaatttcccgtatacttctgttataaagaagtctttaaaaaattgcctgctcccttaagtcagccttttcactgagtttaaatttcgttccaatttgaacaaatatggatgctaatactatcctttatagttactagtgctaagtgcgttgcatgtaacaccttgaatacttactgaagtctgcaaggttggttttatgccctgattactgatggagacacaaattctgaacaactgtgacttcagggatgctaaacaccatagtgaggcacgatgcggggatttgaatcttggcctgagggttccagagctgtggccttttctggggttactctgttaattgatttctagtcctttctgatctacaagccgcggcattataacttttagatgctgaagaaaactaaactatatgtcaaggattaaggcttgtgaacccccaaaatttgggacaggtctcagttaatttagaaagtttattttgccaacgttaaggacgcgcagctgtgacacagccccaggaagtccagatgacatgtgcccaaggtggttggggcacagattggttttatacattttagggagacaggagacatcaatcaacatatgtaagtacactggttccttccagaaaggtggggacaactcggaagcaggaagggcttctaggtcacaggtagatgagagacaaaaggctgcatacgagtttctgataagcctttccaaaggagacaatcagaatatgcatctatctcagtgagcagaaggatgactgactagaatgggaggcaggttttgccctgagcagttcccagcttgacttttcccttttgcttagtaattttgggaccctaacattttcacaggctttaaattttattattctttagttactacgtgctagcatataaataaatagtacaaaaccaagaaggcatccaccttttggttgtctcttcacgtgtaaaacaacactttgtgttaagtatcttcacacacggcggcgcaaaggtagaaaccgatactaaaaaagcgtgtagaaaatagttcccagcctgggcaacacagggagacctcatttctacaaaaataattcgccaagcatagtggtgcgcacctgcggtcccagctacttgagaggctgagatgggaaagttgcttgagctcgggcagcaggagttccaggctgcagtgagctaagaatgcgccactggactccagtatgggcgacagcgtgagaccctgtctcaaacaaaaacaaaagcccgttactccaccaagaaggcgcttttgcacattgttttaatgcttaacgccttcaggatgccagcgtgacggaagcaagtaaccaccaaggcatcaccactggcgctaaacttctcacttccggagtgctgcaagcgcagaaaatatacgtcatgtgcggaggcggagcttccgccctgcgcgtcgtattagacggaaaccgagcgggcccatttttcatgggtttgcggacccaccagcgaaggcgggaggtgtcgcagggacatcttctggctgtttccgtcgcctgcgtggcccttgcaccccggtcttccattagcggcgcagacgtttgggcctaagcgctgggcgaggcgaggccctgcccctccccgccaacggccattctctggac

SEQ ID NO: 11680 - DNA, 2300 bp, Homo sapien
cttgctgttaaacccatatattgagtattttatttcattgattgttatttttcagttttatttgactctttttttttttcaatttgactcatttttatagattccagttccctggtgtacttcttgtcatctgtttttgagtatcttaatcacagttactttaaagtctgtcgaataactccaatatctaagtcacctatgagtttatttctattgtctgtttcttggtatgcatgggtaaattttaactgaatgttggacagtctatgggaaaaattataggtaccctgtaccttcctctagagaggattccagaatgtatttggacaggcagcagaggggaagatcacctcagtgcagccagcgaggacaaagtagattgaaggctagtttgcagttttttctgtaagactccagcttctagtttcacccgtattccaggaaagtcactttccaggagtgccctgatgtttcttcttttgcgcttggatctgcttttgccactgaatgcttcaaaaattagcctcttgccctaaacagcttaatcagtcaattcttcgactgaatagtcagcactaagcgtcaggcttctctctcccttttttctgggatcttgggcccacaaatctgactgtcttggcagccacactcttcttttgtctccacagttctgtgagattgcctgatgctccgctgctatccttacatgcggtcttctctttggcttcctcaggaaacagcaatgcctggaattcttggctgccttgacagctctctgatactttataacagaggcatgtttgtgtggggtgtgtgtgtgtgtttaaaaatctatttttctcattgttaatagaagctgaggtttgctataagctacttacagctggaggcagaagtctgtatgtatttgttaaacagtcatgttggttaagatgcttgattgagggattctgcctcttaagagatctaacagtgaggattgcatgatctttcaaaaaaatccttaaaaaagacaatggtttttattcgtcatttattttgtttttaaaaaagccccaaagaaagagtatcctctgccccaagttaactgcctatgaataatagttcacattgcttaggattttgaactttccagaatgtttttacctataatattcaccccacaaatatatgttgtatgacttttgtatcatttttaaaagacatttatatttttttgagatagggtcttgctctgctacccaggcgggagtttggtggtgtgaccacggctcactgcagcctccatttcctgggctgagtggtcctcctgccttggtctcccaaaggctaaggcaccctgccgatatatacttgttctatagatgatgaaaccaagaaacatactaagtaaatggcttaaaatcacaatctaattataggcaggaataactaaaatcaggcttcccaactcctagccctttccaatacattaaagtgacctcgattcatctgtgtatacattatggacctgtagtcacactcctaagtttaactttccaatattgctttatcttaactctgtaactttctatcagggatctttccagtggcatgggaaatgtgtatgtcctctgagaggcacacatacatgcacttgggcaggtgcacagatggatctatgttcggagcctgcccattcagtctgaataaaaaggaatcatggtagtttgatttctgggtgcagagcaatgctacagacattctagtatggttgttggagtctaaagacagtgttcccatgcagataggtgacatgaaaaatatgtagcgttcatttcctagaatgtcatagccacggagtcttagaataactcttggcatccaagttaaaagctggatcacttcctccaaatagtcttcactcacttccgggagtgggttgtattcacctttagctctgttcacgagacactcgtgggatattcctagccttctgcccccttagttacgggcattgccgtctcactgctgtataaccagaggcgtgggagctgcagctgtcagaatcctaatcccttctgcctggactcgttaccagtggtagcgagtgtgtatagtagtaaactgtgctgcgatgctagcctttcagtcactaccagaggtcccagcagcaaaaacaaaaattgtggatgatacattttaaccttctagaaactcagctaactcctttaggtatgtccaggctttccatttaaatatcagccttaaggcagacatgtctttctttaatggaagagatctaaattgggagcaaaaca

SEQ ID NO: 11681 - DNA, 2300 bp, Homo sapien
ctgcttccagcactgtgagcaaaaagcctaagtatggatcacacctggccaacccagaagcagccatggcccaaaacaggaggcctgccctgggaaacccatttgagttcaaaggagggtgtctaaatatgcttgtcttgagccctgtgcattgggccttgcactgcagccttccaactttaagagaaatttcagaatccaaatccttcccgcctgcagggctcaaattttcctttgcagatcagacctggtgaagaggctatttgccgttcaatcctaggctagctttctgcctttcacctaatgtttgaggttaagagaaatcagaaaagagagaccgtaaactgatcaccactgcatgggcatctgcctcacccacctttgggagttgggggaagagccagccacaggtgctcaggtgcaggtgcccaggtgtgagcggctaggtgcagatgctcaggtgtggcagcagggagtgcacttggctcatctgccctggggagggccagctcccgacagaagtaggccagaggtcagtcccaggaaatgcttggagcagccagcagggtagggccaagtcatgatacacctaggagtgggaggggaggcctctttggatattacctggtttatcatttagctgttggggtggggaaggaggtgggaaagacagaaggctctcccaggaattggcaggcagccaggtcagggacaatggcagcccccacttgtgctagaaaggcaggcaggacgtgaccactcagatagccacatcaacaagtacaaatcacggttgccctggaaggaaatggctcaggtttttcccagtagctcaatgcctaggcacccccacctgtggtttgggcatttcactctattagctcttctgctcagtggcccattctgctagccacagctcacatttactccagttatgaaaaaggttaattttcccatattgagtttctctgcaaaagctgctttcagttgtgaccggtaagttccgttgtcaccaatatgggtacaactgttgtcactctgctattctgaagccatgatactaaaagtgtgaccccagatcagtgtcatcgccatcaactacaagcttgctagaaagaaaactctccctagacttccagaatcagaatttgcattttaacaaggcccccaggggaatcctgttcacactgagttttgagaagctctgttctaagatattactccaatccccagcaagccaaaccgaccactttcttcacataatcagaacgctcggttccagtatttccagataccagccataggaaaacacgttgttctctcatttccctttaaccttatctaaagcactcaatttcctcaacccttaagtcgtcatctgtaaaatgggagtgctaatcctacttaatttaagatgattaagttgaataataaattagaatttgtcctacaaattgtgaatcatgatcggaatattcaattttattattactctgtgtcctaactcaataactgggttataaactcctgaaaacaggacaatctcttctctacctctttctttatcttccctgtatactgaaatacagcgttctgcccagcatgaggtcgactatttgacatttacaaaaatctctcttggaatccccctgccaaaaaaaaaaaaatcgaatttcaatttatgactccaagcacaaagagatcctgtcactttgacctaattctctgaggttcatccctctaaataattgtattgtctccatctataaagtactctgttactatgacaacgcacacataattgcatgtgtaagtagttgagggtggctgtgcaagtcagactcctttccaccaggaaacacagaaaacattctatcttcccaaatgttactctctcagatttgcaccaagaccctagaagtttcttaaatttccatatactttatggacactacaaagcaattccaggaaacactgatacagtagcaaaactactgggagtggaaattggatggagatctgggtcccagttcagagtctgacacctgatttgcaacataattaggcacagggcactcaactattcagggccctaaacccttctattgaaagggaaatgggagaacaatatgtgttcctatggctcagtccctataagattctgtactattcagagttgattttaagtgtcacttaactgaaattatccaacaaaccttcatggcatgaaacattaacacagctctttttatatggcatggttcctatggctcaatccctataagattctgtactattca

SEQ ID NO: 11682 - DNA, 2300 bp, Homo sapien
acacacagtacatgcaggtaaaaaacctgcatgtgaaccccatgagtctaaaataaaagttgaaaaaaaatgcgtggcacataaattatacacaaaaataaatgttaattctatttgtagaaaataattatacatgtaacagtttaaaaatataatcaaattatgccatttcagaaacaaaagctggcttttgagatggggaaaaaatgagaacagagtttaaaataggtaggaatcacctaactattttaggcattcatagagacagaaagtttagaaaaaattgaggtttagagatctattgggagttaacctcagaatacaatggaggtatattttgaaaattaactagaaaatctgggagagtaaaatgattgtatgttctaaacaatcttgtactttaggtgaaagaatctttcagttgataagtaaacaatgatgaaaattgagatttgtttatttcaactgaagtgatgctctgacaaagctactaatgccttaatccactcattttcaaacatacatgtcagcaaaatgaatcatttattacatcaattttatgtagaaaccaatggaacactaacaaaagtggaaatactttgtcaaggtgaggatagaattctccatacttttcttagcagcttccaaatgtgaagaaatattaacctgaaagagcctatccttcaagatggatccccagtggctaactgggcctaaatctaaatagaatcaagtgtaattatttgctggaagttacacacctctgagtttcccaacaacttccaccttttaacattgggaatttcagaggtcagctgtatcaagaagcagcatcattgggaatcaaaaaatatgaatataattgtgtaaaatttattacagaaatatagaccgaattcagtgccaggtaactgtaccaaaataatgatttatagataacacgtatctactctcaaaacaggaaacttcaataacatggaaatttttaaaataaacttcttccacaaatatcttccttgtacatactctatccctatttttatacaaaatttagctcaattaaaacaagataattatgtaaatttaaaataaagtttcagattaaaattttaattttgtaaaaatctatgcatcgatatgactatttttaacttttttaaactaccacttattatgcacatgtggaaaaatatattaactagatattccaaatacaatctatttgtaataaacacataaattcgaaggctgaaataatgtggtaaactattacatatgtgccttaacattgtctttcaatagaaaccttttacaggaacatttatgattcttataaaaacaatcagactcaagtttttagttttttttttttttttttttttttgagtcagtgagtctcgctctgtgcccaggctatagtgcagtggtgttatctcggatcattgcaaccttcacctcccaggttcaagcgattctcctgcctcagcctcctgagtagctgggactacaggcgtgagccactactcctggctaatttttgtatttttagtagagatggggtttcaccatgttggccaggctggtcttgaaccattgacctcaggtgatctgcccaccttggcctcccaaagtgctgggattaaaggcatgcagactaaagttaatttaaaatattattcatttgagtactaacacatacattttaaaattctgaaggaagttttcatctctctcttcttttctcttatttcaaatgtcttgtcctattgagagaaatgaagtcagtgactacatagaaaaacccttgacagagacaacatcactttaaatgtcttaaatccaatttcaaattctgtccaaattaggagttatctcatgtgaccatgaaaatagcatgttttgtaagtgtaaatatgaatactaccttatatatagtgttttatatgcacagaaaagctagatgggttgaatacttctacctttgaatttatagtccttatgttgttcctgtaagtgacaagtggtaaatacaattgattctaaagtctctctttctgatatttttgaattacaattggtcattaaaaagtggcgtaattggccgggcgcggtggctcacgcctgtaatcccagctctcagggaggctaagaggcgggaggatagcttgagcccaggagttcgagacctgcctgggcaatatagcaagaccccgttctccagaaaaaggaaaaaaaaaaaaaaagtggcgtaatttcccttttcttaaaagtaaaaacttcatcattatatattttttatt

SEQ ID NO: 11683 - DNA, 2300 bp, Homo sapien
ttttttaagtccttttgtttatttttattctttctgttatcacagatcctactcatttttgtccctctgtaactattatctaaatacatttaagagattcttaattgtcttttataatttaccttctttcctctccaagctattattaattttgaagccaaaacaatctcaatcaaaatatttacttcattttaatgatttctcattgtctagtgtgttgagtttcaggaagaatgccggtgtcctctctattctggctataccttaaaattacttcagtgatttttaaatacaccagtctctggaccataacctcgagactctgattcattatgcaagagtggacatgggtctttgaatttctaacaaatgttattgtgttttaattgtgctaagaaaaccctgctctggcaacctaataaagtagcctgctaataacaggtactcaataaatatttgtggaacaaatgaattattgattctttgtatgaacagttcattctcaagcaaacacctgaacatcaacctctcccaccccacaccccttttgaaatattcttcataaaacttcctactgtatgaaagtatcttctgtgtgtgaatttttacagtctgcatcaccacatggaatgtgagatccctgagaaaggagactttgtttgttttgttccccacagtgcctcagtgtctgaaatagcacctggtaaatcatagggacttctgaaatactttctgaatggataaatgagtggtaggaaaagtgtgaacatggtagataaaagagaagtcaccactagaacaccaagttcctgacatacagtttcaaggtccagcaacatagttgctacgaactagctgcctttaaagttctctagatcaactatatagattagcaagtcttttaactaagcattaagcagagtactgctctgagatttagcacctcagtcttttaggtccctaaagactccggattggttccagaggtggactgtcaaataggaggactttctgcagtaatggaaatggtctatgtcagtgctgtccaacatggtagccaagtgtgtgtggttattgagtacttgaaatatggctagtggcactgaggaactaaagttttaattttaattagtttaagtagccttaggttgctaggggttaccatattggatattgcagttctagagttattcttctctcctcatattcaaaattatcttatgatgctatcataattgaaagattagccagggaccctatcatggctatggcagtcatgtcctgtgaaaaattccattaatgacctccacgttttatgatgtgtagagcaaaatctcagtctccctgagtaaggcctgctccatgtggacacctggctttctcccttgtctacctccctcagtggagagtccacctgctggtagtgcactccttaggtgcctgtctctggctgtcctgtgccacctgcacagagtcatgcatgagctccactgtgggaagtctctagagatgagctgagcttaccctacaccaactgaaagagtctatctaagtcctgaagatcacaagtcatcctcatattcccatgaatgtgaatggaagttgggcctgctcagagaatcatcagggctctttattgtggcctggagccaactgccaaggagtgcctaggaacacactcagtaagagtgttgccctcaggccagatcagacttgaacctgcagagaaatcccctaggtatgtcagcaattgctcatttggatgctataaacttgaagttgtgaaaaatataaagacttacattatccagtctctcctggcaaaatatgtaggtttaatcattcctgaattttccttagttcacacagatatacaaatatatatcctaaaaattggcattggtaggcgtgtcaagttatcattttaaaaacatagaaacctgaacaagatgtatcactccagtctagaatgtctatatgcagagtatccacaaaaaaccaaacttcaacagtctttcatgtctatatttcttcaacattctttgtcttcaacattctttcatgtctagaatgtctatatgcagagtatccacaaaagacccaaacttctttcatttaaagaaccaaacttctttaaataaaaatgactcacaataatttaatattttaccatttacaaagagattaactacaacaatattgatcttgagttaatttcccacgaataacattttcatttcttaaaatttgctgaatggaaagccagaaagtagagtgaagcaagtaatgtgtgtgtgagt

SEQ ID NO: 11684 - DNA, 2300 bp, Homo sapien
tcaaatgctcaggaattatcaagtaaagtttatgttaagaaactagcattctgttgaatcactcaataatggttattatttaggatacgcaaaagttaatcacaaaaacttagactgaaagatactgcttacaattataggtgggaaataccataaaatacaacctttatttattttggaactcgttttaatgcagaataatcctagcgctctatttagtaacaagaagaaaccaatttaaatatcatgctgatttaaatagtataaataataaaaatgacaattttttgttaattttcagactctacatagctatttttgtctcttctattcttatgaaatattcagggaagatattattactttcactttacaaatgggataactgagaactcaataaattgtataatttatctcaagacacagagctggttcatggtagagctatcatcagaaatctcacgattattagttatccctttccaattctgaagtcctctgggaagtgtcagaatttacactcctcactaggaactactattgcagttggaactctgaggctttatttgggagtttttcctgattacagaaaatctcttcttaagagaggttttaataaacaaaataagtcggggatattaccagatagcccctatatcctcagagctcccagcatcacaccttttataagaacagtatagaaaaacaaagttccttccctcctcctgccctgtgttatttttccaaaaaacaaacaaacaaaaacctaactacacactaagtgtgaaagtgattggagtgggggaaggcaagctggggctgtaccaggtcaagggttgaaaagaattaggggattattacagttctagttcgaagacaaacacttttcaatgtatgtcaatgaactttattgaacagccgccatatactagtaaccctcttaggtgtgttgtacacttacacatcgaaaccagggtttcccagatttcttatgatgaaacagatagaaggtgataatgctggcacagcacacatggacagtgtgacggaaggagaccaattaaggacgagcgggtccgtatttctacacacctgccaccagctggacggctgtgctggaagtctaagccctggatgcttagctgtgtgatctgtgaaccggcagcatcagcgttcccagggtgctggttagaaatacacctctcaggcccacccagacctgctgaatcagaatctgctgtttccaaaattcccaagtgattctcatgcaccttaaagctttagaaacactgttctaattagtgttcttaaaatattgctatgggatacaggctttagtaaattctcaggatattctaccatgtactcaagtttgagaaacaggagatttaataaatactgatgtttggatcccatccatagagattctgttttgattggtgtagggtgtaatctggcattaacatttttaaattgcccctggtgagtttcatgaatggcaatgtttgggaacacctgctttaagttaagccatgagctaattgttcttcatcatattgcagatgtgggaactgagacgttataaggaaatccaatttgcgagtggtagagccagacttaagcttagacccttaactcacttattctcaaaactggtctgtgctgtttattattttacaggagagttctatattgctatgtttaatacattagtatcatttaaatatattttaatatatgcccgtgatggataatactgagtgtccacttgattggattgaaggatgcaaagtattgatgctgttgtgtctttgaaggtgttgccaaaggagatttgagtcagtgggctggaatggcagacacaccctttatctgggtgggcagcaactaaatcagctaccagctcggccgggatataaagaaggcagaaaatcatgatggttaagcaaactaaatatggcctgagaaggactctgtacttctataggtgagtccttgtggatgaactgtaacctagcttaatagtcagacaaaatttaaaacctaatttaatagtatgcactgtaacaatggctgaatgttgcccagtcccagtgggattcaaccactcatagactgcttttgttcaaactgcgttcaaataaggcaaacgccgagctggaaccaatctcactgtttctgtacctcgcttctaattcctgtacgtcactttaccttttttgtctataaatttattctgaccacaaggcacccctggagcctctgtgagtctgctgtggttctggggactgccggattcg

SEQ ID NO: 11685 - DNA, 2300 bp, Homo sapien
ccttggcctccctagtagctgggactataggcgcatgctaccatgcccagctaatttttgttgtttttagtagagatgggatttcaccacgttcgccaggctgatctcaaactcctgacctcaggtgatcctcccgcctcggcctcccaaagtgctgggattacgggcgtgagccaccacgcccagccatgaagatacttattaacaatatataaaatgatagtatctgtcatttagaggtgttcaattatttacataaacatgtgaatagaaaagaatataaatctacattcttgatgacataaatgataatataaaatgttatatatcccagaaggttcagaaaaaataagactagatttgaaataaaattatctaataaagaaatataaatgggatgtaaaatcatgtcaactactcaccctttgaaggagcaggcttatgagaagctaggaaagaattcttatggttcttaaataattatctgcaggaatcaaggtgctcagtacttcctcttgtctcctttagtctatgcagatacacttggtaaatagtcccatttccccttcatgtcttcctttcttcccttcattgtaataatgacctgtaagtacaagaagaattaccgtcaggtaaaagcctttttcatagatcctgcaatgaaaattataattactttaaagcagtaaaattgtaatgctagtaggtaatactcagacatgttcttctcaaacattcttttaactcttccgtgatattttctgaagctctgaaagaatttccccttttaaagaattgacgtataaaatatatgcactctcccactagagatacgagctactttagtcccgtattttattattgcagggatagataagtggacagatgctgtcaagcattcaaataatcgacctataaagggctagacatagaaagacataatttccctgacctctccaacacgcagtctattctcactctggaggatgaaatgcaaagactcaactccaagaatgaaggtacacaatgtgtttcaggggagtggacgcatagctatggcctcacagttggcacttactctatgccctggtgatactgaatttggatatgatacacaacgatattcagcttctggagggccggggaagggtccattgcaaaattgtgcggagttgacccttgggtaaaaatcagaatttacattttggttttaaattttataaggtacagtactgttctatttgctctacataaataatttcatttaatctactcaacagcttagtgttttgtgtattattattcatctcagtttatagctgtggaatctgagctttacaaaggctagataactcatctgaaggcaatgcttagcactgcttagcagcccaatagtggtaccagctcagcaccatggttttatttatactttgtctctgtagaccttgctttattccggacttgagaaggagttctccaagcatttggaagaaactccttttccattgaagttgtttaaagaacacttaccttttgagtaagccagaagctttttttgaaaatacatggaatgtgatgttttttattttataatgcctacttgagctgcatacccaaggctacctgtcaataatcagtcacttttcacagattatttttactacaatctatgacaaagatgatcacactgacctatttagcctcttaaaactctgctttgtacttgattatctaaaacactatttatttcacttcagcccaataaatacttattgagtgcctgttatgtgccaggcacagatgccaagatataacctgtgatttaatggggtaacatacatcatgcattgctttaggagtgtgttcactgggcaaagggaacaaagaggcacttggctcaccctagatcaagaggagaggctctccagatttgctgacctagaaggataagtctgaaagtaggagggtggggagagccagatgaacaagggaggtgaaaacgtgatctagggaggcatccgagtgagcaaaggcacgagtgagcctggtacacttctgggcaggcagaaggaaggcagttaggctgttaggaaggcagttaggctgcagtgaattctacaaagaggctatgggaaagaaacctggaaaggtagggaggtatggatatggacaagctatgccaaggagcagggctttgtcatggagagtgactaggtgcttttacataggaaagtcacctgataatattaaaacctgtgaaatatcactctggtggaagtgtgaatgaatttgaaaggggt

SEQ ID NO: 11686 - DNA, 2300 bp, Homo sapien
ccaggctggagtgcaatgatgcaatcatagcttactgcagcttctacctctggagctcaagcaatcctccagcctcagctgaccaagtagctgggatttcaggcacatgtcaccacagcaagctaatttttacatttttgtaaagacagggtctcactcttctgcccaggctgctcttgaactcatgggctcaagtgattctgccatgtcagcctcccaagtgctgggattacaggcttgaggcaccatgcctggcctaggaataggtcttaatcagtgcttctcatttggccacgtctggagacccctctggttgtcactgtgggagaagcggtgctcatgacatctcccgggtagagccagggtgccgctgtgcctcgcacagtgcccggggcagcccgcacggcacagcattacctggcccagaatgtccattgcactgaggttgagagaccctggtctatgttaatcctgggacaggatcagcaacaagctaaggaggagtcggctgagaggctcattcggggaccagaggtctccctaagggcccctcagctgacacacttccccagcacctctttgtggcagggcaggccagctttcccaaaatgagctatgcgggtgaggcttctccttggactttcctccttcttctccattcttcttcctttccagcaggccggaccccagcgctcgcctctccatgccaggacgctatgtgcctcggtgagtccctgtgcgcgcatagcagaggcgctctccctttccacggggtactgctttccctgggagacgcgaagaggagaggagggcccgagttcaagcagggagggaattcagagagcagtcattcaccaagtcccctccagccccagccctgtgagccagtcctgcgggtcctgcctttcgctaagagattcccgattccgctccctccggacgcagggaggttgagcaggggacacgcagccttcgcccttcccagttttctctgtgtggcctctgtctctctctctctgtcttcaggaaccaacaaaaggcaaatgaattcattagggagaccaacacccgccatgtgcctttctttttttttttgagatggagtctcgctctttcacccagcctggagagcagtggcgcgatctcggctcactgcaagctccgcctcccgggttcacgccattctcctgcctcggcctcccgagcagctgggactacaggcgcccgctaccacacctgactaattttttgtatttttagtagagacagggtttcaccgtgttggccaggatggtctcgatctcctgacctcgtgatccgcccgcctcggcttcccaaagtgctgggattccaagcgtgagccaccgcgcccagccatatttgcctttccttttttgctttttcagatggggtctcactctgtcaatcaggctggagtgcggtggcccgatctcagctcagtgcaacctctgcctcccaggttcaagcgattctcctgtctcagtctcctgagtagctggaataacaggcatgagccaccaaacccggctaatttttgtagagaggggtttagccatgttagccaggctggtctcgaactcctggcctcaagtgatccacccacctccgtctcccaaagtgctgggattacaaatatgagcccctgtgcccggctgcatttgcttttctttaaggccgttatttaggactcaagagagggacgtcaggagaaaaggtgagggaattgcgggcgagagtggagaagagggtaggcaaggtttggagaagttgctttgttcaacagtcaccagcctaagcagcacatcagtgctttcaagttaaaggtaggaaatggaagataatgtatcctgttgaatctatagggataattcagagataattaaaaatataatgacccaaattgggactgaggaaacacgttggcattaacctccttgcccggagagaaggtgccgggagagctcgcggtaggtttgccacttatttaagactccatctccacttgttcctaacccactgagaaatcggctcattattgactcagagggatgaacgccagatcctgactcaccggtaaccacttcctgcagaaatcctccagccctgttagaaatgcctcagccagggggactcatctcctcaaacctgggggaccgagacctatgagaggtcacagcatgaggtgacggaagtgccatgtgcacagggttgatttggtggctctaattcttataacataaaagcttgcttcttagcatagttcttgcagtgttaatttt

SEQ ID NO: 11687 - DNA, 2300 bp, Homo sapien
ttcacaagcttttaccactccaactgagatgtatacgttaagttagactaatgtttcaaaaacggatacttaaaagcaacgtaccataaaaatcttcagaaattgttacaaagaagagtgaaagaaaacaaggtgttttaccatatgcatttttaaatttagcgtagtggatactttgttttaaaaatacataatttgtagaattactgcccagtttgtgtttgaaacataaatcctggggtggacggcattaaattgaaaaaaaacgtgggcatacagtatattttaatttttcatactgaatcgtacatttgcactgtgccttatttctaccgtgttcttcctactgttggacatataaaaagattttccttggaactgtgacttgattagatgctgcagtatgctggatccgggtcggtggaccgcagagcgctcgagatgcggagaagcaaagctggccgctagtgggcgctgtggctccgtggaagtcacggacgagcgtcagcaccggcgctcgaccgggaaagtagcgaggagttcctgccagctctgctctggggtcttgcagacgccgagtgagaagcacatgccttgacttttccatctcacaccctctaaatctctggtcactttgggaagcgcgcgtgtctcctagaggctagtgagacggtccccgcgtcgtgcctgtgccggcgacacgcggggaaagctccaggggcgccaccttcccggggggccaggagggaagggagacgcccgcagagaaggcgggaggcgacgatgctcaggccctgattagagctgcaaattccggcgccgcgtcgcaggaatcgtcttgcaattcccggccccactgactgaaactgagccgtaggcgattggtaccaaaatcaagtgagaagccctcgccgagaggcgtcgggagaagcgcgcagaagccgggagctctaagggtgcgcgcggagtgcaagtcttgcacgcggggcagcgccgcatctgcggagaagggacgccgagcggagcctgctgccttccgcactgctcgagggaaagccgcgccctctgattccgccgagggggaaggcgcccccgggcgcggagacaggtggcccgctactcggccgtcgctgtttccacgtctgcaccgcgcccagaaggcctctcgccgccccgggggcgccctgtgcacgcgctgagcgcttctcctgcccggcttctgctccgctcccgccgcccgcgggagccaggggcggggctcacctgtcagcccgagccccgcctcgcggcacccaatgtcgggaggggatggcggacggacggaccggccgtccaaccagcgcgcggccgcggagccgcgggccaatgggcttcgcgcggcggggcggggccccgcgtttatagcgctctgacagcgcggcggccgcgctgactctcctcggcggggaccgcggcgccggccggagcgaggagctgcgcacgcagcgggtcccggcgccctccccgcacacaaaggcccgcgcgcgtccggagcccgcggcggggaccgagctccctctttcctgccctgggggccgggagccgcgcggactgagaaggctcctgcgcgcccggaggcgccctactccgctccgtgctccgggacatggaaccgcgccgacgcggcgcccgcgcgctcgggccgctgcccgctgcactggatctatagtcacaggcggccccgctcggggcgcagcgcccgccgcccgcgccggtcgtctccgctccgggtctttgtgtcccagcccgcacccgccccgcgcccacccgccagccgcggccggcccggcaccctggagccgcacgggagtcggccgtccgagctgcgtccggcgcggcgccccggaaccccgagtccgccgcgccgccgcgccccgcgcgtgcgctcccgccccgcgccctgagggccccggagagcgagcgcacctggcccggcgaccgctggagctgcgcagcgcgcctcggagctgcctgcgggcgcacgccgtcttccccgccagtctgccccggaggattgggggtcccagcctgcgtcccgtcagtcccttcttggcccggagtgcgcggagctgggagtggcttcgccatggctgtgagaagggactccgtgtggaagtactgctggggtgttttgatggttttatgcagaactgcgatttccaaatcgatagttttagagcctatctattggaattcctcgaactccaagtaagtggcgtccgcgatccccctatgtccccgccccggggtccgccgcgccg

SEQ ID NO: 11688 - DNA, 2300 bp, Homo sapien
tcaatctgtatttattctctctttgcttagcgggaaatcaattcagccaatctgagttgcctgctacataatttctccttctctgtagctcagccccagacgaagtgattggcaaatgagcaaatccatatgttttaacaacttgtcctctgattataaagtcaataacagaataggttttctgtccggatttattgttcctaaattagaactaatgaattaggctctttgtatatacctgttctcctgtatttagaatatgataaaggaaaaaaagattttatactcatttgaatttctgtatcagttaacatcttggtatctgtcatttcctcaaatgtgacatggaaatgaattctgaaaaaatcactgaataatatcaggctcaatggcttgatagacttaaaactagttttgtttaaatttatagttttaaaagtaaatacctaacttgtttttttcactttgtttgctagtcgacagcaagaaatagaagaaaaactcatcgaggaagaaacagcacgaagagtagaagaattggtagcaaaaagggtggaggaagaactggagaaaaggaaggatgaaattgaacgagaagttctccgaagggtggaggaagccaaacgcatcatggaaaagcagttgctcgaagaactcgagcgacagagacaagctgagcttgccgcacaaaaagctagagaggtaacgctcggtcgtttggaaagtagagacagtccatggcaaaactttcagtgttgggttctgcctcctgctcagttcagaaagagatggaatacagactatctaattcctttctcgtctaaacttaacattgctgcgaaagttaattttttagcctattcagaagtgctgactgataacttaaaagttggaagcttttataaaacatattcaaggatactttttgatttaatggaactggctatttgagaagtgtttgaaacttttgccatggctgcaggacttacattcttttttgggaggacggtggggagacagggagtggtaaagggaaaaggttaaaaatccacctgtggttgtatattcttctattctgtcactctgttacctagactgtgagaggcttttgccttcagtcagattaaaaagagcagggcctaacattgagtgatagcacctgctttgataaataggttttctcactcttctttttttccttcttttatccctcactccctcccctaaaccctgcttcagcacaatggactaattctagcattctgatcataaggccctccattttcctaatgtgtttcaaggaatctttttaggaaaaatatccagattattcatccactttttttagtatctactaacaactcctttttttctctagagagttatgaaggaacaggttgtccttgtctggagtcaagctaaacacatgatttgttttatcagcagctggagcagaagttgaaaatgtctttctgtgagacagtaatttgctactgaagctttatggcttgtttgcactgattactccaggatccaaaaacttggtgaaagtcactgaaacactcaaggcaaattactttacagccctgagtgtctgtcaccatagtttgcataatgaatatgaatcccattggtgtgtgatgtaggaaatcctgtagttgtattttcttgaactgaaatatttgactcaaaataattaagactcattgtcatttttcatcttggcattattgtggacaagttgacatattaaatctctttgctttctggtaagcttagcttttaaaatgcattttcccttgtcctgtctttaactagatatacatgcttatatttatagtgggtttcacagactataaaattgaatgtatgaaatttttatttatatcagtgcttttaataatgaagatatttttggagtaatggtgctgtcttgtagcgagttattaatcatagtaagatttttttctcttcatttgctttttttgtttcatattaacaattttttttttacacggacacaaccctctgacagtctttccaaatattaaaatcatttgaatatgtatgctgtgatctgaacactgctcaagccatcaagcagtcttcatacagtttgcattataaaatctcattaaattctccaagaaaaaataagttgaagaattttatttcctgaccatgcatcccctggatttctgagtttcagttcagattgtagatgacaatataagctgccttccgaaattgtcaacatctgaatgttaagtccattttccccatggaagaagcccgtagtt

SEQ ID NO: 11689 - DNA, 2300 bp, Homo sapien
tcactctctgcttcatagatgacacctttttctatgtcttcacatggtaaagaacgggtgaacaagcttccttgggccccttttataagggcattgctatggcttaaatgtatgtgtctctctagaattcctatgttggagcctaaaatccactataataacattaagagctgaagccgttttggaagtgattaagaaatgaggctccaccctcttgaatgggaatagtatccttacaaaagaggttgacaggagtgtcctagttcccccccctttttttttgcccttttgcctcccatcccttccctcatgtgaggacacagtgttcgtccccttctgtggacccagcaaaacaaggcactatcttggaagcagatagcaagctcttatcagacactgactctgctggtacctttatcttggacttcttagccttcagaactctgagaaataatgtctattatttataaatcactcagtctaaagtattctgttatagcagtggaaatgggctgagataggcactaattccagttatgaggttagagccctcatgacctaatcaatatcccaaagccccaccttttaatactattgcactggtgattaggtttcaacatatgaatctgagggaacacaaactttcagaccctagaagtgccactaaaagagagctcagagagctagctttccccttctatcatgtgagggcactgtgagtaggtgccttctgtgagtcatctgtgaatctctgggtcctcaccagcgaccagattggctagcacctggatcctggatttccaactttcagaactgtgagaaataaatttgttgttcataagctgcctagtttatgatattttgttacagcagtcaacacagactaatacactactcttctttgtttccaagttttcttgataattaattatgtgatcttccatataaaacttaaaattaattagttctaaaacacatatccccaagagaatttgggactctcatgagaattgcactaattttgtaatttgacttgggaagaattgacagtatttttgatactgactactcacctaagaatacagcatgttttacatttactagggccttattactgccttttcagtaaaggtttataataaagattgtgtaacttgttaaagtttatccctaagtattttatggtttctgttgccattgtggaggaaatattatttcatttttaatatgtttttgcttattcaaataattctaatttttcttctacttacttaagctttattattgcactcaattttaaaattgaggcacctagattttcaagggttcctgtcatctgcaaatattaacattgccttttccttttaggtcttaacaatgacacagtttgttgtgccacatagggacgaagcttttcgtggctagggttgaggagggcttgctggttatgtgcaagggctttgcacaatatgatctaggttcacgtccctgctctgtcacctactggttgtgtgacccttatttaacctctgtggacctcagggtcctcatctctgaaacgtggataatagtagtacttaattcagaattgtaagaattaagcacttgttaatacattaaagcatttagaaggcacattaagccctatagtaagcattaggttacattcatcaaaacctgctgcctacttacctcctgcaagtctcataagcacttcagaaagtgtggtgtctccattctacgaatgaggaaactaagtccaaggcagcaagtgatgagtgcagggtcacttggagatacattttagggctgccccacaagaccagctcctagaaaataatgcaatcaatcaacttctgcgaggccggacttaaatcccactaaaacgtgcttaattcattcaacaggcgttggcatcttaccagggaggaaaaaaaaaaaaagagtacgccaaggcgaaaaggagagtctccatctattgcgtctcaggcttccgccaagactggcggaaaaaaacgagtccgctccgaagcgctcgcctgccttcggcaaaaatcgtcaggaggcggggcccacgcttcggcacgtttcgcgcagggcattgtgggaagggcggccggtgcagccgcagctgccatcttaggggcgcctggcgctacgggtttctcgttggaggcggccttcgtggcagctgtagacgccgggaaaaggcataaagtccgttggccgacacctttctttcctccggcctcggtagaaccgccagcccgcgtccgaaggcggaggcgaggggaactggc

SEQ ID NO: 11690 - DNA, 2300 bp, Homo sapien
tatcaatatccacttcctttctgctttttaactttttattatgaaaaatttccaatatatacaaggtagagaaaatataagtgaaattccttgtacccgttactcaacttcataattatcatggccaattcattttcacttatattcaccacaactctccctctttgcttctctaactagattatattaaagcaaatctcaaaaagcttctacacacttcttttaaaaaaatttttatgggtacatagtaggtatatatatttatggggtacatgagatagtttgatacagacatgcaatatgaaataatcacatcatgaaaagtagggtatccatatcctcaagcatttatcctttgtgttacaaacaacccaattataccattgtagttatttttaaatgtatttgtacattttaaatgtattttaaatgtggttgtattaatttactttcccaccaagtgtatgagagggtccccttttctctacatcctctccagcatttgttattgccaattttttggataaaaaccattttaaccagggtggaattatatctcattgtagttttgacttgcatttcagtcaaatggaccattggaacccagatcagggctgaaactccatttatttcctggcccacaagcaccctactccaatagagggccctaaggaatcccgagttctctgggtgtgaatgtcagctcaggccctgtgtccagcatttctcaaaatgtttgcatattctgcttttccactgtatagttgtttaaacaagtgaccacaggcacatttggcaaagaaccattggaaccataactgtgttcccttgccatgggtgctcctgagaacctgacctccctttgaattagtggattctgggtcagataaactgactcaaggattaagatctgttttatttcttcttccatcatctatcacacacttgtggcatttcatctttacttaatgtgggctgtaattttctccaaagttccaggagtcatcctagcagtgtgatgaaaacatctcccagagtccttgccagggtggcaaatcatctattacagtagactgtgcccatataaataaactcatcattttccaacttcatgcttcccctgctttgattcatccccctcattcagtcccatgaagagtctctggctttggccattgcacgttggcctgccgcctttaggcacatggttccttcctttgctcagcaggctctgcatttcccctccacatgctgtctcacttgactctagtgatgggtctggtcaaggcaggaggtgggggtgggtcctgaggagcactgtgttgtcttgcaatgcagagattcctataccatgttcaagcaagggcagagcacagcctctcacagggaggtcagggccacctctgtaggcccggagggctctgaatggagtgttgaggttttgttttgttttgagatagagtctcactctgtcacccaggcaggagtgcagtggtgtgatcttggctcactgcaacctccacctcccaggttcaagcgattctcctcagcctcagcctcctgagtagctggaactacagccacacactgccacgcttagctaattttttgtatttttagtagaggccaggtttcacatgttggccaggctggtctcgaactcctgacctcaggtgatctgcctgcctgggccttccaaagtgctgggattacaggagtgagccactgtgcccaacctcaagagttgaggttttgagagcattaattctgttgtctctctcatccctaataggcccctgacattgtcatagccataaccagactaaccagagctaagaattcaaatttttttgaagtgctgctattcttataattaattcctgggccttatccttagatttttcagtcctcctgctacaggagatgagtctcttccgatgcctccagtgaggctttctccctttcacactttcctttcaatgatgattcacagccctgagcctcactttgtctttctctaatgcctccagtgactcagccagagccattagagtccattgttctcaggactggtaatttctctaactcccaaaagcctgggagattgccatctaccagggtattctctcccacctctttcccaccccaggtcatcaccagtgaaagttctgacacttgcacttctccggcaagccagggccggggcttcactgccagccagcaggaggatgagccagctctgcagttccacttcagagtccatcttcttggatcactcttggcaccaactgtattgagtt

SEQ ID NO: 11691 - DNA, 2300 bp, Homo sapien
cctctgtacttacagaactcaccccaaatccatgtaacaggtagatgcgtaaggaaaattctagcagttcatctgatagtgggaggtggtatgaatgaaaaggaccactgatgtcaagaaatggaattgtctttttcactctgagacccaacgccatcccatgaatcagaatctatggttcaataggctctggaggggatgcccaagcataataacatctgagatgcactgctatgcattccttttccttaacaatacattaaaatgaaattgaatgtttttatttttccttttcaactacaatattttctttttcctgtaattggttacactgtatagagcatcctgcatttgtaaatcagtttgctcttcctgtttaaagggggctaggggacacatttctgagacatttcaaattttgttgcatgtaaccggtagctggtggaaagcatgcccgtatgaacatgcatccaagctctatcatggattaaagagatcgtagcagaaaaggactatgttcttttcattctaaagcaagaaaaggccctttactgtgattaagagttgtccttgcccagatatattttccattcagtaaatcagaacttgaactggggagaattcttcccgttagtgtcatcctatctgcctcccattgttcgtcacgtaaatgctaagttgagattgatgggcttataagggctgtgaataacatcacctaatgttagtgacattcataaagagcttcgccatttccaaagattttcacttaaattatctcagcaacaaattagagagactcacctgaggtcacttggctagtgaatattttaaaggatattttgaaatcaggcgaggactttcatagctagaaaaatactgttaagtacccttcatatacacaataatacttaactcagaatattattggattctgcttttcttccttgtgttacaaaatatttccattttcctaattaaattttatttttttataaaattaaaaaaatcccatctcatgagcagaagggctaatccatttttttcagtgagaaattcctcatttttaatgatattgaaatatttagcaaaataatacctacagaatgttaatgtttaacgatcttaatttcaaggcttactattctctcctaagtgccttttgtatcaaacacaaaaattatttaagacagctttgaaagcaaagtgcttcctaaaacttatataaaatcacctgtgtattatgtttaaagtcagactaggccaggcatggtggctcatacctgtaatctcagaactttaggatgccaaggggggcagattgcttgagtccaggagtttgagatcagcctgggaaacatgatgaaaccccatctctacaaaaattacaaaaattagtcgagcatggtgatgtgcacctgtagtctcagctactcaggaggctgaggtgggaggatcgcttgagtcaggaggcagaggttgcattgaggtatgatcgcatcattgcactccaatgtgggcaacagagcaagaccctgtctcaaaaagaaaaaaacaaaaacaacaactacaaaaaagcagaccggctctgtgctgcttctgcttctgcttcctgggtccttgcccaagatttgttggttctcctgatgatctagactgtggggaatgtattaatcttctctcaccccgatcctcatctataagatggtaaccacagagtgcatgttccagagggtttctgtgatgagtaaaataagaatgcgaaacccccagcctggcacagagtaagcctcagggatgctagctctttgagttaatattgtcacttcacacatttcctgtcactattgcttgaatattattattaatatacttcagaaatgtggttattaactaactaagccctgagtcaccggtgtgtgtgtgggtcttgtgcctgcccctaagctcacttgaatacctaactgtgtagttttgtattttctattgcctcataataggtgacaaaaaagcctcaagtgacaaaagccctcacttcctcattctcaggacaggaccagctgaggaaaggggcagtccctaaaaggaggtttattcctcctgctttcagaggagtggctggtagactgatggctcttttattagtgaaggtaagtcatgctgtcttgtaagagccttgtctgtgagagttaggagccaagagagaggcaaatcgatccttccaccatttggggaaggggagatatggaggacagtacacacattgtaaggctttttaatcttctggtatctaaggaaag

SEQ ID NO: 11692 - DNA, 2300 bp, Homo sapien
cccaacacccacagcgctccttaaaggaaaatggatacggatgccccatccctttggtttctcaatgcattttacttagaaagaggtcacctagtaagacccatgtggtgaatgtgcacccgggcggggcatgagggtccttggaaagcaccgcagagagggcgacaccgcaaaccgctgtcccacgcgacccccggggcgagccggggcagcgctgcactcggtgcgcaccggcagcgtctggcacccacgccacctgctgctcccgcgggtctggcaggggcaaggggcggagtgggcaggatcttcagatcaaaggagaccgatgcttgcccacggcatccagcgtaggagccggaatcgaggtgaccccagattttcccagagtgtctgtctcctttcccttctcagaactccgagagccaacgctaaggggcaccagaggctcagactgcggcggcgactcgcaggcacccagctcgcccgcggctgcggaggtcctcggaggagcccacccgggagggggtctggacgcaggcagcgggggcagagggagggtcgaagccgctccagagggtccaggtccgaggaggagccctcggagacgcggacggtgcgcgcggagggcagggctaggcagtgaccccgggtggcacagggcttactgtttcttcctaagactctatgaggccacttctaatcgtttactttagaataggaaagaaaacatagacaaatgggtggctgtcacccaggcagctacacggtcgatgcaggtgcacaggcgtgcgcgccattctcccgtgtcacacagcaggacggaataactgcacgcactgggagcgatggatctcgcggtccgggatccgagacgcattcagagaccaaatgtcacctcatccctcctctagccaattcgagcttcctccgcggacccccaccttccatccgaagtggctcggtccttagttgagaggactctgcccagaccctcgcaccagtagagacctctgcccgggcgcctgcaactcggacgcttcccggagccagagcgtgcgggcggcgcggccgcgaggagcctcaccggccatgccgtccgcagtctgacttttatttttctcttcagtgattaaaacaaaatatcgtggacagggggacagaaaggaaagagcaggcgcctgagcccggggagccgggcgggggcccccgggccccgcggccccgccgccgcccgcccccgcgcgccttctccctcctcccgggccgagccggcgccactgcgccaggatggagcgagctcggcgcgggaggagatgacgcaaaagccagcgctccccccaaaaaagtgtttctccaggacgaagatggcggcaacttagcccgcggactgaagatgactgtggctctcgggaggcccagcccaggcgattcggcccggagctccgcgggaggcggcgtcagcagtcggagccccggcggcggcgcccgcgggcggccctgcggcagcggcggcggcggcggcggcggcggcagcacttagagcgcggggtggggggtgggggggagggagcgccccgccggaggcagcccaggctccggactctgggagagccagcgcggagcaggagcgggaggcggaggagaagaagaaggagaaggaaaggaaggaggaggaagaggaggagaagaagaggaggaggaggaggaggaggggaggcgctccgggcgccgtcagtgggcagcggaggcgcggcatgcccctggcaggggagagcgggctgggctccgcggggccatggggacccgcgcgctgacaatgcctgggtgaccggagccgcgccagccaccctgtcacctccaccatcgccccctgcacccagcctcgccgccggccaccagcaccagcctcctccgtctctctctctctctctctctccattattgtttcccactctacagaggatggggtcggctgatgattaggaagcaagtcagaccttccttcaaagcctggtaatatttatgtaggcaaaagagacagagagagataaaagagagggagagggagagagagagagaggagagagggagaggggaagagagagaaagagagagaggagagagaagaaacgggaggaggggataaggaaattaaaccctttaagtcaatgcatattgtggtgacaccggcacaggcgccctcacggtggagtcggccagggctgtgcgttcccaaaatatgaccaggggtgcttggatgtgtcggcagtatgacgacggcttaaaaatctggttggcag

SEQ ID NO: 11693 - DNA, 2300 bp, Homo sapien
cctctgcccccgctgcctgcgtccagaccccctcccgggtgggctcctccgaggacctccgcagccgcgggcgagctgggtgcctgcgagtcgccgccgcagtctgagcctctggtgccccttagcgttggctctcggagttctgagaagggaaaggagacagacactctgggaaaatctggggtcacctcgattccggctcctacgctggatgccgtgggcaagcatcggtctcctttgatctgaagatcctgcccactccgccccttgcccctgccagacccgcgggagcagcaggtggcgtgggtgccagacgctgccggtgcgcaccgagtgcagcgctgccccggctcgccccgggggtcgcgtgggacagcggtttgcggtgtcgccctctctgcggtgctttccaaggaccctcatgccccgcccgggtgcacattcaccacatgggtcttactaggtgacctctttctaagtaaaatgcattgagaaaccaaagggatggggcatccgtatccattttcctttaaggagcgctgtgggtgttggggatgcgggagaagtaggtgttttttaaagagaaaattgcaaaacctcttgggcaggattcgacctactagcctcttctgctgcataataaggtactgtatacactaaattttacccctaaaaattttcagttcttaccaactataggtaatgatcatccaaaagccgcgtcctgtttgatggctggtttactcaagtgtcatgtagtgttttaaaagacgatttgtgtaagtagatcattctagtactttcgatttcagtgtgttgaatttctgagtaatgtcagtttttcctcataatacagacaaaattattatttattaaccagattgtttattaatcaggactgtactgtacatgccacaatatttcttaactaaatacgagtgcatacattctcgctgacataactattattatacaagtacagtttgtgcattgtaaaaaaggtgtaaaaatcagaagagcaatttaaaaagtcatggtgatatcaacacccagatataatcagtattttcattttacagcatcttcctaacatttttattttgtattactaatttcctgttttgtgatattcactagtccagcattttcgaaggattgaagtatgatagaatacacatccacacttattagataataatatatttcccttcaataatgcattaattttaatcagacacaaacattttaatggtggctgagattattagcatccaatgtcttactctgcatgtgtgattaaatcagaaagagaacgaaaactaggggaaataaaataaacaatataaatttaaaggttcataattatcaaacaaggaaccgaagcaaaagaagactctgtgacttatcttattactattcagatctagtaaaaatcatgtctcagaaggtagttcagtgatacttagtaaaagtcttatatactgcattaaaataatagtgtttaatctatttttactttatgtaacagactatagttaattatttttaagtaagctgggccttgccttcctctaatgtttctcatgaattaggatatttttataaaagacaattttaaggacgcaagcccactgaaagtaaactgttgagaaccaatttgacttttgtttgttgtgtgttggttctagaatgaactgttggaagacagataaaagaccaagtctggcctcttgaagcttagtcaaggggcagataatactaactaggccaacaattacaatacaaggtaatctgtgaagattagcatgttttgagacttcagagtagagcagtaaactccagttggattttaagagggactagggatagataggaattggggacatttaacgggagcagaaagaagtcttctagggaggagaaaaggacaattcagaaggacagcaaatttcaaggacttgggaccttgaaggagcccagggcactggtaggactactgacagataagtgggctgtgttgtgtgtgacctgtatattgggagggggtaagggaagaggctggagagaaaggctggggctctgttatgaatgatactgtataatactcaaaggaaattggcttttctcctgaaagagatggattcattaaggaaatttagattgtgacttcaatgttcgttttcatgaacatcactgttcactaaaatcaaaacgagaaatatgtttggagaaggcgttaactagattagtaaatgttgattcttattagcttatcagctaaaatattgcatagtggcaag

SEQ ID NO: 11694 - DNA, 2300 bp, Homo sapien
taaaataacatgatgaaatggagactgggctttgaatcaatttggagtttgcctggtttcataattcatggttcttctcatgtaactaatacaaagtccagcttctgacattgtaggagctcagtagaggttgaacaagctacaaatgtacacggataggtaccctctcctaagatgggcaagtggaggctcctctaccttaacactattcatttttcctccaaaataaattgataactaaattgaagagcagatactcacaaaacaatatcatgagactttacaacatcacagatgattttagatattcaggcatattaggtcaattagacatacgaagtaaataactgaatgttcttgggctagacggaacctccgctacaaactagcactgaatgaaatgtgtcagttttgaaaaaggaggtttttatacattacacaacctctaagggcacttaacagctctaatatgttttatcagggcccactgcagcaaaatttattttattgtaaagcaatattttatgctaaaataaaatagttctaaaagttgtttccacccctctttatgaataacttctcacttctccatggcgaaagaggactgaccacagcaaaaattcggtggaaaccaacagctcctggaacacaaaaactggggttgtttataatctctccaccctgaatatctagcaccattactatataataataggtgctcaataaaggtttgttaaataactttatttttaaaccttaaacagatactagaagagtccatagttgatttctggtcatgcaacggtttatttctatattgtaagttatgtattgttatgtattatttctgtattaagagaactgagaccacagtagcaaacatcatttaaaaaaaaaaacagctctatatagtttgcaaaagcctattttttaaaagtttaaatgaaacaaccaacgttttgagttgggaggatgtcctgttctctcttgggagttttcacaaccagcgaaatcagtatagttaccactgttttacgtacagagaacaagaattagaggctatcactagccagagcacaaagtgatcttaggtctccctcgagacaaaatccactggcgtgtggatcaactgcttgcagagagcatctgctgccgaggccaataggagccgtgtgtactcaagaccctaaccaggatcctgcaggtcccgcctccgcagccccacggggctgccggcccccccacctcccatcgcgagcctggctgcgccggcgtgcttgagcccggtgactgcaaggccccgggtctcccctgcgcctgcgcggcgagcagctggcggaaccggcatcttctggcgccagcttccggcttagcggctgagcttcaggcttgacgtcaggtgggaagggtgtggggtggcaggtgggggcggttgggaggttggggggggttggggtggggggggtggggggtggcagattgacggtgtggggggagtcaagtggaaggtgtggtccagcaggcggcgagaagtctgtggggcaacagaccgggggaaggtctgtggggcgtcaggcggggtatctgtgggacgtcaggttggggtctgtagggcgtcacgttgggggtctgtggggcgtcagaggggggaatctgtggggcggcaggtggggggtgttcggggcggggtttggggtgtgtgtggcggcaggaggcgggggaggtctgtggggcgtcaggttagggtctgtgaggtgtcaggcggggtttacgtggggtggcaggtgtggggtgtgtggagagtcaagtggggggtgtggggcgtcagattgggggtctgggggatcagatgggtggtgtctgggacgtcaggcgggggtcggggggtcgtcaggcgggggatgtgtggggagtcaagtaggggaagtggggcgtcagattgggggtctgggggatccggtcgtgggggtgtctgggacgtcaggcggggggcctgaggggcgtcaggtgggggggtctgggaggcgtcaggcgggggtcggtctatgggggcagcaagcagggtgtttgtgcagcggcaggtgatgggagttgccgagtccacagcgctgtagactgcgccgcattagaagcctggcctcctgatgctgtgctcttcatctagacccaagccccaggtcgtgggacgatttctcccgtttttgactccctggaactgtattgcctgctttacctgcgtacatgttgattctttctcatggcaaccccgcaggaaaccatcaagatctcattttacagct

SEQ ID NO: 11695 - DNA, 2300 bp, Homo sapien
acctccgcctccctggttcaagcgattctctcgcctcagcctctgacctagctgggattacaggtgcccgccaccacgccccgctactttttgtttttgttttgttgctgttttgagacggagtttcgctcttgtttcccaggctggagtgcaatggcaagatctcggctcaccgcaacctcccgcctcccgggttcaagcgattctcctgcctcagcctccggagtagctgggattacaggcatgcgccaccacgcccagctaattttgtatttttcttcagtagagacgggatttcaccatgttggccaggctgctctcaaactccccacctctggtgatccacccacctcggcctcccaaagtgctgggattacaggcgtgagccaccaggcccggcctaatttttgtattttttagtagagacgggggttcaccatgttggccaggctggtgtcaaactcctgacctcaagtgatccgctcacctcagcctcttaaagtgctgggattacaggcattagccactggcccggcctgtggtgttgttgttattgaacatatgtgtcttgctaccagatggagagctccaggtcaaagctgggttcttgaatcatagcttcctaatcttgatcacggaataagtgccaagcatatataaagtagaccatttacataaataaattaataatcatggcaactctagaagatacttagtgaaaaaaacccttgattgtctttgaaccaatcaactaaaataacatgatgaaatggagactgggctttgaatcaatttggagtttgcctggtttcataattcatggttcttctcatgtaactaatacaaagtccagcttctgacattgtaggagctcagtagaggttgaacaagctacaaatgtacacggataggtaccctctcctaagatgggcaagtggaggctcctctaccttaacactattcatttttcctccaaaataaattgataactaaattgaagagcagatactcacaaaacaatatcatgagactttacaacatcacagatgattttagatattcaggcatattaggtcaattagacatacgaagtaaataactgaatgttcttgggctagacggaacctccgctacaaactagcactgaatgaaatgtgtcagttttgaaaaaggaggtttttatacattacacaacctctaagggcacttaacagctctaatatgttttatcagggcccactgcagcaaaatttattttattgtaaagcaatattttatgctaaaataaaatagttctaaaagttgtttccacccctctttatgaataacttctcacttctccatggcgaaagaggactgaccacagcaaaaattcggtggaaaccaacagctcctggaacacaaaaactggggttgtttataatctctccaccctgaatatctagcaccattactatataataataggtgctcaataaaggtttgttaaataactttatttttaaaccttaaacagatactagaagagtccatagttgatttctggtcatgcaacggtttatttctatattgtaagttatgtattgttatgtattatttctgtattaagagaactgagaccacagtagcaaacatcatttaaaaaaaaaaacagctctatatagtttgcaaaagcctattttttaaaagtttaaatgaaacaaccaacgttttgagttgggaggatgtcctgttctctcttgggagttttcacaaccagcgaaatcagtatagttaccactgttttacgtacagagaacaagaattagaggctatcactagccagagcacaaagtgatcttaggtctccctcgagacaaaatccactggcgtgtggatcaactgcttgcagagagcatctgctgccgaggccaataggagccgtgtgtactcaagaccctaaccaggatcctgcaggtcccgcctccgcagccccacggggctgccggcccccccacctcccatcgcgagcctggctgcgccggcgtgcttgagcccggtgactgcaaggccccgggtctcccctgcgcctgcgcggcgagcagctggcggaaccggcatcttctggcgccagcttccggcttagcggctgagcttcaggcttgacgtcaggtgggaagggtgtggggtggcaggtgggggcggttgggaggttggggggggttggggtggggggggtggggggtggcagattgacggtgtggggggagtcaagtggaaggtgtggtccagcaggcggcgagaagtctgtggggcaacag

SEQ ID NO: 11696 - DNA, 2300 bp, Homo sapien
aaagaggggtggaaacaacttttagaactattttattttagcataaaatattgctttacaataaaataaattttgctgcagtgggccctgataaaacatattagagctgttaagtgcccttagaggttgtgtaatgtataaaaacctcctttttcaaaactgacacatttcattcagtgctagtttgtagcggaggttccgtctagcccaagaacattcagttatttacttcgtatgtctaattgacctaatatgcctgaatatctaaaatcatctgtgatgttgtaaagtctcatgatattgttttgtgagtatctgctcttcaatttagttatcaatttattttggaggaaaaatgaatagtgttaaggtagaggagcctccacttgcccatcttaggagagggtacctatccgtgtacatttgtagcttgttcaacctctactgagctcctacaatgtcagaagctggactttgtattagttacatgagaagaaccatgaattatgaaaccaggcaaactccaaattgattcaaagcccagtctccatttcatcatgttattttagttgattggttcaaagacaatcaagggtttttttcactaagtatcttctagagttgccatgattattaatttatttatgtaaatggtctactttatatatgcttggcacttattccgtgatcaagattaggaagctatgattcaagaacccagctttgacctggagctctccatctggtagcaagacacatatgttcaataacaacaacaccacaggccgggccagtggctaatgcctgtaatcccagcactttaagaggctgaggtgagcggatcacttgaggtcaggagtttgacaccagcctggccaacatggtgaacccccgtctctactaaaaaatacaaaaattaggccgggcctggtggctcacgcctgtaatcccagcactttgggaggccgaggtgggtggatcaccagaggtggggagtttgagagcagcctggccaacatggtgaaatcccgtctctactgaagaaaaatacaaaattagctgggcgtggtggcgcatgcctgtaatcccagctactccggaggctgaggcaggagaatcgcttgaacccgggaggcgggaggttgcggtgagccgagatcttgccattgcactccagcctgggaaacaagagcgaaactccgtctcaaaacagcaacaaaacaaaaacaaaaagtagcggggcgtggtggcgggcacctgtaatcccagctaggtcagaggctgaggcgagagaatcgcttgaaccagggaggcggaggttgcagtgagccgagatcacgccattgcactccagcctgggcgacaagagcgaggctccatctcaaaaggaaaaaaaaaaaaacccacagatttatgaaatatcctctgtatatataaaataggggacatagaataaggaaagcccaagggaggggaggcacacatctgtaaacaagtgtgtacacttcagtgcacaggggggttgacagcgaagctaatgaagcccaagttttaagggcccatttttgcgaacacttccaaggccttgagaggggccctaacgaggtgttcccatggtcgtgtacctcggtaaaatttgcaaaaataagacaattttacattatttttctttaaaagggctctccaaatggcacaaggttcaggcctcacaaaacctgcattcgcccttgacagtccactctcgtagaggtaaaaggagaaaaatagttatggaagcgctttaaatcgtggacctcattgcgacacccttaacaaccctatcaggcagaacaaattgctccgcaaacctgcggcttgcagagcgatggtggactcccgagctcatcgggtccggcacctcttcaccacggaggcctcgggtacggaactggagggagtcctggtgctcggaggagggtggaaggccaagatccctaggtcctggagcagggagccgggcccacgccgccgaggtatcttttccgtccgggccaccgtcgcgggggctcactggcagcggcttctgcgcatgctcggaagagcgggcagggttcccactccgggagcggagacggagaacaggttatgtgggagccggcgggggcatttgccggcgacacccgagcgggggccggaagtggggccacagctcgcagcaggagctccgggctagaccgtggcgccggcagcggcccctgggctggaggaggatgatgaggagcgacggaagcgacgcgggggtacgctgctgcgcggcgccc

SEQ ID NO: 11697 - DNA, 2300 bp, Homo sapien
gggtaatacattaaacagagaaacagaaatagattcccctgagataagttatgagaagagatcatgggaaaatgttagatccaacagtttcctgcacctatcactaagttatattgttagcccagggcaatttggttagtaaaccctcttatccacatgccaagaggtctttgatgtgcccaagaagagggcagtgtgccaagggctacctgtaggtacctggcttgctttaatcattccaagttaactgtcagtgggaggcagtgtggtgcaatggaaaggagacagtgttttgagtcatggtctgttaagagataggtagcttttgccaactcacttagcctctctaaatatatatttcctcgtatgtaaaaggaggatgaaagattaaattgaactactgttgagataaaatgtaatagtgtgttaagtgcagctacttctatgagacaaaatttaaattacttaattatgtactatagcagagtatgtgaaagtaaggacaactagaagccctattagtcctagatcaaataatggatatgattccctagaggtaccgtatctgaacacaggaagtaatcagagcaatgcactctttctctgttaaaaccaaactcaggtagtagatcctctagaaagctttccttggacccctattccctcctgccacccattccacattctgtagtttgtgcaaacttacgtggcagaagttactattacagcgtaattaacctgcttacacaggctgtgagttcctcgatgacagagacctcgtcctattcaactctacattttctgtacgcagcagtgcctgatgcatagtgggcctctattaacgattatttaattgagcagctgatgtcttaggtaggatatcatgacattaacactaaatcggcaatcaagaaatcttacacagtaaaataaaatttgatattttagtcaaagacgagtgatttccctaagcatgcatacaaataagtattgatccacgaaccccctcccgtcaaaagagatcagtgaaaaatccaatatcaacacacaaagccaatatactcatctctttctatccagttactatcacatagtaaacataaataagagttgttaaatggggacggacttttttttggtttcgataccttgggtagtaatactagtaattcattttacttaaatgttgactaaaatctacagcaaaattgacttcgattgtatggggtgcttttttgatgtttcctgaataaccccagaacttcctgtcatgatattcacaggtctaaacctgttactgtcgtgattagatcggggctctccctctctccaacctagtagctggaattattctattttacttttcatgtctgtgtgggagggtgggggagcggagggttggattttagggatcttaggtttgtacacattactggaaatacaattgacatagaacactaagatacgttttaggttccaattacaaaacgacacccggcgagcctctggcaatgcgcgcaccttagtttccaaaacaggtatttggcttcagtttgcttcccctggtgagtggtgagcggagtcggggcggccggcagggctgcaccccgggctggtcctccacaacccccggcgctcggcccccgcacgacccccaggggaagccgcactagccccggggctccccccacagcctcccgggagggtttcgcgcccgcctggaggagccggcggctccccgcgaccctcctagaaggagcggaccggcgctcgggccccgcgggctcggggtccccgagccgcacttactcagactcgcggacaggctgcgcagtcggccgcgggcacgaaaccgggcgccgcgcagcagcgtacccccgcgtcgcttccgtcgctcctcatcatcctcctccagcccaggggccgctgccggcgccacggtctagcccggagctcctgctgcgagctgtggccccacttccggcccccgctcgggtgtcgccggcaaatgcccccgccggctcccacataacctgttctccgtctccgctcccggagtgggaaccctgcccgctcttccgagcatgcgcagaagccgctgccagtgagcccccgcgacggtggcccggacggaaaagatacctcggcggcgtgggcccggctccctgctccaggacctagggatcttggccttccaccctcctccgagcaccaggactccctccagttccgtacccgaggcctccgtggtgaagaggtgccggacccgatgagctcgggagtccaccatcgctctgcaa

SEQ ID NO: 11698 - DNA, 2300 bp, Homo sapien
gaggaaatgggaactcgtcagagggtaactgggtggtgcctgtaaaagtgaagatgtgcttctccctcagcaggcatttgctgggaaacccttgcagacgttacaagcacagttgtagaaaatatctattagagcactgtttgtaactgaaaaatgtttcattcatactttgaatgtaaagaataaaagtgaatgaaaaaatggaagcattgcaccgtgcttttgatttacatttccctgatcatttagtacaaccaccatggaaaacagtgtggagattccttaaagaactaaaagtagaactaccatttgatccagcaatcccactactgggtatctacccagaggaaaagaagttgttatacgaaaaacatacttgcacacacatgtttatggcagcacaattcacaactgcaaaaatatagaaccagcccaaatgcccgtcaatcaatgagtggataaagaaactatgatacatatatatgatggaatactactcacccataaaaaggaatgaattaatgatgttcgcatcagcctggatgggattggagacaattattctaagtgaagtaactcaggaatggaaaaccaaacattgtatgttctaactcacagtgggagctaaattacaaagatgcaaagacataggaatgatctaatggactttagggactcaggggaaagggtgggaggggggtgaggaataaaagactaaaaaatgggttcaatgtgtacactgctcgggtgatgggtgcaccaaaatctcacaaatcaccactaaataacttaaccatgtaatcaaataccacctattccccaaaaacctgtggaaataatttttttttaaatggaagcatccaaaatgtaatttgtttccacattcttgtaagcctcattatgtatcccagggacagttaatatcgtcatacgaattcacaggtgaggaaatggaatcacagagagattatgtactttgcataaggagagcgagggtgaggcaggatttgcagtctagaagcctgggtctggagttctccactttgcactatatcatttctgtaaacttcttacttaagactgtgtggaaatgtagagtgagacagaactaaagctcactattcttagtccacaggggagtagtgactacccagggcttggtaagtgctcagtaacgtttgttgaaagatgaatcaatatttcaatgctggggcaaagcagtgaaaaactggggaatgtccaggaaccagccatcaggataaggcaggactagaatgaatgcaacagtcctcacaggtccaccaagtcaacaacagaaaaatccaaagctaaggtggctcttgtgtgatcaaggacctcttgtacaccgacctgttaggctgtggcacagtcaacatgggagttgtagacaagctacttgagagtggttaatggtagcagtcaggcatttggagctggaggcaaggctgattctcctcaactagtatcatattgagcggggacttaaagcctcagaagtctgagcagaaaagctgagaccaggctccttgggacaggctgttcatatgcatgattgagtttcagtgatgagtcccagaaggaaaaagtttatgcatgttttccttaaaaatatattcacttatatttagagaatccttcagatatctaacctaaatacgtctgtaacatttactctcattctttttatgacattattagtataataatatgaataattcccagtggacttacttccacacttccttcaaggattctccattttatttcataattgaagactgttaataaatcactctctagctaagaacaattcaatgctaaaacacttagcttatctgaccttcacattaattatttttatgacagcagcaggaactttcagctgcttttcccccttccttatgaagccatgtggtcccaagcagacagagttcccttgctacacttaagggtgggcttctcagacctgagcatatcttaaaagctttcccttgactgtgccaatccaaactccaagtttcctcagcagatttaaggggttttaaatctacttgagcatgagtgttatgagaagactttgaaattcttacaaaaactgaaagtgaaatgaggaagacagattgagcaatccaatcggagggtaaatgccagcaaacctactgtacagtaggggtagagatgcagaaaggcagaaaggagaaaattcaggataactctcctgaggggtgagccaagccctgccatgtagtgcacgcaggacatcaacaaacacagataac

SEQ ID NO: 11699 - DNA, 2300 bp, Homo sapien
ttattattcaggccactcaaacacgggctacccaagacacccttgctggctaatctgagtgatgctgcttcttgaccaattacagccttagcctggctcttgtcctcactccttagagataagatttaccatgaggccaatcatagaactaatccatgtcctgacagcatccaacccacagaatatcccacttccttgaacaccctctaaaattacctaacacaagtctacatcctgtaagtccctcttgctgagatgccccacgatgcctcactgcctgcattctccctcattgcagccatggtaaccctaattggtttagcctcaggtgtccctgcaggtcgcaggtcgtggtggagagcactggcactctttccctccttcacaatgcctgcttccctcattctttccctaataagtctttcttgaatcccagctggttattctagctcttgccagctgctctcctccctagccaggtgattattacatggccatcttttaacaaatattttggaaaccatatactggaggattggcctcaactgacctgcactggaattcctcaattcccctgatgcggcacttcggtgctggataatttcagacatcctggaagcactatgcagggacacttctttgcatcctttgttgcaattcctggagctgagtctgttcttgtagcccccaccagcccagtgttgctgagcgaatgacaggtcttgtaccattgcctgcttgatatgtgacattcttagaaatattcagtcatacatttgttggatctctgcattgggaaatgagtgtgaaccagtcttcagcagcactcttctaaacagaagtttctctgatgatatgattcacagaggctgagggagaggaataattttttgcctctttatcatcagttatggataacttttgctgaagggttaagacacagtgaattctggctcacacagatcaaaagcgaatttattcctttcctgactttaaattcttaaatacattcagtctacatactgcatgggtattttgactctctgaactctaaagtgaaaatgtcaaaatcttgacttctgtggtgagtacatggcatctctcttcttaaattagctctaattgttttatagatacatatggatttctttcagggaccagtcacagaagcctggaatatccagattggaaattcacagttcatattggctttattagttttgctccagttgtcttagtactagtaggcttgtttaattcattccacaaaattgaatggattaatggaatcaggtcaaatctccccaccccacatggctggaagggtctgactctgatatgttttataaagagcctgacttacagcttgctcttgagttaaaaaaaaagttcaaaaacaattttgcatattatataaggttacatccctaagtgattgattaactagcgcagtgaaggtagttccgttcttttagtggaaggttaatcaggtctctaataccccaggcagtcgctcccctgcagatgctcaagtccctcttggctctctaatcactagacagtcagccccctctccacctgctgggagtgttttgacagaaagcaaggacttggccctaagcagcctctgatccttccaataaataacgctgctgatcttcacgcctcctcttctgtctgcccagcttcaactccagtccttctgtgtaaacctttaactttttttattgtatggattttaatgttcattgtggtggctactttgagtggttttacagaaaaaaaggagtgcacgtgtcagagttcaatgcaaattcagaaattaagtccttttttttttttttttttttttaccttgagcaggctaaggcttcccttttaattaaagagctgcactccagctctccagtcataaaaggacagcagccaaccgctgtgggctgaatttggggctgcctttgagtcagcctgagctgatgtgttttctggaatgactttttcttttttgaagtcgatctacaggaatcggcctcatcagctgtgtgtgttgagaggtggggacgggggagggatgtgtcagactctgagcgtggaccagaactgcgctcggagactttcagtgaaagcagaggagagatttccaaaggttgtattttccttctggttggagcctctcatccacattgtggtaagtgggtcagctctggttcactcttccttttagaagaacaggagaaatccatgcaggattaactctgcattttccacaagtgaatttcagttcccttgttttaacttta

SEQ ID NO: 11700 - DNA, 2300 bp, Homo sapien
ttaatggaaccaaaattattttcctcagtattaatgcctgcattagaaattaatttttgttttgtagtgatgaaatatgtaaataggtttaaacatagttctaccaatgtttagagcatgagtatgtggtttcaaagacaaaaagataaaagggcttcttaatctggggaaattatatgtagatacagtttatacatagaaagcacattctaagtagtttaagaaatctgtgaatacatttctcagtgtatcctccttcaactcctcaaagtggattagatgttggctcttgttgttttagaggtctacatttgtagtcttacagtttctagcacacaacactgtgctatcttgattgtctctatttcatctgacgataagcactttgaggtcagggagtcaagtttctcttatagcacaaagagttgccaaatgtttatggaatacatgagtcgatgaaaaataaacacatttgataatgagcccctggagatgagatgttaattctcacggggtaccttggttaaagttcttataagaaatgccttaagttattgaaaaaagtagggctcaaatcaattatatttttaataacatattttctttgtcaagtgcacaacatgcccctctgagtgttatgctttttttcagtttaaagagtgaatggtatcattaaactcaattgtcttaagatgtttgctgagtttgtatacatgcagaggcatgcaatttgcagaaaattaagacattcagacatttaaggaaggtatataggcaacatactatttatccggcattgtattaagagaagggggtagggacatctacatggatacaaccttacccgaagatacattagataacattcacataaattcacagttattttatgcacatgtaaagatttgtattgatttaaagaggagagagctttacttcccgtgttggaaacagatatagttgtgtcttacagttttattgaaacattacaaaacatccaagaaaccctttaaaaatacattatagattcctggtatataaaggctctgttttagacatattttattcctgaaaagcacccaaaatggtgacttttgtgacagtgactctcaataattaattgtggaatcaacgaataaatgaggaatcagcattcctgatgaaggctgcaaatcctcattctaatttttggaaaagccaagttaaagcgtccataatcatcatttggtacatacataagtttttttccttgttaatgttaatgacaacttttcaatgaacaccaacaacagaaaccagaaattttatgtgcattatttctaaccttcagaataaagattaggaattatatttcacatgcatagatgaggaaactgaggctttagcaggttaaataatgtgtttacattgatactctggtaagtggtagaagctggatttgacatcaggctgttctgtgcgaaatcttcaacttattattttacatcacgctactaaaatgtgttagaatattattcagtgaaaatgtaatagtcatgaccccttgttgtatagatttgaatttcataatcttctagtttaataaaagcactgctctttgagttttgttcagtaaggaatacaaaattatgttactgccacagaaggatgggtgcacttaacatattgttcatgtttacctttcctataacctcaaacctgaaacataaattctagactatgtcaacttgtctttggagaagatcatcataaaaatgtatcaatttgcaaaaaaaatgtatcactttgaatttgtaaacaacttaaaatataaccttttggtttgctaccatggctatttcattatgagtatgatattcacttttataacaataaaccctagcagaccatatatttctttctgattccaattcagtcagatttacttcatccagttgggttgtacagttaaattcattgcagtctgcagaggtaggagaatcctaaattttaaagctatgcaaaccaaaagctttttgtggataatttaagttttacattctgctcagaaaagcagaaagatgtgttttgaaatataatgcaagtttttcattactaaggacagatcaaagatctctgattctaagaggtggctattttaagctcctgctatcaatttcctattcacacacagcaactggtggcaactaaaaataatccgctttactaccagctaagaatctggtcatatgtggctgatggacagtgtgcacgaagaagatttaggatccttctatccgtggcttctctccagcccactc

SEQ ID NO: 11701 - DNA, 2300 bp, Homo sapien
cttactatcaagcaacggacaaatcaaatactatcaacaccattttgcagttgaagaaacagaggcagaggataagttacttgcccacattggcacaagtagtcattgatacacacagcactaacacccaagcaggttgagtccagagctcctcttctctattgctcatccaggctcggagaaggagctgtggcacgaggcagagttgaagtgccccatggggagaaaagataccagatatgcaacacgcttgatgtggtttctgctatagagctacatcttaaaagtatgaactattatctgagggactaagcacattgaagcccacacagtttaaataactttcgcagagtcaacctgaggaaggaaactacagacagtcatgttcaggagcatcaatccagagtgtattcttgggtccgctgtgctaggctttctcttgatgtttgctgccaggatgaaatcagataagagacaaagtgctcagaagagtggctggttcatagcaaacacttgctgtgagggaggtatcaccatcattatcatttttcccttggaagaagatgaattaattctccttagtaaatacatattttgttcaggaaccaatgctaggaataggggacacatcaatgaagagacacagccacagatgaaacatcatgaaacttcaggttaaaatatatgctgagtagaggtatagacctgagccttctgtgcaccacctacccacctgggtgaagtcagactgtggattccgcactcaatattagttatctttattaacattagtagtcatgaaatgttcaactgatgcatcatttttaaaaacttattttaaaatcattttagattacaagaaagtctaaagacagcgcagagttcccaaatgccctccacagagcttcccctaatgttaacactcgcatagccatggtacacttatcaaaactaaaaagttaacattgggacaatattaactgtactaaactacagactttattcatagttttccagtttttatactaatgtcttttttttttttttttgagatggagttttgctcttggtgcccaggctggagtgcagtggtgcaatcttggctcactgcaacctctgcctcctgggttcaagcaattcttctgcctcagcctctcgagtagctgggattatagacacttgccaccacaaccagctaatgtttgtacttttattagagatggggttttgctatgttggccaggctggtcttcagctcttgccctcaggtgatctgcccaccttggcctcctaaaatgctgggattacaggtgtgacccacagtgcccagcctaaagtcttttcttctattccaggatactagattgcttttaggagcaactattttggccagaaaaatcaaagagatcaaaaactgtatctttgttatttgtttccatttaagtactttaaaatactttgagtaatgtatgttgatgatttatactaaaacagatattaattgaaaacctgccattataaggcatcatatcatactttagaacataacatcccagcactttgggaagccgaggtgggaggatcacgaggtcaggatatcgagaccatcctggctaacaccgtgaaaccccatctctactaaaaatacaaaaaaaaattagccgggcgcagtggcgggcgcctgtagtcccagctactcagaaggctgaggcaggagaatggcgtgaacccgggaggtggagcttgcggtgagcagcgatcgcaccactgcactccagcctgggcaacagagcaagactctgtctcaaaaaaaaaaaaaaaaaaaacataacaagagataattttatattttttaaagactatagttggaaatagaatatgtacaaagataatcaattctttgaatgagtgttcaaagtggaagagaagcttcaaagaaaaacacattgaaagaataggttataaagctaggctttgacccccaggaactgagaagtatctctccattctggttgaaaggctctttctccccacaggagtggatttgacctcactgcgccagatgaagcttcagagaccaatgagtatgttaacagatgtcaaacacttcttatcatctggaggaaatgtcaatgagaaaaacgatgaaggagtaaccctggtaagttcatatatttgactcagaaactatttgaatagagaatttaagttgatctataaaacatagaattcattaaattaacctttaaataattgttgtgatcataaagtaatacatgtcaattgtagaagttttggaa

SEQ ID NO: 11702 - DNA, 2300 bp, Homo sapien
cctgcccccaggtgaaataaacagccatgttgctcacacaaagcctgtttggtgtctcttcacatggactcgagtgaactttgatgccgtggctcggatcgggggacctcccttaggagatcaatcccccgtcctcctgctctttgctccatgagaaagatccacctacgaccttaggtcctcagaccaaccagcccaagaaacatctcaccaattttaaatccagtaagccgcctctttttactctcttctccaacctccctcactatccctcaacctctttctcctttcaatcttggcgccacacttcaatctctcccttctcttagtttcaattcctttcattttctggtagagacaaaggagacacgttttatctgtggacccaaaactccagcgctggtcacggactgggaaggcagccttcccttgctgtttaatcattgcagggacacctctctgattattcacccacgtttcaagggtgtcagaccatgcagggatgcctgccttggtccttcacccttagcggcaagtcccgcttttctggggaaggggaaagtaccccaaccccttctctctgtgtctctacccgttctctgcttttctggggaaggggcaagtaccccaaccccttctctctgtgtctctaccccttccctgcttttctggggaaggggcaagtaccccaaccccttctcttcttgtctctaccccttctctgattttctggggcaggggcaagaacccctcaaccccttctccttcacccttagtggcaagtcccacttttctgggggaggggaaagtacccctcaaccccttctccttcacccttagtggcaagtcccgcttttctagggggcaagaacccccaatcccttatttccacaccccgacctcttatttctgtgacccaatcccttatttccacaccccaacctcttatctctgtgccccaatcccttatttccatgccccaaccccccttcccacttttctagggggcaagaacccccaatcccttatttccacaccctgacctcttatctctgtgccccaatcccttatttctgtgccccaaccctttctctgcttttctggagggcaagaaacccccaccccttctccgtgtctctactcttttctctgggcttgcctccttcactatgggcaagcttccaccttccattcctccttcttctcccttagcctgtattcttaagaacttaaaacctcttcaactctcacctgacctaaaatctaagtgtctcattttcttctgcaatgcctcttgaccccaatacaaactctacagtagttccaaatagccggaaaacggcactttcaatttttccatcctacaagatctaaataattcttgtcataaaatgggcaaatggtctgaggtgcctgacatccaggcattcttttacacatcagtcccttcctagtctctgtgcccagtgcaactcattctgaatcttccttctttccctcccgcctgtcccctcagtcccaaccccaagcgtcactgagtctttctaatcttccttttctacagacccatctgacctctcccctccttgccaggccaagctaggtcccaattcttcctcagcctccgctcctccaccctgtaatctttttatcgcctcccctcctcacacctggtctggcttacagtttcgttctgtgactagccctcccccacctgcccagcaatttactcttaaaaaggtggctggagccaaaggcatagtcaaggttaatgctcctttttctttatcccaaatcagaagcgtttaggctctttttcatcaaatataaaaacccagcccagttcatgtctcgttcggcagcaaccctgagatgctttacagccctagaccctaaaaggtcaaaaggccatcttattctcaatacacattttattacccaatctgctcccgacattaaataaaactccaaaaattagaatctggccctcaaaccccacaacaggacttaattaacctcaccttcaaggtgtacaataataaaaaaaaggaagttgcaattccttgcctccactgtgagacaaaccccagccacatctccagcacacaacaacttccaaatgcctgaaccgcagtggccagacattcctccagaacctcctcccccaggagcttgctgcaagtgccagaaatctgaccaccagggcaaggaatgcctgcagcccagggattcctcctaagccatgtcccatctgtgcgggaccccactggaaatcggactgttcaactcacctggcagcc

SEQ ID NO: 11703 - DNA, 2300 bp, Homo sapien
cctaccacccctacccagaggactacggagacatcgagatcggctcccacaggagctccagcagcaacctgggggcagacgacggctacatgcccatgacgcccggcgcggccctcgcgggcagtgggagcggcagctgcaggagcgacgactacatgcccatgagccccgccagcgtgtccgcccccaagcagatcttgcagcccagggccgccgccgccgccgccgccgccgtgccttctgcggggcctgcggggccagcacccacctctgcggcgggcaggacattcccggcgagcgggggcggctacaaggccagctcgcccgccgagagctcccccgaggacagtgggtacatgcgcatgtggtgcggttccaagctgtccatggagcatgcagatggcaagctgctgcccaacggggactacctcaacgtgtcccccagcgacgcggtcaccacgggcaccccgcccgacttcttctccgcagccctgcaccccggcggggagccgctcaggggcgttcccggctgctgctacagctccttgccccgctcctacaaggccccctacacctgtggcggggacagcgaccagtacgtgctcatgagctcccccgtggggcgcatcctggaggaggagcgtctggagcctcaggccacgccagggcccagccaggcggccagcgccttcggggccggccccacgcagccccctcaccctgtagtgccttcgcccgtgcggcctagcggcggccgcccggagggcttcttgggccagcgcggccgggcggtgaggcccacgcgcctgtccctggaggggctgcccagcctgcccagcatgcacgagtacccactgccaccggagcccaagagccccggcgagtacatcaacatcgactttggcgagcccggggcccgcctgtcgccgcccgcgcctcccctgctggcgtcggcggcctcgtcctcctcgctcttgtccgccagcagcccggcctcgtcgctgggctcaggcaccccgggcaccagcagcgacagccggcagcggtctccgctctccgactacatgaacctcgacttcagctcccccaagtctcctaagccgggcgccccgagcggccaccccgtgggctccttggacggcctcctgtcccccgaggcctcctccccgtatccgccgttgcccccgcgtccgtccgcgtccccgtcgtcgtctctgcagccgccgccaccgccgccggccccgggggagctgtaccgcctgccccccgcctcggccgttgccaccgcccagggcccgggcgccgcctcatcgttgtcctcggacaccggggacaatggtgactacaccgagatggcttttggtgtggccgccaccccgccgcaacctatcgcggcccccccgaagccagaagctgcccgcgtggccagcccgacgtcgggcgtgaagaggctgagcctcatggagcaggtgtcgggagtcgaggccttcctgcaggccagccagcccccggacccccaccgcggcgccaaggtcatccgcgcagacccgcaggggggccgccgccgccacagttccgagaccttctcctccaccacgacggtcacccccgtgtccccgtccttcgcccacaaccccaagcgccacaactcggcctccgtggaaaatgtctctctcaggaaaagcagcgagggcggcgtgggtgtcggccctggagggggcgacgagccgcccacctccccacgacagttgcagccggcgccccctttggcaccgcagggccggccgtggaccccgggtcagcccgggggcttggtcggttgtcctgggagcggtggatcgcccatgcgcagagagacctctgccggcttccagaatggtctcaactacatcgccatcgacgtgagggaggagcccgggctgccaccccagccgcagccgccgccgccgccgcttcctcagccgggagacaagagctcctggggccggacccgaagcctcgggggtctcatcagcgctgtgggcgtcggcagcaccggcggcgggtgcggggggccgggtcccggtgccctgccccctgccaacacctacgccagcattgacttcttgtcccaccacttgaaggaggccaccatcgtgaaaggtgaggaggccctttgccttggcgtctggcgggaaggaggggcggggcgctgagggagcctcttgggtttcactgctcccactttttggggaccttgacccagaagccgacagcctggcactggctccttgttttgtttttctgcgggctgccctgtt

SEQ ID NO: 11704 - DNA, 2300 bp, Homo sapien
gtaagaaaaggtaacaagatctaaaaagaacgccgaagcataatgttcataaaggtggcgcccccaacacacacaatcatacacacatacctatacacacacaatcacacaatctattatataaacaaacacgcacacatgcacacataggtgcacagacttaaaatggcatttcttgaggtatttttttttaaggtatgatttaaaaatggaagatcaactttaaacacacctttttgaggcacactgggtgatatttgccacaatgattattcttcccaaattcaggctactgatcaataatcctaactgtatacatgctaaaaataaaaacgctataatctttgtactagtcagggctctcttggcacataaaattagccaacacaatcttcaagtcacatgttacaaaaacatattaaaatatatatcactctttcaaaaattacacttattttctcttagattaagattttattacttttaagatacttctatgaattatagaggacatccaaaagtaaacatccgggacttaaaaacaataaccaatattataagataaattattgctgtaaattatttcatgaaggcacaattaaaaaaaaaataaaataaacagccaaagcctgttttgttgagttttcttcgttgcgcaggatcgggagcttgctgggatctgaactcaggaagccctcacctcaccctgacttggtcattgaggagacgtaattgcaggggtgcttatttgctataggctttgaaagtcacaaaagcccagtagatacatgaattcgaagcagttctccaagggcatctccaacttggcagtcaccgcccgcaccgcgcacacaggtagtggacgcccgcccacctgcccgtctgctgggcgcagggcgctcctggggtggggagggcgctcctgtggggggaaaaggggcgctcctgcctcggagggggaaaggacgcccctgtggaaggaagggggggctcttgaagcggtgtggtgagaggacgcttccgaggaaggaagggggtgctcctgcagcggtggggggagaggacgcccctgcggaaggaaggcggcgctcctgcgggggctggagagacgcccgcgcggtctcccggctcagggaccgctggctcgcgggtccgccctctccccggcgctatggaaaccgcactttctccgcctgccgtccccgatctctttctcctattacctcccaaacgcgatttcaacttcccgacaagctgacaagtgaatggcgcagaggacgccccgtaaagcgcccgcgagcgggtgggacacaggcgccccctccgcgcccctctgtcctccacggaagggcgcgcgccgctctcgatctggagcgcggtgctcgcgaacccgcggccgcgggccctggaacctccccgcgtttcgcggctgcggggggacggagatgcggccgggagacggggacgggaaacgggggacggggatggggcgcgcccaccccgagcgcgggagcggccgccctcgcccaaaatggggaccccgcgccccgagagcacggcccggctcgccgcccatgcttccactgcaaggccgcagcccccgccgccgatcccgatcccccgccccgcccagccgcggccccgcccggcgccccctccccggcggaagctcaagcccaattaattgagtccgaggcgggagggaagggccctgcgcgccgtggcccgccccgcccctcttccgcgccccttttcccgccctgggtggcatctcctccgccggcatccacaacaagccgctgattaatgaggccggggccgccccaccccgcccggccgggccggggccttcgcgggagggggaggggacggcgggaaacgcggcccggggagaaaggggggcggggcgggggcgcgcggcccgcccccgcgagcgccgcgccgattggccgagcgcgccgtccgtcggggggcgcggcgccaatgcgaggcagcggggcggggcggccgcgctgtgtgtgcctgcgtaacgccgagtcacatgttgttttgctcttcttagttcagtcactcggtgcgcgatgtgttactcactgtgcggcggggaccgcgacgagcccgggtcgccgttggcagcagcagcagcaacaccagcagcagcagcagccccggcggcggcgcggaccccgagcgcccgggcgcaccccggcttcccggagcgcgacgcggcggcagcagccccggtgcggccgcgcgcgccttaggctcggccccgcggctcggggaccccgactcccggc

SEQ ID NO: 11705 - DNA, 2300 bp, Homo sapien
aatgtggatcccagttccagcactttctggctgagtagtcttggatctatcagctcacttctttgagtatcagcttcttcctctgctatgtcctggtttccatgttttccttgcagagctgcaataagggtcagagatgctatagaatgggtcatagtgcctagcaggctggtaaccaatgctagccatattttcagtctaaagattgggcaaatgttggtctgtccttggttgaccaacttcttcctttgagaagcacatagcatctgtacacacagaagcgtgtgcatgtgagggattcatacatatctaagaaccttctgcaaggaagtttatgaaaaaaaattcacattaagtgaattgtgccagagttaaaattctgccaagtcgacagggagtctgaagatgcctttctcaggcctaagtgaacaagtcaatgggacaattgttggaaacattttctgtttttcttgtgaaacccaagtctcaggatgctggaggagaagccattggtgggtatgggtgttctttgcagttttaactttccaggaactgagcaacgttctagtgtgagtctcttgggaaagtcaatttgactctgctgactcaacataactcattttagagctggcccagtgcccactcccagagtttcatctctcactggtgccctggaagtccttatctcttctggaattctgggcatgagcataaaaggaagcctgttcaatatgcacaggagtattcagcactggccaggaggtgctgacgggtagctcagtgggcccagaagctggagaaaaggcttctgcgtgctgccggtggggctgaggcagcaggcagagctgaggacagcgattgttctttgagtctgtctgttactgaagctgcacaatgaaccacacatcaatcagaaccttctgacaggtgctgtgtgttcctatgaatgttgagcagttgttagggtaagaaaactcctggaggagagctgggtgcccaaagccacactataactccctctgccccatccaggtctttgcttgaaatatctaattaagataagtgtttttaagaaaaacacaagaagtgcagcagaccagggctttgtcacagagctcctggcttgcatctagaaaatcaatgatgaggcatgaatgcatgaccattttcaagaaggtggcttcttgattctatggttgcttgtgttacagtcacactggtgtgcttcatggatgggttcttctgtggatcacaaggctttgttcttacagggccctcaaggtacaccagggctgataggccagccaggagccaagggggagcctggtgagttttatttcgacttgcggctcaaaggtgacaaaggagacccaggctttccaggacagcccggcatgacagggagagcgggttctcctggaagagatggccatccgggtcttcctggccccaagggctcgccggtatgtttatctccagactttgaatgtgcattttacagtgtggatctgcaaagcattgagaaatgagtaatttgaatcatattgatgtatttctatctccttgatgatggcacaaatgaacttgtttcatgattcatggttcatggaacaacttaagtctataaacctaggcattgccagttattattgacaaataattaggtgataacagatcagtgtcttctgatgcatttgggggaactgaacagatgtgtttgtgtatctttttgctttggatgggaggtgaaatctaaagttaatagtattcatgtcattgttttcaaaagattccaggtatcaacatctcattctctaaagtatctccctaagtagatgagggaggaagaatgctcagcttagggagaagaatgctggtttcacttattaactacaaggtggccctcctgggagggtagatgaagtaaataaatagtgtgagccagttaactctagtacttattgaccacaaatgtcagaagaatgcgataaggacagggtgttggtgtgtctctgataacggtgtctttttcttcttctcacatcagggttctgtaggattgaaaggagagcgtggcccccctggaggagttggattcccaggcagtcgtggtgacaccggcccccctgggcctccaggatatggtcctgctggtcccattggtgacaaaggacaagcaggctttcctggaggccctggatccccaggcctgccaggtgaggcctgagaaactcgtgatgcagcatgaagttgtaaacggaggttagggcaggcacctcgggtgcacacagaggcctggg

SEQ ID NO: 11706 - DNA, 2300 bp, Homo sapien
tgatcagaagtgcccacaggctgcatctcttaaaaacagtccatggcacctcaagggacactgcaaagacagtggccgggaatgtaattgagctttaggaaatgattaaagggaagtaaaatcatctccaactcaacattaatgcgtttgatttcccgggtgagaacaggatttgcgtaactgagtggttctttctttctacagtcctggatgtttggaaagccagctcttacagttagctttctttgctttgctaacattatccatcagaaaatcgaaatgcaaacagctcctatttcccaatgaagaactttctctgatttaccttaccatcatcaggcttcaccatctcaccttggaagcgttcaatcttttggtcaatatttctagaccaaaataaagtgctctcaagcctgttctttggaaagtattttgtcatcattaccaaagagtgtttaaataactggctatgaagtttggggagactgggctgggaggtacaatctgaagttaattgctgatgtaatcattagtcctttcaatacccagtggagaagctgcctccagggagataagctctcaattaggagacgtgtgtgtatatcaccagttctctctggcatgtaacagttaacaatttctatacagttaagtggatttagtgagtatcattcttccaggagagaagtaaaatttttttttaaagaggaaaacaaagaacaagattaagaacagtaaaagaataagtatggaaaatctggtaagtagcaaaaatcatttttaagcatttgagggagaaactgcaaaatctgttcagaagccacaccttccggcctgtgggactgcatggctgtgacactgagcaacagctgaagtctttattctctcggaggggaaggaaaaaaggaaacaacagtcagtccaggcttgtccacggctggaagcctcgactcctgcaaacctcctgcaaaccgatctcccagatcctttctgggcaagcacataaccaaaggaaatgaaaactagaaaaacaatttgtgcatggaacaatgacatggagtttcactttggtttcatgctcaaatatgaatgtggttataattttttaaaatatatattaatagaaggcaacgagttgaggatggtggcttcttcaagccgggcgtccagaagagccccacttctgccttggagcgcgccttaggcagcagtcgtgggaaagctcagatacagctgtttccaggcaaagggcccagagcttttcagcctcagccaccagggtctccagacaaggagaaatacgcccaaagctgctcccaggggctaggagctcggagctcccagtgtgggtctctgagcagcgcggggtgggcgctcccggccctccagcccccaactccctcgcgcacccgggacgggtgaaggcgcccagctgccgagcatacccgcgacgcgggttcaaatcccgccggctcccaggcaccctcaccccgccacagcgcgggctgtttctcctcccttccccggaggaattccttaactctccagtacccataccataacaaaggaggctcggtccaccaatgcgcgatcgtagcctacagggacccccaacgaaccccggcccagagaatgcacctggccgtgccacgcgcgacccccgaggggcaggcggacgggtccaggcgcggacaaaggggcctctcggggcgcccaagctcggggcgggacgccgggagcggagctggccgggaactcaccttcgcagcggcccggctgtgctcctcgtggagcagaagggcggcgggcagcagcagcagccagacgctgagccggggccccatggtggcgcgcccgaggcggcgagggacggctgcccggcgtgcgggggccgcggcggacagctagctctcggaaggccggacttccagcgctacgcaccgtcccgggtgcggcggctccaagcggagacctgagcgcggcgggccgagctccccaatttgttggcgctgccccctcccccccggcggtgcgcgggcggcgcctcaaaggggaggaccctgcggcgcgggtaagaggcggcgggagcgcgcggcccgggagtgtggctgcagtgcgccgggacaccagggctccgcgctccgcactcaagaggctcccgcgtcccaacccctcgcgcccgcgcgttcgcggatccaggccgaggaccgaaaggggccgcccgagcccccggggccggcgcccagagagcccagcaaggccggccgccctgccggtgtgccgccggcgggtgcttctgg

SEQ ID NO: 11707 - DNA, 2300 bp, Homo sapien
ccggaaccaacagcagcggaaaagtaaagttagcagctcttccccaagtgggagtagctcctcatcactcactgcctttaaaatcctggtttgttttacatcagggcagaacgatgtaaaaacaacagaattcaaatgaaatcatgaacacgtttgccctttgtacctgtgtactgctctggcacagtgcgcgctgaggagggaggggtcgttcccaggaggaatccacctgggccccggctgccacagggcagggctactccatcggccacagtaaggagaggagggacagcggacatctcgaaagctccctccgctttcagctcctgtctaaacatttgagtcctgcaccgaattcacctaccaaacctcttcattttagccatggttacataaagctcagtaaaagtggctcctactctttaaacaaaacgtataaaatggacaaagcctcgcagtgcagtcgccagctgcacccacggtatcggcagggctgtgcacggccggcgtggaggggcaggctcggcgaacaggatcccagtgtggcgcccggagcagctcttccagggccggaacaggacttgggagaaaacgcggtttttctgccattgttccctcgcaatgcttcaattcaaacaatactaaggttgtctcgttcgcctcctcgccccgcccctttacccagagactcccatttaaaaacacaaaaaaccctcagtccgtgacagagactccccaccagctcccgagttccaggaaaacttttttcgccctaagcctggcgtctcactgcctagtgactgacacactttcctggcctctacggctgcagctttgcccaaagcaacgaaaacggtgcctcaggctacattttaagttcccagttcccgtgaaaggccgacgcttgcaaaacacaggattgacgctgggaacccaaggggaaggaaaggtggaaagcatgatgagggaagagcaagctttctcagaaccttggtgggcagcctggcgaacatccacacgcacacacacactcgggagcgcacggacgagctgccttctccaaggccactcaaacgtcccaaccactctcgggcgcgcaagtccaagcgcgggagccaggacttaccgccaagacgctctgggcgaggaaccccacggtcactgtccccagcagcagccacctgcatgggaaagggaggaagagagacgtgaacgtgcgggcccggcttgtcagtccccgagagttacaccgaagggtccatgcgcgcgtgacccacggggaccaggcagaaagtcgcttaccgccgtagggcagggccggccaccgcgcgctggtctctccccatgctggcggttcgtccactctgggccccggtcagtcccacttagcctagaggcgacagacaaagcgagtttagcgcaggatgagggaggcagcccatcctcaccgccggtctcggtccgcgagacgcggggacagcgcggtgcgcggcccgcatgcaggggtgaccggagggccgtcccccccacgacccggaaagaaggagagcctcccgttaggcccctgtgggtgctccttggccgaggagctcggtcttcgctctcccaccctccccctttctactcccaagcaggagagcgtgcagccctagcctgcacaaggcgctccaagtcggtgctctcgggccagggtctgggcgccgctcgggggtcgctctcacctcgggctcggcttcaggggctgctgcccgaacgcattggcccttccagaagcacccgccggcggcacaccggcagggcggccggccttgctgggctctctgggcgccggccccgggggctcgggcggcccctttcggtcctcggcctggatccgcgaacgcgcgggcgcgaggggttgggacgcgggagcctcttgagtgcggagcgcggagccctggtgtcccggcgcactgcagccacactcccgggccgcgcgctcccgccgcctcttacccgcgccgcagggtcctcccctttgaggcgccgcccgcgcaccgccgggggggagggggcagcgccaacaaattggggagctcggcccgccgcgctcaggtctccgcttggagccgccgcacccgggacggtgcgtagcgctggaagtccggccttccgagagctagctgtccgccgcggcccccgcacgccgggcagccgtccctcgccgcctcgggcgcgccaccatggggccccggctcagcgtctggctgctgctgctgcccgccgcccttctgctccacgaggagcacagccgggccgct

SEQ ID NO: 11708 - DNA, 2300 bp, Homo sapien
ttatttcttaaaatatatactaatgttaaagatcgcctcgacttccctgtttcctttcccatttcccggaattctgagctatggatccagaacagaaagacaacagagatgaacaggaacctagtgccatggtcagccaggtcacaggagccagtgacagactgtgtagcagtctaagcaatgccacggaagccggttctggaaggcacatgtacatgcttgagcatttctctcttcccacccgccagctcccctgcatcagcctgggccttcatctccagaacagcgaaggcacaggcttttgtgttctactgtgggtggagaaagaaacacatgattttgttgttataatttagcatcggtaaaatggctgttattttaagagatgctacgttgttaaaggaaaggaagctaatttggacaaggaaagagccgtgtgcgcctcagaagtcaggagagattacaggattgggaatggagaggggctgccctgtggatgaaagcaccagctgcagggtgcgggggggagctggtgggaggtgcagggatggggtggggaggctggcagcagtgatgctggtgtgatctgcgcacacaccacggcacggctcggtgctgtccccacgtgctggtggaacagccatgcgcataagctcccgctcatctgctgagccacgggacgaggctgggtgttctcatgacaatgaggcagctgcttataagaaatcaaaccctgctctccactgacaccacagccccttccttgtcaaaggcatgacggagcggggcagggacaccggtccagctctatttatgagaccttgattaagtggtgtacccctgtgttttagctttttttcacaggggagggggacacaaggctgttgcagagatcacagggcagatgccccaaacttagtggacagcagtggggatgatgccactggaaggtggcacaggcaggatcacgagttttctaaaggcagaagttgacattcttggtttagagatgccaccaaacaaggaaggcacacaagcactgggaaagtccctacaccccgagaatgggaagctgaggctgcaaggttctccctgaccctaaccctcacccctacccctaaccctgctccgaccacctgcccccagctgggctgggactggcagccaggcttgggagccgcaggggtgggtgaaccccatggctggacaggtgcacctcctggtcaccaacttcacaaggcaccaactccagggaaggccaccactaccgtaacaaatccagactcaaacggaccacacacatacacacatgagcacaccacacaccacacatacactcaccacccccaccccacatgacactgaacaggccaaagactgttccaaccacaggaatcatcactcatcctcctcttctggctaaagtgaccaattatgactttgcctcttatttaaccctgttgcctcccagatgagatttttaagatacccaatcatagaattatctgtgttctctggccccaaaaaactgcacttaaattgtaaaaatgtgggccgggtgtggtggctgatgtctataaaaccagtgctttgggaagccaaggcaggagaatcacttgagcccaggagtttgagaccagcatgggcaacatagagagatctcatctctacagaaaattttaaaaatattaggtgggtgtgctggtgtgcacctgtggtcccaggtactcgggaggttgaggcaggaggatggcttgagtccagaagttcgaggctgcagtgagctttgattgtaccactgcactcaagagtgttattacagacatgacccacgttaaaactagagaagacatgggttatggaatgaggcaaataagctgcgaatagaattcaggcgtgaggctctgaggaggagaaagaggattatgacttcaatcgtcctccaatgatgctgaagtcttaacccccaggacctagacatgtgaccttatttggaaataaggtctttgagggtgctcaaggtcagatgaggtctttaggatgggcccattccaatatgaccgctctccctataaaaaggggaaatttgggcccagagacagacacacagagaggacagatgatgagaagacagagagaagacagccgtctataagccaaggaatgccagagctccgggaacctgggagagaggcagggacagatcctcccgcactgtctcagaaggaaccagccctgcagacaccttgatgtcggctttcagcctccagagctgtgagaccatacatttctgatgtcta

SEQ ID NO: 11709 - DNA, 2300 bp, Homo sapien
agctaacaaaaactcaaaggctttatccctgcctcaacacactgaccatgtgataagggaataatcctaaccaaaggaaactcttgagaaccaaaatgatggcatcgctaagaaccaaatatgtcatgaaacatattccaccatgattataccgtggtaaacatgaagagggggcggtgaaaagcaggggacaggtgagttcccagagaagggagtaccaccaggcacaggaggacacagctttccaggtggaaggacataacacggtgccagagagaacgtggtccacacatgaggtgggttcaaaccctcacgcggacaggcatctcaagaccccccacgtaaggcccctcgttcattgagtttattactaacaagtcacattttcatgacttctgttcagatgcttttgttctgaaataatcacagtggtctctaaaaacgtaatgactaagagtgtgtgttggtgaggaggtggagaaatgggaaccttcacaggctgccagcaggagtgtaaaacgctgcggccagtgtgccaaacagtttggcagttcattaagaaactaagcatagagttacccagaagttctactcctagatgaagatcattgaaaacataggtacagacaaaaatgtggacacaaatctcatggcagcatcctttatagcagccataattggaaacagcctgaaaatgcatcgactgatgaatggatgagtaaaatatggcagagctgtgcaagggcacattcagtgctgaggaaggatggggctctcagacatggcgcgtgggcgagccttgagaacactatgccacgtgtcgtctgactgcatgtatatgagatgtccccagtaagcaagtttacagaaatgaaaagtggattcgcagtttcctacacttgatcttagccaaaaggccgagaagcgatggattcgcagtttcctaaagctgaagggttaggggagaattagggcatggctgccagcggctccagggtttcattttctgggataaagtgttctcaagttagacggtgctgcttgctcacagctctgtgagtacactaaagttatgtaattgttctgtttactggagcgagttgtagggtatataaattatacatcaataagctgttttggaaaaccttaattactcttcagacttacagcttttacaaattttcagcaaaataaaaattgcaatctagggtgctcattttttttaagatttttactcacacttgtgctttcaaatagtcttcctgttagcagagatttcaggctatttcaggcaaaaaaaaaaaatgacattttaagattaagtaattttcagctccatggtaattatttcctcgagcctccttagggtgaagttaaccatgggggtgtctgtccctccactggtgggcacgctctgtggggtcaggaccaatttatgattttgatcccatcagcctctagcctagtactgaatacacagtaaatgcttagagactgaagctcaattattttcactgagccagatttcacttactcctccagtgagcatggattccggggcatccccagcctgaactagcacagtttcccgcccggcccgcagctctgggcccctcccctcctgcaatttctcagctcctcagaaccccccggagacctcccttccatgcttctcctccctgtgaaggtgcctacaggagggcacggagctggcgcctgcctcacgggccttcctgcttgtgaccgaggtccatcatggtctcatcagagcacacacaacaaaatgaccttctcacaaagcatcctatgggagtcacactggctttgaccgctccctctgcatctgctggcaggcacgtccccctactgtggtgctgtgtgctcagtgacaccagccccaggcccaggaccctggagccacccccaactccaactactccgatggacacaggagaggcttctccggcgcccttggtctctctccaaggcttccctgcttgggggagacgtgcagccctatggctcagggaccaggccttcacctgtgttctcctgcgtggtctggagcccccagaaaatgacagcactctattcccttccaggcagccgaggggaccctgggcccccaggaccacctcctgtcatcctgccaggaatgaaagacattaaaggagagaaaggagatgaagggcctatggggctgaaaggatacctgggcgcaaaaggtgaggcttctgacctgcagccaggggcccctagtccctgccgccccagcccgcaccagctcgtgcccttctccg

SEQ ID NO: 11710 - DNA, 2300 bp, Homo sapien
tgcctctgtgtatatctgtgaatgccagtgttgatttgggggggattccaagtgagttttagtgagtggacaaattgggaaacacagaatctgtgaataatgaagaccaactctatccaagctgggatccgaggcactggaggacagccgcagggagggttgacaatagtgatgtcaattgtaagcctcatttgcaatttttcaaccttctgtccatcacctgtgctgaccactgtccacacatatcaggatcagagtctgaccagctgtgcctcgcctggtgctgaggctccatctaagcatgatcgggcagcgccttggggaagtcgagcacaggcagacaggatcccagtggagggctcctcacaggagaaaggctggggtgggggaggggttcacatagcccctgcccccccaaccccgccctgagggcctccccagccccaccatgagatgttccttggcctgagggcacctcccatcactgtctcgctcgctaggctctggtccaccacaggtgatggtgtggagggaaaatagtagatttgaaaagttgggtgctaacgctgaaaataatttcttctgttttcatcctaaggggaacgaggcccacctgggagcccaggacttcaggggttccctggtatcacacccccttccaacatctctggggcacctggtgacaaaggggcgccagggatatttggcctgaaaggtaagcaggacttatacatctgtgcttcgacatctctaggggcaggagctggcaatggcccgcttaatgtagggggagaacagacgttcatttccacgctgtgcccagactccggtcaaagaggcaggagccatgatggctcctcctgtgtcatttccatcacctgcacgacctggtccctgggaagctgagacacaggccatgtcatttacttgctgtaatagcagatattcaaactgcagggggctcagaaatgtgcagtatgaacggctttcttcttcctcactgtattgtgtttagacaagtattaaatttaatttgcacttcctaatcacgaacgagctgaatattggaaagagatggcgtaaagatgaagtcacccgtcaaacaagtgtttgtgcgtcaaggttcacagcagcactactcacaagcaccgagtgctgaaagcaacccgagtgtccatcaacagaggaattaagaagcaaaatgcagtcagtatccacccagtacaagaggagtccgtcttttttgttgggttgttttcttgttttttgttttttgagacagccttgctctgtcgcccaggctggagtgcagtggcacgatcttagctcgctgcaatctccgcctcccgggttcaaggaatttttgtgcctcagcctcctgagtagctgggattacaggtgtccaccaccaagcccagatgatttttgtatttttagtagagacagggtttcaccatgttggccaggctggtctcaaactcttgacctcaagcaatcctcccacctcggcttcccaaagtgctgagacgacaggtgtaagccaccttgcccagcctttattcggtcttaaaaagaaggaactcttatcacctgctaccacctagatgacccttgagggcattctgctgagtgaaagaagccagtcacaaaaggtcggattctgtgattccacacatacgaggcccctgaagtcatcaaattcatagaaacagaaagtacaatggctgttgctgagggttggggggagagggacacggggagtgcgtgtataacggggacagatttcagtttaggatgagaaagttctggagctggtcggcggtgaaggtgaatatattgaatgccactgagcagtgcacctaaaaatgattaaaatggtaacttttatgttctacgtattttacgacaattttttaaaaacatagacaaagtcattccatgccacagacttgccagagactgtcgcctgaatgggtgacggtgcacctgactgcccccaggggccttggggccctgtttaaaccctcctttcttgtccctaatgccaacaggttatcggggcccaccagggccaccaggttctgctgctcttcctggaagcaaaggtgacacagggaacccaggagctccaggaaccccagggaccaaaggatgggccggggactccgggccccagggcaggcctggtgtgtttggtctcccaggagaaaaaggtaacagtgcccatggccatgggccagcagccctggccacagtgagaggagccccctccccacagactttcgtgtccctaacgtctt

SEQ ID NO: 11711 - DNA, 2300 bp, Homo sapien
gctgactgagtcttttatggaaaggacccctcctctgtgcccagtgccctcactgccatcatttcatgctactgagaacaaagtgtggatcaaatccttcccaagagtctcctgatctcaacagactgagccccaagatctggggaaggagagcgatggttctaggcgcacctggaaactgccctgcactcctgggtcccgaggtttctgtggggcggctgtcaagggggctgctctctctctctttctcaggctgcaggtgcactaggccgtccactctctctctctctcaggctgcaggtgcaccaggccgtccactcactctctctctcgggctgcaggtacaccaggccgtccactctctctctctctctctctctcgggctgcaggtgcaccaggccgtccactctctctctctctctcaggctgtaggtgcaccaggccgtccactctctctctttctcgggctgcaggtgcaccaggccgtccactctctctctttctcgggctgcaggtgcaccaggccgtccagggagcccgggcctgccgggtatgccaggccgcagcgtcagcatcggctacctcctggtgaagcacagccagacggaccaggagcccatgtgcccagtgggcatgaacaaactctggagtggatacagcctgctgtacttcgagggccaggagaaggcgcacaaccaggacctgggtaggtacctcccacccggcccccgttgcctgctcagggctggcccggaagtggccaagatcaaagggccacagcgagactcccaaaccctccacggctggtaagttcccctgacggaagggtccatctacattcctcgagtgcagaaagattaaaacggcctttgaagcagaagccttacaaagcccttaaacctcaggaccttaacacagggacctgccttttaacctggtattgacttccgcaggctcccatgtgacccgtctgacccccgacccctctccagtggagaccaccaattacttcacctccttcttgtttttgacccaagttctgtagacttggagtcaggcaggggccatgaggggctggggttcatgtaagactctcccatacagccccccgaggaaaatggacccatggacacgtgtgcatgctcttatttaaggaagcctttgaaaggcattaacgcgacttcgaatacagaaaatgcaatacacacaaattacaagtggaggtagcttagtctgaggtcctctttgagggggtgacgggaagggtctctgggatactggctgtgttctgcctcctcggtgcaggttacatcaggcgttctgcccccgggaagcatgttgctggctcatggtgccttcacattcctgcctgtgcgccccgcctccacaatgagtttctaaagaacaacggggcaaaggccgccaaggataagggccaaaaatagatctaggaacagggccaaggaggcagcctagcaccgggcatgtttgctaaaggtggctgcacttctgggtctgagcttttcagcaatccatgtgaagagggaaacctgcttagctgcagcattcgttgtggccaggagataaaggctatcttagtctccagaagcaataaagctacatggaagggagaagggccaggactccttctggggtggctccttggggtcaaagagcgaccccttggaggccatcagagttttcttggggccagtgctgttaagaccccactaaggtaaggctcacccaaaatgctattccatgaagacgccactccctggtgatccaacttggcccagtatgtgtgagaacttgtagaagaacagagctgttccaaaatgccagtggagtctgatcaaaaagagaaaaagaaagaaattgggaagccttagcctggccctccagtaggtggctaaactccaccaggtgccctggggcgagtccgtgacacacagcctcctgggcctggctggggctggcaggtgcgtcttctagccacactgcactgtgatctcatgacccctccttccacagggctggcgggctcctgcctggcgcggttcagcaccatgcccttcctgtactgcaaccctggtgatgtctgctactatgccagccggaacgacaagtcctactggctctctaccactgcgccgctgcccatgatgcccgtggccgaggacgagatcaagccctacatcagccgctgttctgtgtgtgaggccccggccatcgccatcgcggtccacagtcaggatgtctccatcccacactgcccagctgggtggcggagtttgtg

SEQ ID NO: 11712 - DNA, 2300 bp, Homo sapien
catatggaagtgtaaatgttccagaatagtcaaagcaactttggactaggactacaggtgcacaccaccatgcatggcaaattttttctgtaattttcatagagacgggggtctccctatgttgccaggctaatcttgaactcctgggctcaaaggatccatctgcctcggcctctcagagtggtgggattacaggtgtgtgccactgcgcctggccaacaggcaccaaacctgactcatgtttgtgtcgtcccaggccaggcactgtagcttgtgtgaaaattgtcagaatcgaaatggagccgctaatgttaagaaaaccctgacaaacagagccggggaaggccatgaagagagggttcttgcgcgtgcatgcctgataacaaaaaggactctctggaaaaaccgcaaccttgcacaaaggccactgcaatctcccacaaaaaactagtcctgcaaggacatggcccagccactggctgtcctactttgaactggcatcgccttcgttatggatctttgtagccacagataattattttcaaacaattgtgcaatccgcctcattttttttaaagcctttgctttccttgcctctctgaatatgcacaagtttaccatggcatgcatatttctactgcaaagctctattgcaaaataaatatctgtttcttttagagatcctctctgttatttaggttgtcacttgcatgcaacaggcattgaataaatgctgaattgacttaaatttgttctgaggatgaggcagtgctggctgagaaggagccggggtctcctggtgcgctttccacgccccagaaggtccgcttccacctcagccccacactgctcggtctcagcaacctgacatgccagggctgagcaggtacgaaataccttggcattcctgccttgtcggagtctcagggcacctacgaaggaggcaacgggcctatttccctttacaggacaccttcaggacacgggttttaacctgctcagggtctcatcgcctttcccagccaggccagcggccagagtgacactgtcccccagggtttaacttagagtccattctacctctcattttctctaaaaaaccccaaccaaccaactaaccaaattctacacgctgcatattttaaaagcatttcaaggtttatcctttaaaacggaaggaggacctgggaggccgaagcgggtggatcacgaggtcaggagttcgagaccagcctggccaacatggtgaaaccccgtgtctactaaaaatacaaaaattagccgggcatggtggcacatacctgtaatcccgcctactcgggaggctgaggcaggagaatcgcttgaaaccggaaggcggaggttgcagtgagccgagatcgcgcactgctctccagcttgggcaacaacagcaaaactccgtgtcaaaaataaaaaaaaaaaaaaaaaaagaaggaggaaatatttctcaagtagcgactgcaacttccatagtcaaattttcattccaagctataaatggagatgactgtccacttttcaggacaaaaagcttcttgcaaaagtagaagagcaaaagcaaaatcctccactagaaagcgcccccatctctaatctgtaacagtgagagcctcaggacgagttccgcagacgctcatttaaagcaaactttttcaatgaccttgagggtggctgtacttacacgcggagaagcaaatcgaccgcagctggaaaggcgctgggtcgagcgtgagaggaacacgggttttacctaagggagagtggaagagagaagggggttccccaagggccccggccccttcgcctcgttcgggccccgcggccaagctcctcgcaccgcagccccggctgtgcagaagcggaggggcggaaggtgctctcagaactttcattttccaccctgcagcagtcccgagcctcggctggagaactcggatgcttgcgaaacggcgaggtccagcaggggcgggacgggggcggtgggcggaggaggatagggcggggccgcggcggtgaaagggcccgggggcgggggcgggggcggggcgaggcgaggccgccgcggtccgggcccccgacgtgggctccgtgctctgcacccagctccttcccgggcgcgcacacgcgcttcctctcttgagctcccgggcgtccggaggcgaaggtcccggagcgttcacgagaatccgggtcccggcgagtccggggtccgctcctccagctgcgcccagggcgcacgagccggccagcctcggggagagggcgcgggggcgctgggg

SEQ ID NO: 11713 - DNA, 2300 bp, Homo sapien
ttgaaagcaaacttattaagaaagggaataaaagaatggctactccataggcagagcagtggcactggctgcttgactgaatatacttatgagacttgaagccagctggacttcctgggtcgagtggggacttggagaacttttctgtcttacaagaggattgtaaaatgcaccaatcagcactctgtagctaggattgtaaaatgcaccaatgagcgctctgtagctagcaagaggattgtaaaatgcaccaatcagtgctctgtaaaacgcaccaatcagcaggatcctaaaagtagccaattgcaggaaagattgaaaaaagggcattccgatagggcagaaacagaacatgggaggggagaaataagggaataaaagctgccccacccccccacccccgccagccagcagcagcaatccacttgggtccccttccatgctgtggaagctttgttcttttgctcttcataatgaatctttttttttttttttttgaggtggagtctcgctctgtggcccaggctggagtgcagtggcccgatctcggctcactggaagctctgcctcccaggttcacgccattctcctgcctcagcctcctgggtagctgggattacaggcgcccgccaccatgtccggctaattttttgtatttttagtagagacagggtttcaccgtgttagccaagatggtctcgatctcctgaccttgtgatccacccgcctcggcctcccaaagtgctgggcttacaggcatgagccaccacgcccggcctcttcataataaatcttgctgctgctcactctttgggtctatgccacctttaagagctgtaacactgtgaaggtccgcagcttcattcttgaagtcagtgagaccatgaacccaccggcaggaactaactccacacatagttatagttatctcttgattataggctaaataaggaggggattattcatgagttttctgggaaagaggttggcaattgctggaactgagggttcctcccctttttagaccatatagagtaatttcctgatgttgccatagcatttgtaaactctcatggcgctggtaggagtgtcctttagcatgctaatacgttataatcagcaaataatgagcaatgaggacacagaggtcacttttgtggccatcttggttttggtaggctttgggccagtttctttactgtgtcatcttatcagtgcggtctttgtgacctgtatcttgtgcccaccacctcatcctgtggccaagaatgtctaaccccctgggaatgcagcccagtaggtctcaccctcattttacccagtccctattcaagatggaatcgctctggttaaaaggcctctgacatgttgagccatcctttcacctcagcctctcaagtagctggactacaggtgtgccacaccatcccctgctaattttccaaaaaaattttggtagagaagggggtctccttatgttgtccaggctggtctcaaactcctgggctcaaacgatccttccatcttggcctcccaaagcattgggatcacacgcgcgagccaccgcacctggccccacaagtttcttttagcaccatgacggtggcttcaaatagggcggcagtggaggtaagaggccatcagccacaggaggagcgtgggtgggagggcaggagaggtcagaatgccttccaggggtttgggcctcagcgttggagtgatggagctgccctgacctgagacggtggaaagcgaaggggcctcgcagcgagctggtttggggttcagggcagaggttgcgcctggagcagaaaggcacctgactgctatactgggggcacatagtgggcctcggcactccacctgccagcaaaatcattttctataacgccgcaagcctaaaaatgggccgataaacacaaaccagaccctgaaccagatcgttgttaactcttcaacctgccttccagccgaacctcttaggccagagctgggaccaggccgggttgggcgtcgcgcttgtcaatcatctagaaccgggtgtgattgagcgagttgggatcccactgccgacagccgcgcggaggcggtcgggaaaccggaaaacgcttccaatggctgtgtttccggcgacggcgcgggggcagctgggaatccggaatgctgcccgatggccctgggtcctcgctgtggggcaatccgggcttgcagacgaggtaaggtcgattccatttggcccggggatggtcacacgcgcgggggccggaactgccgtcgccggcgcggtcgttgtcgcattg

SEQ ID NO: 11714 - DNA, 2300 bp, Homo sapien
gagtggggacttggagaacttttctgtcttacaagaggattgtaaaatgcaccaatcagcactctgtagctaggattgtaaaatgcaccaatgagcgctctgtagctagcaagaggattgtaaaatgcaccaatcagtgctctgtaaaacgcaccaatcagcaggatcctaaaagtagccaattgcaggaaagattgaaaaaagggcattccgatagggcagaaacagaacatgggaggggagaaataagggaataaaagctgccccacccccccacccccgccagccagcagcagcaatccacttgggtccccttccatgctgtggaagctttgttcttttgctcttcataatgaatctttttttttttttttttgaggtggagtctcgctctgtggcccaggctggagtgcagtggcccgatctcggctcactggaagctctgcctcccaggttcacgccattctcctgcctcagcctcctgggtagctgggattacaggcgcccgccaccatgtccggctaattttttgtatttttagtagagacagggtttcaccgtgttagccaagatggtctcgatctcctgaccttgtgatccacccgcctcggcctcccaaagtgctgggcttacaggcatgagccaccacgcccggcctcttcataataaatcttgctgctgctcactctttgggtctatgccacctttaagagctgtaacactgtgaaggtccgcagcttcattcttgaagtcagtgagaccatgaacccaccggcaggaactaactccacacatagttatagttatctcttgattataggctaaataaggaggggattattcatgagttttctgggaaagaggttggcaattgctggaactgagggttcctcccctttttagaccatatagagtaatttcctgatgttgccatagcatttgtaaactctcatggcgctggtaggagtgtcctttagcatgctaatacgttataatcagcaaataatgagcaatgaggacacagaggtcacttttgtggccatcttggttttggtaggctttgggccagtttctttactgtgtcatcttatcagtgcggtctttgtgacctgtatcttgtgcccaccacctcatcctgtggccaagaatgtctaaccccctgggaatgcagcccagtaggtctcaccctcattttacccagtccctattcaagatggaatcgctctggttaaaaggcctctgacatgttgagccatcctttcacctcagcctctcaagtagctggactacaggtgtgccacaccatcccctgctaattttccaaaaaaattttggtagagaagggggtctccttatgttgtccaggctggtctcaaactcctgggctcaaacgatccttccatcttggcctcccaaagcattgggatcacacgcgcgagccaccgcacctggccccacaagtttcttttagcaccatgacggtggcttcaaatagggcggcagtggaggtaagaggccatcagccacaggaggagcgtgggtgggagggcaggagaggtcagaatgccttccaggggtttgggcctcagcgttggagtgatggagctgccctgacctgagacggtggaaagcgaaggggcctcgcagcgagctggtttggggttcagggcagaggttgcgcctggagcagaaaggcacctgactgctatactgggggcacatagtgggcctcggcactccacctgccagcaaaatcattttctataacgccgcaagcctaaaaatgggccgataaacacaaaccagaccctgaaccagatcgttgttaactcttcaacctgccttccagccgaacctcttaggccagagctgggaccaggccgggttgggcgtcgcgcttgtcaatcatctagaaccgggtgtgattgagcgagttgggatcccactgccgacagccgcgcggaggcggtcgggaaaccggaaaacgcttccaatggctgtgtttccggcgacggcgcgggggcagctgggaatccggaatgctgcccgatggccctgggtcctcgctgtggggcaatccgggcttgcagacgaggtaaggtcgattccatttggcccggggatggtcacacgcgcgggggccggaactgccgtcgccggcgcggtcgttgtcgcattgctctcggccgcactcgcgctgtacgggccgccactggacgcaggtacccgaccgctgaccgcctctgctggctcgcgggggggaagcgccgccgaggggcagcccgcgcgcggggccgggg

SEQ ID NO: 11715 - DNA, 2300 bp, Homo sapien
agactctaaagccaggtctggggactgctcctccctccctctttgggctgtcccatcacacacaggcactttccctcgggagggccttccctagaggtgcctctgaccccagggcggggctccctctttccagagctagccattcatccgcacctccatccatccagggcggggctccttctttccagagccagccattcatccgcacctccatccagtcagtggaaatgcacctcttggctggaagcactgggagcatgtctccaccgccaccttgttctcccacggcaggtgccactgagctgggacagaccctgtggtctgtgtccagtgggcctagggactcgcggtcactggagggcgtgagagccacatgtcccgctctccgtgtggtccctgggtggcagtgccctcagaaaacactgattctgctggaccagggcaggggcacagcatggtgggcaccgcctcagtgaccatctcttcctcctcagccatcgactacagtgacagcgccatgctccaagctcagcagctgctcctggggctgggctctttcctggaggacgcacgtgcctacatgaaggggcagctggcctgcggctccgtcagggaagcgatgctgtgggagaggtaagaggcccgcctagcacccggcgtggcacccctcctgtggcctgctgggtgctgctggtgggctcttgaaggggaagaggggcccccaggagacagggcgctggacaggaggtttggggtcagggactgcccagagaggccccaggagacagggtgctgggcaggaggtgcaggtgtggggtcaggggctccccagaggccacaggggactgggagctggacaggaggtgtggggtcaggggctccccagaggccacaggacactgggtgctggacaggaggtgtggggtcaggggctcccgagacatcccagggagacggcgctggcaggaagtgtgcctggggccctcgggctctgagccccctgctcagagtggctttgggctcgggttccctgtgcgaggagcggagctgctcatccctcccagtcctgactgtgaggagccaaaatctataaaacacacaggcctgggcccacagcatcgcctccactccccacccacgggtgtcctgggcagcgctgcacattcatcccggcatgcagagtcttccggatggtcttggtgataacccacccctgccacttcagcagggtaggcagccagtggccacgggaggctgagatccgggagccccgggctgggcctccccagcctctctttgtgagtggtcagccgtgccgtctctcccccaccgagtcttccttgccactcccctcaatatctattgatttttaaaaccatcatgaaaatgcccacgtgtgtcttgtattttaagtgtcacaggtgacctctgctctgggactttttcttggggtaacatgacagtttgcagttgatgttacataattttctgctactcaggaactcaagtctttgggaatatgacctagagaaagtccccagattagagcccccagcgtctctccctggggaaggactggtgtgggggccgcctggggagagtggagctccctctgctgtgactgttctctcctcttccctcaggctctccagcaccaagagggccgtgaaggcggccttggcagatgattttgacacacccagggtggttgatgccatcctgggccttgcacaccacgggaatggacagctcagggcgtccctgaaggtagctcaacgaacaggtggccttgcggtcctgctgccaggggcatgggtcgggtcctctggtgggtttttctcatgtcggctgggtggcatctctgctgatttcgcctcccgcagcttctgtggaggaactcatggagcccgagtctgccgctgacacacgggatggcacccagcctggggcttgaccctcccgggcctcagggccacctggggaacaagctctcaggagcccctgaggctgagaaattctgtgtgcttgatcctcaggggacacatctcatgtccccactgcattcatggccctttcacagagagagcttttgtggggaactttttaaggaaagacccatttaccccaaggcactgttatgcaatctgcaccccagtgtgatgaccacaccaagcacccaggggtctgagcctggactcgtgggtcactgcaagtgtttggcaggtgggacaaagaccgtgaaggcggcggcaggctttggttcctgcacgtctgagggtcccctgccaggccctgggagg

SEQ ID NO: 11716 - DNA, 2300 bp, Homo sapien
ctgacaaccatgacctgctgtgagcccttctgcgagtgtggagctggggggcaagaagggcagccttagctgtgccaacgcttcgtcctgtcaggtaatgaggaggggccgggtctagaaacggaggtcgtgttcaccttccgatgtgggaatgggaaagcatttgctgttgttgttgaaacaatttcgctccgtcccccagcctgggagtgcagtggcactatctgagctcaccgcaacctctgcctcctgggttcaagcaattctcctgcctcagctgttctagtagctgcgactacaggtgcataccaccatacccagctaatttttgtatttttagtagaagcagggtttcaccatgttggccaggctgggctcaaacccctgacctcaagtgatctgccacctctgcctcccaaagtgctgggattataggcgtgagccactgcacgtggtgggaaagttttgtggctatttttcagtgattttttactacctgttaagataccagcgatctttttcatactagtttggccccaaacaaaacatcagtgtctcctgacgcaggagaagtgacacctgttctcctgtacccagtggatggaagagctaagtgggcagacactatcccagcctgttagggctgctatagccaaactgaaagcgggcgtgttatgaacaacagcaatgaattcctcacagttctgctggctgggagtcctgcgtcagcgcactggcagactcggtgtctcgggagggcctgcttcccatttgtagacggccgtcagctctcgaggggcctctgttatgagagcactgattccattcacactggctctgcccctgtgacctcatcacctcccacaggccctgccttcagttaccgtcacctgagggctgaggattttgacaggaatttgggaggacataaacattcaggccttagcaaatgtgttttattttccaactatcatcaattttaaaaaatcagaatcgtgcttggtgtaatcacattatatagaattacatgttcaaagttatatatgttttttggaaatcacattctaattggttggttggttggtgtatttatttatttatttttgaggcagagtctcgctctgtggcccaggctggagtgcagtgacatgaacatagctcactctaggcccaacctcctgggctcaagcgatcctcccacctcagtctcctgagttgttgggatgttgggactgcaggtgtgccccaccacgcccagctaatttttaattttttttgtagagaccgggtgttgccatgttgcccagactggtctccaaactcctgggctcaagcggtccttccaccttagcctcccaaagggctggtattacgggtgtgagccactgcgtccggcctggaggactcctgtttgaagttgtgtcagaaaaagaggaagagtcttctgttagaaacagaaagcccttctcttggagataagccttgtaaaaagctacaggccagggagaatttcagggtcagattcaggagttccttaaatgagtttggttttcctcctgtctttcacatacataggggatgaaataatacccaggtcatcaaagtctgtgaaaccaactgcaacaggacctctgattcttcccactcagagacccacaagtgccactctgtttttggacaacggtcaacaagcttcaccgccaagtgcctgatttgtcaaatgagagctttgtcgtttcttcagatgctgaccagtatctgaattcagtatctctgaattacaggagaggagaaaatagatgaaatactgctgtcagtaccacggttgctggctcttgtttagcttctgagtcagctggggcacccctgccatctgctctcagtgtggggctgggtgtccctgcaccgtggaacaagggcaggtcctgtcttcccggaaggcccagcacgggtgaagatttgggggcagatttataccaacatacactggtctatacattggatatgtgcaggttcccattcgtttcctggggagccatgtgtccctgaggccagagagtctcctcacccagctcagactgaatgcttttgtttttgtttcagggcatttgcacgccaaaggcaaagaagaaaaaatgtccaaatcattaaagaactacattactattaaggtaacgtgctttttgtattgtatctctgaggtgccgatagcttgtggaacccatcttaaaggcttctgtgtcatttgagaaccacggaatcccattcccagtgccctctggcccctttcttatgacgag

SEQ ID NO: 11717 - DNA, 2300 bp, Homo sapien
caaaagccaaatgaaacactgtcatgattttatagttccatctcttgttaaaattggaaaaccactaaactctacctattgaaagtaagtaaaggtaattttttgagttgaaaaagaaagaaagaaaaagagaaaaaaagaacctggagcaaaaagaattaagtgcctttactaggatgaaaagtcatgaattacgggcttgtgatgacaggatttcagttttcatttgaatcagttaaattatcatgcaaattgatgcaaaactgagatccatttattcattgaattaaaaaggctggaaggaataaatagacgaggttagaagaaaatatgttgcttgattgaatgaattcactactttgcactgtgtcttgcagtatggtatttggaagtcaactggatatccattcaggtgggatagatttagcttttccacatcatgaaaacgaaattgcacagtgcgaagtctttcatcagtgcgagcagtggggaaattattttctgcattctggtaagtaataacttcagattaatttgttctgtttcaattctagcagttctgtctttgtcggcggaacagctacatttggaaatacatagtagatcagctaataggtcaagaaatggatttgcctcttaaattatttttgagtttcaatcatttgaacatgagcttccttggattgcagcaatgattatacctttttggaactgactagaatatggaaaatgtttggcaatgctgttctatataaggtttctttcaagtaaaactattaagaaggaacttgaagtagtacaatgtaacgataattatgaacatcctttctgaagctataatgttgtcactagacatctctgccatcttctaataacattgccctttcttccactgttcaaacacctaactgatgaaccccagctgtctgctctcagaagtggatgcaacaccatgagttaagcaacacctcgaacccagcagttttggaattcacttggatgcactggaagagtcgtatttccaagtttacagggtcacgattaactagtcttattaccttttggggatggacagctaaggtatttgagatgaagaaagataaagagtgtttggtagtgataggatttggagatgcaaacttcgacatctaaaatacagaaaattaacaaatactatcttttgaagtccttgaattgggaaattaggatgtcacagtaaagtgacattaagtgcagaagtgctctggttttctggtccgcagcagagttcacttgggtttcttcgtgaaagtacatgaggctgattgccccgaagtcacttcctgcagcatgtccttcaccccgggcttaccctgttgagtcggggaacccagcaggcggctctgcccctaccattacctactatgtctgcctctcacagtgccccagtttttgtctaaaaatgaagcagaaacaaagctggctgcgtggctgtttgaggacttaggagctgttgtccagcaccccataccatttccctggggagggctcagcactagctgaaatccactttattccggtgtcggtggagtttctaatcagaacaaacgcctgccgccctcacttccgtttcagctggcgctcacatgggaagggggtgcacgctgcccagtggtggaatatttaaggcatcgcccctcagggagccgagcactgatttccacagccgggggcctgcactccacttttgaccatggggaaggaggtctctcttccgtggcccaaggacttctgaattgtgttcttggagaggaagcgtgctgggagcccagatagtggggctgagacactgtgtctcaggcacagaggtagtcgtgtcccttgtcccagatgaagaaagataaagagtgtttggtagtgatagatttggagatgcaaactttgacatctgaaatacaggaaattaacaaatactagtttttgaaacccttgaattgggaaattaagatgtcacagtaaggtgacattaaatgcagaagtgctccggttttctggtccgcagcagggttcacttgggtttcttcatgaaagtaaatagatgaggctgattgccccgaagtcacttcctcgttgacttcgttcagggctcagttcagcgctccctgaactgtctgaggagctggagttgctccctccgcaggcacgtttctgtctgcaggtttatcctgttcagtaggtcagggtttgttactgacaaccatgacctgctgtgagcccttctgcgagtgtggagctggggggcaagaagggcagccttagct

SEQ ID NO: 11718 - DNA, 2300 bp, Homo sapien
cgtaagggattaattcatcaacattcaacaagcccttttatttcttctaaattttttttttccagccacagcaaaacaaaacaaacaaaacccaagtccttttctgaatttagtgcagggcacagtgagaagttcaaaataatgtacaatttaagatactcagggagataaatatacacacagcactggaaagttacaaaataacataaggcaggcaagaagtgataatattcaggagaatttagagtagttaggtaacatgagtggttagcattgatgtaggctatagggtctcctaattctaacattttaaccttattaaattagacaatagattacattagactacagttagcttgaaacagaattgcagagttggactccaggatattgagaaactactctaggtacacacttgtttgtctctacttaaacctttgctttttaataaaacaccaaagcaaactaaaaacaacaacaaaaaaccagaggaacgtctcctgttttgagaactggaaaagcaaaggggactttttcttttttttgagacatcgtattgcaagacaccaatagaggcactttttttttttttcaggcggagtctccctctgttgcccaggctgcagtgcagtggtgtgacctcagctcactgtgagctctgcctcctgggttcaagcgattctcttgtctcagcctccccagtagctgggactacagatgcacgccaccacgcccggctaatttgtgtatttttagtagagacggggtttcaccatattggtcaggctggtctcgaactcctgacctcaggtgatccatccgcctcagcctcccaaagtgctgggattacaggtgtgagccactgcgcctggcccaatagaggcacgtttgtcaagctattgtgagtaactttcagaatgtttttgttctcaagatacgggatcatggtgggggaggcatgctgtgtattggagtgcagacatggtgtgtgttgggttgcacactgtgtattggggtgcacactgtattggggtgtagatgtgtgggggcgcacactctattgaggtgcacattgcattggaatgcagacagtgtttgctgggatgcacatgtgctgtgttggggtgcacactgtactggggtgcagacatggtgtgtgttagagtgcacagtgtattaggggtgcacactgtattggggtgtacactgtactggggtgcagacatggtgtgtgctggggtgcacactgtattggagtgcacactgtattgggatgctgatgtggtgtgtgctagggtgcatactgtgtattggggtgcagactgtatgctgggttgcacactgtgtatcggggtgcactgtgttgggatgctgatggtgtgctgcagtgcacactattggggtgcagatgtgtgtgctggggtgcacactgtattggggtgcacactgtattgggatgctgatgtgtgtgctggggtgcatactgtgtattggggtgcacacttcttggggtgcagactgtgtgttgggttgcacattgtgtatcggggtgcactgtgttgggatgctaacggtgtgctgcagtgcacactgtattggggcgcagatgtgtgtttggggtgcacactgtattggggtgcacactgtattggggtgctgacgtgtgttctggggtggacactgtgtattagcgtgctgacgtgggctgtgctgggatgcacacgtgcttcgctaacaggccagggcccggcaacagaagcttgcactgtaaacgctcctcccgcgcggcggacacagctccaggctggtaccgcgcgcacacggacgcctcgcaggacctgggctaataaggagaggagatcggcacggtaccgcctcttcccacggcctcccggcgcggcaccgccctcctccctccaccccgggccttccccgccccaacctcttcgggccctggttctccacccttgccgcgggcgactcgagccaggccaaagggaggcgctacctgaggactgcttccgggagtgggcgtggccccaagggcgtgggcggggcggggcggggccgtgctgctcttgagcgaccggcagcgtacccggcgtggctcccgtctccgcccagtcgtaggcgctggccgctgacatgttgaggactacgcgcggcccaggcctgggccccccgctgctccaggccgcgctgggccttgggcgggctgggtggcactggcctgcgggccgggcggcgagcggggggcgcgggcgggcctggctgcagcccacgggccgggagacgggtgt

SEQ ID NO: 11719 - DNA, 2300 bp, Homo sapien
aaaattcgttatcaaaggtaattatgttttattgcttgatcttctaagtttgttccaaaaaagataaaatcttttttgactttttatcccaaggggtgggctaaaagttttatggaatgtaaagctccaaaaaacttttcactactgtatccccagcgcacggaccagtagttggcacatggtagacactcgtcaatattccttgttgaatgcttaagatgcctttttggtttatgtgtatgtgaagagagtacataactagaggaacaaaatcattactcagattgtactgtgttgtgatttttttttttaaaaagaaaacctaggttaaactccatcttatctttgtaaagggtaaattacttccaattttattcttgagttcagataaacactattcattctagagccaatgaatgctaggaatagaagaaccggtctatttcttactattgtacttttaaattacttatatgctttttgagggaaaggcgtaattttccttattcaactttgtactccctctatactctgtattcgacataatgtttgtttccacataatgttatcttgtcgtagtctttttttctctttttttccggagatagtcttgctctgtcgcccaggctggagtgcagtggcacaatctcggctcactgcaacctcccctcctaggttcaagtgattctgtctcagcctccccaatagctgggactacaggcacgcgccaccatgccctgctaattttttgtatttttagtagagacagggtttcaccatgttgcccaagctggtcccgaactcctgatctcaggcaattcgcccgcctcggcctcccaaagtggtaggattacaggcgtgagccaccgcgtccggccaagtgttatagtcttttgtgcagaccaagtagtggccaataaatcttgtagaaactaaagtactcatttgcttttaactaggccaagactagaatagcgtgatctgtaagtaaaataacagccatttccccaaatatcaaagccaaagctctcctgctgtgtaggtgagatgaaggggcttaaaagtgaagattaaatccacttcaaagtgtaaagagtatccatccatttatcattgcagcaacgttgcaacgtgaacaatccgattccaaatacaaaacagcttaattcagtctctttgccgtactcacatccatagcacaaaatacccggcagggccctggaatgagcaccactgcggttaataatctactctataaatactggacgaatccaaatttttactggattacacagaatacgtttttaaaaaatccaaagagttttagatgttacaacagggttccatcaaataccacgtttccaaatcttaccaccagaatgtgtatccatttcaactgcaattattttgtgtctaaaactgtgtactctgctttgcaacaggataaacccggtggataaaagctgaaatccgaccctgtcctaattaagaggctaagaaaaatggagaaccgcgctggcgtggagttgatacagaaacactgcaagggctggggacagggcttagttcgtggaatacacaggcagcaccaccaacccggctctccggaaaagagaaagtccagtgagaaaggtgaaaactgacaaggcaccgttctccgacttgctgaaaaaaagacaatgcaaatagagcagggtccaaggcggaagaaaatcagagaaaagcaggcagccaagcgtggcgaacacagctctcggggccaccccggaggggacccgcggcggccgcagcggggcggaggccgaagccgaggccgccccggaaccagagagccaggcgggaagtgcacaaaggcacgaggccacgcccaggaggggcgggccctttggccggaagggggggggccggcgcgcggggccggtcgcctaggcaacgggctcgcgtggcgtccaggcttctcagaaagcccaaaatccgggagctttgggagggtagaggggcgacgcgggggagggcggtccggggagctgaatggcctcaggacgccggccgaccgggtgtctgcatactgtgggcggcctttccaagtgtggggagcggcctccgagaacggtgtccatgacacagggcgggaagagataaggcctagggaaggcgcccctcgggcctatccacctcttctggggctcggcactaggaagcagcttccctctcaggcccctttgtctccaagccgttccaaactgagtaccgggagacgacacaaagggagggcggtgacggatggcgcaggcgcggga

SEQ ID NO: 11720 - DNA, 2300 bp, Homo sapien
tactctgtattcgacataatgtttgtttccacataatgttatcttgtcgtagtctttttttctctttttttccggagatagtcttgctctgtcgcccaggctggagtgcagtggcacaatctcggctcactgcaacctcccctcctaggttcaagtgattctgtctcagcctccccaatagctgggactacaggcacgcgccaccatgccctgctaattttttgtatttttagtagagacagggtttcaccatgttgcccaagctggtcccgaactcctgatctcaggcaattcgcccgcctcggcctcccaaagtggtaggattacaggcgtgagccaccgcgtccggccaagtgttatagtcttttgtgcagaccaagtagtggccaataaatcttgtagaaactaaagtactcatttgcttttaactaggccaagactagaatagcgtgatctgtaagtaaaataacagccatttccccaaatatcaaagccaaagctctcctgctgtgtaggtgagatgaaggggcttaaaagtgaagattaaatccacttcaaagtgtaaagagtatccatccatttatcattgcagcaacgttgcaacgtgaacaatccgattccaaatacaaaacagcttaattcagtctctttgccgtactcacatccatagcacaaaatacccggcagggccctggaatgagcaccactgcggttaataatctactctataaatactggacgaatccaaatttttactggattacacagaatacgtttttaaaaaatccaaagagttttagatgttacaacagggttccatcaaataccacgtttccaaatcttaccaccagaatgtgtatccatttcaactgcaattattttgtgtctaaaactgtgtactctgctttgcaacaggataaacccggtggataaaagctgaaatccgaccctgtcctaattaagaggctaagaaaaatggagaaccgcgctggcgtggagttgatacagaaacactgcaagggctggggacagggcttagttcgtggaatacacaggcagcaccaccaacccggctctccggaaaagagaaagtccagtgagaaaggtgaaaactgacaaggcaccgttctccgacttgctgaaaaaaagacaatgcaaatagagcagggtccaaggcggaagaaaatcagagaaaagcaggcagccaagcgtggcgaacacagctctcggggccaccccggaggggacccgcggcggccgcagcggggcggaggccgaagccgaggccgccccggaaccagagagccaggcgggaagtgcacaaaggcacgaggccacgcccaggaggggcgggccctttggccggaagggggggggccggcgcgcggggccggtcgcctaggcaacgggctcgcgtggcgtccaggcttctcagaaagcccaaaatccgggagctttgggagggtagaggggcgacgcgggggagggcggtccggggagctgaatggcctcaggacgccggccgaccgggtgtctgcatactgtgggcggcctttccaagtgtggggagcggcctccgagaacggtgtccatgacacagggcgggaagagataaggcctagggaaggcgcccctcgggcctatccacctcttctggggctcggcactaggaagcagcttccctctcaggcccctttgtctccaagccgttccaaactgagtaccgggagacgacacaaagggagggcggtgacggatggcgcaggcgcgggagccgcctaggctgctgggagtggtggtccggccgcggaatgggtaggtctcccgcgcactctgcggccgcagctcaaaggacaccgagagggtgccagtgcgcatgcgccgccacttccgcccgtgcccggccctccccttccttccgcctcccggaggacttgggtttctagtagtaagagtccggggggcattactcacggtctccccgcctcctcttcatcgtgattgggctgtcaaagtgatgttggcaagtagattggctactgcggttgccagttctgtttcgggccctacttatactgctctgtggggcggggacgaagagtcaggggctgaggagcgagttgcggtagttgctgtgtaccatggtctcggaggtttctgtcccgcggcccgttaggtcctggtcgggttttcagcgaagcaggccgctcccctgcgtttcccagcgggcgtgctgtgccgcccaacaggctctgcctccaagtgccaaaaactcctagtaaagtttgcgcctcgcccgc

SEQ ID NO: 11721 - DNA, 2300 bp, Homo sapien
caaatcttaccaccagaatgtgtatccatttcaactgcaattattttgtgtctaaaactgtgtactctgctttgcaacaggataaacccggtggataaaagctgaaatccgaccctgtcctaattaagaggctaagaaaaatggagaaccgcgctggcgtggagttgatacagaaacactgcaagggctggggacagggcttagttcgtggaatacacaggcagcaccaccaacccggctctccggaaaagagaaagtccagtgagaaaggtgaaaactgacaaggcaccgttctccgacttgctgaaaaaaagacaatgcaaatagagcagggtccaaggcggaagaaaatcagagaaaagcaggcagccaagcgtggcgaacacagctctcggggccaccccggaggggacccgcggcggccgcagcggggcggaggccgaagccgaggccgccccggaaccagagagccaggcgggaagtgcacaaaggcacgaggccacgcccaggaggggcgggccctttggccggaagggggggggccggcgcgcggggccggtcgcctaggcaacgggctcgcgtggcgtccaggcttctcagaaagcccaaaatccgggagctttgggagggtagaggggcgacgcgggggagggcggtccggggagctgaatggcctcaggacgccggccgaccgggtgtctgcatactgtgggcggcctttccaagtgtggggagcggcctccgagaacggtgtccatgacacagggcgggaagagataaggcctagggaaggcgcccctcgggcctatccacctcttctggggctcggcactaggaagcagcttccctctcaggcccctttgtctccaagccgttccaaactgagtaccgggagacgacacaaagggagggcggtgacggatggcgcaggcgcgggagccgcctaggctgctgggagtggtggtccggccgcggaatgggtaggtctcccgcgcactctgcggccgcagctcaaaggacaccgagagggtgccagtgcgcatgcgccgccacttccgcccgtgcccggccctccccttccttccgcctcccggaggacttgggtttctagtagtaagagtccggggggcattactcacggtctccccgcctcctcttcatcgtgattgggctgtcaaagtgatgttggcaagtagattggctactgcggttgccagttctgtttcgggccctacttatactgctctgtggggcggggacgaagagtcaggggctgaggagcgagttgcggtagttgctgtgtaccatggtctcggaggtttctgtcccgcggcccgttaggtcctggtcgggttttcagcgaagcaggccgctcccctgcgtttcccagcgggcgtgctgtgccgcccaacaggctctgcctccaagtgccaaaaactcctagtaaagtttgcgcctcgcccgccgtccacaccccagcggccctgacgctgtcccctccgcgaccctcgcctctggaaaaagtgacaggcaaggccacgcccccgcgagggccggcctggagcccgcagcccccagggcctgggacggtgaggggcgtgaatgcggcggggggcggggccgttgccgggggagggggccggggcgcatgcgcgctgcgcagcggggctgaatgtttcccaagtgtttgaaactggtatttgggttttccacgttggacaagtgcggctcggcggccagcggagcgcgccccttcccgctgcccgctccgctcctctcttctacccagcccagtgggcgagtgggcagcggcggccgcggcgctgggccctctcccgccggtgtgtgcgcgctcgtacgcgcggcccccggcgccagccccgccgcctgagagggggcctgcgccgccggccggggcgtgcgcccgggagccaccgccaccgcggcccgcgccctcaggcgctggggtccccgcggacccggaggcggcggacgggctcggcagatgtagccgccgggccgaagcaggagccggcgggggggcgccgggagagcgagggctttgcattttgcagtgctattttttgaggggggcggggggtggaggaagcggaaagccgcgccgagtcgccggggacctccggggtgaaccatgttgagtcctgccaacggggagcagctccacctggtgaactatgtggaggactacctggactccatcgagtccctgcctttcgacttgcagagaaatgtctcgctgatgcgggagatcgacgcgaaataccaaggtacggccgggt

SEQ ID NO: 11722 - DNA, 2300 bp, Homo sapien
agtaccgggagacgacacaaagggagggcggtgacggatggcgcaggcgcgggagccgcctaggctgctgggagtggtggtccggccgcggaatgggtaggtctcccgcgcactctgcggccgcagctcaaaggacaccgagagggtgccagtgcgcatgcgccgccacttccgcccgtgcccggccctccccttccttccgcctcccggaggacttgggtttctagtagtaagagtccggggggcattactcacggtctccccgcctcctcttcatcgtgattgggctgtcaaagtgatgttggcaagtagattggctactgcggttgccagttctgtttcgggccctacttatactgctctgtggggcggggacgaagagtcaggggctgaggagcgagttgcggtagttgctgtgtaccatggtctcggaggtttctgtcccgcggcccgttaggtcctggtcgggttttcagcgaagcaggccgctcccctgcgtttcccagcgggcgtgctgtgccgcccaacaggctctgcctccaagtgccaaaaactcctagtaaagtttgcgcctcgcccgccgtccacaccccagcggccctgacgctgtcccctccgcgaccctcgcctctggaaaaagtgacaggcaaggccacgcccccgcgagggccggcctggagcccgcagcccccagggcctgggacggtgaggggcgtgaatgcggcggggggcggggccgttgccgggggagggggccggggcgcatgcgcgctgcgcagcggggctgaatgtttcccaagtgtttgaaactggtatttgggttttccacgttggacaagtgcggctcggcggccagcggagcgcgccccttcccgctgcccgctccgctcctctcttctacccagcccagtgggcgagtgggcagcggcggccgcggcgctgggccctctcccgccggtgtgtgcgcgctcgtacgcgcggcccccggcgccagccccgccgcctgagagggggcctgcgccgccggccggggcgtgcgcccgggagccaccgccaccgcggcccgcgccctcaggcgctggggtccccgcggacccggaggcggcggacgggctcggcagatgtagccgccgggccgaagcaggagccggcgggggggcgccgggagagcgagggctttgcattttgcagtgctattttttgaggggggcggggggtggaggaagcggaaagccgcgccgagtcgccggggacctccggggtgaaccatgttgagtcctgccaacggggagcagctccacctggtgaactatgtggaggactacctggactccatcgagtccctgcctttcgacttgcagagaaatgtctcgctgatgcgggagatcgacgcgaaataccaaggtacggccgggtgatggatgggcgggggcggccgcctccttcccggcgggtccgggcgcgccgcggagccgggccggtcctgccgtggaccggaggaagcggccggctccgcagcggcggccctcggcaggggcaggaacaaaaggtctggagcgcctttgattcgccaaggtccttgtgtgcaaagcccgggacacggaggaggaaggaggcgcgagaggtctcgctgcaaggctgcgcgaccaaagcgctctttgtagtgaagtgatgaggcgggtgctgcgggggagggggcggcgggtccaagccgcgtcctctaggagggggtgcagattacggcgcgagatggagggatgtgccggcgcctggggctatagggcgccgagacggggctgcaggaggagggcggctgtgggccggggttcccgcggacccggtgcctcggtcccgggcaacgccgttcctctggcccttcttcgtcgccccccactcagtcccgaatctgagtgttacataaagtaccgggtagtactccgctcggggtaggtcggccgcccccgcccagccccctccggccctcacttggagctggacaccgagtaggggccgactgcgaggggcgacgccgccggttgtagtttgcggaggacgagggcttttctctgtgtgccgtagggaagggaagggaaggggaggagcggaggcggggaaggcgcccatctgcgctgcgctcgggggggcgcgggcagatcgctggcttggagaggactgtggcaggtgagaggacctgtgcgtcgttctctgcagacctggccgccccgggtgtcagagagaggtggcgagttcgtgtccgccgggaattgttggctgttggggaaactttcctgcgaggtcag

SEQ ID NO: 11723 - DNA, 2300 bp, Homo sapien
aggccgagcgacccgaagacgttcaaatcaactcgtccaccctccaccccgctcctccccgaaaaagaaaaaagaagacagcggaaacacagacccataccagttattgcgctaggcccgccttcatccgcctcagcgaccaatcgttccgcaggggaatgataaggacattccacgaaggacatcacagccaactactggggggctgaggcgggacgttccataatatgctaatgaagttcctataaaattcgctgcgaagctacgtctcggatagaacgcgcaggggcgccttcccggcagaggcgtctagtactttcggggatagcggtcaatttttttttttgcccccacccaactcttccgtttccctactgcgcagccttgtaaacattagtaaactccgagtggtgatccacattcaaaacagagcccccaaagccttgactgacctcgcaggaaagtttccccaacagccaacaattcccggcggacacgaactcgccacctctctctgacacccggggcggccaggtctgcagagaacgacgcacaggtcctctcacctgccacagtcctctccaagccagcgatctgcccgcgcccccccgagcgcagcgcagatgggcgccttccccgcctccgctcctccccttcccttcccttccctacggcacacagagaaaagccctcgtcctccgcaaactacaaccggcggcgtcgcccctcgcagtcggcccctactcggtgtccagctccaagtgagggccggagggggctgggcgggggcggccgacctaccccgagcggagtactacccggtactttatgtaacactcagattcgggactgagtggggggcgacgaagaagggccagaggaacggcgttgcccgggaccgaggcaccgggtccgcgggaaccccggcccacagccgccctcctcctgcagccccgtctcggcgccctatagccccaggcgccggcacatccctccatctcgcgccgtaatctgcaccccctcctagaggacgcggcttggacccgccgccccctcccccgcagcacccgcctcatcacttcactacaaagagcgctttggtcgcgcagccttgcagcgagacctctcgcgcctccttcctcctccgtgtcccgggctttgcacacaaggaccttggcgaatcaaaggcgctccagaccttttgttcctgcccctgccgagggccgccgctgcggagccggccgcttcctccggtccacggcaggaccggcccggctccgcggcgcgcccggacccgccgggaaggaggcggccgcccccgcccatccatcacccggccgtaccttggtatttcgcgtcgatctcccgcatcagcgagacatttctctgcaagtcgaaaggcagggactcgatggagtccaggtagtcctccacatagttcaccaggtggagctgctccccgttggcaggactcaacatggttcaccccggaggtccccggcgactcggcgcggctttccgcttcctccaccccccgcccccctcaaaaaatagcactgcaaaatgcaaagccctcgctctcccggcgcccccccgccggctcctgcttcggcccggcggctacatctgccgagcccgtccgccgcctccgggtccgcggggaccccagcgcctgagggcgcgggccgcggtggcggtggctcccgggcgcacgccccggccggcggcgcaggccccctctcaggcggcggggctggcgccgggggccgcgcgtacgagcgcgcacacaccggcgggagagggcccagcgccgcggccgccgctgcccactcgcccactgggctgggtagaagagaggagcggagcgggcagcgggaaggggcgcgctccgctggccgccgagccgcacttgtccaacgtggaaaacccaaataccagtttcaaacacttgggaaacattcagccccgctgcgcagcgcgcatgcgccccggccccctcccccggcaacggccccgccccccgccgcattcacgcccctcaccgtcccaggccctgggggctgcgggctccaggccggccctcgcgggggcgtggccttgcctgtcactttttccagaggcgagggtcgcggaggggacagcgtcagggccgctggggtgtggacggcgggcgaggcgcaaactttactaggagtttttggcacttggaggcagagcctgttgggcggcacagcacgcccgctgggaaacgcaggggagcggcctgcttcgctgaaaacccgaccaggacctaacgggcc

SEQ ID NO: 11724 - DNA, 2300 bp, Homo sapien
cggccctgacgctgtcccctccgcgaccctcgcctctggaaaaagtgacaggcaaggccacgcccccgcgagggccggcctggagcccgcagcccccagggcctgggacggtgaggggcgtgaatgcggcggggggcggggccgttgccgggggagggggccggggcgcatgcgcgctgcgcagcggggctgaatgtttcccaagtgtttgaaactggtatttgggttttccacgttggacaagtgcggctcggcggccagcggagcgcgccccttcccgctgcccgctccgctcctctcttctacccagcccagtgggcgagtgggcagcggcggccgcggcgctgggccctctcccgccggtgtgtgcgcgctcgtacgcgcggcccccggcgccagccccgccgcctgagagggggcctgcgccgccggccggggcgtgcgcccgggagccaccgccaccgcggcccgcgccctcaggcgctggggtccccgcggacccggaggcggcggacgggctcggcagatgtagccgccgggccgaagcaggagccggcgggggggcgccgggagagcgagggctttgcattttgcagtgctattttttgaggggggcggggggtggaggaagcggaaagccgcgccgagtcgccggggacctccggggtgaaccatgttgagtcctgccaacggggagcagctccacctggtgaactatgtggaggactacctggactccatcgagtccctgcctttcgacttgcagagaaatgtctcgctgatgcgggagatcgacgcgaaataccaaggtacggccgggtgatggatgggcgggggcggccgcctccttcccggcgggtccgggcgcgccgcggagccgggccggtcctgccgtggaccggaggaagcggccggctccgcagcggcggccctcggcaggggcaggaacaaaaggtctggagcgcctttgattcgccaaggtccttgtgtgcaaagcccgggacacggaggaggaaggaggcgcgagaggtctcgctgcaaggctgcgcgaccaaagcgctctttgtagtgaagtgatgaggcgggtgctgcgggggagggggcggcgggtccaagccgcgtcctctaggagggggtgcagattacggcgcgagatggagggatgtgccggcgcctggggctatagggcgccgagacggggctgcaggaggagggcggctgtgggccggggttcccgcggacccggtgcctcggtcccgggcaacgccgttcctctggcccttcttcgtcgccccccactcagtcccgaatctgagtgttacataaagtaccgggtagtactccgctcggggtaggtcggccgcccccgcccagccccctccggccctcacttggagctggacaccgagtaggggccgactgcgaggggcgacgccgccggttgtagtttgcggaggacgagggcttttctctgtgtgccgtagggaagggaagggaaggggaggagcggaggcggggaaggcgcccatctgcgctgcgctcgggggggcgcgggcagatcgctggcttggagaggactgtggcaggtgagaggacctgtgcgtcgttctctgcagacctggccgccccgggtgtcagagagaggtggcgagttcgtgtccgccgggaattgttggctgttggggaaactttcctgcgaggtcagtcaaggctttgggggctctgttttgaatgtggatcaccactcggagtttactaatgtttacaaggctgcgcagtagggaaacggaagagttgggtgggggcaaaaaaaaaaattgaccgctatccccgaaagtactagacgcctctgccgggaaggcgcccctgcgcgttctatccgagacgtagcttcgcagcgaattttataggaacttcattagcatattatggaacgtcccgcctcagccccccagtagttggctgtgatgtccttcgtggaatgtccttatcattcccctgcggaacgattggtcgctgaggcggatgaaggcgggcctagcgcaataactggtatgggtctgtgtttccgctgtcttcttttttctttttcggggaggagcggggtggagggtggacgagttgatttgaacgtcttcgggtcgctcggcctccagccttggattggttcttctcgctgctggggcgggccgtgctcttccgccctgcggtgtggttggttctcctcctggcctccgccctccaaatcggcgattcccataggcggcggctctcggggtgcggggcgagtctcccgctgg

SEQ ID NO: 11725 - DNA, 2300 bp, Homo sapien
cttgtcagtatgaatcttatataaatttattctaattcatttcatattgtggcttgctttctatttactggcatttcctgaaatacaatgtctatatttgcttttatatgatatgtgaagtacttgtaaatttacaagtaaatttattgtgtttacttgcagcctatatacttgtatttataaacacaacatatttcttgttagctacgtggctttccatttttcttttttgggtttagtagaaaattaccacatatctaaaacttattatctcaaccagattccaatatacaatataactttatttatgcccgtgttttcctataatatctcttgaaaatagctttcagtacataaatgcttaaggtttttttttttcaaaaagcgtcctgtgggttgggaggcactgatgtgtccccagtgccagcaggtgtgttggctgttggtgatgggccgctaatccagctgctgccggctgactgttaccgtggggatgactttcaggtgtctgatggcgttgtcaagcagactctgtggacacagggaacttaaggactgcctcgctctgaagtggttatctctgcagttaatgtttccaccgaggactctgcttccagcctgtccatcctgcccacctaagaaaacccttagaaataaggggtgagtccctcgaggatttaactgtttagttgtgaaatgggcacgtggcgtccagggaacacaagcagcagcggaactggacagcaagggcttcgtggggagctgagtgtcctctgagggtggtggctcctgcagggaatgacttacgggttcagggtccctgatctgggaaggcccagccccatgccccgtgtgctctctggggcccacttcccatccatagtggactggttcaggctagaccctctgcaaatctggaataaggtttgccttctgccttggtggaactgagaggtgacagcatgctggcagtcctcggagccctcgcttgctcttggcacctcccctgcctgggctcccactttggtggcatttgaggagcccttcagcccccccactgcactgtgggagcccctttctgggctggccaaggcaggagcccactccctcagcttgcagggaggtgtggagggagaggcgcgagcgggaaccggggctgcgtgcggcgcttgcgggccagctggagttccgggtgggcgtgggcttggcgggccccgcactcggagcagccagtcagccctgctggcccggggcaatgagggacttagcacctgggccagtggctgcggagggtgtactgggtcccccagcagtgccagcccaccggcgctgtgctcgatttctcgccaggccttagctgccttcccgcgaggcagggcttgggacctgcagcccgccatgcctgagcctcccacccactccatgggctcctgtgcagcccgagcctccccgacgagcactaccccctgctccacggcacccagtcccaacgaccacccaagggctgaggaatgcgagcgcacggcgcaggactggcaggcagctccacctgcagcctcggtgtgggatccactaggtgaagccagctgggctcctgagtctggtggggacgtggagagtctttatatgtagctcagggattgtaaatacaccaatcagcaccctgtgtttagctcaaggtttgtgagtgcaccaatcgacactgtatctagctgctctggtggggccttggagaccctttatgtctagctcagggattgtaaatacaccaatcagcactctgtatctagctcaagatttgtaaacacaccaatcagcaccctgtgtttagctcaaggtttgtgaatgcaccaatcgacactctatctagctgctctggtgaggccttggagaacctgtgtgtggaaactctgtatctaactaatctgatggggacgtggagaacctttgcatctagctcagggattgtaaacgcaccaatcagtgccctgacaaaaacaggccactgggctctgccaatcagcaggatgtgggtggggccagataagagaataaaagcaggctgcccgagccagcattggcaacccactcgggtctccttcaacgctatggaagctttgctcttttgctctttgcaataaatcttgctactgttcactctttgggtccatgctgcttttatgagctgtaacactcacagggaaaatctgcagcttcactcccgaaccgagcgagaccacgagcccaccgggaggaaagaacaactccagacatgctgccttaagagctgtaacactcac

SEQ ID NO: 11726 - DNA, 2300 bp, Homo sapien
acgttctcaggagatcacagtgcagtgtcagccagggctgcagtctcatctgaaagctcccctggagcctctgcatccaagctcacgcacatggctggtgactggacccagttccccccgggtcgctgaactaagggcctgagttctttgatggttgttggcctaaggccaccccagctccgtgcaggggagggcaggggcctctccaccaggcactctgaggagtgctcaccccccgcagggagaggcgggagggacggggaagggcagaggacacatcaggtttttcatcttactgcgttttttttaaaacaggaagatctgaagccaactacattcagcaagttttcttaagaacaaagtaagaaagataaaccagaacagccctgcttggcttatcccggcctcgccttaaccctcccttccctgccgtctttctgtggctcccctctgccaggtgccccctgaactttaagattccaggatggtttgagaacaacttcgatgtttctgttttcccatttatgaaggctactgtgctctcaccagtgaatttaattacaagatttttagaagcagctaaaaaaattgcaactcagatgcatcagtgaatcagtcctattccctgtctgctaaaggatgtcttttcgttaccatcatctgccgcagggcttttctgacagttcatataattcaagataattgaagccaattttgcaagcaaaacgacaggaaccactacatgaaatagcacatcaagtctctgattcacaacaatggcactatttcctcaatggttttaaaattctcttggctaggcgtagtggctcacgcctgtaatcccagcactttgggaggccggggcgggcaggttgtttgagctcaggggttcaagaccagcctgggcaacaacgtgagaccctgtctctacaaaaaatacaaaaattagctgggcttggtggcgcatgcctgtagtcccagctacttgggagactgaggtgtatcaattgagaaaaatgacaagacaagtctcaatcattttaggaggtttactcgccaaagttaaggacgaacactcgggagacagtctgtacctttctccgaagatgattttgagggctccaaatttaaaggggaaagggtgagataatgacaagtacacaattttcatctaagaggcgggtagagaaaaatagtcatgcgtttggctcattgaatctgcattatttttacacaagatgacttagacaaagggggcaggggaacaatcaggtttgcatttgtgtctggcgggcaggggttgactgcacctgtaaagatgagctatcgatttgcattgctgtggtgaaatcttaacagaaacaccttacagtaaagattgcggagctcactaggaatttccttgtggacaaaatataggggaggtgtgcagtttttcatcttgcagcatcttatttagggaccaaaaggggaggcaggtttgcatgacccagttcccagcttgacttttccctttggcttgagtttgggggcccaagatttattttcccttcacaggtgggacgatgggttgcagggaggatgggagcctgggaggcagggttgcagggagccaagatcatgccactgcactccagcctaggtgacagagtgagatcctgtctcaaacaaaacaaaacaaaacaaaacctctctctggaagagaaaggagggactgtgaaaacaaccgagggaacaggcagctttcattaccagcagcatgggatcctcgcccaaggccgagaaaacacaggagtgaaatgacagctatagaggtacactccgcaggctgcatgaaaaggacaaaaacagtaatatacacaccagtaaggaacggcattggcatgctccgcctcctgtgggcagcctggggatgaggtcattttccaaaacagggagctggtcagcattttccatgcccagggcaagttccccttgatggacagcacctaatgaccagcgctgagtcagtctaggagcagaaagactggaaaccctggagtaggggccacgtcagcatgactcactcaagcaacggcaaattctcacagcaacaacatgaaacgccctccagggtgatgactgtgggagcaaaactgaccggaacctgggcggtgcatgcactgtgcaccctcctggttaacagccccacggcccgagagctgtgctttacatgaatgtcttctgttaaagcagctcgtgtggcttctgcaccctggtggagccaacacacgtgcctgtcacggaggtgaggagtgagt

SEQ ID NO: 11727 - DNA, 2300 bp, Homo sapien
catctgaacgccaattgagtgtgtaggtattttaagctgtctgcattgtattcccatcaaagtccactcttttgtacaaaccgtgttcgtgtgtggctttgcaggattgcagcctgtgggaggagcaaacgttgacccgctcttggctgcaggttctctgtgtctgcgtgccatgaaggctcctggaggttgagacgactttggcacacttgggggatctgctcttccaccacccccctctcccattcttttttctttttctttctttctttttttctttttttttagatggagtctcgctctgtcaccaggctggagggcagtggcgcaatctctgttcaatgcaacctccgcctcctgggttctagtgattctcctgcctcagcctccccagtagctgggactacaggcactcgccaccacgcctggctaatgtttgtatttttagtagtatttattcagcatgttggccaggacggtctcgatctcttgacctcgtgatccacccgcctcggcctcccaaagtgctgggattacaggcatgagccaccatgcccagcccttttttttttctctctctttttttcaaaagatgccctgcttacacactgatctcttaaaagtgcatgcctgagtcatagtgaaagtggagcctggcctgtggaagattttttaaagctttgaatggataagactaaaatccaccattgaatgcctctggtcttaaagcacttgtatttgaagaatgcttttggcctcctacctaatcagacttctgactaccccccatccccccaactacacaaatcacactgttctgtttctctcccccatactaatttcagaaatcgggtttctcattctgtacattagcatctttgtagaataatccagatatcatatatacagtataatcaaaaatgactcgtgggcctctaaaactagagctaattcaagctgcaaagttccattctccctatttttaaatgtttatatgaaggaggtatttagcactgaaagttgctatttgtggtgtatattctttggcccagaaataattctaagtatctgagttaaccagaaatacacataaaaatgcatttatgagtatgttaattgtggtattcatgataggaaggaaaagggaagcagcccagacagctgcagggaatttggttaggcgaatcgtaatacagccatagggcagaggaaagattgttttgaaattaactgataggacatttatgccatggtaaatgaataaagcaaggtgtaacagtgatttgttagaatcctttttggtaaaaacattcttaaacacgagaagccgttcagacacatggagctgcttgttgtaagaagtgagtcttgctaggattcagaggcggaggtgcttgtgcagcgtgggtatgacatggggcattcgcatctccacagtacagagaatggtcatcttggaagtgaagtgcccgtgtagctttagcttcacatttctaacgctttctgtattttggtgtaattattttactgtattttggtgctcagatcaaatgccactctgggacagtgctgacagactagtcttgagtctcttagcctttacattattttttttgttaatggaaatagtggatttttttaaaaaatcaggattgttttaattgtatgtaaatttaagaattgtcttagtattaaaaaaaaatctgctgaatttgaaaatggagtttggaattgtttccaggttatataaccacttcatgtcttctaaatgtccagaaaattagaatttttgccatcaagtaaatctataataggcatctgaaattccatgaccttaaaatctgcacatgtcaagaaatctttttgattgtggaaaagtttttcagttgtgtgctaagctcattagtgacctgtcgatttttttttatgtgattgtttaaagtgttcagtgctcacacaaaataatgtaaactgtgtgtctgaacacttatcttgttacagacaaaggaatctgaaatagtctttgttttctgtgcagctcaaagcttggattctgccgtgccactcacgaatggcgacacagaagacgatgctgacaaaatgcacgttgatagggagtttgctgttgtaacaggtgggagtggacagtttcctgttagctgcaacaacaatccaatggttgaagacaccaaacagcaggagagtggttctgttggaccaaaagaaatagaaatatatactgtgtcagcaatgcagaccccctgtcgttgcaggaatcagtatgcatattatttctaaca

SEQ ID NO: 11728 - DNA, 2300 bp, Homo sapien
tcttctagtaaagtaagttttgagataatacctaagaccacatggaaatttggttggtctaagtagaggacaagcacgtatttaactacctttggcaggggaaaaagtgaagtgggagagcttaccagtgctacctatgtgtaggctgacactctgaaacttcagtctccaggaatctccatatgttggcactattttgttgattatttttctataaggttatatttctttggaagatcagtaaacttgctgttctaacccaaattcagtgtagtcttcagcttctgaataaggaataaaggaatcgaatgtgctttggatgttcttttaacaatttcagaatgttggcatgccctttgagcatctaaacttccctcagcgaattggtatttatttatttatttagagatagaatcttgctctgttgcccaggctggagtgcagtggtgtgatctcggctcactgcagcctctgcctcccaggttcaagcgattctcctgcctcagcctcccaagtagcagggactataggcatgtgccaccaccacactccgctaattttttgtatttttagtagagccagggtttcatcatgtaagccaagctggtctcaaagctcctgacctcaggtgatccacccgctttggcctcccaaagtgctgggattacaggcgtgagccaccgtgcccagcatggtatttatgattctaagtgccatttcaaaaatctgtttgctcttttttattctctggtccactaaagagtaatctttactgtgggctttatttcatatttttatttgtcctaatactaagtggtagcttctcatttctctgtttcttgattttggagagcaagtctatgcttatctatagaaataatcagtttgtaaacttatgttctccttgaagagtttttgaattttcatgtggcaacttatttttctgttcacattcttgacagaatagaccctcccaggtcatctgcacttctgatatcttttgaaagtgaaatataccattaaaaaaaagtccagctatatgatgaagctgtcacgtaatattagtatattttctatttcaataacaaggtgatctgattttgtacaaagtataattaatgtaatacaatctgcccaaactttggtgcttccttttcatttaattcatatatcaaaataaaaatattatgcaatactagaaaatactcatggccattcatagccatgcagtcttaataaggctaataaaaatagtgactttagtctgtaatagtcctgcacatagccgccttatatttttaagaattttgttggtttctgagattctcaattctcttttatctctgatcagataggatttgggtcttttttcaaaaggtgtaatgcatttatcttatgctttaaaaagtagagacgcttagctagtgtccatgcacacttctcatttccaaggtcagagctctatgatgtctgcaaataacgaatacaaggctattgtcagtccttataaataagaaaatattatttgtccctaattctgtagttttcactctcaaatgcggggttttttttttttttttttttttttgcattaacagtaaccccaagaaaggcatcagggttctggagtggttgtttgagtgacacagcacaaggccttgatttcatcatgcttttgctgtggatgtagtgtagcttgctgaacaggtatggaagctgtctttgctgttaagtacttctcccgtttgtttatcaacctgcagctaacaggatgtctgcttttttacaggtttatttcacagagcagtgtacattcttgtcttccaggggaacttcaacatggagttacttttgatccctcagttttaattcagtgtctaaaggtttacaagttcaacttactctattttattcagctctttcacttactctgccatcacttcctacttgaatctgagttttagctactgtagaggtctcagacctttcctttttagtactattagccaggtaaaactttggttcttgtgagtggtagggatgagtttttaggacagtattcaaagcctttttaaaggaaccaactactcaaatgctctacaatgccaaaaatacaatactcctgcaggttttcccaagcaaggccaaaacaatcaaaatctgacagaaaaacacagctgttcagctctggaatctgatgataggctactttttaatgtcaggacatccttctaaacttccacttacagtgtcacatgtaagcatgaaggctggctcgttggtgagccattgctttgttt

SEQ ID NO: 11729 - DNA, 2300 bp, Homo sapien
ataaaaattgttatcttttattgtcacatggcattaacaataagaaaacatcctgaaggtgatgtgacaactcggattctaaaaattatacttcaggtatttcctgatccgtggtttttcaaaattgaaacaaagtcgttctcatcagaatggcttctcctttgttctggaattgtggcactataagtggaaactggtgggaccctggctggcttcagagtggagcctaatttttaaagttctttaggggagaattcttagatataaattttagtgaaagttctttgggggagaattcttagatataaatttgagtgtttgaagagacagggtcttcctgtgttgcctaggctggtctcaaacttctggcctcaagtgatcctcctgcttctgcctcccaaagcgccaggattatagggttgagccactgtgcttggcttagaggtaataaattttaatattctattcagaataagaaaatatagcatataagcatttgtatctttagtaaagttactgccagtttgattttttttttttgcaagttacttagcagaacatgtaattcacagtaaagatgattctgtgttgtaccacattttaatattcctgttttgaaagaatagtagagagaaaatgggtggcctgctcagtgattgcttttcgtagtcttggtgaatgttacaggagattgaatttatagataaaagcacagtcatcgtagtttccacagtacattgcagcacatttagcttgctagcctaaaaatctgatcatgctgagtttcttttaaagaaagttaattttagaacttcaaactagaaccagtttgaacctcaagttgaccgttgtctgagttttaaaaatctcttcccattttcaaagatttttcaaatggatgtaggagaggaccaaggaggtaggctatagctgtagaacaacacagtcctattttcagaaacgaacagacacacgttttaggtcaggcacagcccatgtatccaggtgcatcaaactggggatgctaagttcaaaagtgcgtctgttttgaagatttcatctgaaaataatgtgtacactttcattactaccagtttgcattcaaaatagtttttgagactctttaaactcttctggatactttaattttccctttggaatagtgtgtaaacacagtccggatgaactttactactgatacctcacttgaggttgacaggagtggccagcagttagtgcctatggtcatgtaatacactaagtcaatacctgtggagtgaaatccggtctctataaaaaatacaaaaaaaatggctggacgcagtggctctcgcctgtaatcccagcactttgggaggctgaggtgggtgggtcatctgaggtcaggagttcaagaccagcctggccaacatggtgaaaccccgtctctactaaaaatacaaaaaattagctgggtgtggtggtgggcgcttgtaataccagctactcgggaggctgaagcaggagaatctcttgaacctgggaggcagaggttgcggtgagccgagatcacgccattgcactccagcctaggcaacaagagtgaaactccgtctcaaaaaaaaaaaaaaaaaaaaaagaaaagaaaaactagttgggtatggtgttgtgtacctgtggtcccagctactcaggaggctgaagtgggaggagcacctgagcccaggaggtagacgaggctacagtgagctgtgattgcaccactgcactccagcctgggtgatgggagtgagaccctgtttaaaacaaacagacaaaaaaacctgtggattgaagggtaaaggatggagtatttaaaaagtactgtgacagaacaaagtactgtaagtactagagttgagtgtggatggaaacacagaacctgtaaatcaagtgtttcatttacgtgctcaactcctactgaattttagcaattaaaacatgaaaactgaaatattggttaacaaatgaaaatagaatttaaagacctgaacttcttttatgatctttaatgattatttgttctaatctttgacttggaaacccaaattattttcagtctaacgtacttgaaatttaactattaaaaaagttggaggaactcaaactttgaagttagggctccctttctccagataaagcacattgcctggtttattgtaaggcacttagaacatgtaaccaaaaacactcaatttaggaataggaatgattgttttacagctaagtgcgctctcagagtcttttgttttacacccctctcaagtttacctttagatatt

SEQ ID NO: 11730 - DNA, 2300 bp, Homo sapien
gatttgtaggtccgttttaatactgcattatacggatgccagtgtttaatggcagagtctcagaacttttctacaggagaggatttcttgagaagccatttattctgtggtaaccagattttcagctgggctacatgtattttaacttaattatttttatcttaactgggatcatcagatagcttgagaagcatcgatagccttatataagcaaattcagtgactcactctagaaaagtctctcttgcctagtttaggaagtaggcacagttggctataacaaagcctagaatgtgatgttagtagactattctaatgccacaaagaatactgcttcactttaattaaaagaaattttaattaaaatggaattgtcttagtttggatcataattgaccatttatgacccacctttgtttaccatagagccctgtctagaaaccagattttcattaggtcaaatacaggtgatgagcatatttaatattagtgttaaattcatttgtgacttttgcccttagcaaaatgtaacctagatttacttttagctattcattttgaaattcgtggtttctttatatttgttcatttttttgcccatcagaataatatttcagttacaaaatctaccagaattatgactctgaattcatattttctgattttaggtcctctgaattctagtcatcctcacatcctacttttgcctcctcttttttttttttttttttttttctaaaaagagacagagtctccctttgtcgtccaggctaaagtacagtggcatgattatagttcactgcaacttcaaactcctgggctccagtgatcctcctgcctcagattcttgagtagccaggactataggcacataccaccatgcccaactaatttttaaaaatgtttagtagagatggggtcttgctgtgttacccaggctggtctcaaactcctgggctcaagcagtccttccaccttggcctcccagagcactgggtttacaggtgtgagccactgtgcagcctccttttatctaattgtccccacagcagacttgtctggtcttggctattttccggttgttaaggtgtttcaggatggaggaatcagttcctgagatagttattaagttctgcctgctagaaagggacagtaagtgggttgatatcattctagacttgttaagaaattgttcagaattttgattgtttttcatagcagcttgattaaaatacagattttaataatttccttactacttttataggtagtgctttcaaataaaaccagtgtttgctaaatccaaatgtctttctcccttgctaaattatagcaggagcatgctaaatatttcatcagactactggaatgatggttttacattttaatgtttgaaaacataattttggttcaattgcagtgtaaaactattctcagtaactttaaacttgaaaacttggcaccaaatttatttaggtagaaactctttaaaaatagtttcttcctattattaactgaagaatatatttaagaaagtcttcataattaaataagagtttggataccaaagggttaaaaatacacatgtatttcttttgctgaagatatcttagatgtttgctaatgttttatctttacaaatggacaatttagtaatgttttttatctttttttaatgattccatgtatttgcttatttccatctaggaatagttactaatgtatttgagatacagcataccaaattttaaagtaaccagaatcgtgagttgatggtttttagtccatactgttaaacttatgttgaaatattgacatatttaaattggcttcatgctaaaaaattaccaaaggtaatttaaaaggcagtgttttagagcagtagctcatggtcaaggtggtcacatgacaatggcttaagctcagtgtgcttctgcaccttatgttgtctatgtatttttaatccaaatgttgcctgcaaatatgtgatcccttattatttaagtttcctgtattatgaaccattgcccgttttaaatcacacagaagattctgaatctgtaaaaactacacatgtcaatgttttacagctacgtaattcgaattgacttgattttttcaagtaatcctagaaagggggagcattccatatagaaactgctgaaactgccacaggtgcttctccgaaaaccttacagttgtggcattgaatgttcagtatcgcttcctttctgcacacgaggcatactgttgaggtatttgttgcggtgattggttttaacgctaatctaggaattcag

SEQ ID NO: 11731 - DNA, 2300 bp, Homo sapien
tttaaaaaacccagtcatctgaagtgaggaaagacgtacacgaagtaccctatcactataacctattttatcttcctagcccttaatactctatgcaaaataaattccaaagttaaaaaaaatctaacagtgggttggaacctaggtctggatattattctaagctctgccacaggcatgcagtttgcccttggacaaattccttgacttaccaccatctctgtttcaccattcccagaatgcagcctagcaagtaatccctccctttcattacatggaggacaagatacactcacgtcctttcgcaaaatgggacacctctctcctaagaaagatggaaatcagggggatatattttaaagagattagattaaaatcaacatggcatgtgagaagaaaaatgattacgttctagagtaaacaaaacctgaaatgagtttatagtctattctcacccttttggtccaaacaaaaaagtattgcttgattattctttcctgcttcactaacagattacaaactccctgggagaagatagattctatgtgtcatattttccattcattagcaattgctcactgaattgaaatatttgctacttccccactatagagtgtttctcaatgtgtttcattcagcattgtactcaacaaatgtttgctgtatgaagacatgtctgtgttgagtgtttacaccactagttaacaacttccctttgttaaatcttaggtttctattttttcgttttattaaccaatgctgcaatatgctttctcgtgcatcagtacttccctagacatctaattgccttgttcaatttgtgacgtagaattttgcaaaaaggaagtttacacagcgaaaaactatatatacaaatgaaataaaatacatgatttaaaaagaccgcatatttagaagcaaaggaaatattcataaacattgtggttattcctcaatagtgaaattactgatgctttcataatcagaataaaattacatatgtaataaagtccgtgatactgtcattcaaaataggggatttggtactcccttacatttatacagttctcaacaaaaagccttttattgtttgctctgtctggtcttctcgcttatctcttaaacttgcaaacgtatagtcctagcccaccgcactcggttccgaagaaggcgtccctcggacaaaaccgaggaatctgtcctgctctgtaaggaactagggcttgctgattcccagattttaacgagaatccctgctccccgtaggcgctccataaatttttactggacaacttcaccgcgcgctactgggcctccgggagacccgtgactcccacccgctctgggcgcgggcccgcagagcctcaacccgcgcccccggcagccgggattccccgcccggaccggctcccaggctggaaacatcatggtccgcacccggggcgcagccgagacccaccgcgccggaggccccgggacccgctcagaccgctgcttggccactctacgcccctgagccccccacacagccagccccgtgacctccgagccccgtgacctccgagccccgtgacctccaagccccggaagccgctgtaggcagcggcccagccaggccccgccccctccaccggagctccacgcgtcaattccagccaggccccgcccccggccgccccaggcgtggacccaagccaggccccgccctctgcctggctactccaggcgcccaccgccccaggcgtcctctagcccaagcccaatgcccggctgctccagacgtcgacagccccatgccccgcctcctaatcggctgctgctggcgtcctctggtccaggctccgctccctacccggctgctccaggcatcctctaggctagaccccgccacctaccggccgctccaggcgtccgcagctccaagccccgccctccgcccggctgctccaggcggcctccggctcaagccccgccccctgcccggcggctccagaggtccgcggctccaggccccgacccctgcccggctgcacaaggcgtcctctgggccaggccccgcccccagcccggccgctccaggccccgccccgccccctctgtgcgcgctccgctcggcagcctgtgggacgcgaccgcggcgctagtctcgttcctttgtgctgcggcggcggcttctcgagtcctccccgacgcgtcctctaggccagcgagccccgcgctctccggtgacggaccatgtcggcggcgggagcgggcgcgggcgtagaggcgggcttctccagcgaggagctgctctcgct

SEQ ID NO: 11732 - DNA, 2300 bp, Homo sapien
actcctaaggcagcctcatgtctccctgctacctgtccctgcgccccctgcagatctgggggatggcatgatgctctgaggggtccctcaagcccctctcttggcttggcggagtgaagcaccccctcctggtgagaagggagagagccacagcgcacctgccctgccgaccttgctcccctgactgtcccagcccccatgtcgcctggaggtggggaaggagggaaggctggcagacccttctcatgggggcacctcagcaccttattttagaatgtggggtccctgagcacttgtttttattcatataactcaaggcaggaagagagtcctttaaccctgtatgcatgcagaaaaagggtatggaaggataaagaaaaaaatcttagcagccattctttctggggagaagagaaggaagggaggtttttaattgtgcatctgattcctcagcatggtttgagtctcttgctctgtgcttcatggcattctgatcaattggagcagttgtgactggatagactgctagctgatcaattagtacagtcatgattggatagactgctagctggtcaattagagcatccatgactgcatagactgttagctgatcaattagcacagtcgtgactggatagactgtttgctgatcaattagtgcagttgtgactggatagactgttagctgatcatttagaccagtcgtgattgcaaagactgctagctgatcaattagcacagttgtgaccggacagactgttagctgatcaactggagcagtcgtgactggatagactgttagctgatcaattggaacagtcctgattgcatagactgctagctgatcaattagggcagtcatgaccggatagactgttagctgatcaattagtgtagttgtgattgcgtagactgctagctgatcaactagcacaatcgtgactgcatagactgttagcactctgcacagctcctggtcctcacgccatctctgtgagcaattctactcctttctctccttttctcttccttgcctaatactttttctggcaaactgattaccctgttccatataacactgactcctcgtttcactaaacaccgtcctcagctctttgtatctaacccagcccttgcctggcttccgtgcgctgtcccctcctcaatgcccatgctggctggggtcccctgggaagcggcatggttgtctgccaggtaggattgcacctgagggaccggttgttcaatagaacccactggaggccacaggtgaagggggctctgagcttccatggggtgacccgcaggaggccactgcctacagggctggcaggagggaaacgtgaccatcagaactgagaacgggggcaggccctgtggacctggagcccaggctcgacagggagggactgccaggctgctggagcccagggggtgctggccagtccacggggacagcctgggagaggaggctgccggttgctggtggggcctccggaggctgcggagggctggtgtaggggagtgggggaggaaactgaaaaggggacagacagctctgccagagtagggtggcagggcagcaagcctggacgaggagcgcagcttcagcccctctgggtgccactcttggcagcacttacaggggtggggtgggattggctagggtgcaggggaacagagctgcgaggctccagcgcagtgtgatgcggcaaagcacaggagggcgtgttgggagctgagagagaacagcaccagaacaggtatgacctgccttttaggacattttgtaattcagatcagtgttcgtgtttgaagagagtcaccgtcctgccatgggaaacacttgcatcgtcttccaaccttgacaggattacgcgcgctcctggaccgcatccaaatagaactctcccttatgcccagggctcgatgtggcgaccggctgtgggggtcacggacccctgcttttctggggtgtggctgtagttgtagtataaacggtcgtgcttattttctatacactgacctcacgctcttcacgttcctgctgacctcacaatggtctgtgaaggttctaccctgtttaccacgccctttcccagtgatacgaatatttccaggctcctacatgaagtaattacactgctatgaacacatgtatgtatgctgccttttcttcatttaatgtgtttccttatcctaatactttacttctaagccacctttagccttacatttgaattagctggcaccccacactcacattttattagaacctccagtgctcgcatattgccatg

SEQ ID NO: 11733 - DNA, 2300 bp, Homo sapien
acttgtttctcaagggccccccaggggaacagagccctagtgctcattttcaccccttgactcccttacctgcttcactccccttcctcactgtccttcctggggtcactccctagcaagccacttgcacccaatttgtgggctcagggtctgcttctgggggaaacccaaccaggagaagcgtcttgttggcatcatgtttcataatatactatactggtcaaatgctttctgatcctgcatactcctccagccatatgtgttgataaattaatgtttcctgccttgcatcttttaattttagcatttgatcatatttatcccaaatgaacaggaccttgtttcatacaataacacacagcagatacaatgagctgcatagagccacttcgtagtgcattctccaatctagacagggtccagttggataagggtagttctacagggagtgattactacccactctaggtaaatggtcatctgattgtccagcttaagtttggagtgaattttgccttattttttagattttggcatttttatagtgaccccacacacgctgagttggcagggttcagctgagctttgggtggtaactggtttgcagtagggtttgtgcgtgaactcctaacagtgatgtggaaggtgcctaccaggcactagcaagcagccaagctgggtgtgaggctgacattctctcattagaaacgaaggaagcgaagccacaggcttgcgtggaaagccattctccacctcttgaggcaagtccagaggagagccacagaaagggctaaacttccccttagacaatagtcttaactcgagctaacccaatagcccaaaagtgatgggcaccagattgcactccgcgtggcctctgtaataggaacctggaaaagtgctaaggaaagtttaaccaaaatgcccactttggatactaaaacaactcaattaagcacctaaaaatatctagctttgagcaatgttactttctaaaatcccttccaagtaaactctttttctgaaattaataaatacccaacataaaagaacgcaactagtaaccataaagtgtttaaaagtctgggcttctccccaccaagaaaagacgagttgtaatacctggactgtgggtctccagtccgacaagaattggctctctgcttcactggtctcgtaaggtcactccctagaattggctttctataggaccatttaattgagtctatttgaatcttactcaagtctaccaccttataagtatcaaaccgaatttagtaggattcgaaatggtaaggactgcattaaattatttctctaattcagcagtaaggaaagtgaacagaagtctcggtgtacaaccacgccccgggttgacatctttccttccacgaagacactgggtacaagccttgatgtagctgttaattgccctcctgtttcctagaaagcttatagggcagcagtaggaaacgggttaggtatgcctttcctggtaggagccgagctttgggtcttatctctgccacttgttcggcatctgatcagtaaaaggggaccatgatgggaggcgaggcagtagacagcactttgtgacggttcctaaccagtcgctgttatcactgagcacattgtcctcgtaatccagaattcatactgccatttgaatattttttgtatttgcaaagaaaattttaaccacttaactcaaggctagaaataaaagcaattagtgattgcaagagaaatccaccggcagaaggcagggggagacgacttaagcctctgattatttttggaagctttatatgctttctagcctttgtcattgaatggattaatgtatgtgcctggcatagactaagtgctttgcttgttaaactgcccgcgggtcatagcgagcaaactgggggagcgcccagggacagtggatggagtgagtggagactcgtgtccttttaagaagaggctccatttcttcctcgcatgtcaatgtgtgcgtgtcatcagttgttcgaggaagctcgcgcatgacgcgacacttgccgtctgggctctccaggttcggcctgctgctttcacagcccagatcttcggcgtccccgagacgcagccaggcgcccggcccggcccggcccggccctctgcacagccccacttcaggccacgccgtttccttgaccttcccccggcagggtctgaagcgtcaccgtccgtctagagcagagtcgcgcaggcccctgccctgccggtgaggtcggcgccgcgctccggagagtcggttcctcccgattcagacc

SEQ ID NO: 11734 - DNA, 2300 bp, Homo sapien
actagcaagcagccaagctgggtgtgaggctgacattctctcattagaaacgaaggaagcgaagccacaggcttgcgtggaaagccattctccacctcttgaggcaagtccagaggagagccacagaaagggctaaacttccccttagacaatagtcttaactcgagctaacccaatagcccaaaagtgatgggcaccagattgcactccgcgtggcctctgtaataggaacctggaaaagtgctaaggaaagtttaaccaaaatgcccactttggatactaaaacaactcaattaagcacctaaaaatatctagctttgagcaatgttactttctaaaatcccttccaagtaaactctttttctgaaattaataaatacccaacataaaagaacgcaactagtaaccataaagtgtttaaaagtctgggcttctccccaccaagaaaagacgagttgtaatacctggactgtgggtctccagtccgacaagaattggctctctgcttcactggtctcgtaaggtcactccctagaattggctttctataggaccatttaattgagtctatttgaatcttactcaagtctaccaccttataagtatcaaaccgaatttagtaggattcgaaatggtaaggactgcattaaattatttctctaattcagcagtaaggaaagtgaacagaagtctcggtgtacaaccacgccccgggttgacatctttccttccacgaagacactgggtacaagccttgatgtagctgttaattgccctcctgtttcctagaaagcttatagggcagcagtaggaaacgggttaggtatgcctttcctggtaggagccgagctttgggtcttatctctgccacttgttcggcatctgatcagtaaaaggggaccatgatgggaggcgaggcagtagacagcactttgtgacggttcctaaccagtcgctgttatcactgagcacattgtcctcgtaatccagaattcatactgccatttgaatattttttgtatttgcaaagaaaattttaaccacttaactcaaggctagaaataaaagcaattagtgattgcaagagaaatccaccggcagaaggcagggggagacgacttaagcctctgattatttttggaagctttatatgctttctagcctttgtcattgaatggattaatgtatgtgcctggcatagactaagtgctttgcttgttaaactgcccgcgggtcatagcgagcaaactgggggagcgcccagggacagtggatggagtgagtggagactcgtgtccttttaagaagaggctccatttcttcctcgcatgtcaatgtgtgcgtgtcatcagttgttcgaggaagctcgcgcatgacgcgacacttgccgtctgggctctccaggttcggcctgctgctttcacagcccagatcttcggcgtccccgagacgcagccaggcgcccggcccggcccggcccggccctctgcacagccccacttcaggccacgccgtttccttgaccttcccccggcagggtctgaagcgtcaccgtccgtctagagcagagtcgcgcaggcccctgccctgccggtgaggtcggcgccgcgctccggagagtcggttcctcccgattcagacccatatggcttcagatggaaccatcatttctgttccgtcatgaccggcttgcaaggtagcaaagcgaaacaaacgtctcgttttcagcctgtccccgccaccttgaaataaaaccggcaaaaataaaaagagcattctgggaagtacttcatcatttcaacgctcacgaattcaaaacataaacaaaggcttccgagtgccccggccaggggcgcggggcgcacggcgggcccggggcaggtaagcgcaggtgcgcgcccgcccccacccccggctccctccccatccgctccccgctccccttcccctttcccttccccgcccgctcccagccgccgccgccgccccgcgcacggcctggagcggaggctgcgcagggcgcggggcggcgcgggccgggcgcgggccgggcggacggccgcgtctttcttctcctggcggtgatgtcattgggcgacggcggccgaggccggggggcggcggcgggcgcccgcaggttcccgagccgctcctgagaaggcgcctgacagcgggccggggcgcacggagaagcgggccgggccggacctgctgggccgcgccgagccaatcgccggcgccggccgctcgatgggcgaggcggcggcggcggcggcgggggccgcgggccgggccgccgc

SEQ ID NO: 11735 - DNA, 2300 bp, Homo sapien
accagcctggccaacatagcaagaacccatctcgaaggaaggaaggaaggagaaagaaagagagagagagacagagagagagagagaaagaaagaaagagaaaaagaaaagaaagaaagaaacccagataactctgcctagcaaatggaaaaagctcacaaaacttctgaaacacagggatctcagaggcagaaaacggctaatattttactccaaaaacctacctttgaactccagagaaccagtaactgtgtctacaatacgctgccttcacattaaactttcattgtgacagagtcagtttaacacaaaccaactggagctcagggggaatcaaaaacagctctgacctaagaaatttccagatgactgtagttttagaatatgttgagttgtttcaacttggcttctgcaagctcaacattttattcgttcttctctttgttgttttagagatgaaatgaacgctacggttttctaggaaaatctttctataatttaaaagaaaatgattattgaagtcggccaatcaatattaatacagttaatatgccaaacaacatattctttgatggcgacatgtttttatcaatacagcatatgacacttcttaaagctttgctcttagggatggaacagaattttatttaagcctattttggtgaactttgcatgcatttcaacacttttcaacatctgtctttcattaccagaggtaccagtatccaaacagcaaagtattttgaatgccttgaaagtcagctcctgctcctcagtcctcctgtcttaaatcataatttcactgtgacatcaggttcatttttaaggaacatttttatttcatggacaggcaggcagccattcactctaatatgcagattctgttttcataaagatgttccaagtaagaaaaatagctaaaagtggaatgcaagccaaattcatattaaataaaatgttttctgacctcatttaaaatgtagcaagagaatatgtacatgtgaatgaaaaaaattaaacattttactttttcaagtcacttacgtggcattttatttacaagttgttgtcatcctgtatgggggccaatacaccccacttaaaaactgaaatccttcttcctaattatggtacacttcaatttctatatttaacaccttttaaataactgttgatcttaacgctatatattggccacccccacccccaccccaccccccgaagaaacaccctgggaataagattttagtattttgagctacagggagacatcgtttttagaaactctcctgcctcctcggccctgctggccggcttgtgggcgatgaaaacaaactttaatcacttccagagattcgggtcagggttcacacgctccagcctgggaaccaccagccggaagggagaagcagtgcctgcaggactaaaggttctgttcagaacgagggagggacctgagaacgaaatctagaattttaacaagccttgaagagtgccaggacttagaccctgtgtctgccgtcctctcggctcggataggtggggaattttctcgaggggaaagtagtagatcgtttcacagcgcagccctcagctacagatgcgtgcctctttaaaaatacagagcaaccggtcaattaacctgggaggcgaaactcacgcaacgccaccggcaagaactgtccacacaaagccagcggagtgagccgcaccgcgtcggaacgcggtttccgatgcggctgctgccagggagcggggccggccccccacgcggaggggcaacttagcgttcgggcggcgcagaagccccgtctcctcgctgcggtgcactctccttcccggggacccccgccgcccgcgccgcccctccccccgaccccgctccccggccccctccccctgccccgcacacaatggcgccccccgagctcccgccacggtcctggcgccggccgcgccgccgctccgcgcacaaaggagggcgcacgggtttcccgagcgcggccggcctcaggtgctccgcgcgcatcccgggccgcagcgggccggaccggggggcgcgggcgggggcgcgggccgggacttactttctcgatggtcccggggagcaggcgctccagcagcctgcagaggaccaccccatccttcagcgacgcctgcagaaagccctccgggtccgagatggtttttttgggcgactccagcacccccagagtgatgagccacgtaacggtttgctcggcggaattcatcgctgcggcccgggaggcaggcggggaggggcgcgcgccttcacctcg

SEQ ID NO: 11736 - DNA, 2300 bp, Homo sapien
tgggggaaggagtgctggcacatgtggcattccattttctcaggggcagctgctctgtgaactctccaagcccagtccaaaggatgccatctcaggacccggccctcattctattaatagaagtcactccagaatctgcctgctcgcctcctttctttaggcactgcctgcctttctatacatcttaaaagagaataagatgtctgcccagcatggcaggcagcatgctcctctcgtttgcaggcgctgtccctcgcaatacccatactgcagatgaggaccctgaggtctggcagttagctttgccccaggtcatctggctgcactcggaggcggaagattccagctcaagactgtgagctttctcatggaaaacaagactgattctgccacctatactgaacttaggggaagattcgcaaccactgccttcagaaatttacaaaccagatcaggaaaggagacggaggcagcagtgtaactgagcacccaggggggacaaaagtgaggactggaggggctggctcaggtcaccggccacaggggcagagtgggagccctcaggagtgcctggagccactgcaggtgtctcacttctcgggacatctggaagcagctctgcccttcagtagacagaccccaaaggcacccagggtagggccccttgccctgggggaacctgcagaagctcctgcagaagtctgtgtctgggcctttctccccggccgcagaacgtgtgttccgtgttcctgtaccatccaataactcactgtagtttctgggcttccctactctgtagggcttaccagatttccacttagtccaagatttcaaactgtgtgcatctacaccacacacacttttaaaattcaagtactatgtacacacgaacatctctctccctttagaggccactgatcactctaaaatgtaaagagtggaggcgatgggggctgtgaggtgagtgggggcagagccgtttgttcttgtgtagggtggattttagccgtttggattggagtcttgtgtaggcttgacgcccacgcgtctctcactgcacgagggaggtggcagaggcacatcatccctttgggcacgcaactctaccacgtgcatcgctgggagatgggaggactggcatcccccgaacccacgggtccctgcctggagacactgggagacccggtcctctgcgtgcttcagagtcaggcacacctggctttgttcccgcagccatttgctctgtgacttccggcacctgtctaacctctcggagtcctagtttcttcctcctaaaaatgagatgaatgatatccactggtgggggcagtgaggtcattaccagggtaaatgagtagatgtgctgggcacaaagtcattcctcagtacgcagtagttactgttttgttgattgacactgaaaaccttccccatcgtgtccagaagactgtaagccaagatttgaacctcagagccatccaaatccaggaacacgggttaattctcacaacagggcagactcttgcaactttcgggggctggcagcctctgcatcccactctggacagaccaccattgtctgggttggtgggcctgctgaacgtggcttccagggccctctggtcagcgccagatctgggcgcagctgctgagtgcacacagctgctggttggggagcgggagggctgagcgggtggactcaggtttcgcttatataaagtttcatgcatcagcagggccgggagtcagagatgggaagtgagggccagcctgccccacctggtgtctgcagagagagggctttggggccgccccggtccgactgcttcccgggtacagcttctgacttctccctcctttatcagttctgtcaagttagggtaggagaattaatctcttgatgtttttatatttctaactttagctttgaatttttaaggtttgatgcaccaggctggcagttctcaactctgtttttgcaggatggtgtcatgtctgctggggtctcaaggcgaggcggtgaggggaactgaaatggaatgtgtgcacagtgtatttcaaacacatgtatgtgaattcatttaatcatcccttttaccaggttcctattgtgtgcgtgctagtgacccaatcacacgcatggaagcgcacgcatggatgccagccataccacctcttcaggcaggtcagaagagaaatgctaggatcttgggtataaagtatttgtgagttctcaggatgaaggaatgtagagtcatccagcccagacgcctccttttgcagatggcttcactgagggc

SEQ ID NO: 11737 - DNA, 2300 bp, Homo sapien
tttctggagcagcctcatgtacagatgtgaatgcactgtattgttgattcattaacattgaactcatggccaacagcactataactcatgcccgaacaaagcttatctaacacatgtattttctctgttaagacacatcacagccttcttgcgcttagggacattagacagcatttcagcactacgtttgggggccatttgaaacagaaatcaccatcggaaagcatagaaatttgaaaaatgtgacactaagtagagtgagaagaggacatatgtttacagaatgagaactaaaaaaaaaaggcagagcatggccttattcaagcacagctgggaacgtgtacataaggtgatccaaatttttcactgttctgcttgtgtccatatatgactgagagtgcttcaagtattgatttttgggttacacataatttttagccaagtagctgagttcataaatacagactctttgaatgatgattgactgtatttgtagaggttacttgccaaaaaagagtgtgtttcaagcataaaaatagactatatgaggatacaactttttgggtgaagtggaatgaattaaaggagaaagaattaatgtctgacttgttcagaaactttttagatggagaaatgggtattatgtttctattacacttagattctattggatatattttttataaaggatgcaatggtttaatttaaaaatgtcatcagaatgtcagaaattacatcctttacaactatttaaaactatgaagaaaaaaattaggtattacctagatatgtgataatttttgaaaattattttaaagagcaaaacggattaggaagcagctttgcttttgccattccactgaaaaaatgtacagtttcgatggaaacatgtcagcacttgcttgaaggaatttttcaactatagaaagaaaaaagcttcatttcatcccttttggcattgctgaacacttggttttgatgtataattttaaaacacctgagcaccataaaatgaaaccacagtattcctgagtagcctggtgaaatgtcgtgattttctcctacagtacagaaggacaaaaatgcctttaatgtcctcaaatgctagagttctagatgacgcattagtttaaatgtcaacgcttaatgtcttcacatgtaatttggaacataagttttcttacagttaaaataatccttagagcaaaaaacaaaataaagtttttcgtatgcctcaggcttcttaaaattttctagtaattggtactgtttctggtttccttagtttcttgccgtgggtaaggtccaaacaccttacatgtgttgctggtggccctcacaattctaccttggactaaagcactagggagtctgtaggcgccttcctgcgctcctccactgcggtggatccacaatttcttctcagctgacttactggttttcatgttaactatttcggttaatcattcatgaagcgcgtggcttatatttgggaaaacattgcaccttaatcccaacatgcataatttatgttgcttaattattttaagtcattgcattagaatagtaactgcgctctccatgagcctaggctagaaagaagggaaaaaatcccaggttctctcccaacgatcaggggttactcaagccgcccgagttctctggggcccctctgggccaggctgcgtccacttgggagaggccgaggacctggcgccaagaggcggcggtgtctgcgctaggggccgagcgggtgcgctgtgtctgcggggccaggccaaggacctggagcagggaggaggccgagcgcggagccgggccttgtcggctgcgtccgcggggctagggtagagaccgaagactggacaggaggaggcggcggtggccgcgcgcggggccaaccggtgggctccctctaccggaccgaggcccagcactgggccagaggaggtggcagctcgccggcaaagcagggtgggctgcgtccgcgggggcgaacacccgacgctatccgaagacgtcccgcgcgggccggcgggggcgcggtctgaggacgtcacttccggcgccggggctcacttcctggtgcgggaaggggcagagattggtgcagccccggaggaagaaaaaagggtgaggagaagcagcggctgagcgggttggcatctggggcagcgggctcgctccaggccgtcgggggccgctcgccagcgtcgcccgctgtgttgggagcgcgggccgtgggcgtcgctcggccttgtccgcggcgtccccgctgccggccacggcgctcagcgctt

SEQ ID NO: 11738 - DNA, 2300 bp, Homo sapien
gaggataatataataaaatccctcacaaaggtgaagaaaaagtaaaacctgccactagcaaggcatattatcacagccaataaggcagctggattacaaatgacaaagctgatacgacaaagggtatcagggaaagactactgaaacactgtctttttcccctttgaaaaggccctaagtttcttggaatctcccctagcactttcacttacgtgtaataatttccttgccaacatgaaatactaccaacaataaatttctttgtgtttacaatcataaacaacgccagtaatactttaatctatgaattcctacatgtctaattcaattaaataaactttccatgtaacctgccctcacagatttgatgttctaggttttccgagaaacctatagcaaaatattcttcgggaagggaaacctctgttgggttatcctacataacaggttctacaaagatgctttcatatacagttgtccctttttatcagcagggaattggttccaggatcccggtggataccaaaaccctcagatgctcaagtcttttatataaaatggcatagtcccgtaaacattaaatcatctctaggtttcatacactacctagtacattataaatgatatgtaaataatcattatactgtgttgttttttattgtttttttttaattggtttccccctcctccagtatttccaatccaaggttggctgaatacacgggtgggtaaccttggatacggagggccgactgtactcttatctgggagcttgatattgcccatctcagtttacagataagaaaactaaggttaagagtgacaaagtggcaacataaacggcaggacttaagtacaggactgactgcaaccacttaagcagatcccaagaaaagcaaagctagatttctgtatttaaagtgctaccccaagtgtaggaagaatcgcaatagcaaaataaaatgaaagagttaaattcccagaaactgccactgaaagactgaaaagacaatgtttagtaaagtgacacaacattttacaacagggaatcgagaccccgcccagtatgttccccgacagcatgttttataaacgtcacatactggttaatgtgaattctctggacattaagtgttgagggtacggaaaaaccaccgaatttctggtctcaggaagaaaaagcagagaaaggagtgcggctgggagaagcaggcggagggctggcccattttatttctgcacgactttgcctgatcacctgctgaggattctaaggcctgacccagacctagatgccagcccttagatgacaatctctaaaagcagagttcatgctgaggcaggtgccaagaaatcggttcacacccctgataaacggttgttgaaaatgtgtgtcacctgcaccaccagcgaccagaaccactcttcctcactggaacgagagcaatgtctggggttccacacgcagactccaccctgccctgggggtggcccgcgcgccgccacctcccggccattacccaaacccgcaacgccccgttccacacatcccggactctcgagcagccggggagggtcggatccgggcgcggaggaggcaggaggtccggctggagcgaagcacccaccccgggcccaaccccgtcttcccggcccctccctcggcccgtggccgcccgcgctcacctccagccgcagggaagccccgcagccgcgcaggaactcgcggatgttgctcaggcactcgctctcgctccggggctcggggtagacctgcaatacagagcacaagcgctgagcgccgtggccggcagcggggacgccgcggacaaggccgagcgacgcccacggcccgcgctcccaacacagcgggcgacgctggcgagcggcccccgacggcctggagcgagcccgctgccccagatgccaacccgctcagccgctgcttctcctcacccttttttcttcctccggggctgcaccaatctctgccccttcccgcaccaggaagtgagccccggcgccggaagtgacgtcctcagaccgcgcccccgccggcccgcgcgggacgtcttcggatagcgtcgggtgttcgcccccgcggacgcagcccaccctgctttgccggcgagctgccacctcctctggcccagtgctgggcctcggtccggtagagggagcccaccggttggccccgcgcgcggccaccgccgcctcctcctgtccagtcttcggtctctaccctagccccgcggacgcagccgacaaggcccggctccgcgctcggcctcctccctgct

SEQ ID NO: 11739 - DNA, 2300 bp, Homo sapien
ccagttgactggcatcagagcggaggggactgtgcagtcctgtgtgtgggttaccggccccgtgggcttcactgtgcgggttgtgtgtctgggagcaggtggggagaaccggatggagggctctagaagcagctacacgagcagagctgagggagacactttctctgcacctgtttcctgtgtcacacttcagatgggggatagtccaggctggtggtggagctcccaggggatttcgcttctgggtagaattgtcatttttttttttcctcagagactgttgtgtgggcctagtggtgcatcaggttccggttagaatccagtgcaggccgcaggcttctctttaattagagagggtcacttcacctccggttagaatccagtgcaggcagcagcttctttttaattagagaggggtctgggtgctgagcttcccatcaggaagaaggggctgtcgtgctgaagtcctgaggtgggtcacgtgtcccttcctgtgttagaaaaccgtctttggtgctcctggggctcccttacaagtgctgttctgaactgttaggtcattcagagtccatctgcgtcctgtccccagggatctcctcaaaccctgtttagactgctcatagcctttccctttttagcactacagcgggttctttctctgttaattttttgaagctttttctttctctcatttcggtggcaccttgggagggatgggagttagataggtgtttgcagtgggccatcttgagaaacttctcaaaactggagtcttgtaactgcttgcattttgaagttaatggaatgggcgcattgcctttatagctgtaaatgttactgcttcacttactgttagcccaagccagtgtgttgcatctgcccagatccttctttgtggtatgtgctcactttctggcgacagccaggctgttctttgcaggcatgtgctcctagcagtcgaagacagaagtttgggggcctgtgtaggctgtatgggctgctgtgtgtgtgtacgtggtgagttgtgtctgagaccacccctcctcccctgggtgctgcctgatctgcctgcatgaccgctgtgggacaccactgtctctggtgtcctttcctggctggcagtgtggtggtgtgggcaaagccaggctggtgggctccgatcttggttctgcctttgtaagctttgtcacactgtcttttgggagctcgtgtgtgtgtgtgtgtgtgtgtgtgtgtgtgtgtgtgtgtgtgttttcgttttctgcctgtaagataaactggcatgcagtctacactgaggtacgggctgtgtgggccagcacagcatgccgtggtcctaagcagggaggtgtccttcctttcccctgcctgttggggctgcgcttccctgcctcgtgtggaggttgcgcccggtctgcagaaggcagagagcatcttgttgggaagagccctgcctgccttcccgttgctgtgctcctgcctccctgctctgctcctctcaccccttcctggaaactacctaaaatacttggttacttcttttttgaagatgtattctctgtcctagtgtttgggtgttgatacagtggaatccacaaaattgaataagatttgattttcattttaaagtgaaataaatcatttgggtgcatgttgggtgaaagtgccgtaattgatagcatccgtcatcagactttaattttacccctggggtgtaggagtgggtgggattaagtacaaaatctgcagaagccaggaagtgaaaacgtactgctggatttctgtttttcacatgtccccaacaatatggaccatttgcattaaacttaaatagcaccacttatttaagattcattttttactcttgttctgaaatcacaagttccatttgacagtgataggacaaaattatatttttaaactttgcaaaccacactccagagctgtgctaaaaataacaatttcttgtgtcaagaataactttctcaagttcctggaggaggcgagctgactggtggcaacgcagaccactaaagcttcagtgagcccagaaagtgtgcgctcagtcccacattgcagaggcctctccgtcagtattgagatggtggaaagtgaggagaagcaaaaagacgactacttctttccccatttcccggtctggtctttttggggtctactacgtagaggtgcatcagccagcgctaccatggaggcaggaggcattcttttgctctcgtgtcagtactgacggggttgattaaggttgctgtgcttgttggtgtgggtattgggagggtggt

SEQ ID NO: 11740 - DNA, 2300 bp, Homo sapien
gttcagaggggctaggttaaacacagttgtgcggtttcattttctgtaggacttacagctgttaaagtacttatatgcattacgaatcttggaaaggagttcacagtgtgtagcattttttaaatacgcttggccacagaagtgtccagcagtctcctcttccaccggccatgctttaggatgagatttctcagcctgggcactgctgacgttctggactggatcgttcatggccaggggctgggggtctcggtgagactgtcctgggcactgtagggtatcagcagcctctctggcccttacttgctggaggtctgagcccctgccaggttgtggcactgccacccattctctgtgggggcacgttccccacaccagttgagcagcactccgtctggaggtgcttatgtagaatcctgctccgcagctgatggagtgctccccaggcagcgctgcccagacgcccactgcctcttcctgcggacttggtgggccaccatgtactgtggtttctgtcagctgtgccaggatgttttgtgttcacttctgacttgtttgtaatgatcactttgtaccccctttctggtatctttccattgacatttcctggtgcagttaccgatttcttctgttttcagggagcactggtttgccaaccattttgtgcattgtgtgcagcatttagcacaactacttattttctgttttacaaagtagaatgttatgaaattcttgttcttgcctcaatttcccacccttattttgactttaaacttggaacttcctctgcatttctttacgaggaaaatacatggttcttttctgcaaaaacatcatttaaaacaactgttatacacggtagttttttaaaaatcataatgtgtgatgtcttttgtcctggtgtctatgtttagtagcagctcatcagatacagtgtgtgtttgggcttgtcactctgtcccttgtcgccagttgagtttcttgcttacagtacagtattataatttattatttgagataaaaatttttgtattatacacacatctgctacaaatgagctttttttggttcacaaacacagttcctccaccaattctaaaatcatttaatattgactttaataatggtacctttttctagaaaagcactaattgtttttttttttgtgggggggggtcttttttagggaaagcttccaacgacaggaatgacaatcacaaagcttgaggacagtgaaaatcatagaaatgcatttgaaatatcaggtgataggcacaagctgtgtgagtgctgtgtctcggggaggagaggcagcttgtccccgcgtgcagattcttgcttgcgtatttcagaaggtggtgtttaagcgctgagtggaattctggggggtgtgcacgcacgtgctttttacctgtgtttccactcggcctattttttccttctctcctatagggagcatgattgagcggatattagtgtcgtgcaacaaccagcaggatctgcaggaatgggtggagcacctacagaagcaaacgaaggtcacgtctgtgggaaaccccaccataaagcctcattcagtgccatctcataccgtaaggacttggtgcttctcctccttccagactccaggcgtggcatcccgtggctgagctgtcagcaagtgatcagttgctttaaaacctaatcaatatttggataaaaagtgcaaaacacttgcttcacatttctctgcagatctttggccctcttcgtgcagtagtgaattgttttccaatgagtgttctcgagaaacaaccctgaattgtgcctcctcacgcacagttcagaggtgcttgggtgggaagctgcttctgctccgtgtggccctagaagactgatttaggggagttttacactcaactatagatgatttttctgagaattttaactgtttattatgcttcatttaagaaaacaaaaaataaatgattatgatgatgaaaagggccagactcatgttgaaggcattaaaagaatttatgacacactgttgattttaagaaattgaggtgtcttttacttagaaaagctcaacaagtctttggatatttagagacttttttttttttttttttttttttttttacaacttttcagaatagatgaacactgaagcttcagtgtttaaacctctcctggtgttttgtgctcaagaagttggtatcgggttgttttaacagtcgtcatctttatcaagtaatacggaaaaactgggcagagcttttaaagaatgaatgacgatgacacaggcgttttctgct

SEQ ID NO: 11741 - DNA, 2300 bp, Homo sapien
agtggatgagctgcttcactcaggttttcaacagcagcctgaaactctacttcatacaattttatatcaagtcagcttttctctgtggccagaccctccgtcttagtgtttctttcactggtggctgggaaggcatcccttcagcggggaaggcactgtgcctcatgtttaaaatgttctgcattctcctacagagtttcttgtgtgggatgatgtattctgtgatccaactctgaccagctgaaatcattttctaattttagcataaagcatacttcctttgactttttcaagaaaggagaaacaaaaccagacactgctttgacgttgttgctagaagggatgtcttacataattttatccatctatacattatttcctatgaaaagatgaccttacagtggcttcatagcatgacctgcatctcacacaattccctcccccatgcagggactagaatgtgatcgttgcaggaagttgatggcttctattcttgaaattgtggcattagctgccgtccctctcagcctgtgttttgaaggtcgcgcacttcctcagaatgccggccccactccgtttccagttcacagcgccacacagcttgttctcccattaaatgcaccttactattgttggctaatttgaggtcattattggctgattttgagaatgacttatttaacttttctcatttaactgtcattgtgatggaatattttgggttttccaggaatataaaatgcattaatggcacaccgctctaagaagttaatttttgattaactttgttttgattaaagttgagttttctaagaacataattggttttaataccagggtttggcagtgttcagtaaagatccagatggtaaacgttctctgctttacaggttcaggcctcttgcagctgtactctgcccttggaacacaacagcagttttagacaggcacaggcctgcctgtgtgccaggaaaacttttttaaaaaacaaaactaggcgatcaggccttagtttcgcccagtactttatcaccaggtgaagaataatacgtggctgggggggaatcaccttccttcttacagccacatgccctgtgtgcttttgtgaaattctcatctttttactagatgaagtaccttttttctataaatgttactccgtagctaataaatgtggctagtggatgtcttttgagtgctggggccccagctagagctgcccctcctgtctggggcagacgccgtgaggagccccacgctcggcccaggtggcgcgagctagtgtttggccccaaaaactgactgctgagagccagagatacgaatgaaatgataaatcctgaggtttatttcacatggagtgtttaaagagcagaaggaagtgcgtgataagtgccctttcgcggtgagcacgcgagtctcatgttctctgcccttcccgctctgtgcccttggcagctcccctcccacccggtcactccgtccagcaagcacgcagacagcaagcccgcgccgctgacgcccgcctaccacacgctgccccacccctcccaccacggcaccccgcacaccaccatcaactggggacccctggagcctccgaaaacacccaagccctggagcctgagctgcctgcggcccgcgcctcccctccggccctcagctgctctctgctacaaggaggtgaggtcccttgaccactcaaacagccagatgacggtgagcatgcctcgggccctgggtgtgcccacgtgctgggccttctgtgtacagcaaaatgcaccctaactcctagagaactgagaagggggggtctgccttggttctctggttatctgctctgctgctgagaggcccgtggtaacctgtgtgggaaggcgatgtgcagggtccccctcctttctgccatgcacaggggggcctttactgcacttgccggaggagtgtgccgccaggggccaggagctggaaaggcgctgagcccaggtggctttcactccctgtgtgtgaggccatcgctcagcatctgcacgctgtctgctgcgtctaacgacccctcctctaggttggggatcctgtccaggagccctgcattttgtcatccagaagccatttgagatgaagagaacatttactaatacaaatgaaaaacaatcacttaggcggtttccccctttgatgcataagaaatcatgatgcggtctttgcttgtctctgttctcatccggcatttttatatttgctaggcgcaaataaagtacgattccaatgaataaatagaagtgttaacacttccttac

SEQ ID NO: 11742 - DNA, 2300 bp, Homo sapien
gcttcccggtgctggctcagtcctggcaatgaccacactgcaggctcatctgtctccactccttccccggaagctcattgatgacgtggttctccagccgactgctgcccaggttggtgcctgctgtaggtgacagttcccaggagagagaagcagtgtctctgcctgggagcctgcacgcaatgctggtgggaacgtgaaatggtgcagccactttgtaaaatagcctggcaggtcctcagagggtgaaacagaattcctgtatgtcatagcccatctggactgtaacaaaaatgccacagcctgggtggcttataaacagcggacactttttgctcacacttctgggggctggaagttctagatggaggtgtggcagatttgctgtcctccgaagtccccttcctggctcatatccggcgccttctcactgggtcctcatgtggaagaagaggcgagggagctctctgaggcctctttaatgggggcacgattcccattcgtgaggcttcaccctcacgacctcctcaccttccaaggcctcgcctcctaatcccatcatcttgagggttgggattttgacttgtgcattttgggaggacacaaacattgggttcttcccagcgtgtgacccggcaattccactcctagggatataccaaggataagtgaaaatctacgtccacacagaaacttacattgagtgttcccaacagcattattcataaaagccaaaatgttggcccaacccagtgcccatccacagacgaatgactaagcgaaatgtggcatgtccctgcagtgggatattattcagtcgtgagaaggaatgaagctctgacacgtgctacatagcaggtgaaccttctgcaacatgaaaaattcagacacatcaacccaaattgcgtgtatgtgtatgcttcctgggcgtgtcccctagatgcctcctctgtccacctgatgcccacagcaccagcctccagccccccagcagcgtcctcggctcaccattgactttttcttctcttgctctccacatccaagccgtccgccactcttattaattgattagttgattgacacagtgtctccctctgttgccctggctggggtgcagtggtgcaatcacagctcaccgcaaccttgacctcccagtctcaagcgatcctcccgccttgccctaccaagattctgggattacaggtgcgcaccattatgcaaggcccactccttcaactcaaaccatgaaaagtagcagccccctccggcagttgcctgccttcttcctcatgagtatcccgtccttcctgctcacaaacctcccgacagccgtttccagcacagcagagtgatgctgtgaaaatgattccatttctcgcacaaaatctgctagtaactccctactttgctcagaataaaggccaccatcctcaccatgacccatgtggtttcatgccctgccctcctgcggcatctcggctccttgtgtctctcaagtcgccacaccagcctccccccaggacctctgcatgctccctcgtcagccccagacacaccttcctccctggaggccgcctgcccaccctgtggcaaggggcaacccctgccctgatccagcctggcccacgccctgagtttgccttctccccacggcccgggcctggtccgaggcagctacgtcactctgtcctctccccaggagggaagggatttggttttgttctctgctgcacccagtgctggctggcagagaggggtgtcccaggaaggaccgggacacaaaggaagggagggacaggactcaagcacctgtgcccacaggcttggtgggcaaggggcgggggtatcctgcagggaaggtgggactcagcccatggtgtccccagcagcgtcttgcccctggaactccctccctacatctgttcatctgagtggccttcgtcctcaatgcagccagtgtcaaggtggacacgcacacggctccgaagtcctgtgtgacgcccacgtgacctcatgaggctgtgtgatgtcacagcgggcggggtggtgtgtgcccagcctggtcccacagtccatagtgagcggcagacagaggggtggccagtttgttgttttacctaaaaggtgttttccacgtggagtgggactgagaggcacaggtggctgaggggacccgcctgggatgtgaggcgcaggtgagtcgatgaacgccccctcctggtgtgagccgcccgctccccaaacgacgtccccagggccccgcccgtgctgacctctcctgttttccaggtgtgctcggc

SEQ ID NO: 11743 - DNA, 2300 bp, Homo sapien
cctcttgttaccagcatcttggaggactgaactaaattgccttaaactccaagggaatacagtttctcaaaagtaaattttttaaaaatccccaagtaaagaaacgtacctgcttaattttgcttttgacacttagaccaacgtgcctttgggggaaagcgaggctgctaggaagagtgttcctagtcaacatctgagctctggcggcttccaaaacactcactcctccactcgcacttctaaatagcttagtccgattaagaaataatttgcaaatgacatagtgtttctctagattaagatccatcgagtgaagtcatgtggggtttttgtctccgagattagagccagacagacaaggatctcctgcaaactgcagctgccgacaatggaaaaaaaattaccctgcgtttgtccgggggagatgtgtgcgtgggtccgcgcgccccgcaccgacactgagggctggcacgcccttactgtctttcgattgtgctggacttgtgcgtccttttttttttttttatgttggtaaacatattgccttgggtgtgagggggtcacaaatcctctgggcaaacgtggggtcgtcattttcaaaaaagcagtgagtttgcttgtgatacatttgcagggagtctcaagggtggtggtcttaagtccgaagtgctgacagcctcactcaactgtggggaggaggcagagagggagggtggagacagagacccagaccccgagaaacaagtgtggctccagcccaggagcctcacagaacacatttcctcctccgccttcggctctgcgtgggctagccccgcgctagggagggcaggcaactaggtcctccgaggtgaggctggggctccgcctgcagagggagtgacagcgcgccgcgagggtccgcgacccaggcaggggtggccgcaccaccccggagcgccgcacagccccgcaggcctcccctcccgcagtgcgtgcctggaacgcggggccgcctggccgagggacgtttacctggagagctttgtgtccacaacactaatccttagacactgcttcgttcagcagctgccgtcagtcgtgagggcactagtgtggggatgggggcgaattcaggagcccgtcgcagagcaatatttaaaaaggggggggggagccggagctgctcccaggggaggcctcgcgcggcggcgcccacggccacggtgtccccgctgcgagccaacaaagctgaggcgctgtccgcgggaggagagagcccagcgcggggaccggcgcgggtgggagtgggggcgcggcgcggaaaaccccagggaaggaccgggtggacacgggacgggaggggggtgacatcctcccacccgggggttagaaaaggtccgggtggtagttccaggcgaaaataggcagccctctgtgatgacagaattgacaactattttttgggggggcgggggttggacttccgagtccctcgggacggaggcgcaggggagcaggaggggtgccccgtccctgcagttgcctcggcccgaatcccgcaggccaggccggaacgcgggggcgggggcgcgggagggggacccgcggcgggaggcgagagcgagcgaatggggagaggagcggggagcaggaggggacgcaggggagaggggactggggagcggcgagaggaggacgggagacgcggctccacctcccagctcaaaacggcgtcccagctgctcgcaaaccaactgctcgattctattcactgtcgagtaggaacaaaaaagtggctatttattagaatacttgtttggtattgttccgcgccacacaaaaggcgtttcattatgtggagggatctcctttttccagagagaaacaataacttgaaattgtctttaaagtcttttctatcaataataaatttcattttcttgtctctctcgcctgcagtgtgtgtgcgcgcgcgcgaggcgaggagagaggcgcgtgtgcgagtgagtgtgctagcgggggtgcgcgtgtgagtgtgcgcgtgtgtgtgcgtgcgcgtggcaccggcgcccgcggctacggggctggcgctgccggagccgggccggaccggggtccgagatctgcgtcgcgctgggcacgctggccacccggtccggaatgagtcggggctccgggaggtgcccgtgggcagagcgttaggggcgcggccgtgccggacccgccctggggacccgctggagctggaggaggaactaactgtaagtgtgtctcgaacttgcgcgggggcttcagcccgcccggggctgcggagctgg

SEQ ID NO: 11744 - DNA, 2300 bp, Homo sapien
aagaaaagtcgctgtcattttgtcccttggttattttgttgtctttttttttttttttggagaagtttggattcaaataaaagttaaacttaaaaaaaaaaaaccatacctaaatatgttggtatgaaaactaaattctataaataatgcttttttaatgcaaagaatggctttctgaacaaataaccttactgctaatattaaatggaagcactttatgatacaaatgcaaaactcttccaaatcattttcgggaaaaaaaatcatgaaagtctgaaattagcaaatgaaaacattgcgtccagtgatattgttttctaaatatgcctgaaatctgtcataatctgttttcctggaacaataagaaagtggttccaagcccccattactatcattttctacacaaaggttatctgtgcattatattcaatatagaattttcaaattttgaaacattttattattacagtaatggctattgccttttctaacagacaccctgtcagaaggtttaaaaaatgtatgtttcggttcatgcaaaaaaaaaaaaaaaaaaaaaaaaggtcaaaacttttaaaatgtcacttcttctgcgctttgcatagaaatacattggatcagtgggaggctccctgcccacagaaggggctgcgggaagaatgctgcctgctgctgagcctccactttcctgcagctgtgagctgagcagaaaggcactgtgggagtctattgttgccccagctgggtaatagttttcttattttacagtcagcagccaaggggggttggggtgtctccgtaaagtgcctgaaaaaaatacataactcctgcaaatagatcactttctgcttcttccatgagaaacaggagtctataaattgtgtagttcgtttggacctaccagtataattaaatatcacaaacaaaagccacccccagaaccacaagagctacagatacggtgcattttcccgacaaacctgggctgcggggagcgctggggcctgcagacttggtgacacaattgtttctcccatctcccgtcagccaattattctttcccgtttactttgtttgaaagtcacctgccatatgctgaaggactaaggcatgaaactaaaattttaatctcaaatgttttcagcaaggcgggattgcaggcgcatgggtcctactgagcgtctgaattccgcttttgtttaccaggcagatcgctaagtttgcgtgaacggtggttaggctgccgagtgtcttcacggctgaagtttgagcagggcccggacttcaggcttgttttgttttgttttgcactgtgaattgtccatcgtggttttgttaccatggaaactcatttttaaaaggtgaaaagtcactgaccttttaccattgccactgcaggaattaatattctagcaggttgggaggaaggaggcgtcttgaatgtaggtgaggccgttttctggtgatgtccccacagagaactgtctgatttttagccttaaagtcacaaggggactaggcttacacttttttttacacaaatcgccttcaaatcagatgtttcaaaaataatgagactgttttgtgcagagactaaaatgaagctgttaggactttgatttttcagagcgatcgaaagcgtcagctttctcattccttaggaagctcccgtggctgagttttaaaatgttcactctgatgacctgactctctggacacccaacgagtggaattatttgtagaaactaatagcacacagtcctagagtgagctggcgagtagaaaccagcctgtgaccacatggagagtcagagagctgaaggaaatgtactgtgaatgggtttttcttttaagcgcactgaataaatgagatctagtgtttactcttttgatggatctgaggacaatgtaagtttcaggcactgttcctggaaaggaagagaaagccacttctcggggtcactgagtgttgacgccgcgcctagtgtgggtggtgatgagaacgcagtaactgctcaacaaacaggcgctgaatgagtcgcctgtgacggtgcttccggaagcttcagccatatgctagttatggcaagtctgacagatggatcgacagcagctgtccgccaggatgcatgtgctctgccttcctaggggttgggcacgtgatcatgggatggtgtcaacccaagagaaggggtcttaacatgcaaacccttgaataccagaaaacggcagctgcaaagggaaaagataagaacaagggaaaatttagtattttaactttttgctttctgtatgggtaa

SEQ ID NO: 11745 - DNA, 2300 bp, Homo sapien
ctagagtgctgaagcagctcccaagaacccggaaaatgcaaaataaatttctcctccctaaaaataaaaagtaatgcagaagacaggcacttttaatatcaacatgaaaacaaagcaccagttaataaaaatataaatcttacattaaatcaccactcttagttgaatttgaggagtgtggtagcagacttgctgaaaatatttcttccctcctaattttttgataccttttccaatttatcccagatctcatctcttccacacagcctgctccgtcctttctcaagagtgaaatgatggctctccttcatctccacctttcacagtctctctgccctgcccactaggggaagagtgcctgggcactacaagaatttagtaccaattgcccttccttccttccttccttcctctttcccttcctctttcccttccttttttccttcctttcttctttccttcttccttccttctttcctttcccccttcctccctctctcccctccttccctgccttcctttctctcttcattccttcctcctcccccctccttcccctcttccttccttccttccttcccttcttcccttccttccttcctctctccctccctctttcccttccttctttcttcctttctccctccctccctctctcccctccttccctgccttcctctctctcttcatttcttcctcctctctcctcccttccctccctcccttcctttcttccttccttcctctctccctccctctttcctttgcttcttttttccttcctttcttccttccttctttcctttctccctccctccctctcccctcattccctggcttcctttctctttattccttcctcctccctcacctcccttcctcccttccttccttttttccttcctccctccctccctccatcccttccttctttccctctttcctccctccctccctctttccctaccttccttccttctttctttacttttcttccctcctttctttcttccttccttgtctccctctctccctctctccctctcttccctgccttcctctctctcttcattccttcctcctccctcccttacgccctctctccctccctccctccctcctccctgctcctgcctcctcagcaccctgtttcccggttccctggtcccctggttccctggtcccctggttccctggtttcctgggtccctgttttcctggttccctgttttcctggttccctggtttcctggttccctggttccctgggtcccctggtttcctggttcccctggtttcctggttcccctggttcccctggttccctggtgccctggtttcctggttcccctggttctctggttccctgataccctggtgccctggttctctggtgccctggttccctgttgccctggtttcctggttcccctagttctctggttccctggtttcctgtttcactgtttcctggttccctggtttcctggttccctggttcccctggttccctggttccctggtttcctgtttcactgtttcctggttccctggtttcctggttccctggttcccctagttctctggttccctggtttcctgtttcactgtttcctggttccctggtttcctggttccctggttcccctggttccctggtgccctggttccctggttccctggtgccctggtttcctggttcccctggttctctggttccctgataccctggtgccctggttctctggtgccctggttccctgttgccctggtttcctggttcccctagttctctggttccctggtttcctgtttcactgtttcctggttccctggttccctggtttcctggttcccctggttccctgtttccctggttccctggttccctggttccctggttccctggtttcctggttcccctggttctctggttccctgataccctggtgcccttgttctctggtgccctggttccctgttgccctggtttcctggttcccctagttctctggttccctggtttcctgtttcactgtttcctggttccctggtttcctggttccctggttccctggtcccctggttccctggtgccctggttcctgttcccacggctgccgcatctattatgcccgcgcccctcctgttccatgaaggtaatgggtgctcctcctctcttgatctttctttgctcttctcttccaaaaaaagtggggggtgcatattaaacaaacactcatcacagtcttcattattttggcaaggaaaacaaatggaaatcaagtcatctttttcct

SEQ ID NO: 11746 - DNA, 2300 bp, Homo sapien
cacgtaaaattcaccatcacgtcacccgttgtcaccttggcactgatgggtttccttaaaaccacactttatcctcaaataaagaagataccaaggtcaccattccacctaacgtgatacagctaatcccacatacaactgaaaacacacaatctcttccccagaaaaggaaataaaggccttgagtgaggtttactcttcttctgatattttcaacttagattctatgatgtaaaattcacaattcttgaatacaatcttataacctaaatacatcttatgttacataacaggataagagagggaagaaaacaaagatatttgctatataatacgcacacacattcataacaaaattaggaggaaattcttctgactactgcaggcctcacctcagtaattagtcacctggagacaaatgtggaagataatttgaagtcgtgataggagctgtgaagacacacagccaggccatactcacccagcagggctgggcctcagggtgccccacaggtgtcccctcaaagcgtagaaaccggacttttgcccaccaactgccttccatagggccggtatctcccctgcaggcccagcctctcaggctgcttcagatgtgggctgtgctcattcttctggcttgagaaaatgtctggaggaaaagtagtgactacgaggtgcacacgtgaggtgggattgtggcagcattcatggccatcgtctcagctctgcaggcggaattcgaggtgggatgaggagataatctgtgtatggggcaaaagagatgcttccatcctcatctcctggcaacagccagattccatttttctccccattgtacaggaggggcacagaagttccgtaacttgccagaggtcacaaagatcacaatttgtagaggaagggtttgaccccaggcagccagcgaaggatgtatgtggggaacttgactaagtcattaaagcatatgagttttctacttcgtatactttaatcatttgaaaatgtattaaataaacataaaataccttaataataaaaaatatgtgtattcagatattttctttcagtgtggtcttggttgtgatgcactgatacttaaattgatctatgcttttatgttaagcattattttccttttcagtagagaataaactaacttcaactatatttcagcagggaaaacatgaactgatataagttccaatatgttttctcatcgagaacaagatgaatacatacacacatataaaacacatgcactcttaagtaaaaataggatttttttttcgaggttttgctcttgttgcccaggctggagtgcaatggtgtgatctcagctcactgtaacctccgcctccagggtgtagctgggattacagttgcctgccaccacgtctgggtaatttttgtataaaaataggactttaaaaaaaaatccaaatttctgatatttagggaccatgacacagcaatgtctcctgcactggactttatgttttattagtaaagattttaccactttattaaaattataatttggtataattattataatttggataatatctgaatgatacctctgatatatctgagttatgatctggactgaagtagacttaacaacaatcaatttcagtaaatatagccaagtgaccatgtagtgttacaagttccaaaatttccaccccaagaatgacacggccacagacgtgggatgtgtggcctctgctcaggacagaggggacccggtggggcaccgctgagagctctgaactgagagagacagaaaccagttaccactcattcagaccactgacttgggcagttgactgaatctctcagggcctgtttccctgtattgacaataataacctaccatggagatgaggatgaaactttacctaccgcaaacctctatggaaatacgggttgttaatattaaccaccatcagtgagcccatggctatggccacagcctagagaggctgaaacggttaactgtgactagacaccggaggttggagacttacttgctttatgactgggttgactcgtaaatgccacgtagacttgcaaaggaagcggtaaagagctgtacccccgctctggggggtttatcatcagaaggagagagacccgagggagccacctgcccactccagatgaggtgctccgtggaacacgaggagcacacgaaacccgatcagctttgtgtgacttccgcgtgtggggtggcacgcgtgtgcttgctattcattgtttctgctgggggcatttttatcttttgaaattctttcttc

SEQ ID NO: 11747 - DNA, 2300 bp, Homo sapien
ggtaagcatggactgtttcttcaggatgggcccaggtaagtatggaccattccttcaggatggagccaggtaagtgtggaccatttcttcagaatacagccaggtaagcatggactgtttcttcaggatgggcccaggtcagcatggaccattccttcagggtggagtcaggtaaatgtggaccattccttcaggatggagcaaggtaagcatggactgtttcttcaggatgggcccaggtaagcatggaccattccttcacgatggagccagctaagtgtggaccatttcttcagaataccgccaagttagcatggattgtttcttcaggatgggcccaggtaagcatggaccattccttcaggatggagtcaggtaattgtggaccattccttcagaatgcagcaaggtaatcatggactgtttcttcaggatgggcccaggtaagcatggaccattccttcaggttggagccaggtaagtgtggaccattccttcagaatacagcctggtaagcttggactgtttcttcaggatgggcccaggtaagcatggaccattccttcaggatggagtcacataagtgtggaccattccttcaggatggaatgaggtaagcagggaccattccttcagaatacagccaggtaagcatggactgtttcttcaggatgggcccaggtaagcatggaccattccttcaggatggagtcaggtaagtgtggaccattcctgcaggatggagcaaggtaatcatggactgtttcttcaggatgggcccaggtaagcatggaccattccttcaggatggagccaggtaagtgtggaccattccttcagaatacagccaggtaagcatggactgtttcttcaggatgggcccaggtaagcatggaccattccttcaggatggagccaggtaagtgtggaccattccttcagagtacagccaggtaagcatggactgtttcttcaggatgggcccaggtaagcatggaccattccttcacgatggagtcaggtaattgtggaccattcctcaggatgagcgcaggtaagcatgcacgattccctcaggatggagacagataagtatggaccattcattcaggctgcagccaggtcagaatgaaccattatttcagtataaagccgtgtcagaatgaaccattatttcaggataaagccaggtaagtatggaccatttcttcatgaggcagccaggtaagcacagacttttccttcaggatacagccaggtaaatgtgaacaattcctttagtttggagctagataagcattaacaatatttttcagaatgctgccaggtaagcatgaaccattccttcaggatgaagccaggtaagtgtggaccattttttgaggatacagccaagtaagtatgatacatatctgcaggatacagccaggtgagcatagaccattccctcaggatgaatccaggtaagcatagaccattccttcaggatgtagctaggtaagcatgaaccattctttccggatggtgctgtgtgattgtggaccattccttcaaaatggagtcaggtaagcatggaccattttttcaggatgcagcaagataagcgtggccgttccttcaggatgcagctatgtaagcagggacgattttttcaggatgcagccatgtgagcagggaaaatttcttcaggatggactcaggtaagcatggaccattctatcaggatgcagccaggtaagcatggaccatttcttcagggtgcaggaaggtaagcatggacaattccttcagtatggagccaggtaagcgtggaccattctttcaggatgcagccaggaaagcatggaccattttcaaggatacagccaggtaagtatgatacatgccttcaggatacagccaagtaatcatgaatcattccttcaggatgcagccatgtaggcagagaccattccttcaggttggagccaggtaagcatgaaccgttccttcaggatgaaggcaggtaagcatggagaattacttcaagatggagcctggtaagtatggaccattccttcaggatggaaccaggtcagcatagaccatttcttcaggatgcagacaggtcaatatgaaccattctttcaggatgcagccaagtaagcatggaccatttcttgagaatggagcctggaaagcatggaccgttccttcagattgcagccaggtaaacaagaactattccttcacgatgaatccaggtaagcatggaccattccttcatgatggaaccacgtaaggatggaccatttcttcag

SEQ ID NO: 11748 - DNA, 2300 bp, Homo sapien
atgtggtgcaagaaaaggcttgtttgcatcgaggcttactctcctttctgctgtgaccaagcccaggctgcctgctagaggccgagagaccacatggagggaagcctcagccatcccaagccccagcatcctagctaaggcctcagacatgtccatgaggccacactaggccagcagcccccagagccaacccacaaagttgtaagcaatcacacatgggctgtatcaagtcaccgagcttcgggcagccttgagaatgactccttcctcgaccaaatcagcgaggctcctctgacccctcttctcaacgaggcctcgcccccagccctgatcaaattcctcatcctccgccttgaggtggaagtccctggcctgccttagccagacatccctccttggtgcagtgggtgtcgttcgacaggcagcagtgcagggttctgctgtcatgggagctctggctgctgtccgtttgtacattcagcctcttaggcccatgctgctggccccaaaatgacattctgagtagcaagagcctgggttatagaagcaagcatctcacttggaccattcattaactcagagtgggacttggaacccactgggtttctgtaaatgtcaaccatgcttagtgtgcctttatggacacgctgaaaatctgaaatatactccccacaccttgaggtagattggctaccactgcatctatcaaaaggaaaacctgagcaaaaatgtgctgtgggttcccatacaagcaataaaaattaaagagccagagacccatggtgggtcagccatccttggggtcctgaccagacctcgggggcattgttagtcttgtgcgtccagggccccagtgatatggtttggctctgtgtcctcacccaagcatcatcttgaattataatcctcataatcccacgtgttgagggagggacttggtgggaggcgatctgatcatgggagtggattcctgcatgctgttctcatgataagtgagttctcactagagctgatggttttataagtgtttaacagctcctccttcatgtactctctctcctgccgccttgtgaagaaggtgcctgcttccccttccgtcatgattgtaagtttcctgaggcctccccagccatgcagaactgtgagtcaattaaatctcttttctttataaattacccagtctcagggaagttctatatagcagtgtgggaacagacaaacacaccagccctctccaccatggagctgggatctgagggctgttcacctgggaccccaccaccggccgagtctagaccagctgccccactctgagccctggatgtaggagtcagtccaggggtgagataggatccaggggagccaaccagagtgactcctttggggttttgtcactgcacggatggagaaagctctagaaagtctaggagatagagctgggaggatgataacatggaaatgcagccatgttctcctctcgtgattaaagtctcactgccagggaaagattggggctgatgctgagaaagaaggtgtgggggaaaggaggctgaaacctgggtcatctgtctcctgttcttcatgatcctggaactttgagggtgggggagggtgggaggggacatggggccacgggcctctgttcttcaaggctctgttcttcaagggacctttaagaggtgattagaccctctggatctgtcggttctggcacttgctctgtaattcaaccacctctccagcatccttcaaatacgcctctttccatgggagcagattttgttggcttttggccactggcccttaagtcctgattagtatctaccccttgagtcctcagggtgctcaggacagaggaagtcaccagaacaggcaataagaaagagtggagaggatctctgttaccttaagaccccagtgagcctcctccctgcttcccagtcacagactctggacagaaaccctgccccccgcccctggcaagatgccagctcccttcctggtcctgatgtcacaggtccctggacatgacctccccaccagggcaggaccccagctcccttcctggttgtgatgtcacaggtcctgacattccacagtgtcctggagaccaaggatgggaaactgtcaaccttcagaacgtccttctccctcagctggagggagcatggcagtgagccaaggagacgggaccctctgctttgtcctcctgctgtgctgttggcaagaaactgagctccggccgagaaccgtgattccaggtagggccccacagggatgtctcagcagaaagagaactg

SEQ ID NO: 11749 - DNA, 2300 bp, Homo sapien
gcggtggctcacgcctgtaatcccagcactttgggaggccgaggcgggcacatcacgaggtcaggagatcgagaccattctggctaacagagtgtaaccccgtctctactaaaaatacaaaaaattagcccggcatggtggcgggtgcctgtagtcccagctagtcaagaggctgaggcaggagaattgcgtgaacccaggaggtggagttcacgccattgcactccagcctgggcaacagagcgagactccatctgaaaaagaaaaaaaaaaaaagaaagatggttgtaacttagttggaagtatgagtagaacatttggtcaaaccgtacatcagtctcagaagcgcatgtgccacttttgtttcccaattttctcgtcctgtttttggagatttagattgagctaattttacataaaaatctaacttccttaaaggccaaaatggtttgatctttttgttcagatatgtttatggccaccctgtttgctatactacctgctaactggcttatcttgcttttttgagtgtctttgaatggcctggaatcttgataatggctaatgattttggcaatagtatggcttgccataattctgaaacaaggcacccatttttttgtgggctgactagaaaaggttaaaaatcctttgtctccatagcattccaaagttatgagctactctataagcatacctgctattggtataaagattagcagttattccttttgccaactgacaggctctaattaatgctattaactttgcttgttgagatgattgctcctggaagacaagcactttctatttctttgggcaaagacgctatggcataaccagtgtaataccttccagctgcatctttaagtaagagccatctgtaaaccaaataacatcagcgttagtgaggggggttcttgcatgtctgtcctaggagagagctggtcaggtaagatgatgcagtcatgcagcgtttcagctgaaggtgggggagagggtggcaggatttagatgacatctggacattgtagtatgcggctgagagaataacttcatgagaagccagttactaactgatcgtgttgagtgtgatgcaagtttagaagcgtttccacagaatgcgtatcgaaggcagtgaggggtgatcgcatccttggtggtttggttgctcttgcagagctgtgatggttgttgcatcatgcaaggagacagtcctttagctgtagggtctagttgttgactgtaataccctacaagtctgctttgtctccatgtttttgagtcagaacgacaacaaacgttttacttgccaacaattctgcaacctgagctggacccaggcccgacgggctttgcagacagtcacgtgtgtggctggcctcagctgggatgttgggatagctgggttgtcctccctcttccatttcataggatctcgggatctctttccatcatttttccttaggaagttggccttttaacatggtagctcacggctcccaagcgtgcacccatgtgtaagctttaacgattgcactgaagttggcttggtgtaattgtctgcttatcgatctttttctcggcaggtttcctgttctctcactccgtacgtgattaatttattttcccaggacgtcccagttacccgggccgggggggaccggcccgcgcggcagtgcgaggtcgggcctgagcagggcgcctgttggatagcgtagcaggtgaactgcccactgcacgttaacaatcgtaacaccctgcaccctttaaacaggcttcttttttcttttcttttttaaacaggcttctttcatcagaagtgtgaatcaaaccaatgccgttaacacacacacccccacacccacacaccaaattatggcctttatggtgctaccggccaccaagtgccctccaagcaagcccgtcacgctcgcgactccggggccgctctgtccgcgcagctcgagggcctcgggccacctgtcgcccggaactttctcggccgaccgggcagcagcagggggaatgcaccagacagggccgggaacgcttaggcagccgcacgcgcggccgcggcgcagggaagaagcggggcattgtgggaagcgcccgcgctttcggcgggttccgttaaaatggcgccctggtggccggcggcgcccgcgccttagcctgtcaggagcagggagcttgcggggcgcaggaagggcgcgggccgcggtccctgcgcgtgcggcggcagtggcggctctgcccggaccaccgtgcacggctccgggcgaggatggcgaccccgg

SEQ ID NO: 11750 - DNA, 2300 bp, Homo sapien
tgggccgggtgcagtgcctgtaatcccagcactttgggaggccaaggcaggtggatcacctgagttaaggagttcgagaccagcctggccaacatggtgaaaccccatctctactaaaaatacaaaacttagcctggtgtggtggcaggcgcctgtgatcccagctactgaggaggctgaggcacaagaatggcttaaacccaggaagcggaggttgcagtgagctgagatggtgccaccgcattccagcctgggtgacagagcgagagtccatatcaaaaaaaaaagaagaaggaaatctgaacacagacacacacacacacacacacacacacacacacacacacacacacacacgggagaccagcaagtgacgttcaaggcagaggctggagcgatgtgtccaccaaccagaggacaccgaggatggcgaggatggcgaggacagtgaggatggtgaggatggcgaggacaccgaggacggcgaggacaccgaggacggcgaggacggcgaggacggcgaggatggcgaggatggcgaggacactgaggatggcgaggatggcgaggacggtgaggacggcgaggacggcgaggatggcgaggacacagaggacggtgagcatggcgaggacggcgaggatggcgaggacggcgaggacggcgaggacggcgaggacaccgaggatggcgaggacggcgaggacggtgaggacggcgaggatggcgaggatggcaaggatggctggcagccagcaggggctgggagaggggtgaagggtcttccccagagcctgccaagggggcatgtttctgcctacactttgaccttgggcattcggtccccagaacggtgagagaacgcacttctgttgtgtatactatgcagtgtgtgacactttgttacggcagtcctaggacatgaactcaggaggcgtcagtgactggccagggtgtcctttccaagaaggttttaaagcaggacagtgtctcagctcaggaggaaacatctaaaatggtgaaggcgtcggaccagctactcagcaggtagaaatcatatctcagaatgcaagaagagaatttgagaaaactgctttgatctgcaggttttgaaggaacggtgggcattttgatgtcacttttctgagcaattgtgctcaaggcgaccatgtagacatgggaaggcataactgtctgtttctaagcactgctggtaacagacacccctgatcagacaacccgatcattcctcatcccagacctcccccttttccctgctaaggagatgctggccagggaagaggcgaattcactcaataattcagcaaaataactcgatgactttttttttttttgagacggagtctcactctgtcacccaggctggagtgcaatggtgccggctcggctcactgcaacctccactgcctcccaggttgaagtgattctcctgcctcagcctcctgagtagctgggactacaggagcccgtcaccacggctggctaatttttgtatttttagtagagacagggtttcaccatgttggccaggctggtctggaactcctgacctcaggtgatctgcccacgtcggcctcctaaagtgatttaaaaaggaaatattccctcctccccactttcatctggttgttcacatactaattctgagaaacacagccattgcactttgatactaattattccatttcttacaatctttaaccaatactctgacaaattgttaatttaagaagaatttgcaaagcaagtaaccctactatgttttttaaaaggcagacaagaaaagagtgtgtgaaagtgtctcttactgtaacctgccctggaagggtaagccttttaaaatcacagcctaacacacctgaattctgcatcgagaacttcagctttctgtggtgtgtgaccgtataatacaagctacatatggtggtgacctaccagtttgggttgaattaaatattgaaagcaaactccagaaatatctaaaaggaaacacaccagcaatattgtattgattgtggtaggctgcttaataattaattccctcacctcagtttttgaatgttgttctgtttatgcctcagtatcaaaaacaactgagaaaggggccgcagctccggccttcatctgctattgcaaattcggagcagggtgctactggggggtgggggagtaaagagaacgggccctttcttcgtgtgtccacttcgtaggaacccaggcaagagtacccaagcagacctctgcttaaagcaaaaacagactgaagttgttttcccctc
